United States Patent Application Publication US 2014/0325702 A1 - sequence listing, part 32

SEQ ID NO: 55905 - DNA, 1047 bp, Heterodera glycines
gacggctgccaagctgaccatgttgggctggtgtgcccgccccagaagaccgactacggtattcgcgtcaccgtggagtcattccgttaccagaccaccacccaaatacagtacacctgtctggtgcgcatttgcccatttgcaccatgccctcaggcgagttctattcattaccccaaactaattaattaattgccaattagatgggtaatttattgcacttcttcagaccacctgtccgccagtggacggttgccctggtgacgacattatgtcgcgcacgcttggccttagcagccgcgcccggcgtggcaccgccgacggcactccggcacccgccgagctgaccctggagcaaatccgtgccgcactgattgccaacccacagctgcagcgacagctcggcggccttttgtcgcagcagtcgtcgcttggcgccggtggcgcaaacccgcccggcgacgaccccgccgacgcagccgcacgcgcaccagcagatggcccagtcgccccatcgacggctgccggacgcgccggtggtcagcgcagcaccgacgctgcgcatgaacaccggtgtggcacatacacttctaaaaaaaatttgtggtttttatgcgacaaattttcaaccgaagcaccgaatttagaccctcgataaattcaaaattttgggtaaaattacagcattcggtgttaattatgttaattaactccgaagtaattttaaagtagttttgatattgtcttgattcttcattttccattaactttacatttcccgcattataatttggagttgtcaaattgatttgtcttttaattgggtccaatttctaataattttctttaaaatttttcgacactttttgaagttagactcaaattaaatactcaaaaatatttaaaattatttttttcattgttttcccctttttagcactccaacaacagcggatcgtgcttggtggtgatacgattgtgcggcgccgacttgtggtggtcaactcggaggaggagctgcgctactacgtgaagaccggggaagtg

SEQ ID NO: 55906 - DNA, 560 bp, Heterodera glycines
atgaaccagcagcaagtaattaaaacaaaacgaaataatgataaattggtgcatgatggtgcactttatgtgttttacaaattcagtaacgatggacttaagaaattttggcggtgtgagtttcatggcccgtcagaccaatgcaagggtatgctaatttacaagcgcactgagattgatgaggaacaatttctattggcggacaccggcgtttttcaaattcaaggacaaaatggacctcaacggtgagacatcatttatactttaaatgtgatcattgaactttcgaagtaacttttttgaataaccggccagaattttcaagttttcccacggcacgtcagttgggccctcacgtttgggccccaataaattttttcaaaattacaaaaaattctttattgaaactaataaaattttcaaaaatattatcaatattaaaaaaacaaattagttataattgaatcaaattttgttatcaaaattttatgttttaacgtttttaaagataataatatcattcttacagtatgcaacagcaaattaacacaaaagaatag

SEQ ID NO: 55907 - DNA, 587 bp, Heterodera glycines
atgggaaggtaagcaaattcattcattctcgattctcgacactttcgtattttttgtttttgtttacgccaaccgccaaaacagcgcgcctttggctcgccaaattgagcacagagccaacggaaagcgattttatacgaatgaatgaatggaaaagagagaagggggaatttcgcaataatatcgcacacaacgccaaaacatcaaagaccaacgggcggcaaaatttgttttcggcgggaaaagcatttaatttttgaatgtataatcaatcaaagaaaaagatacataaataataaatgatcgtgattaattataataattcgtattaattaattaaatgcagttttttctttggcagagttaaacgagaaatgcttcttccagtgcttcttctcagggttgtcgcccgagtccgtcccgattctcggcgtgaaaagccgacccgaacgaatcccggttccttcccatcccgcggcaagcctgctccaaatggaaaattgaaaagaatttcataaaaaaccttcacagagaaaataatatttttttgaattgtgaaaaatgaaaaatttttgagaagaaataaa

SEQ ID NO: 55908 - DNA, 69 bp, Heterodera glycines
atgcttttctacccaatttctgtttctttgattttgttcaccttttttgccggaagcgctgaagcgcag

SEQ ID NO: 55909 - DNA, 728 bp, Heterodera glycines
atggaaatacaaaagttggaggaggaaaggaatgggctcagaacggagagagaaaggcttggcgaggagttcaaagggaaactgtgccgagcggagagtttattcgaaatggaactgacggcggcgaaaatgctttacatgcgcgaactgcaagcacttcgagaacacgaagaagcattaaaggacgaattggcagcaaggtaagagaagggatgaaagaagagagaaaaaggcagggaaaatgccgaaaaaatgggagaaaatggcaaaagaaatggcaaaggcataggaagaaaaacaatgagaggggggggggggagggaaattgaacaaattaaaaacaacggcagaatttgaggcaggaggaatttcacgacagagttgtcgagatgcaattccagtcgagacagtccaaagatgagattatccactgcagagaagagattactcagctggagaaagcacttggacaaaaagcggaagagatacaaaggctatccaaagaagtgagagacaatttgaaaaggaggaaatttaataattatttggaaatgagctttaaacttaaaaagttggcaatcgcacgccgaaaaaccgaagaaacgatttaccaacttgtccaagtcaagtcggaggcggaagaagcggcacgagaactgtcggcacagagagaaagagcgaaacggctcaatggggcagaggaggcgagagagcgtttggaggagaca

SEQ ID NO: 55910 - DNA, 1482 bp, Heterodera glycines
  unsure (1)..(1482): unsure at all n locations
gtctggtcttcgcccattggtgaatgatccgaacaaaaaggacacaaaatcattggcccgaaaccacatcattgaagtgtccaagtccaatcttattacaattgcgggtggcaaatggaccacctaccgacacatggccgaggaagcagtggacgcgtgtgtgaaggcgtgcaatttgaagccaaaaaatgggtgcatgacgcccggattaatgttggaaggtgagggtgaggcgtaagcatggaaataatatgggggggaaggcgggactaatactattcagtaatgaaataaatccgagcggctctcaactttgtttaccaataaaaacccaattcgtacttgggcacgttatgccaaagccatctaaatctcaacgcggcacaaataaccgacaaattggctaaaaaaaaattcagcgggtaccccgtccaaaaaaatctttaaattcttgaaccatcgctggcgctttcccgctttccgcttcccttaataattaggtaattagtatgctttaggtgcccacgattggtacccattgttgtacatcaatttggtgcaagactacggcattgaggtggacgtggcgcagcatttggccaacacatacggagaccgagcatttgtggtggcgcggatgtgcaaaatgaccggcaaacgatgttaagaatagttttaattctcttaaaaatgcattatttgcattcagggccaattgttggcaaccgattgcacgaagaattcccttatttggatgctgaggtgctctttttaaagtttcacattattgccactttatttggttaataagttcgcgaacattggaataaattaggcccacatccagcgaaaatttctattttccagaatttgatattttaattcggttaaccggcacaatttacggttcccctttttcgtcaaggtcagctacgcgatcaaagagtacgcgtgcactgccgtagatgtaatcgcgcgacggcttcggctcagttttttgaacacttacgcagcacacgaagtgctgaaccaagtggtgatgatcatggccagggagttggcatggtcacgccaggaaacggaggtgggaataaaccccaaactcaaaggaacagttgggcaaaaattgaatgttcagaaacagctgaaagttgccagggattttatcaacaacgaaatgggccaagaggcgcgaatgcaatgggtttcagatgttccgctgaatctgaccaaggaggtggacgagtttcttctcacattttcattaaatgaaatggttcaggaaatgcaaatggccaaagaacggtaagcggcgaagggaaagggaggaaaaagtgacaaattggaggaattgcaaaaatgaggngagaaatgatcagtcaattccttttgttaatttagttttaaccagttggacaaggacaaaaagggacacattacggtcaatgacatccgccgacactttcgggtttggtgtcatct

SEQ ID NO: 55911 - DNA, 686 bp, Heterodera glycines
atgagcaccgacaacggagcagcagcaaatgttcagccggaacaggacgagaagctcattgcccagcccgaacagacggctgggaagacagcgtcgccggtgaaaaaggcgacggagagcgatttggggacaggcgagtggagaggggagaaacatttcaaaaaaagggttgggtgagcgaaaaaggggaaagaaagccttgaaagtcggcggttttgaaggccaacggaggggctaacaacaacaaacccaaaacaacaatcaatttgcatatgtgtcaggtgaggaatcgcgcgactctgtccaatccgtgggccaagagagtgcggaaggggacgaagaggaggacgaagcgggcgacgaggaggagacggacgaggagcacccggcccagcagacggaagagaagggcatcaacggacacgaaaaggcggagaagagcgtaaacggacacgagaaagtgggggagaagacggccgtcaacggagttgagaaggcggaggagaaaggagtcaacggacacgagaaggccgaggtgagagggaggggggcaagggacagaggaccaaagggtcggaacggaatgcaatttgaaatgtttttagccgcgaaagcgcatcaacaacgaaggcccagaagaagcggacactgaaagttcccagcagaagaagcagcgaatggacggc

SEQ ID NO: 55912 - DNA, 764 bp, Heterodera glycines
atgtcttcctggttttcatacattcggtaggctttatttctttaaaatattttcatatatattttaaaattaattaaataatttagaagctcaattattggtgatgaattgccttcaacttctgaagccgacgttgttgatcaaattggaccaacggaagatgacattttgccaaggacaggacaatctgtcgacactttgtcgtcatgtttagcatcagctgcttcacaacaaaaactcgattatggacaggaggatagcataacaccaagccatggcaacagttcattgccagcagcactgagccaggaacagcaggagcacatcaaaaatgtaaatttaaatgatttaagggttaatttgaaattgtaaatttttggcaggttctgcgcagagccgaacgttccggacggcatgccaaagtggtggttgatttgcggcatttgaaacggggccgtcactcgaccgcagcagcacaaacagcaacaataacaacaacgccatgtgccccctcaattggaacacaacaacaactagaacggcacgaacagcagcagctgaagaggaatgaagatgaggaggaacagcaacaggaaggccaattcatcgtccaaatggattcgttgccggaaggcaagtgacaaattttgactgacagttttatttatgatagatcattgatcagtgactttattccgacaatttatgatgccaaattatgacactagtcagattcatttttgcggagtttttatccgattaaa

SEQ ID NO: 55913 - DNA, 566 bp, Heterodera glycines
atgaatttttattctacggcatataatattttggtgttcagtccgacattaagtcgaagtcatatgatttcgaacggacgcgtggccgacgcattggcaagcgacgggcacgacgtggtcagttgtgtgtttgatggaacgattaattaattccaattttagacctttattgaaattgagtacgctgtgccaattggggcgctaaatgcgacaaaattggccaatctttggcaaattcctggcaaatttttcaatgtgaattttggcggaaaaagccttttcaaagtgctcgccgacagtgcctttgagaagccttcgttggtcgacatctttttctcgtctaaaatattccaagcttctctgaatgacgcatgtgaaggtctttgccaaaataggataataataataaatgtccttttgttctaagcattgatcagaacgcaatcgcaacaatttgagctgcttaagaagcgcaacttcgacgtgatcatttccgagcagctcaacttttgcggcgcgggcattggccatttgctggacattcccgtgaacattgtgctcagcag

SEQ ID NO: 55914 - DNA, 238 bp, Heterodera glycines
gtaattcttactttttcattgtacaaagaatgagattgtgattgactctgtgccatctttttcttctgtttgtattttgggtgggcttttaaggaaatatggcatagaaaaatcagtgcagaatctttgtgtcgaatggatgacaaaagtcccgccgcaatttttgctcgagaatttgagcatcgtcaagcgcgcgatgtcgacgagttgcgcaggatattccacaggttgatgcgga

SEQ ID NO: 55915 - DNA, 1179 bp, Heterodera glycines
atgtggtctggagttggtccaccgattgtcagaaggcctttgatcaggtcattcagattctgcaaacgcatgaaaaatctcgctcgtcagtatgtctactggcccggaattgacgatcaaattgaagaaatagtccgttcctgccaaacatgtgcttcggaggcaaaagcaccagtaaagactacccttcattcatggacaaaatccgatggcccatggaagcgtgttcacatggactatgcgggaccattctttgggaagatgttcctcgtcattgtagacgcatactccaagtggccagaaatcttcgaaatgaattccaccggttcagccgccacgattggtaaattgcgctatctttgcgcacggcatggacttccggaaacgttggtcaccgataacggtacccaattttcgtcgaaggaattcaaggaattcacccgactcaacggcataaaccatttgttttcggcaccttattgtccgatgtcaaacggacaagcagaacggttcgttgacacattcaaacggacgtgtcgcaaattaaagaaggaaggaattaccgaaatgttggacacatttttagccacataccgtgtcacgccgaatgagtctttgcctgaatgcaaaagcccagcggaactgttcctgcagaggaaaatccgatcgaaattggaccttttgaaaccaaaaaaacgtccaatcgtcatccgcgatgaagcaatggagcgtaagttcaatcgacgccatggcgcgaggccgagatcgttcgacttagacgatatggtctacgcccggcatcgactgtcgcaggattggcgacccgggcacatcactcagaaaaaaggtgtgatgtacgacgtcacttttcaggacggatcagttggacgattccatgcgaaccaacttatggttcgacattctgatgttgatgaggaagattccctcgacatcttgaatgatgcctttggacttccattggcacaggccaatcaacaacttggcgatgttgtggcacaaccagctggaggagtgattgagatagcgccaccatctccgcatcccgatcagccacagcagccaaacgaggtcaatgaagaacgtgccgttcaacagaatgttcaaaacgaacgacccaagcgaaaccgtcgtccacctgatcgttattcgcgcggatga

SEQ ID NO: 55916 - DNA, 659 bp, Heterodera glycines
atgtccgctttcgctttgcgcttcgcttcgttcctctccctcacggcactgctcgtcgtccgatgctccgccgatgagtcatcgtcgtctgaggaagagcaaaagcgtcccattagcgatgccgccgtgccatcgtcaagcaatgaaatgccgcaagttgtacctgctgcggttgctcgtcgaaagcgaagcattttcggtaatttctttgcggggcttttccatcgcaacaatgagacttcgacggaaggtcgtcgcccgtcgaacggcacagagtcagcggaagaagcggaaaaggtaaaggaaaaggaggaggagaaggaggaggaggaaaaggaggaggagaagaaggagaaggaggaggaagaaaaggaggagaagaaggaggaggaggaaaaggaggaggagaaggaggaggaggaaaaggaggagaagaagaaggagaaggaggaggaagaaaaggaggagaagaaggaggaggaagaaaaggaggaggagaaggaggaggatgaggaaaaggaggaggaaaaggagaagcacaatgcgactgatcagtccgccgttgggcgcgagaagcgcagcccatttggcattttcatgaaatacaaaaagaacggaaagcaattgagcattggtcaacacgcaacaaattaaaagga

SEQ ID NO: 55917 - DNA, 311 bp, Heterodera glycines
atgagatgtcgacggaaggtcgtcgcccgtcgaacggcacagagtcagcggaagaagcggaaaaggcaaaggaaaaggaggaggagaaggaggaggaagaaaaggaggagaagaatgagtaggagaaggaggagaagaaggaggaggaggaaaggaggaggaggaaaggaggaggaggaaaaggagaaggacaatgcgactgatcagtccgccgttgggcgcgagaagcgcagcccatttggcattttcatgaaatacaaaaagaacggaaagcaattgagcattggtcaacacgcaacaaattaaaagga

SEQ ID NO: 55918 - DNA, 711 bp, Heterodera glycines
atgccaaaaacatcacacatccttctgatttgcttgcttttcttcaccacttttctagtaaaaacagaagcaaaaattgaagagacaattgaattggaacgaaatccatcggcggaaaggacagaagggtaaaatggcaaataatatcaaaaaaacaaaacgagtgggctttcttattagctgaatagatcgttaccttctgattgccattttttggcattccgtgcatatttcatcaaaaaaaaaagtttttttaaagaaagcccatttaataacctatttcagcaaaccctcgacgagaagaaagcgccatggctggggatacggcgggtacattatttgttttttattaaacttttatttacatataaatccctcctcagctgttgttgctgcggcggttggggatacggtggctatggcggatacggtggatatagcggatacggcggttatggtgggtacggtggctacggcccatttggagtcggattggtaggccttaccggaggactgcttttcggaggatggggcaaatagagaagctcatgatcgctaacacttttaaaaatataatcgttgaaaagaaaaccttctgctttatgtgacaatggaggatgattggttatttgttagtctctacgacttttataatttaccgtatttcttgagttagaattccccctgaattagaacccctccctccttgaa

SEQ ID NO: 55919 - DNA, 1072 bp, Heterodera glycines
atgccaataattacgccaacattcccggaacaaaacgttggcgccaatttgaacggggcaacggccaaagtcattttgaacgaactgagaattggtgaatgtttggttaaatgcatgattaacattaatattctttcttttaaatttttcatttattttagcatttcaacagattcgaaatgaccaaaatttcaattcaccgcttaaaagcaaaaagtttaacgaaaaagtattttatgaaatggaaggagtatttaatataaatattaattaatgaaataaataccttaatctgctaactaataaattatatggcctaatataaaaagcgctaattgtcttaaaaaattttaattcttttggtttcagtatgcccatttcattttggtcgtttgttccgggcatcaaattaatcttgccaaattcacgccatttgttgggaaaagcattcgctatgaattgcataattttctacaaaattcttctctgttgtcaaagcgagtggactttttccacgtttacccaaaagcattctcagtgaatggttcttcttctggcgagcacagcaacaggtaaaaacacaaataattaaataaacaaataattaatgaccaactaatgaactaattaaccgtttttgttagggtaattagccaatggcttgtcggaattgagcttcttcccgggaaaattgtggattccgagctcagaagcgaattgagtcaaatgttgggcaatttcgatgcaaaagttaaaaatgcttttaattatttccttttccatgctgtggaccttttctcagaatatgttgagaaaaatgaactcaaattacggtaaaaatcatttttatttagaatttaattgaagtgacactttttcaggcgatttgactaagaaatattttctgaatttcttttcacaaaaaaggggtgttcgtccggctattgcccaaatccaattcaatgtgatattttatttcttttttttaatgtaattcaatctgtttgtttaattaatgagcttgcaaaaggttaaaacgagcattttgattcattttttctatgaaaataaa

SEQ ID NO: 55920 - DNA, 925 bp, Heterodera glycines
atgccaaacattggccaattaccgccaggaaaatataattggcgagaatttgaaaaattacaaaaagaaattggaaacaaaatagaacatctgataaaaaatgaccaattcgatatgggaatgtgcagatatgacttgaaagacagggcgaagagaagggcagaaatggagaagaaaatgcaaatggaaatttcaagtgggaaaaaataatgaaaaaaattaacaaaatatttttaaaaaacattagtatgtacctatttaacaataagaaataaaaaaaacatttaaaaaaaataggtaatttaaatttttttgtttttgtgaaattatgacttattttttacaaagtctaaaagtggcacctaaacaattaagtgtcaaatcatgaaatgagttcattttattcaaaaacaatcgaaaaaatggatgaaatttgtaattttctggtaaaaaagaaaagaaagacactaaaagacagaaatttggtacaagaattgaaagtgatgctccaaacattagcaggcaatttaaatttaacacaaaacaaacaaaaagaaaggaaattgcaatttagattattcattttatgcaaaaattgagggggaatatttaaatgggaattggacggacgaaaaggaaaaggaaaaggaaaaggaagggccaaaaaaggtggacaaattccggcaaattctcgcctatttggaattgtgggcaaaaagtaatgaattcattaataattaattgagtattagagaaaaggtattatttaaatacatatttagacaaccaaattttggacgatttgatgggatttttgaacacgaaaatgcttttgacaatgctaaccaaaatattccttttgtacccaaatgggtcaatgccttttttggtcgagaaattcttcttgacttattccacctggtga

SEQ ID NO: 55921 - DNA, 1203 bp, Heterodera glycines
  unsure (1)..(1203): unsure at all n locations
atgatagaacagattcatgcagctgatcaatatgaaagtaggacaaatgatcaaacattagggagtgacgaaagggncgacaaatggtaacaaaataattggaaatcgaggagaaaaagcggaagaaaaaaggaaaacaaaagaagaagaactgagctcaaaagtaaaagacaatttgaagagaaatttaaacgaattaaaaagtgagagaaaagcgaactacgaatcagaagaagaagaagaagaagaaaattgcaatggcaaaatgccaaaatttgatggcaaagtgccgaacagaaatgaacaggaaatggcaaattgggaaacaaaaagtgaagaaaattcggaagaagaggacaaattggaccaaaatgaattgcttcatctgaaaatcgggcatttttcagacgataatttgctgagtttgaaatatggcgaactgttttgggcagtaagcaaagaaagttgggaaaatgacgaggaaaacgatgctttaacagtcaaaactttgtgttggacgctccatcttggagtttatgccaacgaaatttcgaatcggattggactttttggcactttggaggaattgaaaataattggcaaaaacgaaaaattggaaattgaaaagcaatgggaaaagcttaaaatggttgaattaagcaagataattagcagatgcgagaggaacaaattgatggccaaattgcatttgttgctgaagaaaattgtggcctcaatggacggattttgtgcggaaaacggcacaaatttatgggcagagattagggagacgaaaagtcagctgcactcgagaaaattggccaagacaatggccaagagcgaaacggaacgccaattaaagcgcaaaatggacaaagtgattttggcactaattcaaacggaaaacaatgggcgcgaggacggaatgccaaagcaccgagcggaattcgaagagcaattaaaggccgtcaaacactttgatgggcagagaaaattaggcaattaaattactaattggattttatttaatttactttttggccaaattcaatgatttttgaattaaaaataatttttagaccaaacattgtttaacgaattgaccaaagaagcgaatttgattgaaatggttgaggaaaaagaacgtgagaaattccgattgacgaaattggcacaatttccggaaggatggcaagaaataaa

SEQ ID NO: 55922 - DNA, 3543 bp, Heterodera glycines
atgcccaccgtcgatttcttgtgccaggcttcgtcattgagccgtatcaatggcactgttggattagagccgattcttcattggattagtcaacagcaaggattcatcaaatacttcaccatgtatccttccgctggagggactcaaatctcagaagtggatttcagccactttctgctggtaatcaacattaaatgtgtcatgttcaagagcgtagtctgaccactaacttcggcggcgcgggggggggggggggctaaattcacacccctcaattttttatctcatgcctcaattaaatttaccgcgctcttatccacaaaattttttttttaaagtattagtccggcagtgccgatagcaccccggtgaaaaaatttgaaatttgtcgctcggtggtgccaatgggcgccaccgagataaaattttttgagaattgaattgaaatttgtttagaaaaacatatttttttcaaaattttcggcttaacagggctataattacctctgaccgccatcccttggctatttgttgtttgatctttttccgtagaaatccaaaattttcgacaatttttcaaaatttacttcttttttgctttaattttcatttttccttaaagcattttacactttgtacatctttatcagagattcttcaattctcgcggtgccccacctgcaagttacaacgccatgttcaaacacggtgttgttgctgacgatgtcaacgaattttccatcgaaaaatgcgagcattccctgaagttgaaggcctgcgtgactgcagatggtaccacggattgggctctgaagagcttatctgcctacgatgaagctttatcgaatgtgctcgtaatcgtccaagcgtgccccgtcaaaagaaaaataattttggaggaaagcgaaaacctttgattttgttgatatgtcctgcaaggacggatgatgatgcgtatttaaatgtttttaaaaatttgattttcacattcacattatgttttttttgatttctctattcaattttgttgtcactttaattaggcgaaggaatgcgtaaaaataagagacctttgccgtttttcttggtgtaattaataggactgcttggcacatttttttgtcatttcattacttttgttttctcgaaattgttttttaagtaaacttttcggattaggcttgctaacgaattggcaatggtcaagaatttcgattacgaaggccacacttttttacgaatttatgaatgctagtcgcaacgaaaaaatcgaaattttggttgaaaaatttatatgggaggggaggggcgaattgggggtgtggagggaatagcggccattttaaacaattaatctttttatattacctaattgaaatactgtatcactgacgcatttttaccatctaaagcatactgtatcactgactcattttctattgcaccgctcggatatttgacagaaatgaaatgtgactattttacaaatatttttatgattattttctcatttttaagggcattggatcgaccttttttggataaaatttacaaatttagggggagagtagtgattttggtgctcagtgcatggcgctcagtcggccgttgtccgccaaaatgacacaaatttttgtttcattttttggtgtcattcccttgcccatcgtccgttcttttcttcaccattatctccaattttcctcccatccattaaaagtggccattattatgtcatttttatcgagtcggaggaacgcctcgggggaaaatgtcggagggcggggagagaattaatcgcctcgggggaaatgaaaaagggaaaagaattaatagtgccaaggcaaaacggcgaaggcttgcccaacaacagaagggcaaaagtcatgttttgttgtgcttatggcgtcatttctttttttaattaataatttttatatttatttaataaataatagaatattttttctccatccgatttcttttaattttatttatataatattcattaaaaaggtaatatttttagtatagattaaatggatagtcaaatttctgaggacaaattaatgctttttaatttacgcattaattggaaaaaatttgatgatcagacaagggaaagtatcagatcagtgatcgaaaaggcattgagcttaacgcaaagacaaaggtgagctaattgaccaatttgtaatgcattaatcactgcccgggggttatttaagggaatcactttattattgaatttatcgatgctcgattttaaatgattgatcagaaagcgaaattcaatgcaactggcgaatcactagaataataaaatcgggcagcagatgtcgtttccttcaaatgagaattttgattttataaagcctaaaatgttaaatatatattaaaacgcgcaattctgctcaactttttttgggctattttaaaatttattaataaaatttagttttatttgcaacgacatttggttcgatgtttttgagttcttcggccgtgccgaactcggccttctgctgatcgcacggctcagcaaacggttcaatgcgttggtggacagtcacttttcgatgacattgtcagggaatgggcataaatatttaaatttaagcataattgcttaaggatccctcatttgacatttgattatgcgatgattcttcgtgcggaggacggcaccggtgccatatttaaagtgcggcacaaaggaagtaatttgcgtgatgaaatggaagaggtgccaatggacagcattccgtttaggaaaatcattaagaaaatccacaaaattgccatttggtatgttttgtctaacgagcaaaaaaatttttaattggcctaatttgaaattggccagttggaaagggtccgccgcccaacctcaattagcaattactgttaaatatcaaacaattagcatctcattaaggccttgccatgaatttggcaatgcccgatagcgcttgtttttgaattcaaaaaggtttgacacattataatgcgctgattattgtggccataacttttttgaaacttggccatttactttaaaatttctatgataattaacggcgggacgaactgggccccgctaattgggcccataatttaatttagtaaatgtgtaaatctcaaatgtttacaaagtcaaaatggggttaagaaataagcccccgggggatagatttcccccctacccaaaaaacggataagtaccgattatggtttcaaatccgccccaatccgttcagttacactgatcgctctgtgttcacttttttgcgagccattaaacatgcgtttgactcgcgcactcaatttgaagtgtgcgcggtaattgagcaaagttgggacataatcataaaagaactttggccgctagtgtaagtgcaaatttaaaaattataaattttcagaatatcattaaaataaataaataaataatgcattttcaggccaatgtttcttggctgcatcagtatttcttggaaaggcatcccaaaaattgagtgtttgacatttgaggccaactga

SEQ ID NO: 55923 - DNA, 638 bp, Heterodera glycines
atgccaaaggacaaataccgcgcatcggaggatgaaagccttaacagcaacaatggcttttccattgtgaatgagaaaacgcaagaattgctgcaatttggacaattttggtgcaaccgttggatgttaattcggaatcaaattagttgggactgggcgggttttgtcatgaaaatatttaatgatgacgtctcgtcctactacaaagatcgtttcatatttgcactgaatgatgagcagtatgatgatcccgaatgaatcaaaatgacattaattgagcaattttggattattaaacacccttttcaccgtggttttatttgaattgaattttgtctcacattaacttttgctgaccaaaacttccgaattgaatctgattatgagcgtgagaaaaagttttactttctaaacggggtcaattaatataaaaagattattccacaatgtattgtatcaatacggtcacgatatacttaaaaaactgtttgattgagacatgggatggaaaattggagttaattaatggtgaacaaatgaacggacgatgggcgtgttagtttttttaattaaaattgttttttatttttattgttacgctttatcttttgaaagcttttgatagtccattccaaaga

SEQ ID NO: 55924 - DNA, 1251 bp, Heterodera glycines
atggttatgacaaagacagaatgcaactacggggcacccgaatatgttacgaaatttgtgatgattcgttgtccgatgtgccgcgatgagaacaaatgggccaaatgggagaaggaagcagagggatgggagcaccgcatgggccagcgaaatcgaaacctaattgacatttacgtcgatgaggaaaatttggatgttgggtcagtaaaatatatttgtaattcggtgctaggacgaggtgacaaaaatatcagtgttcgtaataattaaatttaattattatttaaattttatttgctaaataataaagcataacttagcttaaacttaatcaaatttattcatcttggtattagaatgtagctaaattcaaaaaaaaatatatatattctctactatttttataatttttaaaaaattagcaaaaatttacaaaagttgtgaccaaaaatttccaaaaaatttagactcaacaattttgaccctaacttttttgaaattcaattttgaaatttaattgtagaatagagaaatctttgggctatctaattatataaataatattaaaattggttctttctgaaaaaaagtaaagaaggaattaataaggttatgtttttatggtcatccaaaaaatgtaaggtcgtttaaatgcatgaaaatcgttcaaacattcagttaatcacactacatttgatatgaaaagatagcccaaagatttctctattattcagttaaatttcgaaaaattttattgaatttcaaaaagtatggtcaaaattgttgagtctatattttttttgcaagtttttggtcacaactttttgtaaacttttactaattttttaaaaattataagttgtagagaatatgtagagctgcgattctaataccgaagactgaataacatttcgacttacagtggtaaagtctatagcttataggatgtaatgtcatattatgcataaatatagaatttatatatataataattataattttaattattctcgtacaattgtctactgtttgtcatcttcaggctcaaccaacggtattatatagacatatgagtattttatggctatttttccgtatcatttactatatgaacatcaaactgttggaaaagaaaaggaattgagccggggttttcttcttttgcacttccaaattttgcgaacaaagggacaattgtctgtgaaattaggcaacacctgcttttaaaatcaaacaccaaaacaaaataaa

SEQ ID NO: 55925 - DNA, 910 bp, Heterodera glycines
atgaactcaaattttcaaaaaattctcccgccggcacctgtgtacaaaaatttttttcggaaaaagtgcgtcacaaaaaagcatgttttttcctttttgactaaaatttccaaagtgctgattttgactccaaatgatgattcttgttggctaaatgctggttttgaaaattttcagttagcatccctgtttttacaatgtaaaaagccgttttttatcttatttttgtggccaaatcttcgttttaacctcgttttgttcttagtttataatgggagactaaaaatataaaatttgatagcattttgatcaaataaattgtaaaaatttactgatttgaaaaaatgttgctaatgttattatttttgtccctaaaatcttatttttcggccttggtgttcgtcgggtcggggcataggtccaaaaaacgtctcgggtcgggtcggggggctcggggtcggggcttaaccctatttgaaactattcatttaaaatataaataaatttttttaaaaacacatttttaaatgttctttaatgcatatttattttttaaatttaaaatgatcagaaattcctataatattttaataaatttaataaactcatatttattgaaagcgaaatttggggacccgactttcccgacatttggggacccgacttttggggatcccgacatttggggatcccgacatttggggaccagacttttggggatccgacttttggggatcccgacatttggggacctgacatttggggaccgaacgacattgagcaaaagacacttaagaaaaccgcggacatttggcaacccgacatttagggtcccgacatttggggatttcaatcaaacaaaaaaaaattaaaaatttaattttaatcctcaaaattagacaaaaataaa

SEQ ID NO: 55926 - DNA, 833 bp, Heterodera glycines
atgtgtcctttgccacttcactttctgaaggaattaaacacacatttaaaaacggtgagtttaaactaattagtttaattgaccgtttatttgatcggttgagttaattaagaattggccaatttttaattaaaattttattaattgaatttctcatttaataaagaaagcaaaaatcacattgaagaagaagcgcaattggccaatatcatctgcgaaattaacaaaaattatctcattttggaaacatttttgaccgaagtaataaatatttataaatataattaaatattttgcttctttaaagaaccctttaaatcattcaaatggacatttttctgtggatgaatacaattccctccaaaagcgtatcacattaattaatctcaatgatccgcctttgagccaagtgatgggcactttaattgttacactaatgagccttaaaaaggcaatggaatcgggtaaaaagcgaaaaaggaaaatatttattttaaacaaaaaattcctattattttgataaatttctatataaactttaatttaaaatatttttttattataaaaaccaatttaaattaaaaaaaaattttttacataaatataattaattccctcatattaaaatttaggaaattttggcgattctctgattaaaatgggcaatcagcgtttaaaatttgcactaaaatttgttgcaaaacgtcatggaattgaatttgatgaacgaaacaattttagtttatggccaaaaaatagtcaaaagctttatttttcgaaatgggttatattatattaaataaattagttttactttttagacataattttaa

SEQ ID NO: 55927 - DNA, 516 bp, Heterodera glycines
atgccttggtattggcatagtgatttgccaagatgcgtgagcagaaggatggcacaacaggtaaaaaataattaaatttttaaaataagagccttaatggttggggccgggggataaattcttttaaaaatttctttaaattggtcaatctcagtattaaaatttttaaaatatgaattatggtaattaatttcttaatcgaattttttctgtggaataaaaattattttatttgcttatctgtcagctaatatgtcttgatttttttagcgccacccctatcaacagccaaacctgcatgtgcctatgcattatggttataacgaagcgtattttccgggtaattttgtgcatagtcgggctactgacttcccctgagaatggtaaaactgagcgcaggagaccaattattctctggcgcgaatcgccgggggaggggtgggggggattccagcactggttgaaaacaattaaaaaacagttactgggggatttttctcataaaaaaaaaagaaa

SEQ ID NO: 55928 - DNA, 511 bp, Heterodera glycines
atgcgtgccattttcagcgcgtgcgatgccgacgaattgaagcgtttgctgggagctgagcagaatggcgcgactttgctgcacgtagcggcacaaaatgacaaagcggatgtgatcaaacttttggtaggaaaaaaaagaaaaaaaaaattcttttttttcgtaattttatcaaaatgaaaaaccatttccgtattaccacaactttttccgtttagacgataccaaaaacctttgataattaaggcctattggtttttttaaacacagcaatttttcaacaaaaaaatcttagaaacaaaaaatttttttctccggcggtgacctttaatattattttttgtccttctcattgattatcatttgttttttacattttcagattgaaaacggcgccgttgctccaaccgatgacaccaattccgttacaattcagttcacgtgtggcgatggccatttgccagttggtcagtttttgaaaagttcggtctttattttttgtaaactataa

SEQ ID NO: 55929 - DNA, 657 bp, Heterodera glycines
caaaaaaatcgattttttcaagtgtccgtttggggtactcaaacaattatggggagcaaaaatccaacgcataattaaagtacaggctatagggaagctattcccgaaggattcggtctccccataaatctgggcgcatcggttcggggggactgccccgaaaacaaaaaaatcgattttttcaagtgtccgtttggggtactcaaacaattatggggagcaaaaatccaacgcagaattaaagtacaggctatagggaagctattcccgaaggattcggtctccccataaatctgggcgcatcggttcggggggactgccccgaaaacaaaaaaatcgattttttcaagtgtccgtttggggtactcaaacaattatggggagcaaaaatccaacgcagaattaaagtacaggctatagggaagctattccggaaggattcggtctccccataaatctgggcgcatcggttcggggggactgccccgaaaacaaaaaaatcgattttttcaagtgtccgtttggggtactcaaacaattatggggagcaaaaatccaacgcagaattaaagtacaggctatagggaagctactcccgaaggattcggtctccccataaatctgggcgcatcggttcggggggactgccccgaaaac

SEQ ID NO: 55930 - DNA, 189 bp, Heterodera glycines
atgaacacagaggaagcgcaccttcttggcatcttttttgacacattgaccagagcaattaagcacggcattttgttggaacgaattcgtttgttggatggtcaaatgctgcgactgatcaacgaattctgccaaattgacgtggcatatttgctaacccaaattgatgtggtccaagaactgtatgag

SEQ ID NO: 55931 - DNA, 280 bp, Heterodera glycines
aaccggacgaagcgggctttgtgaccaacggattatttgccaattggacgacgatggatgtgagaagagaaagcgattcataaatagcaaaatgcaaattccgggaaaagtgccaacaatttgtgccattctttttgagggtcggcactccttccaacgaatgttcggtgaccaggacgacggcgaattcattaacgatgcacgcattgattgggtgatgacgcaagacatcgtggaaagcgtgatggcattcactctgccgacacaggcaattaatgca

SEQ ID NO: 55932 - DNA, 1112 bp, Heterodera glycines
atgatagatataaaattgctggtaaaatttaaaaattataaaaataatatcaaaaaaaaaaccaacactccacacaaaccaatgcttctcgacagtctcggtctcgagttgcaaaaaagaagtttcttggtctttgtgtttcaagtctcgtgtcggtctcggattttcgttctctgaaaattctattttccattttcgagacaaaatatttttgaagaaaaagcctcggtttatttttcgagaaatatgattcgaattttgcttaaaagtaaacaaaattttacattttcttggtattattcgattgcccggttttttctctattagcctgcaaaattagaaccaaattttaaataagttatggcagaaataggcatttgtttttgtacaactttttcaaaaattaatcaattttttttttaatgttgcaagctaatagagaaaaacctggcctatcgaatgatagcaagaatggaaaaatatgttttgctattaatcaatgctaatgccattttttgccaaacaaaattagctaaaatggaattaattttactcaatgacccgttcacataaaattacccattttcaattttccagtcaaacttctcattttcaaggactgtcctttattttcctgccaaatttctcatttttcaaggactgtcccttattttcctgtcaatttttctctttgctgcggatcttattttaatgattctttaaatcatttttgatcactattgttgtcactaattattgtactctttttaaagtaattttttcggagattattctgcaccgattttagggctttagaagccgttgattttgtaaggaataattatttaaatttatttaaatttatttttttcattattttttcaaattcctataacagaatgggtttatcaaataacactcacaagccaaagcagcaattctgttatttaatttattaatttacattttattcaaaaaaattaattaatttttgttaagttctctgaggaaagtttttaaaaatttcaaaaaacattaaaaaattttagtttttattttgaaaactgaagttttagtaaaacaaaatttgctgaattccaacaaaaaataaa

SEQ ID NO: 55933 - DNA, 1467 bp, Heterodera glycines
atgcccaaatgggcattggtccttttcactcttttgccatcttttcattgccttcctctccactttttactttctccacttcagctttctccaagtgctcaacgacttcatcttgtacgtgttcgtccttccgatgccggtgttttcacttgtgttgcggtgaatgccgctggcgtggctaatgccaccttttctgtgattgtgctcggtttggtccaaacgtttcgttatattgtgaaaaaatgtgccaaaccgttcagtgcctccttcaatcgccgatcattacggcactttggaagtgttaacgggccaaacggtgcaattggagtgccaaccaaacggaattccaatgcccgagtaaacagccgaatttgaggagccaaaaagggatggcatttcagaatcaaatggacgcacgacggacaaacggtggatgcatcagaaggggggagaattcagttgctgaacaattcgacacaactgcgaatcgaaagagtgcagcggagttccgatgctggccgatattcgtgtgttgcgaccaacaaaatcggcaggacggaaatggacacttttgtggaagtgatcggtacatttatcaattttgcgaaattttaaactgatcgtatgggatggataatgtgacaggcgaaaaactcttccttgcactttctttctctctcactctcctgcgtaaactctctctttcccattctctatcgctctttatctctctctctcattgaattttaaaattctgcttcccttctgcttcatttttctgtccgtttcagaaccgccacaaattgtcgattttgccaccgaattcaaagtgatcgaggggagtgagcagcgattggaatgcaaagttttgggcacaccgacgccgaaagtgcaatggcaaaagggcggaagcgaactgctcgccaaccgcggcgttcacttcgcttttacacctccccacgcgcacaatttgcacatttacagcacgagaaaggagcacggaggaagatacacatgcaaagcgagcaacaaaggcggagaagtgcgacagaacatccaactgacagtgatgggtcagtgggaaaaaggaaaaagcgggggtgaagagaagggaattttgggaaagacgataatggcattttgggaaagacgacttaacccaatcgcattccttgtccaaaatgattccgattacccattccatcttctcctttgctcccattttgcttcagttccccccaccattaccgagggagagcgcttcattcgggtgaccgagggtgccaatttgacgttggaatgcccggccaatggagtgccaacaccacaaattacgtggcacaaaacggacgaagaaggaagatcaaaagaagaagagcgaataaaaaagacaaacacaacggaggagggaccaccggagggagggaaaatgatactgagagaattgagagagaccgacggggggag

SEQ ID NO: 55934 - DNA, 104 bp, Heterodera glycines
atgaaagagtgccattgcgacgtggaggaggacaacttttgctttttgtgctgcggcagtgcgaatgatcgttgtttgccggcacatgagcacgacattctcag

SEQ ID NO: 55935 - DNA, 352 bp, Heterodera glycines
  unsure (1)..(352): unsure at all n locations
atgagtctgtttcggaaccgatcacaattggaaactgttgcaacgaaatgcacagctatgaacacattcagcgcatttttgcggccatgtgggacaaggacaagttccaggcccattacaacaactgccgaaattggagtgacggattttggtggaaagtgtaagaaaattaattgtaaaaaaataataacaaattttattgatacgggaaataattttaaaaaacgttttctctaaaactaattaattcacagtttttttgtgaaaattaaagaaaattaattaaataacattttcagtgggtttttanatagcaaaaaaattcactgattttttaattaatatatgctaa

SEQ ID NO: 55936 - DNA, 93 bp, Heterodera glycines
atggggagcaaaaatccaacgcagaatcaaagtacaggctatagggaagctattcccgaaggattcggtctccacataaatctgggcgcatcg

SEQ ID NO: 55937 - DNA, 588 bp, Heterodera glycines
atgaccgttgcagaccaacatacagccgaaagagctggcacaaatgccactcgctggacatcacaggtgaaatttgttgacgaaatgtctctttaagttagatggtggggataaaatgacgactaggtttaggggcaatttgtctacccaatatgggacaaaatgccgacacagcaaaggttttatacaagttgtcctcgagatatgacaaagtgccgacacacataggattcgggcaatatttccccaacactaaaatggacaaaccatctaaataatagccaaccaaccgaattacattcaaagattttattggcactttatcaaatttcaaatatttaaaatgtacaggaccattttccgacaatttgtcaacaaccgcaacaacaacaacaaaagttgcgcccctccgagtcattcattcgctccatacagcagcagcaacaggagttgaagcagcaacagcagaagaacacctccaacaccatccccagcaacagtcgaatgcatagacggcaaaaaaagaggtcgaaatggcatactctcgacaaatgtgtttcactagtctcgattcttgaggccaattaa

SEQ ID NO: 55938 - DNA, 533 bp, Heterodera glycines
atgggtactcacgcaacaaattcctccaggagacggcgttatgcccacaattggtaagtttttacttaaatttttatggatttaccctttctttaaatctttaattttctttcactgatttgtgattttgaaaattttttcgttttaaaaatgattttaaaattaatttactttttaaaattttttttgagaattttatagcttaattttacaacaaaataaattttgttgccttaattaattaaaaaattttttatttggttttatttccaaaggtgttattcacatttggaatgtctcgttaacaatggtcgctttgatcttccattgcattatgcttctaatgaacaaaattctgccaccagatttaaaatttctccccgacaatgtttgttgtaaatcatttaaataattaaaaatattagtagaattaaacatttatttatttagttttccaaattttcttcaattctgaatcgttacaagcttttcaagactgagtgcctctcaattgatccgcaacagtgcttata

SEQ ID NO: 55939 - DNA, 1051 bp, Heterodera glycines
atgggttttgatctgttggttgaaaataacgctgacctttctgcttccggtgatcaacgaattgcaagaaatggcggtgatgtgttgttcgaatttgatcagtccccgataattccgcccactcaacaaaatgtggataatacaacaatcattcaaatggacccaattgtgcatgaaagcggctatgaaaataaaattggcatttcaccaaccacaacggcagagcaatttgaatccgttcaattggagggtctgtttttttaaatggccaattgtggattttaagctaaatttcaaacaatatttatgtgcattttgtggtccggcagtgccattagggcaccgccagcgaaaattttgaaattttaacgaaattttttcatttttcggttatgctatgcttttccgttccataaaaatataaaaaaccaaaacatttaaggagatcgatttatacagtgcagaaacaaagaaataaattcaaggagataaaaacaatttaaataattaaacatagaatcaatcaatggttgttccattttctaattgttttcttttaaatcaagctcatgaccaagcctcgtcttcagctgctgaacagctttcaactgtgccaacaacgtccaaaaaagcattctcattaaatttgccattgttcagcggcaaaaatggaaggacaaaaaagggcataaaaactcccttttcaacgggagcagaattatttggcggcagcaacgaaattgtaaaaattaaatatttaaattaataaaaatacatttttctattctaaatttaattaaattcgctaagacactttcgaaaacaataatttgtcataggtctattgtaattataatgctttttcacaaaaattttacaaaaatttattttagctttcaagcaatgatcaattagaaagtacgaatttaaatgcgcaattggttataaaacaaatggaaggagacaatcgacccaaagaatctgtcggcggcggtgtctctgatgagaaaaacggttacaaataaaaatttaattaattaaatttatttaa

SEQ ID NO: 55940 - DNA, 1609 bp, Heterodera glycines; identical to SEQ ID NO: 25200

SEQ ID NO: 55941 - DNA, 138 bp, Heterodera glycines
aaattaaatttttaaaaatttttttgaatttttaaaaattcccggttggtcccggtccaagtcccgaaaaaaatcgaggtcccggtctcggcttctcacgtccccggcaagtcccggtcccggttttgcccaaaattc

SEQ ID NO: 55942 - DNA, 1756 bp, Heterodera glycines
agagcagcggattagataagcctaattattaaataaatatgcataatgtgatgttatttttccatttgctttaggcggtggattcataatgactttttacgatgccaaatcgcgcagttgcaaagttttggatgcgcgagagacagcgccggcggcgagttctcgggaaatgtacggaacggacgaatgggcatcgaaatatggtgagaaaaaggcacaaaatagtgctttgttaaatgcgtgatcatccgactgtattacgctaattacctttcttaaatgagtgatcaaccaaatgaatacactaattacccatggtaattaatgatgccttaggctatcgcgcaattgcgacccctggcgaactcgcgggctattggttggcattcaaagagtacggcagcggacgagtgaattggacagacttagtgagtggggggggggataagccgatcaatcaaccaattaatcactcgtaatcattcgccctttccttttgatcagatttcgcctgccgttcggttggccaggacgggggtgcccatttcggagtatttggcctacgttttgggggtcaaagagaagcatttccgaacactcccatcgatgaagtcagtggacaaatgccttttgcatttgcactaattaattcattgccttaattggccaattaaatttgttttaggagttggataaaccccgccacaaatcggtgagtggtcaaaagatcaaaagagtggcaaacgttttaattcccgcattttttaagtgtttatgaatttggcgacgttattcgaaggcccgaattggcggatacaatggaaaggctggcgaatgcgcagaatccggtcgaattgttctacaggggacaaatggcggaaacaatcgttgcggaaattcagaaaaatggtaaatggcaaaaaaggaatgtgttaaaagcattatatggcattttgctcgataatcgattgattggcaatcaatcgatagttccttacatttctgatcaaatggccttctctgatcaggcggtctgctctccaaagacgatttggccaactacagaccaaaggtttacgactcgccgctcatttcgggtggcttccgcggcgccttgcgaatgtgcggccctccgccgccgtcgtcgttcgccgtcactcaggccattgtggcggtgatggtcggtcagtaattggcatttgttgtgccaaattttcgacttcaattcagccaaattcactaattacacgcgcttcggaaaccctaccgacggcgttttggacgacaccgaattttaccattggctgatcgaagcgcagaaatttgcatatgcccagcgaacaaaacttggggacgtcgattttgtgccggaggcaatggaattggccaggtaaacagaaaaagcggcatttggccaaaaaggagagcccttggagaataatgcccatttgtgcacagaaatatgaccagcacgcgcttccatcgcgagattctgaagcgcgtgccaccaaaagcgatgttttccgcgtattatgccgaagagccatttgtggcacaggtggacagaaggggggagggggaagacagatcgaaagcgaagggaatgagcaaaccatcgaatgtcttcagaaggaggaccacggcacttcgcacgtttctgtcctcgacgccgaagggaatggcgtttcggcgacgagcactgtgaacagatggcacgtaactgttagatatccctcattaatgcctttttttattt

SEQ ID NO: 55943 - DNA, 1055 bp, Heterodera glycines
atgaaaattaattttgtaattatttttttcttatttgtaatcgtcgtaattgatggaaccgatgaagatttatttgatgatttgtggaaaaacgttaagctatcaaactcaaaaaacattaataaacctatatttggggaaattaatgccataaaagaagaaagaattgttaaaaatgaaaatgatgaacaaaaaaatgccaataaactccaaatggaaaacacaaagccaaacttatttcaaaaaattaaaaagaaaccattggaagaacaaaataatcatttaaaactaaaaatgccaaaaattgaaatggacaaattgagcgaagaatcatttgaaattgagtttgatgagaaagctgatcagaatgtttcgtcgactgatcatagcaattcttcagatgatgaggattacaataatatggtaacaaaaaaaacagtatcattctaggaaaaaaagtattttttgaaaattcgcttgtttctaaaaatttatattaaaaataaataaattattttttagaatgctgaaacaagaaaggaaattaaaattttaaacgagtttaatttgatgaaaaaggaattgcggtgcaattataaaacaatgccaattgttcaatttgaacgtgaaattgcaaaaaaagttgggcacatatcgtaccaaaatttataaaatgaagagaaaattagaacaaacacggaagtacacagtaaataaggacataaataaggacacaatgattcgaatgatcagaaaatttgatgaaatgaaaaaggaaaaaatttatggatttaaatatgtatgataagaacaaaatatgcaaaattgaatgtgaaattgcgaatgaattgggaattactcggcaaaaaatttatcaatggaagaagaaaattggtaagaacaaatggaataagcgaattttaataattgtctcattttaagatttatctaaaaaattttcaacgccacaaaatattgaaaaaatagagcaatttgaaaaaatcaaacaagaatttaccaaaaaattcaatttgaaaccaaattgggaaattgaa

SEQ ID NO: 55944 - DNA, 63 bp, Heterodera glycines
atggcgtcaaaagcgagcgggttccgagcgggtgtttaccgcacaaacccatgcctatgggag

SEQ ID NO: 55945 - DNA, 645 bp, Heterodera glycines
atgcgactggtccatggcaaggacccgacccccgacgttcattatctgcacgaaaaggatgactatcactttgtgaatgcagtgcacaagtacattgtccgacatccggaactgccatgggactcgccggagttcaacccatcagcaaacattcagcaaaacattgcagagttccgggaaatctttgagagcgaagtgttcgacgaaaattatgagctgaagacaagagaggagaagaacgagctgatagagctggtcaagggattccgattctacttcgcggacgagcttggacgctttacgctaaggattttcagcgacaaaatatcacacatcactttgacggatcagctggcctacgtgttgggctacgagcagcagcaagaaattcataacgaagaccaagccaagtacgctgttgacttggccggtggtgtcagtcatctgtgcatatacctaaacagtggaatcatcgaaagcatgatttttggcaacaccttcgccaatctcctccaagtgattgcggttgagggcacgtcaggcagtgtggtagagaaggactttcagtcaccgttattccacaaaattgtggctagagaggtggacgtgctggacgttgagattcgtacgctgaccggacggtag

SEQ ID NO: 55946 - DNA, 1695 bp, Heterodera glycines
atgactgaagggattaccaagaaaacgggcgtttcatgtgattgccaatttggagagaaaggcaaagaaatgggcaatcaacagttcattttgccaccaattgcaccaattgtggaaaacgtgacggacataaacgcgttgaaaaaccgtaagaaatttaggaacgcaaattatagggtgtcgtcatgacaacccgtataaaaggcactcgtacactgttgtacaaaggcaactcgtaccattgcctagcttaggtatagacttccggctctggcctaagctttagactagcctaggcttcttgggtctaggcttaggcttgcttgtctctaggtttaggcttaagcctaggctttgttttgtaaaatatgagttgccttttgtacgagttgccaatgatatagatgtcaacaacattcataagaaaatttccataaaaaatatttaccgaaaaccattttattaagattcgatagtaaataaacattaaaaaaaattaaataagaatttctagttttaaataaaaatgttttttaagattcttgaagaaaaatttattagaatttttttttaattaaccatttctttttttgatggggattatgagacgaatttatgaaactccctagcggaatttacgaatcctcattttgaggcattgatattcactttttacagggcttgaatgcaaaatcggagttttccgtgaaaacggaatcgggcagatccacatcggcttctgtggggcggacgctacgcattgcttcgcggcgagttgtaagatcggtaagggtagcagtcttcaaagaattaagttcagacttgagaattaattatgttttaaaagcaaattcatttttttaaaatgtgatcagtcaattctctgaaaccgaaatttcgaaaaattataattttttggtgaaaaggcagcgtaagaatcgtgatcagtgagtgatctgtgtgattaaagagtctcgaaaagcccatggaaccttttttgacattcttttcaagtcttaaaatatattttgttaaattttttaattctaaatttttcaaattagatataattatttgggtttttaacagattgatgcattgataaaaatttaggaacaattatttgaatgaattttttatctatcctataatttttggtatacaaattgtgccaatttttatagggtttttttggcttttatttattgatgaattctttggtaaaattaaattcattatttaattgctgttcatttaattaatgctgttcattttgttgcagccagtggtgtgatcgacacttggggctgtcagccgtccaatgactattgctcaaaagttggcaaattgtgccatttttgcaaactaggcaaaaaggacgagaaacactcgaatatgaacttcatgattccgacatttttgaaaaaaaatgcaacgcgtgtgaccaaaggcattgtaagctcgacggttttggcaccgctgccggagggcaccaccactacgacgacgacgacgacggtttctacgactactacatccacggcttccaagacgatttcgacgccctctgcgaatttggtgaccgacatttcggatgaaatgtccgaaacaacggttgacggtaaaactgagtcccggccgtttcacccccaaagttttttgttcaattaatcattttattggggcggaggagca

SEQ ID NO: 55947 - DNA, 3491 bp, Heterodera glycines
tccatctttccactatcgcttttcttatctctttcatccccgccccttttccgttctcttcacacttttcctttccccagcgatcagttagtcgtcggagtcatcggatttaccaccgatcgattaattcacttttctcatctcgtccgtccatggaatatttcgatcacctattttatccggagaataaattagtcttttaacactgaggcaatttgggggatttaaccatcgatcccagggcccgggatccgtcctcccaaatcgtcctccccatttattcggaagcggtgagtcgtctgggggacccacgcgcctccctcactggtagcaccggatggtttgttttgccatttcggcaaacggttcatcgacgacgacaatgaggagtgatcgacgacgacagcagctgcagtgcctgcgggcaaagtaatggcgccggaggagagaatgttttgggtacccgcctgcgggcacaatacagtcaagcgcttagtgatcacttttaaaagagactgatcagaattaaatttgagttaaagattaaaatttaattacgtgcactttaaaaatgttaatgatcagaattttaatttgagttaatcaccagagataatttacatgatttatgatcagtgtgccaaagttaaaaaaaaattcataattagagattcagaaaattgtgtaaagagtaccgaacaaattaatgcacgtgaattctttattggactgttcaaagtttctggccaatcatgagaatgccaaatttactcacttacaattttggccaaattaatgacttcgaattaattttgagttattttttgtatgagtccaatgttcggccatttcaaagttcaaagattgcaaaaattttcttgttatccgccattaattactcggccgtgggaacggaggccacggcggcgctcttcatttagcggagatgcgatcagttcacataatttacgtgagaacattggcgatgtttattacacattcattcaaaaagagcgacattcgcggaaattcttttactgctttcattggccattcatttatgatctatcgcattttcagtcagaaaggaataggcaaacatgcaatcatttattttatgagagatatttgagctcaaatatttggctaaaataatttcatttttaattttgttaagcaatcaaaagcaattaatcttactctctccacgactaaagcaatggatattcccgacaaccctaaaggggttcgtcgcagcacttctgcctgcgggcacaatacagtatatgagttgagaaatgaggaggaggtgagtgaaatgacaatttcggtcattaataggaaattttggtcgggaaaagaaaaacggcggtgaaggtctctgacttagaggccgcccataacgaattggtcaaattggaagacggaatgaaccgttccattagggttcttaaccgttgtatggacaaaaagacaaaatgggtctcggaggtcgtctcaaatgccaattccaattttgagaccgtcaaggcccaaattgaaacgttggttgaccgaatcgacgagcttgaacgagcgaatgatggaacagatgcagcagcacggtgcgcgagcaggacgactcctcacaatttgaaacgccgttgaaggataacaagggcacagaccgtggcttttcaagcacaggtggcggtacggcaacgcaaacacagaaaggcgtcgggacctcttccaacaatcctgccggcccaacccgatctttcttggcatcaacatgttgagcaactcattatcgataaattcaaatttggagttattcggagaagaatcggtatacgccttcgatgattgggccgagcgattcaaggactacttatcggtgtccgggaaaaatctgactgaaggagagaaagtcacacgtctcaaattagcactcaaggacacgccgaggacacttttcaaggagctcgaggctgaccaaatcgtgactctcaccagcgccttggaagccttgagagccaaattggattcgcctcaacgacgggaattggcgaagagaacccttgcactgtgccgacagcgtgaggatgaaacggttggccaatttttaaggcgtatgacttcgctagttgagtcatcaaatccatcactatctggggatcagcgcaaagagaaagtttgtgaggaatttttggacagactcaagccaaatatgagctttctcattcgccttgttggccttacacaagccaagaatttggaattggtcaaagcccaagcagaagagcttgaggctctatttcttgcctctaaaggagatgatgtcactcgcctctctcacctgattaatgcgctgaaggacaaatccgaaaatgagcaatcaaattcaaatccaaatgccgaaaatgatcgcaactttggaaggcagcaacgcaataacacttgggggttcaggcccttcactgctgatgatgttcagcgacaacgtgccaactacaggggaggccgaggcaacagcaatcgtgacgtgactgggcaagagggagacaggagcacatgagccagagaaattggtctaacaacccggtttgctatttctgcaatagagtcggacatttggccaacaattgcaatgcaagaaaagcccaattcctaaaccgacgtggaggaaattcaaaattttgattattcgaaaaaggaattttcggtgggggattcaaaagtcaaattttgccaccaatcttcgtttttgcttaacgacatccgaatttgtgcggatgaaaatatttgggtccccagggattcagaaataatgatcaatgccagaattgagacactttcgagcccatcaaacccattggtaatcgacagaaccgacaacagcctaatcagaaagggcatgtcagtgttgaacagcgtttcgcctgcgggcaaaatacagataaagttggcattaattaatccatcaatggaatccaaacgtctttggaaaggaatgcatttggcatatgccaatgaagtcatttgcgactcttccggacttcttagagaggccaaccaaacacaagtcattgcacttgatgatcagaataaaaccaaaatcgatccatccttcattgtgagttattcaaaaacagttgccacagatgatgaacttaagaggctgaaacttctgattgaggaatattcggacactttcagccaaagtcaatacgatttgggtatgttttcagaagcagaacatcacatcaccacaacgacagatgagccaatttcctcaccaccccggagagtgccgtacaggtacagataagaactgaaaaagcacattgaataactcctggcatccggcgtaatggttgagtccgacacaccatgggttacgcctttggtgattgttcaaaagaaagacggtggcattcgtccgtgcttggacttcaggaaactgaacgaagtaacaattccggacaggtatccgttaccaatttcag

SEQ ID NO: 55948 - DNA, 932 bp, Heterodera glycines
atgaagagctttataatgataccaacaatcatggatttggatgccaaagaaaaaagttatagcgaaaaacataaaaatttttgaaaatctgcccacagataacacacaagtatctttttttttcttttggatttcacctggtttcatttttgaaaaaaatatttccaactatttttggcgttttgcctttttaacaaaatgcaataaaaaggaaaatgcacccctaggaaatgaaaaatttctcaaaaattcatttccaacatttatttattcaattttaaacaattatagcatagaattttttataagtagactttaattaaatcaaaatcagcaaattacgaatgaattctcctgtaatttcccgcggaatgcatggtttttcaactactatctccaagagattcgcatcaagcattaggtttttgaaattatgattgattctttactgttttgccttttcagcgaaggacatgccgaatattaccgagagttcaatcgacttgcttctgctggaatttgggaccagttaaacatgcgaccaaaagttttcagcactaaaactgagaaagcagcggctatgaaagtctggcaaaaaatggtttgttgttttcctatggttttcgaaataatttcgaagcacttaagcggtaatagtgtagtttgtcccctcttactggttcttatacccaaaatgttgaggcaatgtggcatcattataagcaattccgaccacgtagcggaaacactgcaaacacatttgaaagttacttccccgagtttatgtggcgcaagcattttggcgataccgttgatgttttttataatttttggtctcatgtcactgaactatacccatgtgaatgaattcaaagctttgttcttctgcaaatttgttctttcgtgcatcgtaatcgattttggacaataaa

SEQ ID NO: 55949 - DNA, 226 bp, Heterodera glycines
atgcgatttccaagtacaatcttggaaaaaagtacagttaaacttttccaagcacaaaagccgaaatccaagtatgtacttggcattcaagtaccaatccgagccctgaactattataatgcgataaatactaatattttaataataaatttaataaatcacatttaagcaattgtttaattcatattcattcattaaggattcctataatcgctgattaatttta

SEQ ID NO: 55950 - DNA, 423 bp, Heterodera glycines
atgcgaagagaatgggcggagaaacattacaatgagaaaaggaaaaaggtgagaaaaggataaatgtaattgaattgataatggccaatgggaaataattaaatgagggaaatgcgtctaataatccttacaataactcggcacttttcgtcgaagatttatcgttaattgcatttttatcgtctatatatttattcagatccattttattaaattaatttgtattttttcatgcatatttattaaatttaaaaccccccacctaaaaaatgtcttgcggatttatcaaaatgtaaaatacactaatgcgccaaatacaaatctgagaaaaaaacatagtagtttctatttcttaaattttattgtatttaggttatattctcgtattatatattaataaaaaaatttatagtaaaaaataaa

SEQ ID NO: 55951 - DNA, 263 bp, Heterodera glycines
agtgccgagttattgtaaggattattagacgcatttccctcatttaattatttcccattggccattatcaattcaattacatttatccttttctcacctttttccttttctcattgtaatgtttctccgcccattctcttcgcattttctccttccccagtgatcagtcagtcagtagtggtgatggaacagacttcaattatttattccgatttctcgcttcgtataaatccaacaacgaatgaataaagacatctttaaca

SEQ ID NO: 55952 - DNA, 332 bp, Heterodera glycines
atggagattggatttggtgaacaattatttttgacaaaaaatgtaaaaatttccaaggtgtgaaagggttcgacttccaattcccaatttctttgcaatatttcgtcgctaattggtggatttttttttcgttactaaatttttcttcgtttgtcctagttggaattttatttgtgctaaaaatataaaaattgcgcatttcagaactttcattttgttgaattttcatattcatcaaaacgatcgtattttgccgaattcattttataagcagtcaaaattaaatattaaaattcattttgcaattttataaaaaaaaagattaaaataaa

SEQ ID NO: 55953 - DNA, 448 bp, Heterodera glycines
atggcctcaattaacaccagttcaaatgatccggtattaaactttagtaataattattttatttaattaattaattatttatttaattgtttcgcccagctttatttggcctaccgtttcgccggtccatccgccgatttgattgtgccggctgttgcactcaatttggttgcgttggttggcattgtgttgaacggcacagttttggtggtcactgtcaaatccaagtaaatcattttttaattaatttaaatttattttcagttccctccgcggctccgccaattttctgatggcattgatttgtatttgtgaattggtccaccaaattgggcactctttttttctggttgttgtcatttcgggcaaggattttgtcagtttgctcactgctgacttaattatgataggaaatttaattttaaatatttttttaattttgatttaa

SEQ ID NO: 55954 - DNA, 657 bp, Heterodera glycines
gttttcggggcagtccccccgaaccgatgcgcccagatttatggggagaccgaatccttcgggaatagcttccctatagcctgtactttaattctgcgttggatttttgctccccataattgtttgagtaccccaaacggacacttgaaaaaatcgatttttttgttttcggggcagtccccccgaaccgatgcgcccagatttatggggagaccgaatccttcgggaatagcttccctatagcctgtactttaattctgcgttggatttttgctccccataattgtttgagtaccccaaacggacacttgaaaaaatcgatttttttgttttcggggcagtccccccgaaccgatgcgcccagatttatggggagaccgaatccttcgggaatagcttccctatagcctgtactttaattctgcgttggatttttgctccccataattgtttgagtaccccaaacggacacttgaaaaaatcgatttttttgttttcggggcagtccccccgaaccgatgcgcccagatttatggggagaccgaatccttcgggaatagcttccctatagcctgtactttaattctgcgttggatttttgctccccataattgtttgagtaccccaaacggacacttgaaaaaatcgatttttttt

SEQ ID NO: 55955 - DNA, 1795 bp, Heterodera glycines
atgtccaaagcttaagctgatttaaatgagtgccacgttggattctgcccgattccaaaattatttaaattattgtgaaatgctgataattcgaggacgcacatttccagttgacattttggtaaatttgtttgcgtgtaaaattcttcaacaacaatttcacacaataaaagcattttaattcagtattctccgacaccagtaattagctacacacatgctgcggtcgaaacagcattgcaaatccatttgactgcaaagcgtcctggggatcttttaatttttgtgactggtcaaaaagtaataatcattttatacctgaaagttgaatagaatatttaattagaattttaaggagactgaaaaggtttgtcggctaattcgctggaaatgaacgatgatatggtttcacaatttggacaattagtaataaatagttttaaatatcatatatatatataatttatttattttcccttttgtttaattacagtattgttttcctttgtatgcctcaatgccattggacaaacaacaacgtgttttccaacaatgcattccaaacaaaaaatgcacattgatcagtaataagcaataaatagtcttaaataaaatgttcacaacttttttttattagatcgtaaatgcattgtcgcaaccaatgttgccgaaacatcaattactattgatggtattgcctttgtcgttgacactggattttgcaaacaaaaaatttacaatccacaaattcgtgttgatgtaagtaggttgtttggtgtgtttgtatacatgaatttggttgtatattaattttttataacacagagccttctggttacgccaatttcacaagcctcagcaatgcaaagagcaggtcgtgctgggcggacccaacctggacaatgctatcgtttgtatactgaaaatgcatataaaacggaaatgcaaccgcatacaacacctgaagtaaagaataaataaaaatgaaaatatatacatgtataataacttaaacaaaaaatttttcattggcgggcagttcggccaggataaggcccggctggccaagctggcggccgtgttcgttgccgaaggcaagaagaaggggtggtccccacgcagcctggagagcattaagaagaaggctcagcgcctgatttgtcaggtgcgggatgagggcggggtggtaaagggcggggggccacccattaaggtggtgattcggaacaaagaagggccgagctgctcggcaacgtcggctggcgggcaaccgccggcggggaggcagctggaagatgtggtggtgccacaggatggtggcccgttgcaccaggtccaacagcatgtttacatcgattccttacttaatccgcagggccaggtggcgaaggccccgggagggacgtttgagccgctggtggggattgaagaggcgttggaggaggctgcggccgccgtgggggaggagttggagacggaagtgatggagggtttgatgagtgaagaggagctggcggccgcgcaggcggagatgtttgaggagatgggaccgtctggggacgtgtcggatgaggatgtggagctgttggagaagctgatggcgcagaaggcgccctgagcggcacgggcaggtgctccgccacatcgggactgaaactgtcaggtcggtgtggcggatactggaagggtccctcctgggtgggaggtgggggggggggttctttttttcgcagacacactgcaacgacagctcaatatggagaggttcttcgacttgcttgtcggaagctcatcg

SEQ ID NO: 55956 - DNA, 1288 bp, Heterodera glycines
ttaaaattggacaaaatgaaattagagtcaattaagcaaaacaaaaaacatttgccacctcatttagcaaattatgtgctcaatcattgatgagtcacccgtcgcaattggcaatggcggcacagaaacacagctggtcagtgagtatggtggttcaacagaagaggcaatcaaaagcataagcacattcaatatacaaatacagcaaaagtgccaaataaataattaaattacccataattaaattaccgtatttttctaattatccctccggggggattattaagcaaattcagctgaatacctggcaacattttatttgacaatggtcttttaagttagctctagaggtttaaaaagaatttttttcgaaaaattaaaaattccatttatcccccagggaggataaatggagacagtgcataattagagtaaatacggtacccaaaattaaattcattttaaaatgcctgccaattacagtggaataatgatttttttaaaatataattaattcaaataaaatttattttctattttctccatcacttttacctctgacagaattattgtgcatttttaattttcaattttattcactataaaatgctaattttaataatttccccattagtcaactccattccgtggcgttttggacgtgcgctttgagcccggccaaactttgacagtgaagggaatcgtcggggagaaggcgcgccaattcagcgtcaatttgcacagtcggacggccgacttcagcggcagcgacgtgccgttgcgcgtcgcggcacgcgtcgaccgggcaaaggtcgcgccgttgggagcacccgccaaaacagaaaccaaataccgtatttcagtttttaaaccccctgaaaaggggggggggctctattttaggggtgggggtgtattgtatgtaacacgataatattcagaatatttttctcaaattttcaattatgttagctctaggaaatcgagactatggcataatttctaaaattggtgctaatttcacacactgaagagggagagagtacgctgagactgatcaatgagattggcccggttgatcgataagacagaaacaaacggacgataatcgagcggaatccgtcgagaataattattaattgtctccattttcatccgtcctctcagattggcctcaattcgatggtgaacaaaatgtgggggaaggaacagcggaaggggcactcgttgaagcccggcaagcccatcgacttgcgaatccgggcgcatgacaaggaatttcaggcgg

SEQ ID NO: 55957 - DNA, 804 bp, Heterodera glycines
tgtcccacgcttacaagaaagaaaaagcctcttgcagatcataatcgacggcaaagcgttcaaacggtacgcctaccaatcgccgcttcagtccatcacccatttgtccattgacggcgacttggccatacagcatattgtgccgactttttttgaatttaattacgttttgccactttagcattggggcgggaaagtttacgtgagttataatattggattggattatgcttaattgattaatgtaacctgaatttgtccattttaattctgattttaaattgctttgagcctgtcccctatgaaacgggccttccccacggcttcccaattggcaaatgcctgaaaatgtccggcactccgtcgctgagaaagggcgggcgctttgaagtcaatttgttgcgcaaaaatggtcacattgcgttgcatttaaacgcgcgttttgacgaaaaagtctatcgaaaatgtttttttttgtgccaaaatttgaatttttgccccaggcggtggtgcgcaattcgctcgaggcaaatgaatggggaaatgaggaaagggagggcaaaatgccattcgaaaggggccattgcttcgatttggccatcacaaatgaagccaatcattttggggtacgtcgggattataatttaactttttattgtctaattaagatgattaatttaatctctttttcagattttcgtcaatgggcaacattttgccaattttgtgcatcggtcaaagcccgaagacatttttggcctgctaattcagggagacatcgaagtttgtcaagcaaaagcaatt

SEQ ID NO: 55958 - DNA, 2333 bp, Heterodera glycines
atgactcattcattcggctctgatcagttaatcaccgccacagaacattcgctgactgctgaccaccaacagaggagcaatgggtgagtcagtgaagcgaaagcggcgattattttggttggcggtgaacggaggcggaaaatggggagcgggaaaggcattgcggacgacggtgatcagaggcgacggatcaatgtcagcagcaaacaaatgctcaccccctccccatacacattattaacttgatcgagagccaattttgaatttacagtatttttaagggattatttatttattttaatgtgattcaaatgtccataaaatgaaaacagaaaatttcaagatttggtgggatattactgaccaaatttaaaatttatttggataatttaattggattattttggattaaaaagtttcaaaaatgaaaaaaatgaccaaaaaggcaaaagattctatttttatgactttatttagctaaattcgtttaataactttttgtctgcggtgaatcttaatgggaactgacagatcatttttagaattaattaaatcaaaataaattaattattcgaattttcatttaaatattaaaaaaacatattgccaacagcagccggcacttagctaattgctagctaatgccgaatatttgtttaattaaataattaatcttaatgggcattcttttcgaatttaaggcctttttaaatacttatattcaacttatcataactttgttcttgacaaaaaatggccagtggcgcgaagcgtccgcccggcactgaccaagaccagcaacttcccacttacaagtaataaacaaacgaaccaatccaatggcaccaagccaattgccgtcccaccctctctctcctttaggcttgttgtgattggcgagggcggtgttggcaaatcgtcgctgaccattcaattcttccaggcaggtgggggcataggacggacaaacggacggagagacaaattggccattgtcaggccgattttacaccatttttcgtcctttttgtcaccttttttggcctaataataccaagttttcgtccttttttcacttttttccgtaaaattttcattaaaaattgtaaaaatccctcgcaaaatctttcaattcgtttctccatttcagaagcaatttgtggattattacgacccgaccattgaggatcagtacattcaacattgcgaaattgatggccaatgggtcattctcgacggtcagttgcaaagccatttcaatttaattgctttattcattcgaatttaatttaattgaagtgcttgacactgctggacaggaggagttttccgcaatgcgagaacagtgcgtttttgcgttttctgaattttaaatacaattttttcataaattttaaatattttcagatatatgcgcaatgggcgcggctttttgttggtgtattcggtgacggacgagcaaagttttcaggcattctctttttctttttttaatttaaatttaattttttgctaaattttccgttttttcaggaggcgcgcaaattgtaccagcaagtgttgcgggtgaaggacaccagcgaatatccggtgctgttggtgggcaacaaagtgagcagagaagggaattaaaaagagaaaatgacagagggaaagggtaattaaaaagggagagggactaattagtcgtaattagtacaaaaaacaaagctaatagactaaaaccaaatgccttttgtttctttaggttgacctgatcaaccagaggaaaggtaaccaaattttgcatttgccgctttttgatttgctttttccaaatgcctaattttgttttggcatttcccccaaattttcagtcagtgaacagcagggccggcaattggctgccgagttgggcgtgccgtacatcgaaacgtcggcgaaagatccgccggtgaatgtggacgccgcgttccacgaacttgtgcgcattgtgaacacttttccgagcgaggacagcgcaacttccgaggcaaaccgaagggggggggggacggacggcggagatttggggattttgagaatttggttggggattttggtgaagttttggggtcggaatgttttgtttattgcatttacaaaagagttcttggttcaattgcactttatatgtccaatggcattttatgcgtccaaatcgggccaaccattcaattttgcatattttagctccttccgactttgtgcctaaattgaaaatttaggccaagaaaaatgggcccaatcgaatggcgtcaaaagcaaagcgtcggagcagcgccggcagcaacaaaaagtgcctaattcaatga

SEQ ID NO: 55959 - DNA, 1100 bp, Heterodera glycines
atgtccgttaacaaagcaacggtcggtgccattgctctgtccggctccaccctgttggtgtgcctgtttggcattgcgtccatttacagtgacattcaagccatttggaacgagttggacatggaggttggtccgcagcaacagatgatcaagccacctttaaaatgaccatcattaagatggaccagtttaaaatgcaagcggacgacctgtggaaggacatgctgaagatgggtgccgggacggccgcgaatcgggcacgtcgcgaggcgtatgggggctatcaggtgagatacccaaaaaaactgaactttaccgttctggagactcgagaaagggtcaacaaaaaataaataaaatgaatcagacacactttgaaatgaacatttggcatttttaggcttccggcagccaaccacaaccatcccccggcgccttgtcttcaccgcaaggagtcgaagtgccgcccgccgttatgccgggattcgccccgggcgtatcgccttcggtcaacagtgtgttctcgcccactgctggcagcaacaatgtattctccccgttcgccccgactggcagcaacagcatcaacaacgggctgccaatgccttttggccagtcaccggacggacccaacggcggtggcactttccctggcggcttcatcaccccggccggctcgggcccaggatgcagtaggattttggatttttgaatacaaattgggataccggtatagtgggaaaaggaaaggaaaagccgagaaaagtcatgggaaccgccatccaatgcttttcttaaaatggttcgggtgtgcttcgatccctcactctttcgtcgcccttcccacactttttcttggccacgaaatgcccccctttggccattgtttttgcctaacttcgaatcaccaattgatattttgttggcactttcttgacttgtttttctcagagtgcaagtcgcgaaacacgtgccctgcgggccccgctggtccgccgggcgacattggaccctcgggcgtgcccggcatcccgggaaaagacggcattcccggacaggcggccgaagactcgcaaaacgcaccgctcaaaggctgcttc

SEQ ID NO: 55960 - DNA, 802 bp, Heterodera glycines
catttcaatcactgggactcaatccaccagaatttcaatcactgggactcaacccaccagcatttcaatcactgggactcaattctgcatttcaatcactggcactcaacctaccaacatttcaatcactggtactcaacccaacagcattccaatcactggcactcaacccaccagcatttcaatcactgggacttaattcatttcaatcactggcactcaacccaccaacattccaatcactggcactcaacacaacagcatttcaatcactggcactcaacccaccagcatttcaatcactgggactcaattctgcatttcaatcactggcactcaacccaccagcattccaatcactgggactcaacccacaagcatttcaatcactccagaattcaatctcaccaattcttcgaaacccaataaccggaaatgaatgataaaaccgacagcggctcgaccgcttagcggcctcgcactcttcttttggcattttcttatggcataacagttcttccttgtttcttgacattttcttacgacacaacatttttcttctatacaaatttttcaaacaaaatctcattcattcatttaaaaacataagcaaaacaatacctttcatatcaaaatcaaatcaatttaaacacaaacaacaaagaaagaaaagatacatttttaagactgttttttacactaactgacaaaagaaaactgtaaaacaaaaacatttcatttttcaaagcatttatacaacacaacacaatgttaatattataggattttcttactgaataaa

SEQ ID NO: 55961 - DNA, 484 bp, Heterodera glycines
atgataaagattttggtattgaggagcctgaacatttcgatgaaaatggtaaattaataaataaaaaagtaaaatttattttaaataaaaaagaaaatgcggctgctgaaagtacggaatgtccaatatgttgtgattatgtaacatatgatcagctctgtttctgtgatcatttaattggtgacgcaatttttggtagcagttcaaacaatgcacaaaaaggcatagcaattaaaacgaaaaatgccatttaattaataaatttaagaatcgcatgccttctgccgcgagtgccttaaaggctacacaaaagcggcactcgaaacgaaaccatttgcaagcggttggctggacactgaaatgcatgccggaaaaatgcgaaaatcctcttccatggtgtaacttttaatatatatattattaaatttttaaatcgattcattatctaataccaatatgatgtttcttacgtcacattatatta

SEQ ID NO: 55962 - DNA, 579 bp, Heterodera glycines
atgctgaccacgaatctgacgtttatttttaggcataaagtgttttgtacgtgagttacgtgaaaagcgaaactagaaaaattgaaagtttcgactttttgttcgaattcgggttcaaggttcgaattgtgtcgaaatggatgtaggaaccggattctccgaccgtgaaaacacctaaaatgacttaacttcgagaaaaaaaattttgaaatttttttctaaaggggggggggggttaaaatcggcactgttatctttttaaatttttcacgtaaaatttcacttaactcactggaaacacgtcatggttaaaaacaaaaagtcagattcgtcatcagcatcaaaaatgagcctagaaaaaattcttagaaaaaaaatttcagggggtgacaaaaacctaaagtacccaacaatgaccatatacattttgcccacctgtatgaaaaagctttttggcgattcaatttgttgcttctcattgctcgcagcagaaggtgttgctgcacattggtcaacttttgactgttcagaaaagctaaattctatgatttaaaaatttccaaaaaatattgaattaaa

SEQ ID NO: 55963 - DNA, 297 bp, Heterodera glycines
atgtcccacattaatcccttaaataaccgtccatactccagcaaatattttgaactgcttgaaacccgaaggcgacttcctgtagttaaatatcaacatcaatttgtccaacatctacaatcacaaaaacaatgccttttaattgttggagaaactggcagtggcaaagccactcaaattccacaatgggcaatggattttgttcacggcacagcacaaaaagttatttgcacgcagccacgaaggctggctgcgatgtgcgtggccaaccgtgttgcagaggaaatggatgtttct

SEQ ID NO: 55964 - DNA, 344 bp, Heterodera glycines
atgttctctttcgttgaagagggttggctgttctcggcactttccctcggcactctgttgggcaccattctaattggccatctgtgcactttggtcggttttcgtcgcacattcactgcctacggtattctgaacggactgggtacggtggcggtgccattggctgtcaaatttctcacaaagccattccattttgtggccatatttggcgcccgattcttccaagtgaacgttttatatttaaatttaaattttttaataaattttttaagggaattttcctttcgatgtcattggtggccattggtaatatgatgtgctgattaagtgtgataatgagcgta

SEQ ID NO: 55965 - DNA, 132 bp, Heterodera glycines
atgcctttgtccggctttttgtgcgactcttcgcttggctggccaggccgtttattatttccttggcattccgacgcttttcacattttcacttttttgtttgttttatcgggaaacgccatcacagcacag

SEQ ID NO: 55966 - DNA, 229 bp, Heterodera glycines
atggggatctgggtgagaaaagagaagggaattaattggtgagggatcaaaaatttttgataaaaataaattaaattatttattttcatttatagcatgtgttcgtatgcataagtggtcaagtggctaaacctttttactttcattatttgtctcttcggttcaattccctgatggaacagaaaatttttttatattttctttaccattatttaattgaatttaatta

SEQ ID NO: 55967 - DNA, 248 bp, Heterodera glycines
atgttcagcaacaacagttttggagctacattaattctctgttggatgggaaacaggaatcggaaaggtcgcagttttattcgtcgaaaaacaagtcaagagatcgaagataaaggggtcttcctgtttcagtcttccgactttggtatcaattacgacaagaatcgcccaaaaatggtcaaacgaagcgatgtcgaagaagttagaggacatcaattctctgatgacgagactaacccttcacaacc

SEQ ID NO: 55968 - DNA, 300 bp, Heterodera glycines
aacgacaagtcagcttattctctgtgcactgtggcctattcagagggaaaagacaagcccatccatctttttactgggctaacaaatggacaaattgttgagccgcgagggtcgcgcgagttcggatgggacccatgcttccaagtgaattaatgcttattcaaattaatggtttttatattcatcctttagcccgatggatttcaaaaaacatttgcagaaatgaccaaggaagaaaagaatcaaatatcgcacagagcgatcgcattagggaaattgagagaatttttgcaaaatgag

SEQ ID NO: 55969 - DNA, 255 bp, Heterodera glycines
  unsure (1)..(255): unsure at all n locations
tgctctttctattgtcgtttcgctgatttcttactctgttctnccattaccaagtagcacacttttattnntctgtccttatttcatatttagcaatccttcaacgaattccgactgcttgcgatggcaatgttttgctacggtttggcattgaaataggcatgccataaatcggtcaaaggaagtgatggagcggatagcgcgctcctttcactctgtgccgctgagttgacgacactgctcagaacgaatttg

SEQ ID NO: 55970 - DNA, 564 bp, Heterodera glycines
atggccaatgaatttgacccaaattggaatgacgaagaaatcagcgcacatatggggaatttaactgatcgtgaggctggaagcagattaatgcatccgagaccatcggaaagaagcctattcaaagatgacgagcacttttttgggattttgacggactatgaaatgcaaaaaaaggagataagcgaaaaggtgaatctgctctaatacttaggttttttccggatccttattttcttgatacatcttggtcgaagaaattttccgtcatataatgccaggagcttttctccgccgtttatccccatttttgaggcaatccatcttcttcacaagcatatcttgggcagtagggagccccacgcagcaggagtgtataggtcgaatgatcttctagtgcttgagaagaaaccgactgcagcgaaggaagtcccggcacaaatgaaggaattcgtgcactgggcaaacagcaatgaaaacaacggcgacatcgctcgttttgcagcgctagttcactacaagctggttaatgatagctttacttaaaaattgcaaaaaattaaa

SEQ ID NO: 55971 - DNA, 1108 bp, Heterodera glycines
atggaaaattcgctgagaactgatgtgctgctacctcatcacccaatttgcagttttggcccttgcccacttgcaacattcctcggtaaaagccggatgtggggtggactccatttttttgcgaaaaaaccaaaaaaatttacataaaatcttcaggcaaagaaaagacaaaaattggtatcgaaaagtttgtttattttctgtttcacactgctgctctgcatttcacttctcacaaaaacattatcatttttcatgctgtgatttcatacccattttttatgctcgaaattccgacaaatttgatttttttttttaacttacatatttaagtaaattttcgtatgttttcatttttccaaaatgtagataaagaaaattcggccctactgtcgaaatagttggaacgtcataactttttttcttcgttcatcacttttaaattggtatcatttgaaagctcttcataatctgtacaaaaaatcaaaaataagcaaaaatacattaaaaatctgaaagaaaaacgtatgtatgacgttccaaatttactgggacagagtgggcgggaaagagttggtcggatttgtagggcaactgaaacattttttattgttatttacgctcaaacctaaaaattcaaatttaacaattatatcggaattccgagcgtaatcaagcattataattacaacagaaaacagctagttttttcaagggatttttcttaaatcgagattaacttttttttcgtgtatcatcgtcaaattttattttttggcatttttaagccattttgaaactgtaatgtctgttggcataatgtccacttctgttaaagtccatttaatccagtcgcaatttgccgggattctgacaactaaacgaaatggactattttaactgaaaaaaatgaaaatttgaattttggatgaaaatttttccatctattttccgatcaatcgaaatggtttaccaaattttgctgctgctttccgggttccatccaagccgagtccaattttcttcgtccaaaattgcttttccaaaaattcggggcaccgagcgcaacatctggagcctacaaacagttcacgaaattttgttcaaa

SEQ ID NO: 55972 - DNA, 1608 bp, Heterodera glycines
atgaatcgacggtaagcaatcattaaaaaaatgtcgcaaattttcatttcactattttttcatgtttcagttgggtgtgcaacgacgtgtggatggacattttcccatcgtttgaccgtgctcaacttggcctcaaaatggcattgctttcgccacgttttgatgcgctggtggacaaacattttgacggcaaaacgcaatttacgatttggaaagcaattgaaattcgcaaggacactgatgaaatgccaaaactttttgttgaaggcaaatcggagggatttccattgccggaccgtccgctgcccaacaaaatcatcttttccagctataagcaacttcagattcagtaaattcaaactgattgtgttatttttttcgtattccttcaacagtttccccttttcaggtacattgatcacttcgtcatcgaatttctccgttccaatcagcagatttgggacaaaggcaccaaattgaaaatcattgtttgggaaaaaaacgaagataacaagccaattttggatgatgttgtccgtgaaatatggccattttttgcgacaaacattcgccaatttggttttgacggtgccgaatttttggacaatttgcgtcgactcatttcgccaacaattctatccgatcttgatcagttgaattcaatcctacctggtgatctgtttcccgatgtgcttgctgatgatgattttgatgggccaaatgcgacttctgccggccaagcgttggccaaatggttgcacaatccgagaaaagatggccaaccaaagtcattgcattgctgggaaatgatggcatccacaaactttgaatggctcaacagtttcaaggaggtcagtttgtcgttacaatttcatatttgacaatgtacgaattttggttttttgtttaggtttttgtccgtgcccgcacttctgtcagttacactgtctactttacttttttcgtctctgcgccaattgagccatttgaattggtgaatgaacagactaaagaaaagctgacattgaagaaagaatcggatattggctcttctcattcttggctgttgaagtgatgtccaattactattgttggggaggagagggcggaggcggttcagaaacaacagcagcagcagaagaaaaaagatggaaattttgcgaacagattgatcaatgtctatttcaattttagtgcctgcaaaaattgccttgggtgagcaaaaaaaaggcaagaaaatggacctgactgggggagaggttaaatttttggcgaaaaccaaaaaagcgcactgatcaagatgtgaagttttttttattaagttgaagaaaacaaaacaaaatttatcagtagattcgtcaattaagaagatttccgaaattaaaatttttaaacaatgggattttttattttggtatcatcaaatcattttttttttcaattttgtaaatttttttctaaccctcctcctcttgtccatttagggtgacagcttttccttttgttttgaaaataatattcaaatttcattgaattttcaggcctttgtctccacctgcagcagcagcagaaaaagaagcgagtcaaagcagcgaaaagggcgtctaa

SEQ ID NO: 55973 - DNA, 1567 bp, Heterodera glycines
atgtctttgttgagagctcagcgatttgttgttgagcgctttgatggctgttcggtttaccacactcctttgccatatgaatttgtggttacgaacttcacaaaaattgaagttgttcagtttgctccaaagcttgtggaatcttttgagaaattgataccgggttgtctttatagtaagtttaatgatttaattaattttaattgaaaaattcaaaacatgttttaaagatgttttatgacatagttagcacgagaaaagctgtcaaaaaaattttgcacattattgtgctatcatgttttgttgatcacatctgtgtgggattttgtaaacaagaatttttttagtgtatttcattgttagtttatttttatgagatgcacattatgtgtcgttaaggtttttgaaattgcatttttattaagcaatgaattgtgctctggcttcgtcgtttgcaccaatcggaaaacaacttgctgcagtggttgctgacacgaaaggaaaaagggctgacttatatgttagtggagaaaaattggtggagcaccttggttctttcagcaaaaacatgcagataaacctcgccaattttttttgttaaagtgcaaggtaaagacttttttgtctaaagatttaaatgaggtttgaatttagtctttttatagatgaatgtcttcaaattcactgcgaagttgcatctattaaaattggagttggtcgcgttaattttgaggaaatcttgacgactccagttaaacgtcgtagttcagaaacttttgaccaaattaagaagtcgcaaaaaaatgggtagtctttcgtttgttgttcgttgttttgatttgatttgcgactcagaccttttcagttacggttattatgttgattttttgtgatgcttggttatttaattatatttttgatcttcacatattatcaaatacggatattattttcttttttataatcatatttaaacatacattgaaattgtaatttgttagaaaattgttaaaatttgataaatgattgttttgggatcacaataatgtgcttctatgttattagaaacctaaacaagtgtgaaatttgttaaaaaattcatttttattgtattgctttgagatacacagtgatgtgcctctcaagttttagaaacccacacaagtgttgaattttgtcaaaaagaattctctgttgttgtattgttttgagatgcacattactgtgtctctaatgttttagaaacccacacaagtgttgaattttgtcaaaaagaattctctgttgttgtattgttttgagatgcacattagtgtgtctctaatgttttagaaacccacacaagtgttaaattttgtcaaaaagaattctccgttgttgtattgtcttgagatgcccattactgtgtctctaatgttttagagaccacacaagtgttaaattttgtcaaaaagaattctctgttgttgtattgttttgagatgcccattagtgtgtctctaatgttttagagaccactgacctaagaaatgctatgaatgttgtaccatatgaaagtgccaataaa

SEQ ID NO: 55974 - DNA, 726 bp, Heterodera glycines
atgcataaggggtgcagcaaagttccatccacctccgatgttcggtcaccatctgtgaaacggaagcgtatgatcagcaatttggagattgaagaggatgaggagattaccacctctgatgaggagcgcgaggcgactgccaatgctaacaaagagccaggttcatatttgtttagccaaaaacataaaaaattacggcacttttggtgtcggggcacccctgaaaaatgccaaaacgtgaaacccttttcattttttttaataataattcgtaaaaactttttctcttatccccgaactcataaaattcaatttttttttaaaggttcaaagtagagttgatcgggactgggaccaaaacacggacaaatgagtaccaaggtcccggttttgaccgggaccgggaaattcccggttttcccagccaaaaagtcccggttttgcccaaaattcccggtcacgctcaactctagttcaaagtaaaatgaattaaattatagtacttccaactcagaaaatgatgacgaagacgaggaggaggagagtgaagatgaggaagaaacgcctcttccggaagcgcttgcagtgacgcgctcacggcgtgcaaatgccggccgacgaatggccgaactgatggcacagcaaacgaacgaaaaggacgatttctacggcactttgtacggcggatttgaagaggtttttcttttttcgaaaaccatattttaa

SEQ ID NO: 55975 - DNA, 933 bp, Heterodera glycines
atggggatctgggtcaaattgctgaccaaagttggaggttagaaaaatttaaaaaaaaataataaaatatttactttaaatgccactatttatctctactgatatgctttaaaaattgaatttacgtattaatttacgttatacttctatcgccaaaatagttatattctttttgtttttcatttccttctttgtccaattcgctcgcatagcgatttttaaaggatgcttttgaacaattatcccatgccgaaatattcacataaatttatataatttttaaaatttcagctcattaccccctcaaaataaactgtatcagtgtttcggaagtgacgagttgataaacacaaataatctctgatttataatgtagttaagcaaatttttacaggcgttgtggaaatatcgagttgatagcgccaataatcaattgggcccggaacccggcttctctgtgcccggcaaaacccggacccggttttaccaaatttccatttcatttttttcaaattttcattttccaatttgttgcaactttctcatctcttcttcttccaacagcaaaaaaaaaagtaatttatggcgctgttttttgaatgtgaatttttcagcttcagtaaaactcatcaatttttaagcgctgcaacaaaataacgctgaaaatagcactcacgcggacaaaagcaaattggacggacgcgaaaaatggattctttgctgctttgccgcgggcattggccaaaataagcgcaagaaatattttaattaatcggaaattaatttgagaaaaaggcaaaaacataattttaatacttaatagggtatttatttgctgggaaaagttaattaactttattatcctttgctttcccattcacctgctgttgctcacacacatttgatctctcaatttcccatttccaaaataaa

SEQ ID NO: 55976 - DNA, 1165 bp, Heterodera glycines
atgctgaacccgttggagcgtcaattcctcgatgcagccgaaaaaggcaatcggccggtgctggaagcgtgtttggccaagcaattggtgggcatggccaagggacagcaaccgatcggagagattggaaattgagtaaaaggattttggaaaggatagcctagcaaaaaaataaattggggacaaagggcggcaatgggaatttgggacagaagcaaacaaaacaaaaaatgccaaaggaatgtgggaaaggagaagtcgaattcgatggaggaaatacccccccccccccaaaaaagtgccaaaaaataaatctcaagagaaaagcgccgctgaatatcaatgcggtggacacaatgggacggacggcgatcgaaatagcggtggacaacgaaaatttgggtaatcttttgcttaatgggaaggcaaaaaatggcactaagcagaagaacattaattaaacaatctcagaaattgtgcaacttttgctgcgacaggtgagtacggcacttttccccgcaaaagttccataataattgcacaattaattattatctctacagcccgacgttcgcatcggaaacgcccttttggtgggtgccaaattttggtttgccattcaaaaagtgacatggatggcactccaaatgaaagcaatggccattcaatgctttacctttcccccaccaaagtgtgccattcgcgagggtgtctatgaattggtcgaagtgagtgggggaacaaaagggcaaaaccaaaggaaaacccaacgaatcaaaaaggtactcgtcaaccacccgtccatcacaagtaagacaaaggcaaatcccaacacaaacatatgtacagctaagcttcgttcaggggatatgctcggcgaagggtgggccaaatatttggatccgacggagacggccacttcggagtactcgaggttggtctgctcggattgggttcgcccgggttgggttgtgttgcgggtactgcttggcccacttatctctctctccctctcttcgctctctttgtctgtctctctctctgtatatgtttctttttcagtgacatttcgcccgttattatggctgcccatttgatccaattcgaaattctgcaaatgcttctccgaaaggatgcaaacattgagaagccgcacaagcattag

SEQ ID NO: 55977 - DNA, 1318 bp, Heterodera glycines
gtggtcacatggtacaacacgggctcagccgtgtcgggtcgatcggatttggacggaggacaattagccacttaccaggccatttggttgactgatcagccgggaaggttgagctacgtgatcatcaactatgataagctgggctttgatgctgctgattttcgtgccaactcgcgcagcggacgatgccgggtaagaaatgtcagagagtgaccattaggacatgtaattaaatgcacataaaatcgaaaaattttagcagcaaatgcaataattttttttaaattaaattaaattccaaaaaatttaaacctaaacctcgaaaatagctaagaaaataatatgaaaaatattaagcgaatttttattaattttgaaaaaattgagttaaaaaccgaataatttacatttttggactttctggcataaatatcctatttcgcgaaattgtacaaatatgcaaaatatatacgtaaaaagcgaaaaatatgggcataaaattttccaaaagtgagcgtaattttctccaaattcgttaaattctcgaaaatggctaatgatggcatgaaaaatcattttatgagaaaatataaattaaagctaaaatttttattttgaagaaaattgagtaaaaaaatctacgaaatttttcggatttgaacttatttttggcacaaatttctcatttgcaaaacattaaaacttagagattttatgatttataagtgcacacaaagaactataaatgatacaactaatttgaaagccaaatcattaccatttgtagtttaaaaactgcattattttttaataaaattttaataaaaaaaaaaaaatcaggcacttttcaatggtggcaatcataccggatttgttgacgtggacccaacccaactgtacaaaaattcaccaaaaattttggcacaacgctccggcgtgccgcacatggtccgcgggcgatacatgttcagggtggacgatgttgtacggcctggtggatgctccaacaaaactggcggaacatgtataagaatatttattatgaaaattatggcactactttcaaagtgttaattttgaaattaattaaaaaccaaaggtgggtggaacccttttggtttccgacttccttctaaatctggaaaaatatcattaatcgaaaaatttgaattttattatgctcggttcgggttagggcttagaaatggtcaaaatagatgtcaggtgcaggattccgaaatccctcgggaataatttttagttattatgacataataatttttcaaacaaatagggttccccatttagttataataaa

SEQ ID NO: 55978 - DNA, 304 bp, Heterodera glycines
aaaattccctcaaaaataaaaggtctattgcgcaccgccctccctatcatgctcgagagcatttgtatgtgtataaaatttatcaaaaaaagagatatccatttttctgggataacctctaaatataaaaatcctctgtgaaataaaatggcgattgtgcacagccctccgtctcatacgcaagcgcttttgtgaggtataaaatttctcaaaaaaagagatagccatttttctgggatagagtataaatttaaaaattccctcaaaaataaaaggtctattgcgcaccgccctccctatcatg

SEQ ID NO: 55979 - DNA, 720 bp, Heterodera glycines
atgatgaaaggtatcagagaggccatcgaccaaaagtacatcaaacaagcattcgtgatgatcaacgaggacaaagaggacccggacgtatcgttgtatatttcgattgcttattcccttgcattccttcaggtcgcaactgaagttttctcagtcggtttttgttacaacgaacagcacacgatgactgtcttggagtaaatcgcaaagaaatcttccattatttgcacatcactcccttttctttcagtgacaaaggcaatcgtatcgtttcatttggctacaaaggggagaaggtttttcgaatgcaagtgaagcacatcatcaagaagctcagtgtggtcactaagaatctggagccgttgaaaaaaggggccgtgccttatttgaaactcacttattacgagagtatgccgttttattaattgcatgaatgattgcacctttttagacacgccggatgactacgagccgtcaatgttcaagcattgcgagaacacttacaccttcaacaagtcgaacccgccaaccttttacaaattcggtgacatctccaacaaagaaacggcaatttcattcgtgctggagagtgtatacatcaaaggggccgacgtggccacccttgatgacttgttgtttgaccaagctgggtacaaagataacgacgaggtcaacatgttggatgtcactgcggaagggtttttcgcgtcggaggaagtg

SEQ ID NO: 55980 - DNA, 656 bp, Heterodera glycines; identical to SEQ ID NO: 53175

SEQ ID NO: 55981 - DNA, 1081 bp, Heterodera glycines
atgacattccaatctctaggattcaacccatcagcatttcaatcactgggactcaattctcctgcatttcaatcactgggactcaattctcctgcatttcaatcactggcactcaacccaccaacattccaatcactgggactcaaatctccggcattacaaacactgggactcaacccaccaactttcaatgacattccaatcgctgaaactcaacccaccagcatttcaatctctgggactcaattctcctgcatttcaatcactgggactcaattctcctgcatttcaatcactggcactcaacccaccaacattccaatcactgggactcaaatctccggcattacaaacactgggactcaacccaccaactttcaatgacattccaatcgctgggactcaacccaccagcatttcaatctctgggactcaattctcctgcatttcaatcactgggactcaaccgcagcaaatttctttagcatttttaactttttgtgtgccttgggatgttgaacagttggggagggctcggccgcttcgcggcctcgtacgggggccttcgccccccccccacaattttttgcgccaaaggtaccatcatttaatcactgggacttaacgcaccaacattccaatcactgggactcaacccaccaacattccaatcactgggactcaactctccagcattcaatcactgggacttaacccaccaacattccaatcagtgagattcaatccaccagcatttcaatcagtgggactcaatccaccaacattccaatcaacgggactcaatccaccagcatttcaatcagtgggactcaacccaccagcattccaatcagtgggactcaaccctccaacattcaatcactgggactcaaccctccagcatttcaatcactgggactcaattctcccgaattcaaatcactgaactcaatctcatcaatccttcagcaacacaattaccgggactcagttctccgacatttcaatcaccggaactcaacctcagtaacggaatacagaactatttaaaaggaatccagaaattgaaatataacccata

SEQ ID NO: 55982 - DNA, 900 bp, Heterodera glycines
acaagaaaagaatgaagttgatgcctcatgaaactcggaattggttatgttttgtcgaaaatatccttacataatactcataaaaaaaattcaacccatctattctatgaccacattctgaaaaaaatcccagaaatacgaggaaagatatgcttggtcacaataaaataaaaaatggctagtatgtaaaaatttgcggtcacaaataaaataaaaaatggctaatatgtaaaattggcgtccagaaatttttagactaatccgaagcaaagcacgaatgaattaaagaggcgaaagaattcacagtatcgtttctaatagggaaatattgacaggatattcggctaaaaacgggtttgatcatttttagcgcatttttaggtatacatttgagacaattgggcaggacaagaaaagaatgaagttgatgcctcatgaaactcggaattggttatgttttgtcgaaaatatccttacataatactcataaaaaatacaaataattcaacccacctattctatgaccacattctgaaaaaaatcccagaaatacgaggaaagatatgcttggtcacaataaaataaaaaatggctagtatgtaaaaatttgcggtcacaaataaaataaaaaatggctaatatgtaaaattggcgtccagaaatttttagactaatccgaagcaaagcacgaatgaattaaagaggcgaaagaattcacagtatcgtttctaatagggaaatattgacaggatattcggctaaaaacgggtttgatcatttttagcgcatttttaggtatacatttgagacaattgggcaggacaagaaaagaatgaagttgatgcctcatgaaactcggaattggttatgttttgtcgaaaatatccttacataatactc

SEQ ID NO: 55983 - DNA, 476 bp, Heterodera glycines
atgctaataacgcgtttcaagggctatgttatgataccaagattgtgcaatttggttgagtctgagaaaagttatgagttgatttactcaaaaatttagctaattttgcacttttcgtcggttgacatagcaccaaatttaccatatttttcgaaaatttgaccctcatgctcagaattctgcaatactgtaaagctttaatatgttccaaaagtcccatcaataaataaaaataatttaatcattgatttttttttagacaattcaacccagaaatttggtccgcaaatgtcggggctaacatcccctccacccgccccactgtatcgttcttgaaattttttgcttttctagctttcttagatgttttttcttgaaaaaaatctctatcttttttttcacgagatgcgacgagttttgtttaaaagttgattttattaatcatgactcatcattatgtgccattaattcacata

SEQ ID NO: 55984 - DNA, 307 bp, Heterodera glycines
atgaacaaacggaccaaaatgaagacaaaaattgcactgatcatttttggcactaccatttgctggctttcggtcagggtcgttttcgtaccgccgttttcgtacgggggacattttcgtacgagttcttgtacaagcgtcaaattcaaatataaaaacttaagaactaataaaaccaaaatttatcattttttgtttcccattcataaaattttgtagaaaattcataactttataataataacaaaatccaggacaaactaggtcgcatctcataatttcggaaaatttttgatttgtaacacca

SEQ ID NO: 55985 - DNA, 686 bp, Heterodera glycines
atggaatttgcgccaccgaagttcgtggagccaaaaaagccattaaataagaagactgcagggcggtaagttaaaaagaaatttaatttaaaatcatttgtccattatcgaattctcatccgattataatagtcttggataatagattaagctgaatttctcagattttggcacttgccctcgcggatggcacttctttgatcgactgtcttcggctttatttgcgtctcaaagacgacgtcttcggcccggaggcaaaagcaagccgttttggcggatacaagccggaatgccttgagaagtttttgcaagatcactttggcaagcagcgaaaaatgtccgacattcgatgtggaaaaatgaagtgagttttgaaagaaactgacaaaaaataattggttttaaatatattataaattcatttatatttttatcatttcgtttttattattgctatataattaatattttaatgattgtccaattattgtttttttgcaggattttcgtcactgccacaaaagcggagcaaattcccatcgaattggtgctgttgcgcaacttcaactgcccctttaacggctctgaccatcacgcgcctggcaatgtgtgcatttggcgggcggcgcgctattcgagtgctgcgcccacttactttcccagcatggacggactgatggacggag

SEQ ID NO: 55986 - DNA, 742 bp, Heterodera glycines
  unsure (1)..(742): unsure at all n locations
atggctgcgagattnggcatcagattcggcttattgatgaatcttttgttggacactntggtgaaaaatcaatcaattagtttaatttaaatgtaattaaatcagggctcncaagtgtccttttttctaagatttttcctttttttttggcaacacctctttgttttgtgcttattttcaaaaactcaaaaaagcggcgatttttaatcatttgttttttttcaaaaaatcttatttttgtagtcaaaatcttagttttagcatcgtttgtcctttttttgaagaaaaaacttgggagccctgaattaaatacaaatttaatattccaaactgtgcgtttttgcagactgttgcttctgaactgcttgaaacaatggcaatggctgatatgtttttcccgtctgaccattttttttgcttccccgatgcctttgtcggcactttgttggtacatacaataatcaaaatttaggtatcaacaaacaatgcattaacatttagaatcaacagtgaaattataaatggcgccgaaaaagagagtgatcaaaaaaaacagagacgacagatacaacaaaaagagacatgcagagagagagagaggggggagcagagaaggagagagaggaagctgagaaggagagagagagagagcgatagagagagggagagcagagaaggagagagaggggggagcagagaaggagagagagaattcaatcggattttaatgtcattaaataaa

SEQ ID NO: 55987 - DNA, 57 bp, Heterodera glycines
atgcctatatatcgctgttaccatcatcattttgctggttcgacaagccgagctacg

SEQ ID NO: 55988 - DNA, 477 bp, Heterodera glycines
atgtccttgaataattgggtaaatgacgagctgcataaagtcattgggtatagtgactcatcaactgttgcctatatgattgcattggcaagaaaatccaacgattgcgacgattttcttaaacggctgcaggatgtcgttcctacgaataacctaaagacatttgctgagaaattacttgagcgtgtaccccgtgccggtatgttctttttaagaaatgctcgggaatacccatcgtctttagctgccaaaaaagttacgccaattacgaagggaccttccgagtcggagttgcaaaacttacggttgaaaaatttgagtgcaactttaaaaccattggcctacgaagtggaagagcccggaacgagcacaaaagaagcaaaaagtggaagggagaaaaagaggacgagaaacacgcggaagaggtgggaaagcagcagcagttcttcggaagacgaacaaccgaacgaagtggcg

SEQ ID NO: 55989 - DNA, 440 bp, Heterodera glycines
atgtcgggaccccaaatgtcgggatccacaaaagtcgggtccccaaatgtcgggtccccaaatgtcgggtccccaagttgcaaatccccaaaagtcgcatcacggtaggaaaagcaatgatatttaaataaattttagacgggaaagggtaaaaaaaacggaaaattaatgaaaaacgaaaaataattaacggaagcagcaaaaataaatcgtagacaaatttattaatacaatcgtaaagtaaacaaaataaggacggaactgttaagcaaatagtgaataaaattagactaaaatgaataataataaaaaagggaaaagcgtcaaagcgtaaaataaataataaaaaaagcatttttaattaaattttccagaaactcaggcggaaaacccggtacatataaaagccgaacggatttcatcctttaattgaatattca

SEQ ID NO: 55990 - DNA, 87 bp, Heterodera glycines
atggcatttttggaagcaaaaaatgatccaatgttggtgttcgacgaattgatgttcaaatggttggcattctcagaagcagataat

SEQ ID NO: 55991 - DNA, 119 bp, Heterodera glycines
acgacgacattgggccaaattttggtggaaaaagggaccggagtgacaattgacttgtacacttttcatcgaaataaggagttatggggtgacgatgctgacgaatttcgaccggaaag

SEQ ID NO: 55992 - DNA, 271 bp, Heterodera glycines
ggtgtcacaaaaattacagcggacaattgaaaagacgcgccaacacggcggaatcacttcgctggccgcaaagagtcacgggtcgaccgcagccggcaccgcttcgagcatttcgtttacacctgtccatgggttggaaattgtgacgccaatgcaaaaggaggaggcgtctgggaaggcttcgacttatttcactccgtccaccaatttcatcgcccccacaaagccggccattaaaaaagtgaagcaacaaatgcaaaaaatggagtga

SEQ ID NO: 55993 - DNA, 761 bp, Heterodera glycines
atgacctttgatgtgattacacgcgtcgcaatgggccaacgcgagtcgcgacaattccattcggaggacgccaaatgggccgttgccgcatttctgcggttccaaaacaattggtaaatgatacggatttaccagatcataaaaaacatatctctggatgaaacagttccttaaatccgctaggggttgggtaaaaatgaattaaaaattttgcttttttcaagtggttcttcataaaaaatttaaccaaggtttgagtatttggccaccttgttcccgtggcttggtgccaaggtgatcaagccgttcattcgacagaccggcaaaatccggcatgacccgttcgcactgatggacaacaaaatcagggaagcggttaaggaacgacgtcgaacgagacaacatcaccatgaacaacaacatcaaaataatggcaacaataatcaattcgaaagtgatcagaaacgacaagtcgatttcattgatctgtttttggatgcggtcacggatgaggagaacattgagtacaagaaccagttttgcgtgttcaacaaagctgtcacaaaggtggtggggtgggccaaatgcaataaatttttatcattttttcttattggtttaaaatcagagtttttatagaagtttaacaaatacgcatatcagtgagcacatgaaaagtaaaaaatgcccattttgtgaaaaaatcaaaaaaaaaaacggaaaaatcattctaacggaaaatacaaaccattttgaataaa

SEQ ID NO: 55994 - DNA, 369 bp, Heterodera glycines
atgttttggttaattctattacaaatttcattcttattcttctgtttatttctcgccttttatttgtaagtcaaatattttgctcaaaaacctaattaattaaaaaattaattaattcatttgtcgatttcaagtttttggctttaccgtgccgcctattggaaacgccgaggcattccctgcccggatggaaagctgttcagtggcaatttggacgaaatgttttgggaggaaaagcttcgcttctttcaattggccaaatggacggagcaatacggaaaggtcccccccccccccctcctgggtttttatgacaagttgttgacctacagtggttcattggtttgccatcatacattaaaaaggggg

SEQ ID NO: 55995 - DNA, 163 bp, Heterodera glycines
cttaagttaaaaatttaggaaaattatattctgaaagagaacaattaaagctattgaatgataccacgaaatattaatttggttgaatttgagccaagctattaatttaattattttacccattttttgttttcaaacccattggcagttttaacaaacgcgc

SEQ ID NO: 55996 - DNA, 818 bp, Heterodera glycines
acaaaaaaatcgattttttcaagtgtccgtttggggtactcaaacatttatggggagcaaaaatccaacgcagaattaaagtacaggctatagggaagctattcccgaaggattcggtctccccataaatctgggcgcatcggttcggggggactgccccgaaaacaaaaaaatcgattttttcaagtgtccgtttggggtactcaaacatttatggggagcaaaaatccaacgcagaattaaagtacagactatagggaagctattcccgaaggattcggtctccccataaatctgggcgcatcggttcggggggactgccccgaaaacaaaaaaatcgattttttcaagtgtccgtttggggtactcaaacatttatggggagcaaaaatccaacgcagaattaaagtacagactatagggaagctattcccgaaggattcggtctccccataaatctgggcgcatcggttcagggggactgccccgaaaacccaaaaaaaaattttttggataaaaattatttaaatgaactgactagataatatttaaaataggttatttctcttcctttcagtatccctgcaaagtttggtgcgcttctgatcagtttctgaaaaaaaagttaagcctaaactttttggcctgtttaaaaaggaattaaaaatttttaaaaattttattcatctccctttttgatagaaaaagcatcagagtgcctaaactaacatgtaaataaaatttggtgcgtttcagaaccctttctgaaaaaatatttaagaattaattttgcaaaaaataaataaaaacgaaagact

SEQ ID NO: 55997 - DNA, 235 bp, Heterodera glycines
atgcaaacatatggatgggcggagcgagtgagtaattgaaggctaattaatattgctgttcgagattctcggggtcaagtctcgttctcggaaatttttctgtagcgttactaattaaccgtaggtttgggtaaaactgcagaattgcagctcgcgccaattaaaaaaaatgcgaataaggcaatacgagatgcactactctgaattatgcattttattttaattctgcgcataa

SEQ ID NO: 55998 - DNA, 730 bp, Heterodera glycines
atgtttaaattgtcttttgtgcttttattctgtaccatttgttgtaacgcaacaaatggtacaactgctaatgaagaacaaaaagaggaaacaactgaacaattgcaaggttttttttttaaattttatatttataaataaaaaaaaattaaatattttatatatttaaaataaatattgaaaatttattagttaaaaaatcaaaaaatagcaattttcaaaaccaatcatttgtttaattaattttagaattattttttgttactaatatcattaaaaatttgatataaacataattttttttgtatttttttaacgaaatcataagtcaaaaaaactttaaaattttcgaaaaattatcactaattaggtaaatacatatttctatttatatatttaaacaatttaaaataaaataatttttagtgacaacgcctcaaccaagtacagctccaacttttgttcttgatgaagaaaatgtgcaaaccttggtggaagatgcaattgactattctcacaaagtttttctgattacaagattgcctactgcgaaagacaagtaattaaaattttaaaaaattaatttgaaattgatattttaattaatttagacaatttaaattaataatttaattaatttaggagtaacatgtccgtttttgcacccttcacactgttcccctccccgtatccgcgtgaaatgtacaaacaggctattgacgtggcaaag

SEQ ID NO: 55999 - DNA, 1366 bp, Heterodera glycines
atgcgcgaaatgattgttcaaaacaaagacaaaatttgcgaggccatttacaaggacttgcgacgtaacaaggagacaaatatgaaaatggaggtgaatttcgtattatttgcggtattttttgttaacttttagtaaagatgtttaatcgcgcttattaattttaaaatatcatttagttttctcgtttttcaggttgatgggcctttgcaagccattgactattgtctgtctgagttggacgaatggatgaaaccccaaaaggtacattagaaaaaacggaattttgctgaaacacactgatacatttgcatattttagctggatgaccaccaattgggcaagccgttggtcatttttgagccgaagggcgttgcgttggtgatcaccgcttggaattatcctgcagccctcgcttttcaaccggccattgaagcaattgctgctggcaagaaaacttcgaaattttggaaccttacattttcaatttcaggaaacaccgtggtgatcaaaccgtcggaagtgtcgccgaacacttccaaattgttgaaggaaatgtttgatgccacttttgacaaagtgagtttgagttgaaatttaaataaaacacttacaattaaattgttcaataaatcaaataattaaaatgatatttattataatccgtagaaattcatcgccgttgtggagggggcggcccccgaaacgcaggcgcttctcgaccaacgctttgaccacattttctacaccggaagctcgtcaattgccaagctgataatgcaagcggccgccaaaaatttgactcccgtcactttggaactcggcggaaaatggttggtcgttatgcttcattctgattttacttttcaactgatttagtccggtggtcgtggagaatgacgccgacttggagaaggctgctttgcgtatcgcagaagggaagtggttgaacagcggacagacttgcctggcgccggactacgtcatgaccacggccgagatgaaaccgaagctggtgaacgcactgcagaagagcattcagacgctctacggagagaatcccaagaagagcgagcagtattcgagaatggtcaatcaacgccatttcgaccgagtgaaggcgttgctggacaagacgaatgggaaagtgctgtacaagaatggggagccggaccgagacgatgtgttcattccgccggtcttggtggatacggacttgaaggacgcactgatgcaggaagaagtgtttggacccgtgctgcccatcctcaccgtgaagggacttgacgaggcgatggacgtgatcaacgacggagaaaaggcaaatgcttcgagaccaaatatcaaaataaatttgaccctttag

SEQ ID NO: 56000 - DNA, 714 bp, Heterodera glycines
acactgggactcaacccaccaacatttcaatgtcattccaatctctgggactcaatccaccagcatttcaatctctgagactcaattctcaggctttccaatcgctgggactcaacccaccaacatttcaatctctgggactcaaatctccggcattccaaacactgggactcaacccaccaactttcaatggcattccaatctctgggactcaacccaccagcatttcaatctctgggactcaacccaccagcatttcaatctcggtgactcaaatctccggcattccagacactgggactcaacccaccagcatttcaatctctgggactcaattctcaggctttccaatcactggaactcaaatctctggcattccaaacactgggactcaaatctccggcattccaaacactggaactcaacccaccaactttcaatgacattccaatcactgaaaatcaagccaccagcattccaatacttggactcaacccaccagcatttcaatctctgggactcaattctccggcattccaaacaatgaaatctccggcattccagacactgggactcaacccaccagcatttcaatctctgggactcaattctcaggctttccaatcactggaactcaaatctctggcattccaaacactgggactcaaatctccggcattccaaacactgggactcaaatctgcggcattctaa

SEQ ID NO: 56001 - DNA, 998 bp, Heterodera glycines
gaggaggatgatgtggagaaaggacgcacaaagaacccttttgatcagcgtaaggaagaagatgcagaattggatcgttagcaaatttcaaattggcaaaggattggcattatgttttagaaacgcatttgcctaaataatataattttttctaatgcctacataagaattaataattttcttagaagtgacaatttcgacgacagcgatgagtgccggtactcaaaatgcgacaggacagggccacgtgcacaaagtgataatggtcggctcaggcggcgtaggcaaatcggcactgacacttcagtttttgtacgacgaggcgagtgattttagagagaagggccaattgaatgtgtaaggagacccgagaaataatttcgaaaaaatggtagtgattggagttgttttatacagttttgatcaattgtgcttatcccttttcatttaattttggactttgatattggtgtttttcatatttacacatgccaacactccctcccccctccctccgctctgtcttcactggaataatttactttcatatcacagtttgtggagaattacgaaccgaccaaagcagatgctcacagaaagcaagttgtgttggacggggaatattgtgcggtcgacattttggacacggcgggacaggaggactattcggcgataaggtcggcaaatggttaaatagtttttcggaaattacaatcacaattactctcttttatttcttaaactaattcagggacaattactatcggtcgggagaaggtttcatctgcgtcttctccatcaccgatttggattcctttgatcaactcgtcgaatttcgggagcaaattttgcgtgtcaaaaatgccgacccaaatgtttgcattttgttagtcggtaacaagtctgatttggacgcggaaaggaaagtgcctttggagcaagcgcaacaacgtgaccaattccaccaacgatggaaaggagctcttttttgcatttag

SEQ ID NO: 56002 - DNA, 1959 bp, Heterodera glycines
atgaactccgacaattcgagtgctatcaacagcaaatccttcgatcaaatttcggagattggatcaatggccacggacggactgcttcaggacgacggagtgccggattatgcaaaaatcataatcaaacagcagcaggcactcattgccacgcttatgaacatgcaacagcagcagcaggaggtcattgaaacaaggaaaatttggcgtgattggttttatgagccgagattagtccggggaaatttctaccgacggcaattataatttgttgagaaataaataattgaaaatcggctgttcagtctcggtacgcgtcgaccatctcactttttcaacagcatcagccgcactttctctccaacaacgattcgtcctttccccctcctggcatccccacccatccgtctcctccgcccggcatccgtccacccgtctctcccgcgccagtgtcggcacctccgccgcctccaccgggctttcgtgcacccccaggcttcaacgtaagcgtcagttcccgcaagttcgaactcgactccaccaaatccgacaccggcggctcccacaaattcgacatcagagaggagctgaagaaggcatttgccttagacgacaccaacgaaaacgacagctcctccgccgagcagcagaatttgtcaccacgttcgcagaacattcgcgaggcacagaacgcgcgtctgcccatgtcgagcagtttctcgtccatcgaaaatttgcaaaatttcaccggtttaagccaacaggtgggcatttcacagcaaaaattacgaggaaatattacatacaaaagaaatgatagtgaacattcttccttccatttcctttgctttttaaggactcatcttcgcccgtctccgcgctcagtcggcagcccatcgccgcggccgttccgtctcctcagtccgcgtcgtcgtcggtgtgcgccttggcacttaattatgtgttggttgatcaaatggtgttgaattatgagcgagtgtacgagcaaaaggagaaaatggccagcgaaacgtatgactgacaatgagcgaatgatttgcatttttacgtggaacaatgggcgaccatttgaactttttcagtctcaccatggtggacagacagtcttcgcccgaacggagcatttaccaacgctttgccaacctcggcgccgtcctctacattttgcagcgacttcaccgactccaccccgacggcttcaccgtggcacaatatgtgcagtttgagaatgttcgtaacattggtacttttcgatttctaattccaatcaattctttgctcctttccccagtccccgttagttccacttataagcattttttgttgaaatatggggctttatttttatgccataacggtaaataatttttttgttagcgtcagaagcgagctcggccgacctctgagggcttttttttcaacaacactttgccatcggtggcttcgttgttggaatcggacgacgatttgctaagagtggacataaaggaagagaagttttacgtgtcggaggaggtcactcagacgcacctcttctgtctgagcaagaatttgtgtgagtgtttttagacttatttgatgtcatcatagcattttcaaaaattatttaaccaaaaatgcaacaaatagaaaattggtcaattcgggggttacgatcgttccttcctccgtgtggagagtaaccgccccttttgttctatttcaggctccaatttgttccgtcttttgcgtcgctgcagctccaacaatgccatccgcgtccagcatttgctcgaaatctctgtaaaacgattcgttgtgtccctccaccattccaaatgccatttcagtcccaattggtgcccatcggcgcccccatgcccaactccaacgctttggtcgacctgtgcaatcgcttcccgaccattttcaaattgcgttgttcgcctcaagacaatt

SEQ ID NO: 56003 - DNA, 495 bp, Heterodera glycines
ataggaaatgccattgaaaagcattaatgccctccaaaacggttaatgtctttgagtggcgtcccgaaacaattaaatttgccaaatgtctgccagaattcagcacgaggctttttttgaacattttggcattgtgttggacaacgccgagggcgtttacttttccggacaggaaattgccggaaaggtcggaatataaaagtcaattaatttgcccaattggccaaacttcgccttgggcaggtggtcattgagtgccgggaaccgcgccgaatcagcgaacttttgctggaagtgaagggacgggcgcggacgcattggacaaagtcacgcaaaatgtgcagcgaaaacgaaacgtacttttgcgagcagttcaacacggaatacacgcgaaagttgccaaaaacggaggccgaaaacgacgcggggggaggaacaccacgggaaggggggaggacagtggcggaacggagaagggaaagcatcaaaatgatg

SEQ ID NO: 56004 - DNA, 101 bp, Heterodera glycines
aaaattccctcaaaaataaaaggtaaattgcgcaccgccctccctatcatgctcgagagcatttgtatgtgtataaaatttctcaaaaaaagagatagaca

SEQ ID NO: 56005 - DNA, 304 bp, Heterodera glycines; identical to SEQ ID NO: 51570

SEQ ID NO: 56006 - DNA, 554 bp, Heterodera glycines
atgcacaatcacacttcccaaacaccggcacgcggacaaccgatgatggtcaaccgaacgcgaatcatggactcaggacgaatcgaacagctgtcttccgttaaagaatggaaggaatttgccaaactcggaaagcccgtgccgttgaaccaaattcgtttcacaacccccccttgtcccattcctccttttttggccgtctcatccaacagcccaaatggtgccaccaataccctgccgggagtgtcgcgaactgcgaacaatttccctaatttggtctgtgtccgtgtcccccttgctcccaccccattgccacaatacttggtcactctccctacacattttcccatgcaccacaatcattgaatcggccgatcctcgagatttcccacggcgataaaatttactcatttttcccgtttcacatatccgccggatggactcccccttgtcgatcactttttttccttcacttcttaaaaacacacaacaattggaaaaatgtgctccccctgcctttgattggtcccctcttaccaagcgtcagaaataaa

SEQ ID NO: 56007 - DNA, 1641 bp, Heterodera glycines
atgtggcgacgaatcgttttactgtgtactgtgccgggtacggtagcgatttttttgttttttgagtttagcggggtggggtcgaattatcactgtgttttttcatttcaaaggatttgcgggtgacagcaatgcaaaaatcctggagggaccgcgtcagttcggtgccgatgctccgactcactttcatgggcctgcaaatggcacttccgctaattatcgttcccaccattgccagactcccccctatgggggccaacccaaatcagcaatgttctgagatttttgactataaaaacggcacaagtgatcagagccgaccacatttttgatgagggagtttattggaatgaccaggaatggcacgagagcgagaagaaccgaatgcacgaaaagctgaacaaagctacgggtggcaattaggaaaagcgattaatgattaacgaaccaattgtaattaattaattaattaaggagcggatgaaaaggcggaaattgtcatggaaatcgaattgctgaacggaaacagcgcaatgctttctcatgagcgcgcaatggcattagaacaacgaggaaaagtgaaggaatggactggtgccatacgaattattgccggtggggccgagccgtacagtaggagaatcgagacaaagtaccgtattcattcagactttgggatttggaagaaaatcgtggaaattttgacggatgaaacttcgcaaaaagaaaacattgaagaaaatgacagcgaaaattctgtggggaaatttcgagtcgttttgatttatttggagcagtgggcaagagtgagttaaattgaaatattaacggaattattaataaaaataaataatttaaattattaaaattgctttcctcagataagcacatttattccgaccaatttggcctgttcaatcggaaaatgcttctcgttttgctggccaaaatatttttgctttttccaaattcgtccattcccttcataatcgacaaattctttctcactttttcactttggtacatttatttccatttcattttgacttttatttgaagggattggcaaatgcccgtccaattggcgcccattgaacgaaatcggagggctgaatttttgaattggacaacgagcagagaatggttttggaagaggcaaatggcagaggaaaatgtgatgaaaagcattcgcaaggagacggcgatggttgtcataacgccaatattcccagagcaaaacgccgcttcaaaaacgaatttatccaccggaaaaatcatccgatgggaaatggccaaaggcaaaccgccaaatttgcaattcaaatttatttaaattttcagcgcgcgaaaaaatcagagaaacagcggacataaattggccaattcgagaacaaaaatttactgaaaaggtaacaaacaagaaaagacatttagaatacaaaagacttaaaaaatcaaaaatctaagttttgactccaaaaataagatttttaaaaaattaaatcgtttttgcctaaaaataattaaagtatcgatagagtagtaaaataattttggcagaccctgttcaaaaaagtcgaaaattttgcgatttttgagtcaaaattttttaaaggaaaaaattaattaaagaataataaa

SEQ ID NO: 56008 - DNA, 979 bp, Heterodera glycines
atggaccaacaacacgcccacgcccaccagcaacacccgacggataacagccagcccaagcagcagtttcagccccagcagttggacctccacttggggcagatggtcgacccgtcctttctgctccaggacttccaattggcacaatccgtcacggtcggcgtcaatggccaagttggcatggtgccctttttgggctttgaccttcaacaacaactgaactcattggccacggcaccagcaactgatcaccagcagatgaatgctgtttctgtggatgtgagtcatcaacggcactttcacaattccgttgcatttcaacatttgaaatgcatgtcaaaaatgccttggctttccttccatctaatggcctcataatgtcccgttctgtcctccagcgcacttcgtccgcgcgttcttcggccgtccccgcgtcggtctctgtgattttctcggccccttccgccgtcccctgcatttcttccgccccctcctccaattgctttacaaatgcttgtccctcttccgctgaattgttgctcaacgggtacactcatcagcagcaacattcgcaggtgccttctcccccccccccccttttttctccactcattttgctctttttcagattggtccaaatgccacgcgctttttgccctcggtgacaaaagtgcaacaagaaaagaatatgtcggctgagtttgtcaacgaccggcagcacatcggctacgatttgttctgtacaacggtaaacagagggacggcggtggtcgaattggaagaattcgaagttcggaacggcgcatcactgccgacttatgggcagcaccatttcacatctgctgaccaattcggacagctcggaatcgaccaacatcgatttgtccatttgtcagcagggcaaattttggaaggcaaacaaatcaaagcggaggagcagcaacagccgccggggaccaccgtggccatgtcctactga

SEQ ID NO: 56009 - DNA, 918 bp, Heterodera glycines
atgaaatttgcaaagaaaatgttaatgattcccgaggcggaatatttggctctacggagtgcgatgaatagtggtgattatctccaaaatgaaaaagcgagtttagacgcaaaaatttctcagaatttacaagaccccgacataagcgaggacctcaaggcgaagagacatgattggctctataaagaaagacgtacggtaaaggggatacttgaaaatagaccacagaaggtagtgattgagaatcatgtacccggtccgaatgttgcaccatatctaggcctcaacactcaatccaaaccacaggagaccgatgaacaccggaaaataattattcctaggaaaagacttgaagagcaaactcctgatcctgaatcagataatgatacaataaatgagttaactccggagccccaaacaacatccacattaaaacccattccgatcaaaactattatacacccgacccttttaaacggtctttttaggtacgtgaaggaaaacaaagatttatttaaaattacggcggccggaaaggtacagtcgaacatgaatttgccgattgaaaacagtaattatagagatgttttgttgtatctcgcagggaagaaagatgaaacgccgcgcggtgcaaaatttctcaaagatcggttactgaaggatccaacagtaaaagacatggttgataaatcaaaggtcatgtggggacgtggaaggaaaaaggcaataaaatctataaaaacacccggcatagtgcgagagaagaaacccttcaaaccactaatatgggcaagactgtagagaaaattttatcgaaaatttattttaatttaaaatctccggcaagttttgctggaattcaaaaaattttaaatgaggccaaaaagattgacccgaaaattacgaccgatgacgtta

SEQ ID NO: 56010 - DNA, 314 bp, Heterodera glycines
taatccgtttacgtttatcaaatgaaataaagagaattcacaataaatcactctctctcaatgtcaggaatttcgtcggctttgaatgggcggtactctcgaattcgtggattgtaccgtttgatgtaaaaccaactgccagggtgcaatttgtacttcagccgaaacattgccaaatcgtcgtcccaatgtcggttgaatcgcttgtacccagcacggtcaaattccggtatagtccgatccgggaaaagtcccgaccaatgcgcttgcatcacacaccgctcaagtcgttgttgctggtcatggcaaagacc

SEQ ID NO: 56011 - DNA, 310 bp, Heterodera glycines
ctttcttgttccgatatatgattggcattttctgttcctttggttattgtcaagcattttaccaaaaacaggtctttgccatgaccagcaacaacgacttgagcggtgtgtgatgcaagcgcattggtcgggacttttcccggatcggactataccggaatttgaccgtgctgggtacaagcgattcaaccgacattgggacgacgatttggcaatgtttcggctgaagtacaaattgcaccctggcagttggttttacatcaaacggtacaatccacgaattcgagagtaccgcccattcaaagccgac

SEQ ID NO: 56012 - DNA, 1296 bp, Heterodera glycines
  unsure (1)..(1296): unsure at all n locations
atgaattttgtcagtttcaatagactcacaaatttttggaaaaaaatgagaggagaaaaaaatagtgaaaaagcactttcgatgaaatgaggctgaaaaggcccaccaattcatattcattaagtggctaaaatttttaatggtccaattgtttttaaaaatgaatttccgatgcactttataagctttggccaacaaataacaatgctatngaaagagtttttgttttttaaaaaaaattttgtacaatttttgttcattgactaatttttttttttcataataatgtgatataatttgaaattttttcaatttttcaaaaatggaaactattcccaataaaaacccacaccctaaacctaattaaaagtaaaaaaaattgtgattataaaattttttttattcattttaaatattaaaaaagattcagtttgttaaactttataataaaaagaaaaaaaagtaaaaattctttttttatttaaataaacttaacaatttaatttatccaattcttcacaaaaagaaattaaagtaaattaaaaaatttttccaattcaaaaaagaaatttaaataattttaaatttttattccaacttcacaaaaatgtgtatggtacacatttcacattttatcagctgagcaacgaacacaaaacgcgcttcacattgccctgcacaaaattttatttatcatttgagccaaatggttcccacgcaaaaatttgcctttaagggataaaataacaaccccttgggaatttttcgagaagtaattgactcgagaatggcaaattggcgcattggaatgggttgggggggggaggagaagaaaagttttatgagaacaatttgaataaagaatttgtttgcgatttcactgcggctggttggtttgtggagggcacaagggtcgtcggcataccaaaattcaaagacgagacttttttgttggcacaaaaatttgtcggaagaccgtaattgttaaaaaaatggaatgcaataaacaaaaaaaaattgctttttttanattttactgtaattgaattttgaaaaaacttttttttaggtttatgataacggcgatggttggcattttgtattcacattcgggtggaaaagcccaaaaatgtgccggacttgggtagagaaaggaccggactttaaaattagtccaaatcagtgttcaaaatattaatttaaattcattgtttaaatgtcagtctgattggcattctgaaaattttggcatttaattacctttttgcatttgccttaatatataataataataaa

SEQ ID NO: 56013 - DNA, 873 bp, Heterodera glycines
atgagacagcagacaggcagagaaaattggggaggagtgggtcgatatgtcaatccattcccaagcccttcccttgcactgttttcattgcaagggtcaacgggcaccacattccttctgcatttgccgtttaatgcaaactttcctcccccccccatcaattgcttaacttttttttctctaaattgtgttattttttttttgacatgccaaactttgcgaggcgtactggtggcgcgccttgccatcaaaaaagaatggctgcgcgggtggccatccaccttgtaaaaaatgtaacttttttttttagttcaaaatttctttcaatttcgcttttttacagttttatacaccgggaggcacagaaacaacagcggcagtaaatgctcgacgaggacaaaaacgaagggtattttttcttctttttttttaaatttttaataatttcccgctcacatttaaggtgttcaagctgaaaggcaatgttgaaatgaatgaagctgatcgaacagccaacgaagtgggtttttttttgaaatttttttaaattcaaaattaaattttttttttttgaggaattggacaatgtgatcaacatcagtgccaacgccaatgccaacaatgggattaatggtgatgaggtgaggtattataattgaaatttaataatttaaaaaatttttccattttgatttaaggcggcagcggcggtgagcgacggcgatgccaatgccaacaatgaaaccaattgtcaaggggtaagtaattgtgattaatttctaaattttgattaattttcccctttgatttaaggcagcagcggggatgagcgacggcggtgccaatgccaacaatgggacaaatgccgaaacg

SEQ ID NO: 56014 - DNA, 1191 bp, Heterodera glycines
ctgacgagttatgggcccgggactcaaatgtccctctcaggccaaaaattttttctatttccgggaaaaaatcgaaaattttccgaaaaaaataccagtcgatagagctcgaaaaactgttgcttggaagtggtcttcgtttttctgggaaaattcgttaaaaaatactaaaattcaaaaacccgaaaaccgttttttaggcctagctcgaaaaattttgaaaattttcgaaattttaaaatttggaaaaatcgaactcaccgagctctacaataagtctgctggccaccctgcgctcaggtcaaagcctaatgagttattcaacggggactgaactgggcaaagttggtactaaaaagttgccaatttctgcagcccttccaagtataggtagaggcctggaattttttttgaaaattagaaaacacttcaatttaaataattctcaaatttcgcaatccatgcttggcaattttgttgaatatttctctgttgataaagccactgatgaaaacccctttgccgtaaatgcggctgactttgacgtagcgcagcttaatcagcttaatccaatgggaatgcccacccatttacttcggcttaaaacaggttctattgttgtgttgctcgtaaatttaaatacgtcaaaaggactgtgtaatggcacccgtcttcttgtcaaaaaattgactgataatttgattgaatgtgagacaataggtggaggcttctctgcaaacggaataattgttggtataccccgtaaccggcacacatacaaagacaaacgccccgacggagtaagctttgaaagattccaattccccgtccgcctcgcttttgctatgactgttgtgaaggctcaaggtcaaaccgcattccgattaggaattgattttactgaagagccatttgcacatggacaattatacacagcattgtcaagggctacgagtcgtgataatataaggatttttgctcccaataaaccacttgatgataatggaaacccattgatcaggaatattattgcttccgggcttaatttggattaatatttttatgctgtcttcctcgcagcattattagttgtttgttttgtcaaataacagccataaacaaatcgtttaattcccaatcccgggcaaacacaccccttgcttttcaagtaaggtggatggttggatggag

SEQ ID NO: 56015 - DNA, 3438 bp, Heterodera glycines
atgatagctaaggaatttttgtctaatgaaaatgtttataattcattgttagcatttgcgtccgtttcggttggataccgtgagtcatcacttgatggaaatgtttgctatttgttaaatggtgaattcactcgtcaaataggctcaactttacccggaaaattttctccatccttttcgcaattatacattcttgaccctgttacagccttcatgcaaaggactcagaacatagcgtatggtggtgatcgagtaaacgaaaccacaattaaaaagcttgattttattattcgaaaatataaccctcttgcccaagagttggtaaacttccataaacaatatcagaatactctaaaagagaaaggcccagaggctgtacttaatttccgtttaacgctcgtcgaggctcgagatgcaccggcaagtgttcgagacgtttctattcattcgagacaagccaatttacccgatgaggggaattcattgtttgccgtttgggctgaaagtgaacagccaccctttttgaaagggatatggattaccaatgacgaaggaaaacttaaaaaattccctccacatcatccactcacagattctctttgctaccctttgatgtttccacatggtgataatggctttcaccttaaaattccatacaatccgttaaataagcccgaaaagaatgaggccatggagattgatgtcgaatctgatgagaacactggtgattcagatgctgatgcatcagatgatgacaatgagtccgttgccagttcggttgattctgttgacaaacgcggtccgcggcagtttttatctattaggtcgtatatccgctatcgtatggcgttaagaaaacacaaaaacattcacaacatttggagttccggtggcggactaagtcagaaatttacacttgattacgcggcgcgaattgatacgaatgttgcaaattatttacgtcgtcccgaattaaatttgcgtagtacacttccagaaaatgcccttcgctggctttcacgtaatgctggtcttagctccacagaagacttggggagtattgttatgttccgcagatcagagccaggcacacgagcgtatttccaacacaaattttatgatgctaccacaataatgtcacgctttaaaaaaccaggcaacgcttcattctttctcactttcacaaccaatccgcgttggcgtgaaatttctcgtaatttcctccataaaggtcagaaaactgtagatcgacccgatttaatatgtcgtatatatgaggataaacttcgccatttgcattatttgattgacaaaaaaaatattttgggtaaaatgattggacaagaatgtcgtgagttccaaaagaaatacggcggtccacatgcccatcgtgtttatcacacaagtttgcttgccatcccagagaatgttgataatataatatgggcgcatatacctgaagaaccagcgaaaaatgataaatcagattgggccaattttattcgtaaactacgtgaattattaccgaaatttcaattccatgactgtggtccccattgtcttaataaaaaaggaaaatgcaaaaagggattccccaagccgtttagtaagtttactgtccttcacgatgatcgtccagcgatctattttcgtccgagcccggaagagggcgggcaaaccttaaccgtaaagcgaggcaaagcgcaagtcatttatgataattctcgtatttcctcctataacccatatatcttggttcattttgagactcaccataatctggaatatgcatatgggcaaagcacaaatttgaaatatctgtacaaatatccattcaagggcccaagcttttcgtacgttaagacaaatgaagaaaatggaaagataagtatcgatgaacctgctttttatgcaagaatgttatatcgttcgtcgcctgaggcctacagtagaattatgtcttacaagtatgccaaattatcgcatacagttattgcattgtcacttcatttgcctggccagcaaaaagtttattataaatccggccaagaagaggcaattggacagcaacttcaggcgggcattttgccagaaactcccttgaccgcatattggaaaatgtgtgaaactaatcccgacgttaaaaaaatccttttcgaacgcatgccagagcaatactcatttaataggtccggaaaattttggaagaaacgtgtcatttctactaatccaaggcctaaaacccgtgagagaaaaccaattattgggagaatttacccagtgtcaccccgaaatcctgaattatttgctttgtatttgttaactaagcattttcctggaaaccctcagcaactaaagatcgttaatcccccgcatgtctgctccacatttcttgaggctgcccgattaagaggtcttattgatgatagtgatgtttggatccgaacgatgacagaggggtccgcctcactcggtccggcacaaatgcgccaattactggcaaacattttgatttttggagcaacagagaattgtcttatcgacggcgcactgctttgggataaatttctccatcatatgtgtgatttgcgttgtaccgatgccgaacgtcctgcgagaattgaccgtgcattggtccttttagaaaaacttttagtaagactaggaaaacagtgtaaagattatggactcccaacccctacaatttcaattatgaataatccccagctcgggcttgatgaatttttctttccacaacacgctaatgatgatgatgcaaatgatattgacacaagctcttatgagcgtggaaaattgaatattgaacagcaaaaattttttgatttggtaaagactgcatttattgactcacgatgttcaagattgttttatttgtatggtgacggtggaacaggaaaaacctatttgcttaattatatcctttatcacttgcgtagaattggcgctaaaattattcccaccgcttccactggtatggcggccacccgtttttatgctggtggcaccactgttcattctgcctttaagtttgggataaatgttgaacctggaaaattgccatccattccctttgatagtttctttggccggagaataacagagtgtgatatcataataattgacgaaatgacaatgttagagaggactgttttggaaaatattgatgctctttgtcgtcttatgtgttcgcagaaacggcacttaccttttggtggaaaatgcgtgattatttctggtgattggaagcaatcactacctgttgtaattgactcatatggaagtccagcgcaagtttccgcatgcattcaatcctccccactttactcactttttacaaaattcaaattgacccaaagcatgcgagtaaacccaaatgagatcgagttcctgaaatggcttgacgatgttggaagagga

SEQ ID NO: 56016 - DNA, 1669 bp, Heterodera glycines
  unsure (1)..(1669): unsure at all n locations
cattactcaccgtcccctcatctccaaaacggcacagcatcagcttcactgatcgcccgatcgccgggtccccactcgccctttgggcttgagccaccggcggaggacgacgagtggagactttccccgaaaacactgagtcggataaaacgacttaacgttgtgatggagacggatggaaaaggtcaaaaattgcaacaaaaaaatgccaaaggaatttgaaaagagaaatgccaaagtgctcgaggcatcaaacaaaaggaaaagcacattttctgatcggaaatgcctttcagacagttccgatgtgatccatcatcatccggtgtttgtcaaagacacctcccgctattggtacaagccgaccatcagtagggaggaaggtgagagtcctttttctgatcagtggctattaccgatcagtgattgatcggttttggtcaaaggatcatcccttaagcaatcgctatgctgaaggacaaacccccgggcactttcattgtccgcgacagcaattccttccccggcgccttcggtttggcgctgaaagtggcacaaccgccggcgggggttccatcttcaggttgtactgactaatcactggtgagaggatgtcaatcatttttacaccattcagcggatggcaatgagttggtgcggcactttctgatcgaaccgtcgccgaagggcgttcggctgaagggctgctccaacgaacccgtcttcggcactttggctgcgctcgtctaccaacattcgattacccctctcgcgctgtaatgctttactgaaatgggctgatcaatagggatggaaattattttatttaaaaaatattgaaaaaagtccgaaatactgagcaaaatatttaagaaaaatgaaaaattttccaaaattaattaaattataaaaaatcaaaaattttgatttaagaaaaaaaacttaaatgcataaatttttaaaattttaaagtcggcaaaaagatgtgatcgcatcaataaaaaatcattctttattgcatgttgaagaatttaattcaaaaaatgccaaaaggttgagaattgctttggctttacggggctttcttctcattgtttgcttttgcaatctttttcttctgtctcttaggccgtgccgtctgatccttcccgaattcgaccccgccgccacgcccgaacacctcaactccaaccattcactccttcacaatatcacaccttatctcaacatctctctacaaatcattcccaacaattcttctcttaacctttcaacttcacctatttttattccataaacaccaaatcactcaccactccctaaccattccacctctcaaccccccatttctttcaactactccaaacacattaactaaattcattatcaatncacttcaaactctcctctcattctatcactttcaccctaatttctccatatccaataaaaattaattatcnaacccattcaaaacttccnaatntcattaatatcataanaatatnttntctaatacactaatnctactaatatcatccaaatctcctcttcnccccattnccccttttcttcancnccnccctcttagaggttcttcccacaccantaaccanccaacagagcttgttgggaaatatgcctaattggataatttaaaaatattatt

SEQ ID NO: 56017 - DNA, 56 bp, Heterodera glycines; identical to SEQ ID NO: 52733

SEQ ID NO: 56018 - DNA, 427 bp, Heterodera glycines
atgctcaatcgagccaatgatcaattccttttgtggtaagtcaaaatgacagaacccccccccccctatcaacgtaaattaataattacttgacaatttttaaaattcaaatttaagtttcatattaaaaattaaagatgaagaggaataccaaagaaataaaatgagaccacatgaaattgaccagacacgtccagtagctgaagtaccccgcaccaaaaaatatttggaaaatgatcgagccatcaaaaatctgattgaacaatttgatcagcttggtcctgatcagcgtgatgatcaaagatggattacacatttacacgcactgtcatttcgacttaccacaaaaggaattcaaatgcatttatcggctggccacctgctaggctaatcaattttcaatgatttgttttcgcctcatttctca

SEQ ID NO: 56019 - DNA, 603 bp, Heterodera glycines
atggccaaaatattggaggaagaagcggagggggaggagagggagagggagaaattcggggaatttttgaaaaaacgaagtaagggcaaaccagcgaattgaaaaacataatttaaggggggggggaaattcggggaatatttgccctaattaataatttaaatggaaattaattcagaacgattccttggagaattgttggatactgatggcattagaaagataaaagaactgctcaattacgaggtcatttttggaattagtaaaaagaattacagaaaattcgcacattttctctttcagaatgaatatttttcggcaagtgaaaatttgaaaagtgactcatcaacatcagaagaagaggaagaaaaagaggaggaggaagaaggagaaaaaggaaaagagaaaaaggaagaaaaagaagtcggaaaaggcgtaggaaaggaagaggaggaaggaggaggagaaaaagagaaaaggaaagaaagaggaaaaggaggaggaggaggatcgtctacagaaagcgatcaaactttcgaagaaataaatggaatatttaatgaagaaaaaaaaaataatgtcaaagaaaaaaggcaaaaatga

SEQ ID NO: 56020 - DNA, 1115 bp, Heterodera glycines
gaaagtggaagaggaacagaaagtggaagagaaagtggaagaggaacagaaagcggaagagaaagtggatgaggaacagaaagtggaagagaaagataaagaggaagtggaagtggaagagaaagtggaagaggaacagaaagcggaagagaagaagaggaacagaaagtggaagagaaagtggaagaaacagaaagtggaagagaaagtggaagaggaacagaaagtggaagaggaacagaaagtggaagaggaacagaaagcggaagagaaagtggatgaggaacagaaagtggaagagaaagtggaagaggaacagaaagtggaagaggaacagaaagtggaagaggaacagaaagcggaagagaaagtggatgaggaacagaaagtggaagagaaagataaagaggaagagaaaaagcaacaaagggaatgaggaaggaacaaaaaaagaagagaggaagagaaagcgagagtgatgaagtgaaatgggaaggtagaaaggagggagaaaggggatgagaaagaggaaaagtaagagattttaagtgatcgtattaaaaatttgaattttaagaaaaagttaactgaattcccggccattaaaaaaatcggttgccttcttacatataaaagttttttggcgcgtagcgccctctagagacagtgttaaatagcgaagctatttcaattttaaaaaaataaattaaaatcaattactttcagtgccctacgggcactggttcgttaactaatttgaatttttaaatagtttaaaataattctgcataatccagaaagtgtcctccgcaacgagcattgactattccgaccgtaatcccatcgaaaagccaacaaaaacgacagaggacaaaagtctgagaagccaacaacagtcaaacgacgacagtgacttaacggagcagcagcagcagcagcaattgtctccgaattgtccgttgcgccgttcaacgcgcgtctccgtactgaacgccaaaaaacaaacgcaacaaaacgaacggacggaatccgaacggagcgctgacagtgccacaaaagacaacgacgacgaattggaaatggtgggaaataggagattacaacaaaatcattga

SEQ ID NO: 56021 - DNA, 179 bp, Heterodera glycines
atgcttgcaactcctttatttttgtttctgatcacccaactgttgctgatcggtgctgtggtcggaaatgatcagccaattgctacgacattaattgaaaaactgcgaagttttctcaaaaatatgcttgacactgtgaccgaaattgatgaggccaattctcggcaattaatagtcaa

SEQ ID NO: 56022 - DNA, 528 bp, Heterodera glycines
atggatgcagtgaaaagggaattggcagaggcaaaacaaatccgaaaaaaccgacaggaatatgacgcactcgctaaacttatcaaagtaaccactaaaacaaccgaattttttaaataagtcataaaggaaaagccgagcagagtcgaaacttcgaaaaggctgaaactgcttcaggatgagttggaagaagcatacgccaaacaaaagatgctcgaacaacgggtcggaaatccctgtcctagaatttacaacaattaaacttttcagttgattgaaaagaggaagaatatgttcgtttgcggtgctttgcgctccccttaaatcatggttaaactttgaaggtacactcttgctgttctgctggacaacctcgaggaaatgaacaaagaatccggtgagaaaaggacgggtgggggaaaaacggccaagggaaacacaatcatttgcagaggacgtgcccatgtcggaaggtgacgatgccagtccggccggagcagtcccatcgtcgtccgctgggtctttaaa

SEQ ID NO: 56023 - DNA, 3916 bp, Heterodera glycines
atgggagagaagagagagaaaaagagagaaggaaaagataaagaaaaaaagagaaagaaagaaagagaagagagaagcagtgagaggtagagcgaagagagagagagagagaaaaagtgagagggtggaagagagagcagagaaagagagaagggagagaaagaaatagagagagagagaaagagagagcgacgggatagagagagagaaagaaagcaggctaagggagagagagaaaatgaaatatagagagagagagagaaagagagagctaaggggagagagaaatagtgagagaaagagaaagaaaatcgagcagtgagagagagagcaaagagagagagagagacagaaagagggagaaagcaagaaagagagagggagagagagaaaagtggagaaagagagagagcgcagagagagagcagagagagagccaaaggatagagaaagagagagaagaagaagaagaaaagagggagaggaagagatcgagagagagagagagagaaagagaaaaaaagcgagcagtgagagagagagtaaagagagagagagagtaaagagagagagagaaagagggagaaagaaagaaagaaataaagagatctaatttgcgaatcccgttgcgggattagaactcaatttttttttgcggaacgggattaactgctaattaactgtaagcatcttctcaacagcacacatttgatgtcacttggaggctttaccaactttgcgaaaaatgcgcttttaacagcccaaaagcacatcgattctgcgcttcatattgaagaggaagatgaagaagaggagcaaaatgaggaagatgtagaaaaggaagagctttctatttctgatagtgtagtgatgaaaagcatttatgccgttgaggtcggtactcattgtattgacatcgaatgattgttgtttcagaatcacgaagcagatggtatggtgagtggtggggacgcagtgccccttccgagtgcagttgctgactccccttttctcgaggtcgatttgaataggacattaactccgcaatctcaatggacaaatgagtcgactggcactatggtatgcaattaaaggtaaaaaaaattatcatttatacaaaagcatcctatcgttgacactgagccgaatccgatccgagacgcacatgagccaaatcacattttccactattcaccctcatcagtatggaattagagggatccaattttttagaaacgaatcttagcactctcccgacgacgacgaaagcagtcaaaacggacagagttcgtcctctcagtcagcgcccatcagctcagccttagacgcttccttgactaatttatacaaggaaaaggtctttgctctttctcaacggtcaattaatgttctttcaattaacaggaaaacgacgaatgtgatgatgatcggagcatgccgagaagggcgtcggagagaacgctggacagatttgaggacgtgagaacgattgcatccagtgacattgaagttattcgccaaatggacgattggtcagttgacactcattttcatccaaataactcaccaccatccgaatgaacaaaaacgggttccgaatttccttctccatttaggtcggtcacgagcagttatccgaacagctcccaccagcagagcaacacacagaaaattggacaaattcggtcaataggagaacttcagcaaagccaaacaccgccagagttaactaccaaattggacacttcagaacaatctcagcgagaaatggacgagaaaattgccatattaatggccaaattggcgcatagggaccaaaagatagaagagttgggcagggccaacgaaaacctgcggacaacgaatgcaactttagtggcgaaaagcaaacaaaagtaattggaattttatttgtcgccaaaaataattttagaaatgcggcggaagcaaaacttcaaagtcaatttgctgagaaagaaaaacaactaaccgatttgctagacgaaggtaaaattgtgtcagaaaaagtttacgattgaaaaacaattcaggacggaaattatccgaatacagcggtcgtcaagcgaaagaagttcgaaagttgaagcaacagttggaacaattggacatcgtcacggctgcgagggacagcgcagttgaggaactgcaagaagcacaccaacagctgcaagagcaagagaacgcaatggaacagttgaggggtgagggaacagagcaagtcgagacgaacaaagaaaacattgttcagacgaactcgaaaattgtgagcataaagcgaggaaactccaagcacaactcgacgacaaaatgacaaatgcgaccaatttggaggggaaagtgtgcgaacaattaaccaaagttgaggcgctaactgcggaaaagagacgaatggagaagacactccaaacaacgagcagagaacgcgaagtgcgacaaaaagggagggggaaaaggagaaacagtgggacgaatgcaacacaattcaggaattggctcaggaaaacaagaaattggcagcaaaactgatgaacagaaaggcacaggatcgaataatcggagagcgagagaggggacttgaggaagagctgagacaggaaagactcaaaagcgagtccgccaatgcgcggatccgcgagttggagcaggtctttgccgttgaatgcttttccagcttttacccaacgaattcagcgcatcgaatgcattcaggacatgaacagagacattgcagttgaatatcaaacggtgggcgaagggggtgagcggtaaaaaaggggtgatgggacagtagagataagagaagaattctaaaaatattatatttaaacaaaattccattaaaaagacaaagttttcttggctctagtgcactttatgagtccaatcaattgacaatacctggtttttatacaataactgttcatgtttgaacaaaccctatatttttggtatcattcgacaacacaaagtctaacgaagctaaaacatataaaatctcaacgtttaggcaattacgaaaaaagatcttattaattaagtaattgctgattatttaggtttgtaactttcttgaaatgttaaaattctcttgttttctcgtattattacattattcagactttatgctttcgaatgatgccaaaaagatagggtttgttcgaatatgaacaacgttattgtataaaaacccgggacataattttgcatagatttcttgctattttagcaaattcacctctgctcatcacaatttcttctttggaagagaaactgcttggattggagcgtgaaaatgacattttgacgcgttcgacgagacaaatgtccgccgaattgggggcaatgaaacggaggcacgaagccgaaatgggaacaatcgaacggagtttggaagaagtgggaatgttattttgtcagagtgaattttgttaatttcaggaaaaacaacaaaatgcacaaaaaacggaggaattggcgaaggcgttcagcgaaagagcgaatattcaaacgtaaaaaagggggggggggagaaagtgaaacgaaaatttaaaaaaaaacagcatttatcattgtcctttacgccaaataagaaaactgactgttcgccgcttttcagtcgtatagaaaaactcgaagacgaattgtcgcagtcgaaaagagagcactcggaaagggtaaaccgaatggagaagagaatggaacaattggagacggatatccaagcgaaggtgtccattaacaaaacaaaagcttactttggctattcatttgctaatttcaaatagattttcagaggaatgagttaaccgaattgcaacgtaaaaactgcgaattccaacagaaaatcattgcatcgactgtggagcgaagaaacaatgccaattcactactcatt

SEQ ID NO: 56024 - DNA, 426 bp, Heterodera glycines
atgtactttttgatcagcttttgttcagctcatggtcattctgacaatcattgtgtactctctgatgactccgttcgggtctttggtcggcgttctcgtcacggtgagtcataaatcataatcaacggtcatcgattgatcaaatctcaaattattgaaaaactgatcactgtagcttgtaaaccagggatcgtatttttatttttggtttggcacctaaccttttagcacctaacaaaaaaaatgcaaacatttttaaacggcggctcctaaaggcacagccgaagccgaaaataaaccaaatttataaaaattttaaacatattttgcgatttaaacgcctaaaatcaaaaaaaaaattaggtaatcttgtttcggttttcagccaaatgtgtctattttggattgattctggttcctaattga

SEQ ID NO: 56025 - DNA, 1044 bp, Heterodera glycines
ttggtgcatcttcggattcgctgttaaacagcagacaaaattggatgtagacattcatcttgaaaagggcacttatgcatatgccaattatggctatttatgtatcaacggaaaaggaaagggaacaaatgcccaatattcctacggtgttggcgataccgtaggaattggcgtcaattcggctactcgacagatcattttcacaaaaaatggacttcgtttgggttagcaaataataaataatataattttacgattttaaattacaatttggttaattgtctattttatctaatttattttatgtttaaaataatcaaaaatcccttaaccttttcacagatacctctgattttttcgttgatccatcttttgttgatggttctttttatccattcgtttctttgttttattctggtgacaaaattgaggcgaattttgggcccaatttcaaattcgatttggcgactctctgaaggaagaattaacaattaattcactaatgttttcgatcaatttgctcgtttttatcatttttatgtttttcttcttcaattaaaatttggttttttgcattaatcggaaaattttgtcgtttcccgggtatttaagactaaaaagatgaaaatttgcaaaaaaatagggtttttttccaattatatgctaaaattcatattaaatatctgctcatatgctatgaagaaatgggctcaaaaaagcatttctacgttaaaattttgatttgatgaggttttttagtccatataaatccatatttagcgtttttagtttatatttcggccatttttaggaaagtttcacaaaattcaaatgcatcgctaagattaaaattcgcaaaacaaatcgtccttccagtgttttgacttgaaaagtgatgatgcaaaaagtgccgatgccgtcgctcggatggcatttcgaattccgtcgcctttcgccgtcgccgcgttgcaaaagtcgccgaagcaccagcaggtggactcctcgacggagctgaactggtccagacagaccaacgcgcgttgc

SEQ ID NO: 56026 - DNA, 205 bp, Heterodera glycines
ctctgtctggaaattgaaaatcaacaccgaatgcaaacacacgcaacgcgcgttggtctgtctggaccagttcagctccgtcgaggagtccacctgctggtgcttcggcgacttttgcaacgcggcgacggcgaaaggcgacggaattcgaaatgccatccgagcgacggcatcggcactttttgcatcatcacttttcaagtca

SEQ ID NO: 56027 - DNA, 822 bp, Heterodera glycines
atgtcccagtcaccgtcttccatgtcatcgtcctcatcttctgcagagtcttcgcactccgcagggaacaaagggggacaacccaatgtttgtgctttggttgcaaagacggggtttcaaaaaacgggggttaattcgcccagtttttcatttgtttgtgaattagtttaaattcccaagcttcagcatgtcgaaagccatggtgaccacgtgggcaaaatgcttggcaatgtgtccgacgattctgaggagggcgaggaggaagaagcagcacaacaacaacacgcggaagtagcggtggcggcgatggacgacgcctcttccgactcaccggcgacctcatcagacgaagaaatgccaatggaacagcgccagcaaaagcaaagggacgcggaggggacggaagtgcgtggagaggtggaaatgcattggcattccccaaattattatttttttgcccaaatttgttactggacccctttgaatttttgccgccgattcccttgcaaaaatttctgtcgtcctcgtcccccgcccttttttaagtgtggttttggatttgatttaaatattttgcgtcgattaagggcaacactgaagaggcggaggaggacgacgaaggacaaattggacgtcgaaaagcccaactgcagcgaaatgagcaggatgaggaagaagacgacatggacgaaatgtttgctcgggacgacgacgtcgaaatgcatggaattgaaggggaagaagaggaaggggcacagtcgacgagtcaaagggacgcggagggcgaggaggaacggcagatggacaccacgctgggcgaag

SEQ ID NO: 56028 - DNA, 768 bp, Heterodera glycines
ctttatctccgccgattgttggctttgtgtcttcgaattgcttgcgccttctcaactaggcctcggaattgcgctgatcagccaccgttttgacgtttacattggcgaacacttcaagacgcgcaaatgggcactgaaatttattcaaattctactcaaaattggcgagaatggcaccaaggaaatggaaattaccaatttggatggagaaacattgccaattccaaaaattcaattgccacgcaaagtcatcggattcaaacgaatcatcatcaagtaaaattggcgattattcaaaagatttaattagacaatattcccattttcagttacatcgaccacaatgtcatctcttttctcgaccgattgagtccacttttcgcctcatttccgattaatttggcattcggcacgaacaaaatgggcattttggatttggttgtacgcaacacttggccaatgctcggaaaaaacattcatggcatcgaatcgtaccccagttttttacactgtttgcgacatttcgtcccgtcatttctcaacgaatgtccaccacttcgctttgtcttcttctgttttggcgaactattccccgaattccctgccgatgacaatgccatggcatcggaaagacaagcggtggccaaatggcttttcaccccacttcaaaacgatgtgccaaaagtgttcaaatttgaatttgtcaggaatgaatgggagaattggccgtcgaaaattgacgccttcaaagcggtgatttcgatttga

SEQ ID NO: 56029 - DNA, 2919 bp, Heterodera glycines
atgaaagatgagtcatccgttttcattaatttattattcgatcacaatttctgttttctgcttccaattgacgccgaatcatcaccattatccaccaccacagcagttgatgaaaatttattccatcaattagtccatcatttatttcagttcattctttttgttgtaaacggacaaaaatcaaatgggatttgtggttttatttttaaatgctcttgtttgaattgtctgttttttccatatcccaaccacagtattctctgcatcataatgtgccgaccactgctcttcctacttgtttcattgtccgctctttcgttcaaattcgccctgccccccgaactcggcatgccaaacggaccgcgaacgggcgccgcttcatcagtcaaagtggtcgagctgtcacaccccgcaaccgcacgacacggaaccggcactgggtctggcaacccgtacatggactacggtatcggtatggattcgaacaaaggcaaacgaaccaaggcaaaccatacaaaaaatgaaaaatttgatcatactgtaggcattttcccctacaaatttaagcttctgttgcacagctatcactgattacagtatttcaattttattcaatttatttttacagaagaaaatttttcactgatcggtgccattttcgttggtcagctgatcttttgcttcttggcctcatccgacaaaggtacgtcccagtcgctctctctgaatcaattaaaaatgccattttaaattaactgtgtaatttgaaaccgaactatcaattaatttgttgtgtctgtttttactttttgcttattgttagctgccttaaactttggaatgttcttccgtccgctgatcattttttgattgctgtcgcagtttatggagggtaatttcgtttaacttctactaattatataaaaaaattaattaacggcggcattttttttattaaaatttagaattcattatgaaaattgggacaaatgtgaaccgattgaaaatggcactgcaattagactggaaaaaggcggcaaaaagtgtgtaccaatttttaattttggcattttaatttaaaaaaaattaatttcatattagttatctgatctgttacccgagcaaattggccaaaaatttcggaaattggaaagccaatggacgtatgagagagttgcaaagatggacttgcaggaattgagtaagaaatgtgccgaaaatggtgggccaaatcattgcaacggcggatggcacagcttaatgatagtcaagaagagtgacgggcagttggcattccattcatccctcaggcgagtgtttttgggctaattacatattttatttagatttagcgccaatttgtccggcaatttggacaaagatttcttcagcgatgccggttttctgagagctcaatttcaccaaaggtccaatcttatcaagaatatttttaattggctacagtaaaaggtacatgtgatactatagatttatcaaattcattcctacatttttacaactaaagttaccattatgaataaaaagttaaatgtttgactttttataaatctatcaaaataataaggacggagaagaagaatacagtacccttataccgtcacagtatccccgtttttgaaaatacattatttctgaagctttttctattcccttttcagctctgatacagcaaaatgggtcactttctgcagctgaatttgaagaggcacttccgcttggctcatttatgaaagattttgacggaatggcgttgcgaattgtggcactggaacttaccaagggcattggacaaatgcacggaacgaaaatgtgcaaaacaatggtgggtactgtaatgatagtatacttacgacaatcgaattagttgatgaatgggtactgtaatccaaatggttgcttgatttcctgtaataagttagcttttctccgtccctgctaatgtcagccttttcgatatgcaggtggccgccctgaaaatttctcttaataaagttttttattttctttagcctgtgccgaaagcgtcaaacattgaccatttgggcacaaactgtacacaaattgtgtttgccgaccgtatgccacagttttggctgaatgtgtccgtttctccctattttattgcgtgcgaacaatttaaggcgccatttgatccctcgactatgttcaatcagtctcggaccagcagtgatttgtttgatgcatgtcaaaaggtgccaacaacaccgaactgcgagaagttggcacattatctgtgataaaattattttaaaaaaaccataaccaatgtacaaattcgaggactgtcattggtctttaattctatgattttaaattttcagaaattccgtccttatttttcccattatcttgaatatttaaaaaaactgttctttttggtgcaaaaaactttcaaagtgctcaaaaaattttaaggcattgaaaaaaatggaattttgtgcttttaatcatatattataatttcctatttttgccactccaattgttttttaaatatttttgccaagaacatctccaaaacgcgcgccaaaaggcgtacggatttcgcatccgtttgtgtacacatcgcgaagcggaaaagcaacggatcattttggaatccaagctggacttttcattcactgatcaaaagtacttaactaacaaatagaatcaatcacaaaaactgattggaaaattcgccgctacaatggaatcattaggctaatattaattattattttttaatatatcgattttttttctattttttgcaaatattttaatttttaaaagtgatcaaaccaaatcaattaaggacagggctaatgaaattagactaattaaattaaatgacaaattaggcatttgccgcttggcattatataattaaataaa

SEQ ID NO: 56030 - DNA, 928 bp, Heterodera glycines
atggacaaacttttctgtgcaaattttgctgtaaagacgtgggaaaaggaaagcggtgcaccgattgaatgccaattcgatgtaaaaagtgtcaatgcaaaaattgacgaaacggaacagataggcaccaaatgggtattttgcatgtacgcgagtgccaacgagaaactccaaggaaagccaaacatattcgagcagccaaataaggtcgaagagattctaaagccaaaatattttatttttaatcttgaaataaaaccgacatatggaaatgattttgtattttatatgccatgtgtattaaattctataataattaacaaattttaatatagaatattgaaaagatttcaactaattttgtaaattgaatagagcggcaccggtattcttcactaaagcagatgccggtactgcgatcacctatgccgataccgtatgcaagtttacgaccggtatcgatatcaacaggacggttagttgcggtaccgccggtactgcaagattcgagccgggtagtttattttttactaaaaacaggtactggtcccgtcactgctcttgtttaattgtaaattcaatttttgaaactcaaaatatgcgcacaatgtaaaggagcagcagaaaggcggagcgatgtttggagaggcgccaattggcgggcagcacaaccaattgggacacaatgccaagcgcgtaaatgatgaacaaagtgatggcggacgaggtcagcgtcaggtcacgccgcgttgggtcgtcacaaaattggacaaaatattggtaagcagctgagacatttgtggaaaaattcggaaaggaattgtcgatgggcgacggaatggctgaggaagaagccatcattattttctttctctaaaaagcatttttttacggttacagtatgcaataatagaaaaaatgtaataaa

SEQ ID NO: 56031 - DNA, 1175 bp, Heterodera glycines
atgaaaacttgcgttgtgtgcacatgtatcgtgtcaattgtttattcaatttacatgaattggtttccggagaggcgccctttccattgtctgattcagttgggctatttcgaaccgatgacatccatcacgaaagtgtgacgaatgctcgcttttagcttaatcattttaattatatttaaattttaattaataactatttatttcttccagtatatcaccgcaacattgccggacgcggggctttatgacgcggttcaaatcgctgaattggcttccatttgcactccctttttcctctatggcataacagtaatcaaaatggtgcacgatcacaagaagaatccctccacaagcataagtatttctttttttattgtgtggttttttggttgcgaaattattcattaattaactaattaatgaccttcggtaaatcccggtgatatcccattaacggggggggggggatgctaaagagagccagcgaaggaagaatcgtcttgtgtgggtcttttgaaaagggtcacttctcgttctcgacccaagaaatctgagaagatttattgtattgtattattcattttaattaattttatttagtccaagttgcgactgtgatgccgcgcgggagccaatcgaacggagaggagcgtgccaaatttgtcaatttgatgcaggaacgcactcggctcttctccatgtgcttgctcagccaagtgccctactatttgtcccacgcgctttaccaatcgtcccgaatatttgagctcagcgaagacaccgttcaggtggaaaaaaattggcagaccaataaaattttgaaattttcagattttggccatcctttggcaacttctcggcacaatttttcatgtccaacagcccattctgatgctgttgctcagcaaggatttgcgctcatcagtgcgcaacgatttgacaaaaatattcggcacaattttgtgacccttaagagcaattttgattataatcatatgtagatgtccatttttaatgataaaatgtgtgaaatagacaataatgaactgcaaaattgatacaaaaggctcattacagtaactttaaaatggcttgtgtaaagtgcataaattaattttcagctttttccgtcaaaatgtgatattttttttttttttttttattcagaagaa

SEQ ID NO: 56032 - DNA, 1562 bp, Heterodera glycines
atggtgtgccgtgtttcttcttctgttggtcggctgtgccaccattcttttttggttctttttggacaatgccaaaaaacgacgacgccctcacacaaaagaaatgtaaaataaataatcataatttgaaaatttcgaaaaaattctccccaatttttcagctttatctgcggagattgttggcttttggtgttcgattttcttgcgccttctcaactcggccttggaattgcactgatcaaccgccgctttaactgcatcgtcgacgaacacttcaagacacgcaaatggaaattgggcgaaattcgaatttgctacaaaattggagagaatggcactaagcaaatgcaaattgtcaattccgatggaaatccattgccaatcccgcaaaatccgttgcccaacaaagtcatcggattcagacacattaatatattgtaaaaaattaattaatttggttaatttttcatctaattttctgcttttcagctacatcgatcaaaatgtcatcgcatttctccgccgttttcaccgttttttcgccgtttgttcaacggttttgtacattcgcactgaaaatgttcgcattttggaatttgttttgctcaacattttgccaatgtttcgccattcaatgcatctgatgttcttgaactccatcgcttttcgccgtttgcgccaattggccccgtcacttctcaacgattgtccattcctttgcgctgtcattttctatggcgacattctccctgaatttccgcccgatgaaagtgccaatgcatcggatggccaagcggtggcaaaatggttgttcacgcctcgtccggatggtctgcccaagtggctcagatgctttgagaattcaccggatcaatggtcgtcaacgatggaacaattcaaagcggtgattatccctaattgttttttttctatgattttttgtccgctttttaggcattttccaatgcttcttctccggttactttttgtatttactttccgatgtcttctctagctgacttcattgtgccatttgatcggatcaacgaagtgactggggagcaattggcactggaaatatatgcacatgattgttgcctcttccgttgtccaattgcgtgggatagaagaaaatgggacaatgtgtgggaagaaatgtatgttcgacagaacccaatttacattcggatcagagatggcggattcgacgacgggtgaataattaaaaatgcttaatgattttatgatccaatcaacaattgaacaatgtttttttcagtcttctcctcgacgccgcttctcccgggccgagtgaaaactgatcaataacagcagaacaaatgaattaattaattggtgcgattatgtgaccgaaatgatgttggcaatttgccatttaaatattgccaattgtttgtttgtatttgacctttgcttgctcgcaaatgcgaccatttccattgtattttatgtgtatgtaattaattcattatgagtgatcgttgataaaaatggctaatgataaaacggattttggttaagcagtggctcaacacaataaa

SEQ ID NO: 56033 - DNA, 1403 bp, Heterodera glycines
atgaatgaattaataattgaagagaagggaaaagtaattaaaggatcaaagttagctagtaaatacaaatgtgaagttatagcatccaaaaaaagctaatctttcaaaattggttttgaaatttaaatgcgaaacgttagaaaaaaaaggaaataataaacgtacagaatttctgaagacatttgcagcaaaaaaatgaccgggaaatacaggaagaatacctaatgagagaatggaatgatgcggaggaggagaaaaaaacacatttttatactaaaaattttagcgtagcgccccgagttgtagcataattttcgtcaaaaagtcacaaatttttgccaatttggggtcacattttcagaaaaggaaaaaaattttggaaattttaatgatgtatgcccatcaaaattcgctttaaggagcttcggataaagcaattttatacttttgtatatattaaagcaatttttatatttcttcagttacatcgaccattccgtgatcacatttttgagttccaaccagcaaatttgggacagaagtggcaccaaattggaattgtctattgaatattgtgaccagtcaatttgggatgttttgtccgtgaaatttggcctatctttgcgccaaacattcgcaatttggtctttcctaatgccgatgatttggacaatttgcgtcgtcacatttcaccgacaattctcactgatcttgatcaattgaattcaatcaattcctattttctggtgcctgatggaattggtgatgatgggccaaacgcaactgctggccaagcgttgaccaaatgggtgcacactccgagcaaaaatgggcaaccgaagcgattgtgttgctttaatgctaatggtccacagaatctcgaatggatcaacaacttcaaagaggtgtgtctagccatattttcgtcaatttgtttttgttttaccaatttttgtgtttaggcattccgtcgtgccaccacttctgtcagttaccatattcaattttatttttgggtggaaccaatgccaattgaacaatttgaattgatgaacgaagtgacgaatgaaaagctgacattgaaacaggagatcgacgaattcgacgtaaatgtgtataattgtgagctgcggtatgacaataatttgggcgccaatttgaacaatatccgatttgatttgtggggtggaaatagttgttgcattgggtgagcagcaaaagcaatttttgattgttgaaaaaataaaaataattttaggccattgtcgctgccagcgaaagaagaagaagcggatgaaagcaatgaaaaataattatttcgagaaatgatcgatctcaccaataggaatcggatttgatactctctttttctccgaaatgtttttgctgattatttcgttcga

SEQ ID NO: 56034 - DNA, 173 bp, Heterodera glycines
atgatttcaatcgatgctagtattgtggtgcccgattggattgctgatgatggaccaaatgcaactgctcgccaggcgttgtctaaatggttgcataccagggctggacgtaattacggattacgtattacggattacggaaattacggcctttttggagttacggattacgg

SEQ ID NO: 56035 - DNA, 694 bp, Heterodera glycines
atgcgaatttctttttataagacaacaacgccaattgaaccatttgaattgctgaatgaacggaccaatgagaaactgacaatgatgaagaaggatttcggtggtagtgattggctgttcaaacggtgcccaattattgaagaaacggcggcggttcaaaaagacaacaatttggaccatttgaacggagttcacttcagtctttataatgattgctttgggtgagcagcaaagaattggccttacttttgtataaaatacggatatgacggtgtcatggcaattcgtacaattttaaattgatgtggccataatttttttagaattttggcagagctccaggagttcctgctaaaacagcagaggacttcattcagtccctgtcttgtcctgctggtccatctaggaaacgctgctggcccgggtttttaaaaataattccgggttctattttttcaataaaaatgtttcatcctttcaaactgcatttctttagaccactgtctccgccagcagatcaaaacgacaaagaaagcttctcgactcccgggcccagtgatcagcagaagaaggagcgatcatttaaggaaatgaccgatcatttgagttaagatgaattggattgaatttttggcatccctgattattataattcagtatttcttgaaagggaaaagtgtgctctaaaattgca

SEQ ID NO: 56036 - DNA, 538 bp, Heterodera glycines
atgccagatttacccttacccccaaaccagtgtttgggttacttggatgtgtgctgccgcttattactgggagtattttcaatcagtcaaagcggtcgtttttcaattagggttaacttttttaatttaaattaatttaggtagtggactcgtttgatccgaatgatgctgcctgtgttgaggactgtcaagaatgttttactgattctgtgtggcaggatttggcatacattcaatcaaattttggacgtttgagtcatgcaatcacaaagttggaaacacagggccttaccattcaagagtcgctggaaatttttgcgggtgtacaaaacgaaatggacaatgcaattggtgaaaaagcagaaagaatccgcgaaagatttgcttttattgtttcgaacaacgccggtcttgaaacgtaagaaacagagcaaaattttcaaaaatttacccggcggcgcctatcggcaccgccggccctcactattcttgaaactttttttgaacaaagccaactatcaatattgtgcgaaaacaa

SEQ ID NO: 56037 - DNA, 1860 bp, Heterodera glycines
atgggtcctcatcttgtcccacagtccaccccaacgctttcccacgcaatgaacggtccaccgtcttcgtccgccggactcgcggggcgacaatggaaacaatgccggcggtggtggcctcatcgatgggccctcggcggtggtgccgctgcgcatcacttgggcgtcccgtccgcaatggtcgtcgtcagttcgaccgccgcttcttcggctggtcaaccaccgcccacctacaacaacaccaacgccgcaatgggcggcggcgtgggtcagcacagaatgggaccgcacgggcagtcgtcgtttgtacaaccgcagcaacagcaaaacacgggcggagggcaacaacagcatcaggtggacaattgaatgttcggcagggtcaattagttgttaaatttcaattttaatggcactggcaaatcccagcgaattactgaccttaaaaacgggatgaatttgttgcctaataacaacagcaacaattagggatgttcccattgcgtgtttattatcccacaattgttttttgaaagagaagattttctcttatttttcaatttgttctttttattcccattttcagccaatgctccaaggacctccgatggactctcatcatcaccagcaacaacaggggccaccactgcccatgacaattgctcagaggcagtccgctgctgtgcagcagcagcagcagcagtcgtccgccaacccaaacgccgctgggggtgccatgatggtagcgcagagtccgcttggcgccatgatgaactcggtgagcggggagggcattttttgcattggcacgagatactacgtatgaataaaattggcttaaaattttaccaattttattttcataattttagcagcagcagtcgatgaacaacgcaaacagcggaggaccaccgcaaatgcgcgggggtggcattgcgcagcagcagcaaatgctaggcgcggggggcggcgctggacagccgcaggacccggagaagcgcaagctgatccaacaacagttggtgctgctgctgcacgcacacaagtgtcagcagatcgaacgggtcggtggttacaaaatttatatattttttatcccttatttcctgggatttcatttttacaattgattattattttcccataaaatctctattttcagtctgaactgcgacaaaaccgtgcgccctgcacattgccctactgctcggtgatgaagggcgttttggagcatatggtcggctgttcggccggccggcagtgtcagtacgcgcactgcgcctcctcccggcaaatcattgcgcattggaagaactgtaacaaggacgactgtccggtgtgcaacatggtcaaacggtacaccaccggaacagcggctgaccggcgacaaggcatggcaaaacatcaagaaaattttaatttaacgcaataataaatttccgatttcttgttggtaaattgctcccatttagctgacattatgctgattgctgtcggttttccctctgtgactttacctcagcaaacaatccaaggcgcgattggccaacaggtcaatttaatgccagaaatttaaataattaagaatttttatgcgtggacttggcgcaatcaattatttccatgaaatttatgacattggctcttttccagcaaccttcaagttcggcaagtgcctgcagtggaccgtcctctgtcggcatgaacaacacttctaccggtccgtccgccgctgtcggccccacaagcgttggcagtgtcggcggtggtccgatgagttcgttcggctcaccgccgtcgacgagcagtgcggtgaacaatttgctggacgggtacacaccgaacacgttggttttttga

SEQ ID NO: 56038 - DNA, 1285 bp, Heterodera glycines
atggagaagctggtgcttggcgacgaccagaagtcggcggacagtgccgcgtccgcggcgtcgcgcaacgactcggtgaagaagtgcatcacttcgttggtgcacgcgtgcatatgccgagatgccaattgtcgtcggggcacgtgccacaagatgaagaaggttagttttgggtcaaatgggacccgtctattcatttgacaatgaccgacccttccctggccaatccgtacggggcaactattttattatgttttaatttccctcattttcaaggtcattcaacacaccaaacactgcaaaaggcggcaaacggtcggctccaactgcgcggtttgcaagcagctgattgccctgtgctgttaccacgccaagcattgcacgcaatcgaagtgccaagtgcgtcttgtgatgccaccaaggctatttatggggacaatttaaagaggccaccctcgttagcggcgtttcaatatgccccgtttcatttttaattaaatgacttttcattgccattttaatttctaaaaggttttgctaagttttatggaattaatttacaaaagtaaagcttttcataggttttcaaattttcttgaaaataaaaacaaaaatgttcgatattttttactaattgtaagtgtttatgttttaatcctaaatcaaatttcgcaggtgcccttctgtctgcaaatccgacaaaaactgcaggagcagaagcgttcacagaatcgccaggcggagcggatgatgcagcgacggatgatgaaactgcaaagtgtcggcgcggcggcgatgaacggcagcggcggtgccgccaccgtcacgtcccaaatgacgtcatcagtgcccactccgtcttccgtctcgtcggcgtccatgcaacagcaacaggtggtcgttttgggcgtgtcttttgcatgtcggatgggattttttttttgagtttttctacggctgttagctgaaacctcccaaaaaaatagctttattaaaaagttggcgatcctcaactcatccccgtctattttttattgcgtatttttcttcagcaacagtcgccgtgggcacagccgcctcagtcgccacgccaacagcaaattggcgcctgcggactacagcagcagcagcagcaaaccgtttggtgcgccgccgatgcaaatgtcgggcatgatgatgtcaccaaatgcaatgccaccgcagcagcagcgactgaacggtccgatgggcgcggcagcggcgtaccatcgtaagtttcacaattggctatggccctattttcaga

SEQ ID NO: 56039 - DNA, 1048 bp, Heterodera glycines
atgccggttttttggtccataactctcgctaattgtgtccattggcagggccctgccggacttcaccgtgtgccgtccagcggagcgctgcagcagcagatgatgtcgcccaactcgcagcagcaacagcacatcactccgcctccgtatgttcgaagcgccgccgccgcgcaacagtcgcctctccaccaccagcagcagcagccgttcgttggtggaggcgttggagcagtgcaaccgccgggtcagcagcagcaacaccaagaacgctttggcaccgccggagcccaaccgcaacaagtggtacaacaacaccacaccaaacagcagcagcagcggttgtttcaacagcaacagcaaatcagaggcaaacaaaaataaaataaggaggagaagtccacgccaattggctcgactgggcaaaatcggcctgttttccattttttaccaaatgtccatgtaatttgagtttgatccgtaagtttagtgctgggccatcaagtgatgaacaataacgatatgcagctgctcatgaatcggttcaaggaggccagtcaacgggggagcaacgacgaggtggaaagatttttctcggacttgcgcaagacgccccacatgttcaacgcgtttttgaagctgaccaaaaaagtgacattttcctccctcttattctcttactcctagggcagttgtcgttttaatccccacatttgtgcccttttttgccattcccttcagcagggcgtctgtatatccggcgatccgtttcctcatcaacatcaaccgcaaggaggtgctgcaacacaaccgcagcaacagcactttgtgcagccgcagtcgtccttctaccagccgaaccaaccgcagcagaacggtggcaacattccatcgtcacagtttggcgggcccttccaacagcaaatgccgtcccacggcgccggaacggcgcaatggatgcaacccccgaaccaatcgcagcaacagtccgccgcctcccaacggaattcgtcctgacaaatgagcaataactgtttgatggatgaagcaa

SEQ ID NO: 56040 - DNA, 56 bp, Heterodera glycines; identical to SEQ ID NO: 52733

SEQ ID NO: 56041 - DNA, 481 bp, Heterodera glycines
  unsure (1)..(481): unsure at all n locations
atgccgcattggacacgagcaattttctcaatccaacagccgtcgagaagtgagtaaatgttcataacacctttcaaaaaacaaattttaaaaaaaatttttaatttggtcaactttgaaaaaattattacgattttatgacgattttttatgttacgagtagggcagtacgagtttgcctagtacgagttgaagttttaccaggtcctgcgctatcatgttataacatttaaaaaaaaaattcacatggttttgtctattattttttaaaattatagctcaaagggccgcggatttcaatttttcctccaaaaagccggtttttggttcagttaaacaccgtgaaaagcctaatttacatcccccccnccccaaagaatatatttttggttagaaaattaaacgaatagcttgcttattctcgtgtttaatcaatgtaaactctgaaaatttttatgaaattttaaattcttgaaataaa

SEQ ID NO: 56042 - DNA, 321 bp, Heterodera glycines
agttgcacaacgttatttttcgagcagtcgtaaacaaacggaacaatatttggaacgacaggccaacgaccaatactcgaggcgggccagagaacactcataccgtgcaaggagtgcctttaaactcatgcaaatcaatgacaaaatgcacttcatcaggccgggtaccaataataattgtgagtcagcaaatgctcggctcaaacactcattgcaggactcgttgcgattgacgcgggtgcaggttcatttctgttactcttttctgttgaaactcgctctttgcccagcgcccggctcgtggtgccaagtgctcagcga

SEQ ID NO: 56043 - DNA, 732 bp, Heterodera glycines
atgttcaacaaatcatcaaactacgataaggtcctccagcacctccctccacgtgaagactactgtcctgatcaaatgaaaaaagccgatttacagaaatttgataattggtataactacaatcgcagtcaaccattcgacctcaaagagaaactacctgaatactgctgcaacgacgtccgaatcctcacccacgcccttgtagaactacgccgggaattcaaacaacttacacaaagggacggaaaacacggtggaatcgacattttgtggcaagccatgaccatcgccagtgcctgcgtcaaaaattttgccctcaatcatctgaagcctaactcacttgccatcgtccctgaaaaaggctatactccacaacagaatcaaagtgcactggccatcaaattttttgactggtactcccacatcaataacgtcaacattcaaacggcacactctcggtacggcgaatatgtctttaaacgcgaaggggaggtttaccaagtcgacggatacatcaaaggcacgaatggaaggcgggacaaaattattgaagttaatgggtgtgtttggcatgggtgtgagatatgtttcggtaatatggatgaggaatcgaggatgccgaacggaaagacgctgagggaaataagagagagggagaaaaggaagcacaaaacattgaggcgttacgttgacttggagttatatgggagcacgaaatcaatgaggagctga

SEQ ID NO: 56044 - DNA, 1771 bp, Heterodera glycines
atgaacgaccaacagcccatcccctctttcatgaccaattttcctgtcagtggccaacaaaaagcggcacttcaattcgccttttacaacactttactcttttcgctggtaaatgctattgtttctgtctcaagaaggtcagaaatgccaacaaattcagctcggaatttgtttggccagcatttttgcggtctatcgacttttgtacttatttctgatgccaatgttatgggctttgttagtcggcactgtgcttttcccgctcaaacgaatgatcagcgaaggcttaaaaggtaaaatatacctaattgagtattaaattcaatccaattttaggttggctcgatcgtttggatggtgaaaatcggccccttttggttggcctggcatttcttcccgttcaaatcactttgcaattttctttcgccgtttatgagacggcactgaggttgtatttttgctgactttctcccatttcaattgtcttcagtttcaccggcctttgccttggcctcggttatttcgctctgaaagtcctttgccattacggcgctttctcctctttgctccttttgatcggtcgaatttacggtttcgccgattctctcatcgaaatttccactcggaattgggtcgttttccttttaattgaacttttttttattcctttttaggtttttctgctgattttctgttattctttggggcttggcggttggatttatcttcacgaaattggccaaattaacaagaaattcgcgcgtgtcctttccctccccatttggtttttcattcatttttctttcatttcccttttttaggttttttctgttggcttacctttccgatttcttcggtttttttcgtgttttcattttcattctctgctgctctcttctcgtgttgatttctgccggattaattggaacaaatgccgaaaatgaagacgaaaatcaacagaaaaagcaccaaaatgaagtggggaaaattatggattttggagggattctgagaaaagacaaatgcacggagaaataaatataaattagcatgttaaaacaggaagagaagaatgacgaagctgacaccgaaactgagcaaagtcagcgggaaaatggcaatggaacgaatgttggcactgcgctgggcggcgaagcgcggcttgaccaggtgaagcggtggatttcattaaattggtttgatttgaatttgttatcccccaaaaaggctttctcctccgacgtccatttgcgtgtcattggcggactgtgcgctttgctttgggtggttaaccacgaccttttgctgtttttcttcgtcattattccttttgccattgcctttgccgttcacttgggtaattttttaatttttgtcaaaatttcttcgcatttttaggtgcacaaattggcctttttgcgttcattttgcaacatttgacgcaatgcaaagaacaaattgtgcataagactattaaatttgtgcatgttattgtggcggggcccctgcgaaaatttgtccatttgcttttcaccagcgaccgaatggtcatttcttaagtttttctagcagaacggttgattgattcaattttccaattttttactcaatggttttcagtttacaaattcttttttcatttttgtttttccatttttcagtttgtcattggcttccgcgaccgcgtcgatttgctttcttcgctcattgtcatggccattttggccgtcggatgtctctttgcgttgcttttcaccctttttcaacttca

SEQ ID NO: 56045 - DNA, 1680 bp, Heterodera glycines
atgaagaaggtcgcgcagcagcagcagcagcagacgaacaaaagggcccaaaacgcggctaaggtaaacgaacccatccaaaaacaaaaaatgacagaaaatggggaggggacaaaagatacccaatgaatactgacaaacaattaaccatggctaacctgcttgaaggtgctgaaagtgatcacgccagagcagcaaatcgaatgccatccgaagacaaacgccgctggcattccaacgcaattgatttgcaaagtgaacggacaacaggtcaccggagatgagcagtgccaggacagttcttcatgtgtgcagttcaacaacaaacagcaggatgacgtgaccattcagacggaggcaatcgcagtgcgtttcaacggacgcaaggcgtggctgaaggtgtcccaggcatacaaaaacacccaatgcggactttgcggacactacgacgactcggacgaccagggggaggagctgcgcatggccaacggccagagaggtccttagcaaacccaaagcagcgactttgatgccaacccaaacaataacagattcattttttgctttcagcttccgacttggccgagttccaccgctcctacgctttggaagacgcggaagaatgcccacaacaggtgatgaacaacttctacagcgaacagcagcagcagaacagcgagcaggacacattctacgggcagttcaaccaatttgaggacgaagacgaagcggacgatgagcagcaacaacagtctgaaaaggacgaatggcagaatgagcaattcaatggccaattcgaggagcaaaacgatggccaagtcactgacggaggcaatccgttcgaaggaattttcaacgaccaacaacagcagcagaagtgttgctgctgctgtgacgacgacgaggacgaagagggcaccaacgaacagagccaatgccgacaaaactgccaaaacggcggggaatgcccagagaagtgcaacaaaaacgaccaaaagcaatgccgaaagtcatcgccaccacagccgcaacaacaacaaaattgcaaaggcagcgacgacgagcagtgcaaagggatttgcaacgacggagacgaagcatgtgccgagcagcagcagcagcagtggaaaggtgggcatgggaagggactgttggcctaatgctaatttgcatttgactgttttcagcagtttggccgattttgagaaccaaaaccccacgagcagaaccacgcggtgtgcttttccacccgcccggtcaaacactgcccgccggatgcctacccgtacaatccgatgaacggttatgagcagcagcagcagccgaagaccaagaaggtcagcttcgtgtgcatggagcgggcggagccggagacgcgtcggctgttgcgctcgttgcgacgcggacagcgcgtggtggacgtaaacgcacgcggcgcctccttcacggagaatgtgagcgagccgcatcagtgctggcgcagacgctactgatggaagaacggacgatttggtggatgacagaggagtgaccccccaacggagtagaaaagcacaaagcgtagaccaacccaaacacaaaacaataatcaccctctgctgatcaatgccattactcaaatgatcagcaccacaactccgccatttcctataacaaattgtatttttgtaatagtttaga

SEQ ID NO: 56046 - DNA, 307 bp, Heterodera glycines
atgccaatcattcgaccattccgcaggcaatcaaatggaatggcacaagtgaacagcccgagggatatgtgccgggtcgaagttacgtggtcactgtgcgcggatggtcggttggatgcaattaattcattaattaatgtttttatttgagatggcacagcgaaaaaataagtgaattttcaggcgcacccaattcatcgtgcagacttttcgcggctttggcattaccgcactttttgaacagaatggaaaagctggagggaaatttgacattaagaaggtgaaatatctaattaatattaattaa

SEQ ID NO: 56047 - DNA, 442 bp, Heterodera glycines
atggtcaccaaagtgttccttctgttccccggcgaaacttcggtggcatttctattggaaaagtttttccttatttattcgttttggtaagtgtttgggttgtgccgaattgatgaaattgcgaaattatgaaattcaagagtgaattaatcgcaaaatccatttaagggtttggccaatgccattgcaattaaaagaaattaattatgccaaagaagaagcatttctgaattggtcccctgaacgagaatggtttgagagaaagcaaagcgaagttggccatgcccaaatttggatggaaatgccaatcatttcgccagtagttccttacacaaatatggccaacaaaattcagccttctgtcgctaaaaacattctaaatgaatttttgaatggtaaattaaataaattaatggaaaggaaaaagaatccaataaattaa

SEQ ID NO: 56048 - DNA, 759 bp, Heterodera glycines
atgggccaagtcccgccgaagcttaatttcaatgggaaattaattcaaataattctcactaaattcgggaagaaaattggtactttactcaaagaaagttttgttgacgtttataccaatgaaaaggatgagaaaattggtagggaaaagcatgagaaatttcgaatggaattggaggacgaactttttgcaattggtatgaaatttaaaaaggaataaaattaattcatttaaaaattaataaaagtattaaacattttatggaatttttttaggggatgatgatgataaagctgcgagaattatggaaaagttggaaaaaatggtaagttatgaagaacggacaacggcacaaagtgattcaatgaaagaggaagtgaaaaaggcggaaatgaagcgaaaaaccatttggcaattgatggaaaatctgaatgttttgtggggtaattttcaatttattcatttagtttattatttacattaataaaacgtaaattgtatttttctttgatttttattttaattaaatttaaatccattaacttttattaccattttaaatttcagagcattcgcttcccttggctcttcttgagcacttattgtcaccaaacgaattgtatattttgcaccaaacggacgacgaaaatgtgctgaatggaagcactttgaggaggtttagaacattttatgcatttgtcgaattatgggcaaaaggtggcgacaaaacggaagaataattaattagttttaattaaa

SEQ ID NO: 56049 - DNA, 1101 bp, Heterodera glycines
atggccggggatcgggattggccacatccccaaaatgccatcaagaatgtcatgccaatgccattccattcagttacccttcctccggtcaatggcattctgccgtccgatgcaatgcgactgaatgcagttgaagtgctggaggatgtcgattttcgttacgcaaagttagcgcttaaatccaatgttatttcctataggcaatcattgttttacttttattatccgaaattttgttggtgacaaaatttgaatacgggttagactaactggtcacttgcttaactggactaaaaacgcttttgctgataggacggcggctacagcccggcagattcaaattccacccagattcggctcgagagtcaatcaaagtctcgttaattatcgctgatcactcaatgttttgccatttgagtgttttttacaacttttagacaccgatcagtttattttatcagttggtccaacagttactgtatagtcagtgcaaacattgtactgattttctttgttatcatttatcagagaattgtgtgacgcgcactctgattggacgttggcgtacgagcggaaacggacccgcgtttggacacgccgcgtggacgacgccagcggtggcggcaacggtgggaaacagtcaacgctgcaaatgatcaaaacgcgcagcgaattcgccgatgtgccggccgcactttgttatgacatgcttcaggtgagagaaaaaggctgaaaatgcccgagagttaattgagtcccgagaacgaagcgaacagtgctcgggaatttgagttttgccatttgcgcgaggctcggaaattggcatttgaaaatggaagcaaatgttgagaaatgccattctcgacatgattctcgagcatctcttttaagcttttacagtgctaattaattcattttccacaggacaccgactaccggttaaaagtgagtccaatcaatcgatttttcatttattcttccaccaaacaatttgatgccgtaattccctaccgtaccatcacagtgggacaaatacatgctgaagacggtgcctgtcggctttttgaacccgaacaacgacatttgctattacgcccgtag

SEQ ID NO: 56050 - DNA, 426 bp, Heterodera glycines
  unsure (1)..(426): unsure at all n locations
caacgcagaattaaagtacagactatnagggaagctattcccgaaggattcggtctccccataaatctgggcgcatcggttcagggggactgccccgaaaacccaaaaaaaaattttttggataaaaattatttaaatgaactgactagataatatttaaaataggttatttctcttcctttcagtatccctgcaaagtttggtgcgcttctgatcagtttctgaaaaaaaagttaagcctaaactttttggcctgtttaaaaaggaattaaaaatttttaaaaattttattcatctccctttttgatagaaaaagcatcagagtgcctaaactaacatgtaaataaaatttggtgcgtttcagaaccctttctgaaaaaatatttaagaattaattttgcaaaaaataaataaaaacgaaagact

SEQ ID NO: 56051 - DNA, 1681 bp, Heterodera glycines
  unsure (1)..(1681): unsure at all n locations
atgaaagatggacaaaacccaaacgcctttccattaagcatgtaaaaatccaatgaaaaataaacgagataaccgatgagaataacaaagatagaatcaacatacgcagtcgtgcacacaattntaacatcaaaaaaagcaattccaaaataaagcgagaccgctgcttcagcacggcatgaacgcgcagagtctgaatgaaatcncatgaattcggaaccgcaataaaaatgtaaattagatntaaggattcttaacccatgtgggttttgggaattggttttattaggtctttaaaaaacgaggttttttattttttaacaaaaggtaaaagaaaaataactaatcaaaattaatttattccaatcgcaaataaaatgagagaattgaaaattcgagtccgcccatttgaaattttttctggctacgggcccgcccctaaattgtctttttcgaaattccttaaattggaaaatttacacttttttcgttttttgtattttttattctgggtttggtttttaatggctcacctgctgaagaaaagcgtaagtcgataaacaaaattgttgtaaaaaaagagtatcgtgaattttattgctaaatttttacgtttgacgaaataatttaaagcgcaaaaaacaaaatttcaatagtttttgaagaaatcaaaaatatttcaaataacattttctttgtcaccaaaatccccaaactatatcattcattcaaaaataaacaagaaaaatcacagagttactgacagacatgctccattgaggaaagtttttgctttgaatgcattaaatgaaaattggtaactcatattggacataaaaataaaattcaggccattcattgatgagaaaatgtgaagaaaatgataaaggggcgggctccttttatttgaacaaaaattgtgagtgggagagagtaagaccatccgtaatctttaatctattttgagtatttgaaagcattttacaatttcttttcgttttttttaattctttttccttcttttccaacttcatttccaaaaaaacttatcccatatccactttattacaagtggcacccaacaaaactttttttacttttttttatccttctcgttaagtttttccaatttcgttttcctgcttccattttattttaaaaaatgcttttctctcccccctccccctcatccacttcatttttttaggaaagcaaacaaataatatttgagaaaaggaagcattttgattaatttgcacgactcacggaaaaataaatttgaggcaatggaatttggaaaacaatataaaatggcataatgatgaaaaatattaggggaatttttaaaaatttaaattaattaaaattaaaatttattatagaaattgtatttgtttaaaattgaataagcagttgatgaaatcaataacagagctaccgaattcatcgataaacgccaaacggggaaaacataggaaaagccgaagaataaaaagtaacaattaatttttttttaattgttttgttttttgggtggcacctcatagctgtctgattctaatcgatcggaaaagcaaaaaggggaaaaagcatttaaaatgccggggggcagggagggaggataaaagcggggggggggcggggggggggactgatattgctgctgtagtagtggaatcaa

SEQ ID NO: 56052 - DNA, 807 bp, Heterodera glycines
aatcatcaacgcggtccgctccatttcaacgcctatcatcaccgtggcattggccgatgagcgggacgaaaagttggcacgacgggtgaaggcacggattgagaagaccacattgggtagcttttttaaatcaaatcccccccccccttttaaattagctaaaatttgttttccattttccaatttttcccaaaaaatgtaaatttcaggagcatttccgccctgaaaatttcaaaaaacaaaatataaattttaggcgatatcagtgactatgtggagcaagtgtttttgccggacgacctgttcgtgctgatcaaactgaacacccggcgaatcagagcaatgcaattggaggtgtttatttaaaaaaaaaagaatttacaattttgggattcaacaattaattcaattaaaaacataaaaattcaaacaaatggaaccaaaaacttctaaattttttcatgaattcaagataatggtttgaaaatttttcatcgattttttggaaaaatttttcaaaagttttttggaaatttcttacaaaaacaactaagggtttttgaaaattttccgggcgggaatcaacctgctcccgaggacatgttcggccgagtagaaaatattttttccaggtgaccatggacaccatcatcgacgcaatttgcgccgccaaattgccggtgccacgcattctgtgcgaccaggtccgctcggtgggcaagtcgatgctgctggtcaggccggtcgagtcgtccaaatgttcgatgaccatgtacatgcactacctgaagtaccatctgccgtcgg

SEQ ID NO: 56053 - DNA, 4580 bp, Heterodera glycines
atgactcgtcgaactgttctccaacagctcgcctccgtttttgaccctctcggactagtgtgcccggcacttcacgatgccaaaatgtttttccaatcactttgggaaaccaagcttgactgggatgatcctcttccgactgacaaagtgcaagaatggaacacaattgccacgacttggaaccagcaaaaggtccgtgtcccgcgccgagtcaccccgttggaagtggcctctcatcagctacatgcctttgtcgatgcaagtaaagatgcctatggagcatgcatcttcattcgggcacaacatggagtcgcgatcacggcccatctcatttttgccaagagccgagtgaagccaaaggggtcaaatctcactattccgcgcatggagctcatggggatgctgattggcattcggatgcttcaatttgccgaaaaacagctcggacttgccattcgccacaaattcatttggtgtgactccaaaccagtccttggttgggtgtcatcttctgagcagcaacctcgttttgtggagaatcggctaaaggaaatccgtgccgtcgaccaagttcgctttcgctacatatcgacagagcaaaacccagccgatgtcgcctcacgaggatgtactgtgcttgaactcacctcccatccactctggtggaacggcccaagttggcttatccatcccgaggatcgttggcccatcaccatagaagtcaagcctgccaatgatgacgtccaaaacattgctgagatcgctgccatcgtacccattgtccaaaaggacgaagcatggatttgcgccgacagattcagcgactggacttgccttcggaacgtggtggtgcttgtcctccgtgcccttcgtcgatggctcacaatgtctagcaagcccattatcggattgtgctcccgtgtttcggcctgtggaccaatccaagcaagcgattttcaactcgccgagcgtcttctgatcgaacttgcccaagttgactgtaccgatttggccaagcaaaggcccgaggtacgccttcgcactgacgaacagggattgatccgccttgagaccagactcggcaactgtacagcaagtgatgactggaaaagcccaattctgcttccggaccagtcaccaatcactctgctgataattcgagatcgtcatgagaaggtgcgacactcaggagtagaagccacgctcacttcattcctggagaaattttggtgccctaaagccaggggcacagtgaccagagaggtcaaaaaatgccttcgttgccgacgaatccaaggcccggcatttgctctgccagccatgccatccctgcccactgatcgtgttgtgcgatctgcaccctttgagcatgtcggcattgactacttgggccctacaatgacgagaatcgtgaccggtccaaccaccgcggcacataaggcctggatcgtgctgataacctgcctggctactcgtgccgtctatcttgaaccggtcctggacctaacagcctcgtcatttcttctcattctgcgccgcttcacgtgccgacgaggcgtgccaactcggatccttaccgacaacggaactcaattcgttctggcatccaaagtttctgcggctctcgaagccggcagagtgccaacttcagcactggaccgatttctggcacgagaggcaatccattggcgttttatccctcagttgtcaccttggcaagggggagtctacgaaagactcgttgccttggtcaagagctgcttcaaacgagagcttggccgcgtaatgctctcatgggaagagctggtcacatacacagccgaagttgaagcagtactcaaccaaaggccgctctgtcatgtctctgaagagcctgacggaatcctgccactccggccaattgacttcctccttccaagagcaaaacttggcattgcgttcaatgccgagactgaaaatgaagagttccgaatctcttcaaccaatcaacgagatacgctcatccaacgttggcattccgtgtcatcatcaatcgaccatttctggaatcgctggcagaaggaatacctgctgatgcttcgccagagattgcagtggaagttcaagaaacagaggaaccaaattgcgcgagagcccacggaaggagaagttgtgctaatctctgaagaaaaacttcctcgcaactgttggccgatgggacgaattgtcgagttacaacgctcacacggggagattcgaaacgccaaaattcgattggccacaggaaaagtgctaagccggcccctaaatcgtctttatcccttggaagtggcttcctctgccggacaagatgagagccaccagcagctgacaaacccgccgcttgaggaacatcacaaccgaacccaaacagcggactcaactccaatttgccaactgcgtgcccggcgcaattcacctggcccgactcattctatggtcactcgctcaaaaaccaaagcactggcctccgttctgtccattctgatgtgcctatttctgattggcgcttcccaaaccaacgccagtagcacgaccaagccaaagcgtgggaaaggacttccaattcgttgccgtggatgcgaactgacctgcacaaaaaccggcgttgacatttcaataccgaatgggattgtcaaattcttgctatgttgtgccggtggaactcagtgcatcactcaatcaggcgttcggaaatcctttcatcgtttgcccaaggaacatcttcttttcgactacgattgcgaagcaatgtactggacgaaacggggcaacaaaagaatcgggagcgtccaatgtccaggcagagatgcgtgcgagctcatcgattgttgggtgtgcctcgaacgactggcaaatcctgattgtcgtccagatgtgaccttcggactcattggtggagcgagcttcttcactttcctcttccttttctggattctgccactgatgtgccacgtcaccatgttttggatcctacagcatcttttcaccctgctcgttcgcttattgtgttgtttttggccaagccaaaatgcaccgcagagagaagaatcccctctccttgccttccaaagtctgcctactccgcgcaggcgccaaatgagtcgcagtcgttttcgtccttttccaaaacttcaaacgacgctcctgttattgaccctatgtgcctttacttcatgtgccagggcacaagttgtctcaatcactgcctctgctgagaaatgccaaaggtccgactttggctcggtgtgccatctcgagagctcgacaacagttactcttctcccatcgggtctgccggtacgtctactccttcgacatcccgacgagagagtccttggcacgcttgaaatcagcatgcgctcactgactttgcattgcctgccaaaatctgagcaatggcttcggtcctatcacattgagacagtttcggtaaaacggtgcccgagtcgtggaaattgtacacgcgagttctgcgatgaagtcaacaacggaaggaagacagaagttcatgagctgagcgaatggaccaagcatcccggattcaacagatgctcagcatcttgctccttttggtggtgcgggtgtttaaatgccggtgccagctgcatcttctaccgtccacatgccattgctaactcgccaattgtctacgagcaaatctcctgtcctacatgggaataccgcttgcgcacttcactcaaactgtcggtcaacgcaaacttcacgaaagagccgtccgtgtcgctcacacccggcattactttccgttggaaggatttgagcatcacacctattgcctcttcggttcctccggccccaatcatggcaaacaagttcctctcggatggcaataacatggcaatcagtgatgaaatccaaagtgaccttcaatgccccagtcgtgccaatgccaaacgcctcaactgcacactcagatggggctcatgtccgatgtgcctgcctgaccacgattcagcaaaaatcaactgccaatgccgagatgtcaaactcgaaccagcactcgccgatcctgagaagcgcctaccaattcagctcaaaaacttgcttctccggaacgaaaggcgggacatttttgccgaaatcacctacgcgccgattcagttgtccattcaattcgaggggcttcgaatcgctacggaagaagacctcacaaaatgccatgccatgtccaagggtcttttcgggtgctattcatgccacactggagctcatctccatttgcaatgccacaccgacttcggttcagcacttggctacgttcgctgttcggatggcacagaattcacagccctctgccacaaaacaccagaagttttgaatgtcagcctgtcattcaaccgtgccgaggtcgacatcaattgtaccattgaatgcagtggaggacggaacccattcgtgattaatggtcatctccgctatgtgccaaaacacttccaagcacctaatggaggaagctcatttgcctcgaaggccaaacccagcaactcatgcctaatttggtgcccagattggaacttcgacttttccgatgtcttttg

SEQ ID NO: 56054 - DNA, 700 bp, Heterodera glycines
agtagccaggcaggttatcagcacgatccaggccttatgtgccgcggtggttggaccggtcacgattctcgtcattgtagggcccaagtagtcaatgccgacatgctcaaagggtgcagatcgcacaacacgatcagtgggcagggatggcatggctggcagagcaaatgccgggccttggattcgtcggcaacgaaggcattttttgacctctctggtcactgtgcccctggctttagggcaccaaaatttctccaggaatgaagtgagcgtggcttctactcctgagtgtcgcaccttctcatgacgatctcgaattatcagcagagtgattggtgactggtccggaagcagaattgggcttttccagtcatcacttgctgtacagttgccgagtctggtctcaaggcggatcaatccctgttcgtcagtgcgaaggcgtacctcgggcctttgcttggccaaatcggtacagtcaacttgggcaagttcgatcagaagacgctcggcgagttgaaaatcgcttgcttggattggtccacaggccgaaacacgggagcacaatccgataatgggcttgctagacattgtgagccatcgacgaagggcacggaggacaagcaccaccacgttccgaaggcaagtccagtcgctgaatctgtcggcgcaaatccatgcttcgtccttttggacaatgggt

SEQ ID NO: 56055 - DNA, 68 bp, Heterodera glycines
atggcaaaagaggagaatgtaacgggacaacacttgttcatttacagctcattcatctacaagcaaag

SEQ ID NO: 56056 - DNA, 416 bp, Heterodera glycines
atgtatgcggatcctgccggatcccgcacaaaaatcaaatttgcggatcctgttgcaggattggaattcaaaattttttgccggaccggatccggccggattaatcctacaaatcctgcattttccaaaaatgcaggattgcggactgggatcctgcaaaatcctgcacaggatccggtcctgctccgggctctagtatcgggtattgttgcgcgaaacgtttcaattttggacagctagcagggaaatccaaaaaattttgggttgttaattagggatctgtttaccaatcccgcaatttcgttggattagggatgaacaatcagccccaattttaacactggtacagtagtcatggttaaaagagttgtacatccattcatccttcattaatgattaatgatattgttgaaaaa

SEQ ID NO: 56057 - DNA, 1420 bp, Heterodera glycines
atgttcgcgcagcacttccgacgatggccaaaatgtatcacaaatggccaaataagcgcagatggaacagtggcggacgaaagggtggcgaagggcaccgaaacgacggaggacggacagccaagcgaaggaggagctgagggagtaagaaagaaaagggaaaatggagagacggggaagggaggggagggagaggaccgaacagtcacctcaaaatggagagaatggagggcgaatgggccgcacatccaaccaactcgccaagggtcagcgccaatttccccaaaaagacgttggactgctgtaatcaatcagtgtttttttttgtgaggcgtaaatgaggacatccgggtcaatagcagttcgtacaataggagtttcgcacaatggagttacgtacaatggtgtttcgtataaaagccggttcgtacaacgaacgtttcaatttggcgtttcgtacaaaaaaattcttatttagtaaaaaataatgacgggctaacccctttctgcaaaaaaatattggggaatggaataaaatgttatgtaaatttaaagtttgtcgaaaacttcattggccaagttcagttgaagtgatgcaaattctccgaaaaagctcgaatgaattattattgttttggttattactattgttatttttataattattagctcattacttatttataatttgctttatttttgttattttgatgaaattatgtgtcactatcacttatttttttttaatttgattattgtacgaaacgcaaaattgaaacgttgtacgaaccggcttttgtacgaaactccattgtacgaactgcctattatacgaactgcccattgtacgaactgcctattgtacgaactgcaaattgtacgaactgcctttgtacgaactgcccattgtgcgaactgccatgaccccgttttttagcttttccaaagaatcgctgaatttttttcaacaaattaattttgaaaaaaatattttccggcggtgccaatcgccgcggcggatgagtgaattccaataaatttacaaaaaatttatccaagaagggatcattgttagaattaaaaatctggggggttctaattttttaggtgtggaaaaacctgggcacgataaatttacaaaaaatgattcccggcttttcgaattgggtgagaccaattccgactcgaggcccaccaatttcttaatttccccaatgttcatgttgtgtttaaggatgccgaatgcgagggcagtttcgccattgagccaattgacggtgccgaactgaggggccaatgtttggccaaaattgcgaaataccaaacgaagcgaaaggcattggacaaagcagtcggcacaaacttttttgttggcattcaagacgaactgttggcattcagacgggccaagcagaaacag

SEQ ID NO: 56058 - DNA, 100 bp, Heterodera glycines
ggcagttcgtataataggcagttcgtacaatggagtttcgtacaaaagccggttcgtacaacgtttcaattttgcgtttcgtacaataatcaaattaaaa

SEQ ID NO: 56059 - DNA, 1249 bp, Heterodera glycines
atggtcgaacaatgtaaagactgccaaaattctgcaaaaatgccacgtaaggcaccgcttcacccatggcctgtgccggatggagtttttgacagaatccatgtcgattttgccggtccttgtcaggatggtcgaacttatttgattttagtggatgcaaaatcaaaatggccagaaatcactcaaatgatttcaacaaatgcggccagtacaatcgatattttaaacaaaactttccacagatatggttttcccaaggaaatggtcagcgacaatggtcccccattttcatcgtttgaattccgccgtttttgtgaacaccatggaatcaagcatagtttttcaccgccgtaccaaccgcattgcaacggtttggctgaacggatggtagacacttttaagcgtcaagctaaaaaggagggcacaaacaaaaatcaaaattggatttcagaatttttgttttcctacaggacaaatccgagtcaggttttaaacggttttgctcctgccaaattgttcttgggtcgcatgccacgaacatcactttcattgttggcaccgaaaaacgattcaagtccgaacaagatcaatgtctaccaaagcaagatgaaacgacagtatgatcagcaccatgacacttctgatcgacaattcaaaattggtgacacaattttaacactcaattatggtcggtatggtaagccatcatggcttgaaggtaaaattgttgatggtaagaatttggtctggaaggtcaaaatccattctttgggtattgtggttaatcgccacataaatcaaattcggtcatttattcccaaaatcccaatttcaaaagattttgtcgaagagcagagaccaaattcgccaacaaagaccccgacgacaaagaacaatcagcctcatggttcgcatgacgagcaaccttccgttttggcacgtcctcagcgtgaacgacgcccgccgaaacgattgaatatcggcccaaatgctggcgctcgatatgaaattgagggataatttcatttaaagggggagatgttgtggatttgacaatttaaatatattttattatttattgacacgattccctgtgtcatcacttggaaatgtttatttaatattgaccctttcactcattcgggtcacttgccgttctctccttcatttttcatttcattgattgtctttcctccgtcatttatttatttgttatttatcatttatttttctgtttgtctttgcttta

SEQ ID NO: 56060 - DNA, 899 bp, Heterodera glycines
ccgtttcagcagcaggtagagtttgaatggcaaggctttttaaatgctttttctaaattaatttgaccatcttttttcagatgtgtcaccaaaatacgactgcccaaagtcaaacgcatcggttcactcattgtattttctgaccaatgattcttttgccgttaaacatttctttcattgaagacaatttcgaactgcttcaactcccttcagttcggagtatcttttaattgtgcctttgagaacattcactgtcaacggatggttctttttcagaattgcccgaccattggtgttccatcgcttattttgagttagatactcagtcgggcgaactgttcaaagtgccatggcaaatcaaagaggtgccattgcataaatgttaatttgtttcatcggacaatatttaattctttcaatttcaggttgcaattgacggcggaatggacccttccggcgctttgtccgctcgcttttgtttgggcgcacttgcgaatgttcaccggaggttttaccactttgtaatgaaagaaaatggcactttaagtgaagcatcggaacgggcacgaatgcacattggcaaaggggtgggcacacaaagggacagaaaagggtcaaattggcactgccaacgactgatcagttggattttggggaatgaatgacctaaaagtgatcaaaatccgtttacaattggatcaaaggaggaaagatttgtacaacagttaaatcttatcttacaatgatttacactttcataatttataggtttcgttgaaatttgctgacaattgcgaggccgtttttctcaagtccattgaatttttcatttttttcttaatttgtttttgttctttttttctcagatgtctctcccaaaaaagcgttttcgtacgaag

SEQ ID NO: 56061 - DNA, 656 bp, Heterodera glycines
atgcattctttgatcattctcggcattgcttttgccaatttggcaccaaatgcttttggccagcaatggccaaaagcaacaagtgatgaaacggtttcggcaaccatcaaagtgtcgggcggcaccaaagactttggctacaaaagattgaccgcctcttcggcgttgggcaccggtgatcagtcggagggccaaaaagcgctgatccgtgccgaaaagggcgcagtgatcaaaaatttgatcatcggccaaaacggggcggacggcattcactgctatgacgggtgcacgctgcaaaatgtgtggtgggagaaggtgggcgaagacgcggccactttccggagcagcagcggatgcaaggagtacaattttctggtgacgggcggcggtgtgaaaaatgccaaggacaaagtgttccaaatgaacggcggtggcacgttgacgatcaaagattttgtggtaatctacacatatatttaataaccaaaaatgcgtggcaattaatcccggatttaaattggatatctatgccatggatgcaatggaatataattgaattttttaaaatattttagaccattgtggtcgaattcccattcaggcaaaatccatcttttccccgtgttctgtcaattatgtaattatttattccctaa

SEQ ID NO: 56062 - DNA, 725 bp, Heterodera glycines
atggttgtttcgaaagtcacacaacaaaacaacgccagtgaagatgaattggagttgcacaatgcctggcctcaatattccccagccgataaagttctccccacacgctttctacaaattattagactcatcaacaacaaattcaaagagcgtttacccgcctggcaaatcattgaacaacatccgcaacacttcacccatttttttatgcaaattcttcaaatggcactcgacgaaaaacttccatttgtgcaccaaatcgacattatcactttcttatgcaattgttttaattctttggaagtcgatttggtgtgccgtgaagctggtaaactttgttcaatgcccatttggataaatctactcaaggttggcggatttcaactattttttgaattcataaatcaccccaaatcagagacaaagagatttcttgctggagcaaaatccaaaaatgaaaaagatttggacaaagatggaacagaaatttgccaaattaccttctgatgattttgacgctttggactttaataggaggtttttatggcggttgcttcaaaggctaaagcggacggttgacttcatcgacgatgagagacaaagtcaaaacaattaaagaaccttaacaatctcttcttttagaagccgacattgatgctgtgagctattgtgaacggcttgtttctctttttattgacttagaagcgcagcttacgactcggtaa

SEQ ID NO: 56063 - DNA, 117 bp, Heterodera glycines
aaattagtcaaaatacatgtcagattcgtgattagcgacctttaaaaccccggataaaaaattatcatggttttttatcgtaaaaaaattttgcaaaacaaaagggtcccccctttt

SEQ ID NO: 56064 - DNA, 548 bp, Heterodera glycines
atgtccgtttccccggtgatcagtcgcatgctcagcgtggagatgaaggagaagcagcagcgaatgatcactttggacgaattgggcgtggacatggaccaattcatggagtttttggaggccatcacttatctgaacggaccttttctgcccaaccgtaattccattatactgtatctattcaattcaaccctctgaaatatttctctcccattttatggggttgaaaatatgtgatatttaaatttttttaaatatgattccaatttttagccaaaaatgtgctgatgcttctcaaattggctgattacttccaggtgggtcctctgatcacttatcacatcctcttttccctgtctgatcattttaattaaatattaaatttaaccaccataatgctaatgagttttgtcctaataaaagtgtcgcttcactttcaggtgtccgcgttgaagtcgcgttgcgaaacgcatctgatcaattgcgtggaaattccactgatcgaccgtttccttttgattgatcgctacggactcgacaatttgaaa

SEQ ID NO: 56065 - DNA, 58 bp, Heterodera glycines
ggattgctggagtcgtgggttcgagtcccaccgggcgagttaccttttatgttctaca

SEQ ID NO: 56066 - DNA, 1315 bp, Heterodera glycines
atgagcgcggaccaacttaagcaactccttgaggccatgcgtgtgcaatcggatgcgatccaacagctaatgggccaaacaccgcaaaacgccgcgtcagcgagtctgaaccatgcaaatttggcaagttccatcgacggccgaatttcaaaattcaattacgacgccgaaaccggaaacactttcgaacagtggttcaaacggtttggagttttgattgaggaagatggtaaggacctccccgagtcgacaaaagtcagactactcctcggcaaactcggcgacgaggagtacggcaaataccgcgacagcatcagtccgacccagcccgacaaagtcacttgggtggactcgatcaccaagctgaaaggattatatgccgaaacgcgttcactatttgtccggcgctacgacggtcacgtctatttcattttggtggactcattctccaaatggccggaggtctaccaaatgaattcaatgacggccgcggcaaccgtcttcacactccgttcaatcatccaccgactcggtattcctgaagaaattgtttcggataacggaactcaatttcattcgtcagaatttgcggcactctgtaaggagttcggaataaagcacacttttacgccgccattccatcctcaatccaacggacaagtcgaacgtttcgttgacactttcaaaagggcgatgacgaagtgcaaaggcgagaagaacagccttgaaaaagtgctgctctcctacagatcaaccggatattcgccagatcaattgttccttggacggaaactgcgcaccaaattggcactcgtccacccaaaaggacaaattgatcagtcggagaaatttgaaaaatgtaagttcaaacagcaccaaaaggactattcaaccaaaatggcacagcaattcgatcggaacaatggcacaaaagctattgagttcctcccaacggattccgtcctgctcttgaattatcgccttggaaaaagccattggctacagggcacaattgtaaaaaggctcaacaattcgccaacataccgtgtccacgtcccaactctcggccgaattgtccatcggcatgccaaccagcttcggtgccgattggattttgaggacaattcaaattgggaaccccccattcaggaacaaatggccattgagccaaatcaaaggacaccgccacgccaacacgcagccatcgatcagcgaactccacctgttgttgatcaggctaggcaaaaggctaaaagcccaattggcgtccgacgttcccagcgcgtgccgaagccggtcaaacgcttcacgccag

SEQ ID NO: 56067 - DNA, 667 bp, Heterodera glycines
ggactcaattcttctgcatttcaatcactgggactcaacccaccaacattccaatcaacaggactcaacccaccaacattccaatcaacaggactcaacccaccaacattccaatcagtgggactcaacccaccagcatttcaatcactgggactcaacccaccaacattccaatcaatgggactcaattcttctgcatttcaatcactgggactcaacccaccaacattccaatcagtgggactcaatccaccaacattccaatcaacaggactcaacccaccaacattacaatcagtgggactcaacccaccaacattccaatcaacaggactcaacccaccaacattccaatcagtgggactcaacccaccagcatttcaatcactgggactcaattcttctgcatttcaatcactgggactcaacccaccaacattccaatcaatgggactcaacccaccagcattcaatcactgggactcaattcttctgcatttcaatcactgggactcaaatctccggcattccaaacaatggactcaaatctccggcattctaaacactgggactcaacccaccaacttcaacgggactcaatccaccagcatttcaatcactgggactcaatccaccaacattccaatcaacgggactcaatccacca

SEQ ID NO: 56068 - DNA, 319 bp, Heterodera glycines
atgagtgcaaagcctttgctcgagttgtatgtgaaggtaaatcacaaatataaaacaccaaagttttttttattgtttttcaggcctcagggattgacagccgacgcatcggtgcatgcttattttgccaagaattttggatggaactctacgctctttacgaagtgggctgtgttcgtgttgaggtttcatcggaaatttctgctttatgcaattaaatttttcgctaaattaaggtaaaaactgtgaatgtcaattcggaaggatacaaaaagcacttttcgggagcacagccgccaataatggtggaacaagacaa

SEQ ID NO: 56069 - DNA, 783 bp, Heterodera glycines
atggccaatttagtgaaattggtacgaaattcatataccatataatttctaatttgtgcataatcaattaaaattttctttaaaggtcggcttcttcatcctggttcttttatggccaaaagcattagcaaacagtaggtcgaagctcacaagctcacctttcctattttgtatgataaaattattattttaagtaacatcggaagtgaaggacatgatggataagttttcttcactaaaagcttatacaaatgacatcgtcaaaaaattgagaaacgtgagcgataatatcgacgatttcatttgggtcacacgtccagtgagcgcattaatcaaagcaggggctaaaaccgcatttcaagtaaaaaatgttttttaaataatctatttattttgacttttagtttaattatttgtttaaattttaagccaaacgctgaagagctagaagccattaaagtatggcataactttgtaaaagtcgagtttgaaaaccttatagaagtgacacaacaactaaaaccaggaattaaatattatttaattcaagacgaatatataaaggtttgaaaaacaaatttgtttattcataatgaaattacgaatattaaatttaaatatttagaaaagtaattctgttattcatttgtttttcaggctgtgaaaagaccaatgcatggtttagaggaactttataaaaatataacggacccagacaaagaccgttcacaatatttagaaaaatttcgtgctggatgtttagcacagcttgaagttttgcaa

SEQ ID NO: 56070 - DNA, 304 bp, Heterodera glycines
aaaattccctcaaaaataaaaggtctattgcgcaccgccctccctatcatgctcgagagcatttgtatgtgtataaaatttatcaaaaaaagagatagccatttttctgggataacctctaaatataaaaatcctctgtgaaataaaatggcgattgtgcaccgccctccctatcatgctcgagcgcttttgtgtggtataaaatttctcaaaaaaagagatagccatttttctgggatagagtataaatttaaaaattccctcaaaaataaaaggtctattgcgcaccgccctccctatcatg

SEQ ID NO: 56071 - DNA, 304 bp, Heterodera glycines
aaaattccctcaaaaataaaaggtctattgcgcaccgccctccctatcatgctcgagagcatttgtatgtgtataaaatttatcaaaaaaagagatagccatttttctgggataacctctaaatataaaaatcctctgtgaaataaaatggcgattgtgcacagccctccgtctcatacgcaagcgcttttgtgaggtataaaatttctcaaaaaaagagatagccatttttctgggatagagtataaatttaaaaattccctcaaaaataaaaggtaaattgcgcaccgccctccctatcatg

SEQ ID NO: 56072 - DNA, 1135 bp, Heterodera glycines
atgtcaaaaatatgtacaaaaattgatcaaaatatgtacataggtaaatatgggcacccccacaaagtgtccaagccacgaaaaagttttttttatttttcacaagaaaaaaattttcaaaaattctcaaaatatgtataaaaaacgaaaaatttgcagaaatttttgattttttttgaggatttccaaaattttccgtaaaaaattctcaaaatatgtaaaaaaaaagaagaaaatatgtaagaaaaagtacaaaatatgtatcaaatcccgaaatatgtaaaatatgtttaaaaccccgaaatatgtaaaaatatgtaaataaaagtcccaacattttgttcgcaaacacaaaaaagaaagtgtttttcccactatttagagcatggagaagtcaggaaaaaaatgtatttacataaaaggtaaaaacccaactcgtactattttagagtatctttttttctctgttctctgatgacttaacgctgtctcgcttttttctgtttctatatttactacataatagtacgagttgggtttcgtccgtttggaaacagcacgtggtacggctcacgtgcaaaaaagccgtaaagcccgcgtgcccgtgaaacccgtgtccagcctaaaaacacggattacgggcgcgggcccgtaaacccgcgcacgggcccggcctaatccgatctctaataatcattaagttcctatcacgtttgtttcagcgagggtacgctacatcaaaaggcagccagcgacctatgtgaccgcgagtgaaattgagcgggcttcatcctcatataacttcgaattgtatcgcaaagacatggccattattcgcgacatgcttctggatgatatcgaactcttccagagcgttcctcaatgtaagccaatggagggactgaccgcaggtcccggtcccggcactggtcagtaacgttccaagtttttcctgaaagtacagctccggcctattttttaaattttgatggaacatttttggtattggagaaaaaaacgaagaatttttttcgaaaattttccagatttcaagccatttttggcttttcagatcactatgaaggagtgaaaaccaaatataatttttgtgaaaaaagttcagaaaaccaataaa

SEQ ID NO: 56073 - DNA, 698 bp, Heterodera glycines
atgttaattggcaggattggaggtaatcgtacgctttactggtcccacaaaaaaaaggtgaaaaaaaggaatttcagcttttaatggtgcactcgggggttcagggcgctgatcacgaatatgatatctatttcgaatcccgaacccgaattccaataatttttttgtaaaaattttgaaaaatacagaccataaaaaatagtttttttaaattataaatataaacatttctagggggtttcggagtcgctgatcacgaatctgttacccatttcgaccaattccgaagcccggacctgaattctgttccgattctaacaaagtgaattttggtttcgaattcgggttcgggattcgaaataggtcgaaatggatgtcatattcgagatcagcacctgcgaaaacccctgagtgcacgggaaccgcccggctcgccgcgaccacttcgccgcggccggttcgccgcccatagaaaaatgtccttttcgccgccataattattgttcaaaaaatttttaattttttttttcaagaatttgttataacttaggctgaaactatggtgcgaagcgaaaaaattaattaaaaataagtttctctttattttgggcaatttaaatgtatatgtattaggataaaattctggcgatggatacaaaagaaggaacgattgaaaaaggcgaagccgattggtttaa

SEQ ID NO: 56074 - DNA, 232 bp, Heterodera glycines
acccattcattcttaggcacgtattgaggctcggcaacacaaactaacgggtaattggaatgcaacttggaacctgaaatacgccgaactcaaaaggccgactcgagtgggctcaaatgggaaatttggttggcaattaaacataagaatgtccaaatgattccatttttaggcattaagctcaggctgaagaaggagaaaagggggtttttgtttttctcttccaaagatg

SEQ ID NO: 56075 - DNA, 851 bp, Heterodera glycines
atgtttgttgatcagacaaaacgccaaaaatgcgccgaatcgtttcaaaaagttggaaaacgtaattcaacgggcacaaacacaaagaaattatttggagaaagaagtggaagaagatgtggagaagtgcaaggccgaagtgagaaggcttttccaccagaaattctctggtaattttggaataaagggggaaaaggtttcgtttcgttttttcagattttgaattccctccgatcgtttgggtggtaatgcattcgctcctttcccactgtcaactgttggctgattctcaccaatccgaaggggctttttctgttgtacgctttgggcagcacggattcatgcacttgagcaatgctacattgcgtgcattggacattttcacaatcggtggagaaattggtaggaaaaatggaatttgcactgttagttcagaccatttaatttttcctaatattaagatgcttccgctgttttttcttctccttctgtcacgctttttgatcacatgaacaaatgtcgttctcagcccggcaaacgcttaatacgtaagaatttatcaatttattattaacgctgcatttttatttgaaacttatttaggcgaatggttacgccagccactctttaacattcgacagattgaaggtgattttcatacacaaaaaattgacatttattatatatttatttcagaacgactcgatatggtcgaaatattaataaattttacatccattcgtcaaactttgtacaatgattacttgaggcggattcctgacatcaaatttttggcgagaaaattggtccaaagaaaagccggactaattgtttgtttgtttgttttttag

SEQ ID NO: 56076 - DNA, 3274 bp, Heterodera glycines
cttatcaaattgaattgcttccggcgaattcgacgagcctttaagccaatgctttgtccacgataagccaaaaggcgaatttgcggcggctggcaaattcgaaagcggtagcatttatttgtttaattttttgcgtaagtactttgaccggtttttctttagcctcgtctacgactcagaatcagttatcggttggcgggtgccttgaatacaattgacgctgaagtgacgagcatcgcctgcctcgcctcctaacaacagtcccttcccactctaatgatctgtgacattccatttgttcattctgtcattagtccacttttaattaatttatagtaacaatgtaaatcattctttgtaacttagttcattgtttaaaggaggaaatgagtgtttacttttccctataattgcaaataatctaacagtcaatttcgactggtattaattacatataatttcaaagaatcacaataagagttggtaacactaacaagccttcaaaagttcttttggcttaacgccctaagtctcgaatggagaatggaatggaggaagaggagttcgattttggcgcattgggtgggcgtttcggatggtttgtacgggcggacagtgaggcggcggaggagcggacgccgttcgatcgtccaaaattttctcaggtgttaaaaataagaattggcttttttttattaatatccgttgggaatgcgttttcttctcccttaggttctccaactgatcccttttttgtgtcgttacgcgttcttttggcttcgcaatgttttcagtcgggagcgtcttttcatcgatattttccgccctttccgtcatttcccttacaccgcgctcccctgcggtgcgattggttcgggctcaatcagtcgggactttcgtggcgccttttgtcgcttcaacttgaggcctggcctcgtccagcaacacaacgagccgattaaggcaaacaaagactgtgactgtctgaccttcgctttgtcgtccctttgttaggctgaccaattcgtcctcactttgtcttccgccgatggctctctcatccgtcagactgcgctcagtgcggtcccttcttttgctgcctctgatgagttgtcttcctgggagttttccctttctccaaatgatgtcacttatcggtcaattagcgttaattttgaattttaaatttgccttccctaatgcgcaaaattcattttgttttcttttttccagtgctctttatccgcgcgcgtggatgaaattcgaattgcccgaacaaaaagtggtcgttttgatgcgtcaactttcgcccgttttgcccggtgattacatggcgcgtttcccttcgcttttcccttcatcgtttcagcttttccttcagaattcctcgttgccttgcactttgttcacttttcgcattgtcaataactccgattatccgctgaatgtttccgtcacttttacctttcgtaatgcaattgacgtcaatgacgtcacacccgccacggaatgcaattcaaatctcttcaaaacgagcaaaggtcggctcaaattccattggcttcccccttcgtaaatgccatttgccaatgtcagcggaaggtgtccttctccaccagtcggtgttcggaatgccctgcaccttcgccttgggtgccctccctcgtccaactacggcgatgtccgccactcgctctttcgatccctccggggatggcttttgcttgtggaattcaatggcatccggagaaacactcgctgaaattggtttatcaattcacaattttcaaagtgtgtacttttttaattttagtagatcagccaaaaaagaacggcgctttcggagttgccttgtcacagcgtacgaaagtggcagcaaacagtgcgactgattgtgaccaggagatggcatttgcactcatttggcatatgtttgggaaagggcgaagaatttgtggattaatttgcttttcatttttaaggccctttgttcaatttggcggtggcaaacgcacttttcgaaggtacgaaatgagttgggaagaaaagggtttctgggttgaattgcattcaattgtgtactcaactcgtcccaatgctccgatggcgagttgctgaagggacgaatgcgaaacaaagcgattcctttcattggtctttgatctcagagactgaaactgcgaagcaacactttgccatttattttttgttaaatgtctgctttattttgtcccttttctcagatggtattcccaatttttcgatcaatccgaccagcaaagcggcgctgtcgcattgtgtgaatacgctctcgccaattacgtccaatgggaggcggagattgacaaatggcagggcccaattctgagcaatccgtgagcatttccattcgtatttattttatccgaccaatttgattggtcgcccattgtcagtgcccttcccaattggttcaaatccgcgctgttcaacgagctgtactttctcaccgcggggggcaccgtttggatgtgttacgattccgaatggcgtcagcaggaaacgcaactgtccgattactcggccgcccatttccgtcgttttggtcgctttggctatttggaatgtgagaagggaagggcaaagggcgagcgcattccgcacaaactcttcttcagcttgggaatatcgcatgctcaacacttacgacgttcacttttacgcttcgtttgcgcttggccatttgttcccccaattggaacactctcttcagacggacttcagtgagtccgctttttcttcgcggatgtcctcatttaagatgatcagatctgccatttcgaccccaaaacagtgaaatatcacatgagtggagtccattcgccggtgaaaacgaagaacagagtgccgcatgaccttggcaacccaggcactcccccacccaattgccccattaattaattgctcttttacagcggaagagccatggcttaaaacaaatgtctaccgaatgcacgacaccagcgaatggaaggatttgaatcttaagttcgtgctttgttcctatcgaaccttttgcacagtcctcgggagagatcgccaattccttgcgcaagtctcgcaattccatttttggcgaacaaatgaagtgacgatgaatacattgaggtgtggccgcaagtccaaattatggtggctgaagggttggaacattgggacactgacggaaacggaatgattgagaatttcggccccgctgaccaaacttagaggcatggaaaatgcacggagtcag

SEQ ID NO: 56077 - DNA, 1596 bp, Heterodera glycines
atggcaaatgttgttgaaatgacaattgagaaaattgatgaagtcaaatcaagactaggaaggtgtgaattaattgtcacaaacctataattgataggcatgactttaacattttaaggacattgggtgcgtcgatgcgcttgcgtgatttgattcgtcaagtccgagcggcacgaacagcggccgaggaacgggcagtggtggagaaagaaagtgcaaacatcagagattccttcagggacgacgacaacaaatacaaatgcaggcaattgcacggagtttcgcattcgatcgaaaattaaattaaggaatatggctaaacttctctatattcacatgcttggttatcctgcacatttcggacaagtaaacattcatttttaagacgaaatccgtttcaatccttccaaatcgaaaggttgaatgtgttaaattggtgggcagcaaggataaacgattcactgacgttcgaattggttatttgggcgccatgcttttgttggatgagcgttccgaaattcatttacttgttacaaattgcttaaaggggttttaaatatttcttttttcttcgttatatcttttcatagccatttaaatgatccggaacaattcgtcgccggtttggctttatgtactcttggctcaatttgttcggcggaaatgtgtcgagatttggcaagcgaagttgagaagcttttattgaagtcgactaacacctacctcaagaaaaaggtaggaaatgtttggacatttcctctatttgctggtattgaggccgctctgtgtgcgtttcgtatcgtccgaaaggtccccgaccttattgaaatgtttatctccagcacacgctcattgctcaacgaaaaacaccacggtaaatgccacttttaccataggcttttgcatttttgagggtttaaaggtgtactaatggcgggcattacactcgtctcggaaatgtgcgatttgagtgccgatgtacgcattcacttcaaaaaggttctttattgatttaacaaccaaataaattcggttttacattttggatggtgcctaatttggtgcgcatactcaaaaacttgctgatgaatgagtattctgctgagcatgacgtcgctggtataagtgacccatttttgcaggtctttcttttcacatagatttcttacaattagctaattttgaatttaaggtcaaaattctcaggctattgaggattttgggcagagatgacccacgggtcagtgaagagatgaatgacattttggcacaggtggcgacgaatacggaaacgacgaaaaatgttggcaatgccattttatatgaaacagtattgactataatggaaacaaaaaggtgggcatgaaatagcaaggctaacagtacgtaaaaatgaccaaattcagtgaaagcggcttgcgagttttggccgtgaacattttgggtcgttttttgcttaacaccgacaaaaacattcgatatgttgcacttaacactctgctcaaaactgttgcaattgatttccaagcagtgcaaaggcatcgcaccactgtggtggaatgtctgaaggatgccgacatttccatcaaaaagtaa

SEQ ID NO: 56078 - DNA, 578 bp, Heterodera glycines
atgatattcccagaaggatccgtatttttccagttggatccgtcaattttcaaggagagccaaccacaaatcatcatgcctgaaggttatgagtctggtcggggaaaatttgagttcgctctcggttacatcggttgttcggttatcggaggattcggagttggaagtgttcgtggaatgttcggcgagttaggaaatccacagaacagaactttggtttgtggactgattgtgagttattatataaaaatgaaaaaaataatttcaaggcttggaatccgtggtacactcggatgctgaatgccgccactaagcatggcagcggatacgcacaaactgctgggactgccatgtttctctattcggtcactgagttggggctgaagctgtcacgagccgatgacttgcttaattcttttatcgccggaccaatcgctggcggacttttccgcggattgcctcatgggctgcgtgctggcggtgttggtgcattggccggactgggtttggtcaccgtctggaatttgtgtgatcgagacagcagaagagagttgcgcgaaatcctccgattgtcttaa

SEQ ID NO: 56079 - DNA, 274 bp, Heterodera glycines
atgacaaaattcattcaaaaaggtaaaaaaataagtcaaatcagtattgagttaccttattttttaaattcaaaaatttgtccaaaaaaaatttaaggacgatttttgagaaaattttttatttcttaggagatttattttcagaaatttttgggtcgattcttaagggtgtatttttcgtttttattgcatttttttaataaattttcggcaaaacgccaaaataggcaaaaataggctctttcaaaattttttaggcttttaagctctaaaa

SEQ ID NO: 56080 - DNA, 1002 bp, Heterodera glycines
ccccggccgagactgagacaaccccggccgaaactgagacaactgcagccaagactgagacaacttcagccgtgactgatacaactccagccgagactgagacaactccggccgagactgaaacaactcctgccgagacagatacaactccagccgagactgagacaactccagccgagactgaaacaactcctgccgagactgatacaactccagccgagactgagacaactccagccgagactgagacaactccggccgagactgaaacaactcctgccgagactgatacaactccagccgagactgatacaacttcagccgagactgatacaactacagccgagaatgagacaactccggccgagactgaaacaactccagccgagactgatacaactccagccgagactgagacaactccggccgagactgaaacaactcctgccgagacagatacaactccagccgagactgagacaactccagccgagactgagacaactccggccgagactgatacaactccagccgagaatgagacaactccggccgagactgagacttctccagccgagactgagacaaccccgaccgtgactgagacaaccccggccgagactgagacaactgcagccaagactgagacttctccgtccgcgactgagacaactgcggccgagaccgagacagcttcagccgagactgatacaactccagccgagaccgagactactccggccgagaccgagacaactccagccgagaccgagagaactccagccaagaccgagacaactgcagctgaaactgatgcaacccgatccccgactgctccatcaaccagaggcggatattatcccggagctaggtcaacacattcatcttctgccccaactactccatcaaccaggggcggatattctcccggagctcggacaaccgattcatcttcagctccaactccgccaccaaccagaggcgattattatactgggacaa

SEQ ID NO: 56081 - DNA, 1141 bp, Heterodera glycines
ccattcgccttgcttggcaaattcatctgcaccgtccaattttccgacaaaccaccgcaaactctgatcgcctatgtgagcggagaagtcggacacaatttattgggattgccgtggatcgaagctttgaagatcattccccgccaaattttatttccgtccagcaaatcggctgatcaggcgacaatgattgaaaatttttcggcagtgaagccaccaaacaaatcgatcaatgatgtggcatcgcttacagcggcactccaaaatgatttcacggaagtttttgaagatggattgtgacactgtcaaaaaccaaggcgcatatcattctgcgatctgatgcaaagcctgtctttttccgcgcacgtcccattccacacggcgccatggaagctgtgaatgccgaattggaccgtcttcttcaaatcttcaaattggcgcaattaagccgatcgatttcagtcattgggccgcaccgatcttggccgtaaaaaagaaaaagggcaagtcgagagtctgcatcgacttctcgaccggcctcaacaatgcattggaattgaaccgccacccactgccaaggccggacgacatttacgcctcactgaatggcgcaaaatttttctctaatttggatttacgcgatgcgtatttgcaaatggaaatggatgaagaatccaagcaattgtgcgccatcaacacacatcgcggacttttccaatgccaacgcatgccgttcggagtcaaatcggcacaggcaatatttcagcatttgatggaacaaatttgtgctggcatccctggtgttttcgcgtatcttgacgatggattgatcgcaatgaaaaccctggagcaacacatcacggcactttacactctttttgggcgcataaaagagtacggtcttcgcatccaactcgacaaatgcaaatttttgcagcccgaacttttgttccttgggcatattgtgtcagcaaacggcattcgtcctgacccgtcgcgttcagacgcaattcggaaaatgcccgcaccgattgacaaaagcaccctccgatcgttcttgggggctttgaattattatggaagatttgtgaaatgcatgcgcgaactgcgtgcaccgctcgacaaactcctccaaaaggac

SEQ ID NO: 56082 - DNA, 825 bp, Heterodera glycines
atggcacgtggaggaacagacgaaggcgggacagttgccggtctcctattttcacatcgtatacaaagcgatcaaaagacgagtccaaaagcaacagaaggaagagtccaagcaggtcggaatcatagtgttgaaattgaaaaaggggattttcttatagaatttggatggatcacttgaaaatgccatggcagcggacgaagaggaagacaacggcgacttttggcagcagcgacgcctcacaacggaggctgtcgaccgtcaaagtggcgacgagaaacaatcgcttcagaggacggcaactgggaagaattgaagcagaacgccagcgaaatgaccgcaattcggcaaaagagtggggaaaatcattttatttctatttcttgttcaacatttgtttatttcagatgctgaaaatgagtacgacattggcgggcttcagccgttcactttgtacgagttcaccttcgtggccttcaacgaggcgggcagcagtgaccctgtgacgatgaaacaggagacggtgaacgattgggtgccgccgccacgcgaagtgcaaaacgccgaacggcacaacgaaaatgttggcgtctcgtccagctcgacatcagtggccacttacatcagcgtcggttagtcgaccgttcattatttattttatcccaaaaatgatacaacataatttaaagcattgatttctccttcacaaagggaaagatagaagcgttcgtaaaagcgaaaagaattttaaaaatttaaaaaggttttcaaatatatgaaataatgaatagataatcttcgctcattaatttcattcaaaatcaa

SEQ ID NO: 56083 - DNA, 305 bp, Heterodera glycines
  unsure (1)..(305): unsure at all n locations
atttttcgtgctgtccagcttcgtcatcgccgctgcctattgctccatcgactcgggtgggaatgcctccccctcctccgccgatggcaaatgcattgcgacgcccacccccgtgccctgagactcaattaattctttttttttttgaatttcacattttttgcgttgctttacttatttatttttgttctttttggtgctcattcattccttttttgattttctttcgatttcaaacaaacaccataaatatctcttgaatctcctctctttcgcttgatcttttccnnaatttacgacgatca

SEQ ID NO: 56084 - DNA, 663 bp, Heterodera glycines
atgcgcacccgtccgatctggcaagttaagcaacgattgctgactagccaaaaggttcggtgccgtgatgaaacgaaccagcactgcttaccccgcggcacccggcacggtcccccgaaggaatggatttaattaaattctctccttcggggatttttttccattaggtcgtccgttagcgttcgattgctctagtcaatttttcaaaatttttgttgaaatatttgtcgtgctctgaagggcgtgggaggggggggggcgaaggcccaccacgaggccgcgaagaggccgagtgagtaccttcggtgcaggaaaattattaaattttaaaaattttttaattgctttttaaatatgccaaaaaatgtaggcttaacttttttagtgaaaattcgatcactcatattttttgctaattgagcagaagcgtaccaaactttgcagggatactccccggtaaaggactaacttacactgaaatgagcgccgagctagctggctcaaaaaaattttcgaaaatctgagtctttcgtttttatttattttttgcaaaattaattcttaaatattttttcagaaagggttctgaaacgcaccaaattttatttacatgttagtttaggcactctgatgctttttctatcaaagagggagatgaataaa

SEQ ID NO: 56085 - DNA, 262 bp, Heterodera glycines
aaacaaaaaaatcgattttttcaagtgtccgtttggggtactcaaacaattatggggagcaaaaatccaacgcagaattaaagtacaggctatagggaagctattcccgaaggattcggtctccccataaatctgggcgcatcggttcggggggactgccccgaaaacaaaaaaatcgattttttcaagtgtccgtttggggtactcaaacaattatggggagcaaaaatccaacgcagaattaaagtacaggctataggga

SEQ ID NO: 56086 - DNA, 304 bp, Heterodera glycines; identical to SEQ ID NO: 51570

SEQ ID NO: 56087 - DNA, 2179 bp, Heterodera glycines
atgggcaggttagttcgtacaaatcttttttttgcactttcaataaagctagtattttctctcaaaaaaaaaatcagaatcgattttcaagcctagaaaaaaagttttttaaattttttttgcttttttcaaaattttttcacttttttttcttcacttgtaaattcattctgtttttttttactgcattctaatgcaatttaaaatgaggtggtttttgtttgggttttttgtcaagaaaaaaattgaaaaatatttttaaatgagcaattagcagtttaactcagggttgcgatctcaaaattttgaaagtcctcaattcagagataaaaaatactcatttgccactaaaatacctgaaaaaaatcctcattttttaaagcataaaaaatgcaaataaaatcaattaagagtcatatttttcatttgaaacaatcaatgtcatcaatttcttgtcatttataagcattttacggaagtctgagcacgaaaaatcgaagttgcacttcactcgggccaacgctttcaccgtgcatccgttaaatttttcgcttttagatttgctcttttcgtggcgcggttttccaaaaaacttttcggaaacatcgggagggggggtccggcagtgccgataggcgctgccggaaaaaatttggaattttgagtgcgattgttaacaaattttgtcaaaaaaatgattttgactgaggatttttcgaaaaaatgtttaaaatttgaagaaaaagttcgaacattttgccaaatatacctaatttttaaaaaaatcatgcggttttgtcacttgtttaacaaaagaccacaaaaatcctcaaatttctcaaaaggtcacaaaaatatgcaaatcctcatttttcaaaaaaatcctctttgaccctctaaaagaccacaaaatgagtaaaaatactcagatatcgcatctctggtttaactcatttaacaaatgaatttcttgatgctaatacaaacatcagcagacatataaatcaggagatggagttccgaggcactaaaaattttcggaagtcggaactcggaattccgaggccccaaaaattttcggaagtcggaactcggaattccgaggccccaaaaattttcggaagtcggaactcggaattccgatgccccaaaaattttcggaagtcggaactccgacccaaaaaaggtcggaagtcggaactcggaatttttgaaaaattttacagaaattttaaaatatttcataagttaactttaaagttataaatcaaaattactaaatataaatgtatttatgtattaaaaaattaatattaaaaattaataatcaaattcaacaattgataaattggactgcaaaaaaatcaatttcctaacattgtctcccttaatccggtttcgcaaatccgtacaaatgagcccggctttagaaaacaatctttcgctttcaactgatccacaaggtgcgctcagaaattttgggcaacacgacaaagaagaggccattttccatgttcttctttcaacttccagtaatagaaaatacaaacagaaattaaaaacagaaattaaaaattctcaagaaaattaagtttttttgagtccggcggtgccgataggtgccgtcggaaaaaaattgaaaatttctatgcaatttattaacataaattgtacaaaaattgctaattttttgaaaaaaaaactcaaaaaaagaggcgagtttaattaaaaataaaaatttaattttatttttcaattgcaatttcattaattatccacgttttttaaaggttttgccagcacatcagcttattttgaagagcgcttgagtgaaaatttaaatttgtgattggcgtcgacccagcggggtgccgaaaagcaatttaaattaatggggaataataaaaaattaattagaaattatttcttatttataataaattacagcgttccaaatttatatttcttcacggatttgcaattcgtctcgttcccaaaatttgacacaacaaattctgatcaatttgcaaaaatgcctccgatttaagcaaatcgtccttttcgtcatttttccaacaagaaggtgcattggcgcctttggcgaaaaaacttaccttggaatacaaaaccaaaaaaaagcaaacaaaattttaaaaaaaaatttgttttaattaaaaaa

SEQ ID NO: 56088 - DNA, 1173 bp, Heterodera glycines
atggcctcttctttgtcgtgttgcccaaaatttctgagcgcaccttgtggatcagttgaaagcgaaagattgttttctaaagccgggctcatttgtacggatttgcgaaaccggattaagggagacaatgttaggaaattgatttttttgcagtccaatttatcaattgttgaatttgattattaatttttaatattaattttttaatacataaatacatttatatttagtaattttgatttataactttaaagttaacttatgaaatattttaaaatttctgtaaaatttttcaaaaattccgagttccgacttccgaccttttttgggtcggagttccgattccgaaaatttttggggcctcggaattccgagttccgacttccgaaaatttttggggcctcggaattccgagttccgacttccgaaaatttttagtgcctcggaactccatccatccctggtgggcacccgattgagcggcgccccacctactgttggccgccgtagtcgagtgtgcgctggcttttagcgcattattcactattcaaggctaaaaaatgtgactcgtcaagagctgtcgaatgataccaattttgtacggatttcatccttataaaaggttaggagagccccattttgttcattttttaattttgaatcggtttaaagttgaaacgagtaaaatttttgattttttagtattttgtacaagtgtttgatgtaaattaataaaaatacgaaaatttgaccaaattgaaggcatttttgcaaaccgatcaaaaaatgttatgcgaaattttggaacgtgacaaatttcaatttagaacacaggaatttgacaaacaaataacgggccaggccgtttcatacgggccgttttcgtacgagcacatgtttttggactataacttttttctttgtcaaccaaattcaatattcttggtgtcattcgagagcacttcagatgccaattagcctgcaaaattccaaaaaatttcgtttagtttaaaaaaagttcgagccaaaaaagttggaaaatctggttttttgaattcttctgatcataactttttttgaaccttaacgaaattattcgaaattttacaggctaatagaggacacttaaggctatcgaataaacaacagcgttggatttgattgataaataaa

SEQ ID NO: 56089 - DNA, 816 bp, Heterodera glycines
atgaatgataaaatcgactggctcggccgcttcgcggcctcgcatccttttcttggctttttctccaatcgccgggactcaacccaccagctattccaatcactagggactcaattctcctgcatttcaatcactggcactcaactcaccagcatttcaatcactgggactcaacccaccagcattccaatcactgggactcaacccaccagcattcgaatgaccaggactgaacccaccagcatttcaatcattgggactcaattctcctgcatttcaataactggcactcaactcaccagcatttcaatcactgggactcaacccaccagcattccaatcactgggactcaattctcctgcatttcaatcactggcactcaacccaccaacatttcaatcactgtgactcaacccaccagcattccaatcactggggctcaattctcctgcatttcaatcactggcactcaacccaccaacatttcaatcactgtgattcaacccaccagcattccaatcactgggactcaattctcctgcattccaatcactgggactcaacccaccatcattccaatcactgggactcaacccaccagcatcgaacattttcctcgtcttttcttctttcttgtggcatttccttatggcacaacattcttggcattttcatcatctcttcttgtttcttgtggcatttccttatggcacaacattcttggcattttcatcatctcttcttgtggcatttccttatggcacaacatgacacacattagtgtctcacatgaaagtcacagaacaaaccactaa

SEQ ID NO: 56090 - DNA, 269 bp, Heterodera glycines
ctgaatccgatgactttgttgggaaacggatttcgcgggattggcaatggatttccaaaggcggatttgacaatttgcattttctttgtgccattttcttcgatgtccaattgcataataagcaatttgttgttcaatttccatttgcgtgtcttgaagtgttcgtccacgtaaaagtcaaagcggcggctaatcagtgcaattccaaggccaagctgagaaggcgcaagaaaatcgaacaccaaaagccaacaatcgccgcagacaaa

SEQ ID NO: 56091 - DNA, 782 bp, Heterodera glycines
atgccgttaacaagacttccggtaaatggctcctgccccccgcccaccccccaacaaaaaaattgggacaagaagcatcgggaaaatcctaccgggatctcgctggaccacgaatgatatcaagattgttgggtttcgatcaacaattaaaaaaattatattggctcaaagttggctcagacaaagttagcccgttccgattccgaaattataaaacttaaaaattgagtgcctaagaatcggaaaaaaatttatgctatatatataaaaaaaaataataagtctaaataaatttccatgtatgtttcgtagattcgtcacagctgtcatcatatttctccccaaccatttaaacggacaagaaggaagttcctagtgtcacaaaattgccagcaaagaaacgacatgataaatagggattttttaagggtgaaaagtccaaaataaggccgtaaataagggcgaaaaattcgcgaaataagggcgaaaataaggtcgaaaaagtcaaatttagggtataatttttaaaattgctgttttttacatgaaataatttcagactaaggcaaacaattttattcactgattgcagttacaaataagctatattttagaaaaaaattttcatttcttagggtctatttttgaaaaatttagtgtcgattcataggggtatattttttcgaaatttttttgggtcgattcttaggggtatattttttcgaaatttttttgggtcgattcttaggggtgtatttttcgtttttattgcatttttgtta

SEQ ID NO: 56092 - DNA, 97 bp, Heterodera glycines
ttggatgggtccgtggcacggcacttcccttcccagcggtcgctgctcggcactttcctcgacccaattgcggacaaatttctcatcagcactttgt

SEQ ID NO: 56093 - DNA, 213 bp, Heterodera glycines
atgtctcctgttattgcccctttcgtcctcgccatcattggcatcatcgccttgcccaccatcgaaggcgcagtcgggcgtcagcaagtcaagctgggcgagcagtacaaatacgagaatgtgcccggcaaattgatggtcaagcgacaaactgcggccagcaaggagccccagtatttgttcgccggtcaaacggcatggaccacggacgga

SEQ ID NO: 56094 - DNA, 1667 bp, Heterodera glycines
atggcctatcgacggctaacgacaatgcttcaacggctgcagaagactcccgaggtgctcaagcagtacaccacagtgatcaccgatcagctcaatgcagcaataatcgaggaaacgacgatcggagctggtaaacacgaacacttcatccctcaccaagcagtgatcacgcccaaaaagttgcgggtcgtctacgatgcgagcgcacacacacgaggggcaccttccctcaacgactgcctactcagaggcccagtttggctgccggatctggccggcatgctcattcggttccgagcatgccgagtaccagtgatcgccgatgtcgagaaagcatttctcatggtcgggattgaagaggacgacagagatgtgtgcaaatttttgtgggtgcgcgacccatttcggccagtgacaacggacaatttggtaacataccgatttcgacgcctcgcatttgggctcacgccaagccccttttgtctcgccgccgttgtacgacaccacctgcgcaaatacgactccaacttcgcggaagaactcattcgggacacatacgtggataatgtgctcatcccggcggacactgcggaagaagcagccattaaaggacaagaagcgaaacgaatgtttgcggacgcgcggatgaaccttcgggaattcttgagcaatgacgagacactcaacagcagcttttcggacgcggaattcctcggcaagacgacggccaaagtcttgggactcgaatggaacgcggagacggacaaaatacgaatgaagtaccccgggagcgaacccgacactccgatcagcaccacacgcagaacggtgctgagcagcgtcgccagcctgttcgacccgctcggcttggtctgcccggcgaccctcaaggcgaagctgttcttccaaaagctgtgggacgacaaccacgaatgggacactcctttgtcccgggaggaagctcgagaatgggagcacattttggcaagttgggagggggaaagtaatgtgattcctcgaggcgtaactgcgggcaggggtcacccgcttcaactgcatgtgttcacggatgcatcggaaatcgcatatgcagcagcagcttacatacgaacgggaggagaaagcgggtgcaactcccgcctcatcatggccaaatcacgcctcaagccgaagaaagcggctaccacgttcacaataccaagaatggagctgatgggcattctgttgggggtcaggctggcagcattcatcgaaaagcaactccaccatccaatcgcggggcaacacatttggagcgactcaatgatcgctctccactgggtcagaacggcttcagcgcaaccacaattcgtggccaatcgactcttcgagatcagaaaagcgacagcaacgacgtttcactacattcgaactaacgaaaacccagcggatttggcaactcgaggggaagtgcccaccctcttacaacacaatgatcagtggtggaatggtcctcaatggttgcgcgggccgagaaccgaatggccaagcgaattggagtttcagcctgatcaagagggcctaccctctccggcggggcaggaagaaggacaatcagcattcattgtccgaaatgaagcatccacaggcctcgagagtgaacaattcccgagttcgttgcttacgag

SEQ ID NO: 56095 - DNA, 1044 bp, Heterodera glycines
atgttggatttggcacgcccaaccgaggagaacgccgatcagaagaagccaaaagatagtccgacatacagagaccgaatcaaaagaaattttgatcggggaactcgagaacgaacttttgaaattggccaaaaagtttttataaggaattatcgtgatgggcctaaatggtttcgcggtctgatcatcacgaaaaacggggtgatttatttcgttcggactatgagaggtgtttggaagcggcacgctgatcagcttaaaccggggatttgacggtcgaagatcatcaggagaacgaatccgtggacagcgactcgaatgtcggtgatcaataacaggagactgaagatgaacagaatgatggcccagctcctcccgaacttcgacgatcacagcggaccaagaagaaaccgagatcttggatccaagcagctgatccttgataaggagggagggatgtgatgtatccatccccttattatttatcttcatttatcgattaacaagataattcgtgggttatgtttagggatattaaaaaggcatgttctcaaaaacattgaaatttaaccaattccaaaaatcgcccgaaatgtcaaaaacgggaacggacttttcggtttttagttaatacgaaaatttttttaaaaagtctcgggattttcggtctcgagtctagagaatagcctagatcagtttgagaatttttttcattaaagagattatttatatatctaattcaggtattgaaactaccaataactttctgattcataagtccgagtaatttgtttagaaattgattcgatcatggaatctaatcatggataaatttgaaaaaaaacctgcttaaggtaccgggtttttgattatgttaatcaggactgttgcatgaattttaaaaattcaaacacttgtcctgactgtcctttgtttttttaaataccaatctccggtcaaaatcactaggccaaatcaaattccaaattgttaactttttgttccactaaatatttgttcgcaaatttccccccccccccccaa

SEQ ID NO: 56096 - DNA, 454 bp, Heterodera glycines
atgaaggggttagaacttttaatctttttatttacaaagtccataagagaattaatttaaaaacttatttaatttatgttttccagtgactttaactttggggaagccgtcaaaaatttccaactgttggacgaaggaatttattgatcgggcacttttgcatatttttgcattaacggtcaatggaaaagtcgtaattcggatacacttatggtgtcggtgatgttgtcgctgcggtgttaatttggccactcgacagataatttccaaaaaatggacattgtttgggtatttaaaattttttgtcgaaacattttgttttccgatcatttatttgtttattttctttgcattttttgcatgaatttgtttataaaatatatttattcgttgctgcatcttatcccccacagaggcgtcaaaaaacaatagaatactaatatttggttgtgaa

SEQ ID NO: 56097 - DNA, 925 bp, Heterodera glycines
atggtggcggcggaggagttggaggacgtcaaagaagaagtgatcggacgactgctgaagcttttgcccaaagttttggaaggactgaagccaaagcctgccgaactatcgacggaagtcgaccgacgcattcaggcacttgacgtagtggaagagcaactgaatgtggtcaaaagagctcgagcgaccgacgaaatggtgacgggggcaatggccaaagtgatggcacagctgagaaatgcgtcacgaggaatgggaacaatggacatgagcacactgaggtgggcaatcttaattaattaggctaagggactaattggggggataaagggattaaaaacaaagagttggtaattaaatggatggatggttatttcagttctcttcaatcgaattgggacaatctgatgagaaaggacacccattggcaaattcggaaggcaattaacagcctggggggatgcccgaaagacccgcagggcaacacgctaatgaagcaatgcatggaggaagcgatcaccaaagtggaccgatacattgacgacgtgaacgactggttcaaatcccagcgaccaatcgacatggacgactggaagtggctggtcagtgcaaaattggcatttgatccaacccaacgttggcattttcaaaacaattttaggctgctgagattcaaatgataattcgttggaagagcccttgaggcggcagagaaggagaagaagacggactgttctgatctgattttgggattgattgagtttcttagaggagaaaacacaccaaagaacaaaaagattcaaatgtttcaaatacagaaaattgtaaaaaaatgaagcaaatttagagcaattaaacataaatattaatgcacagttgaacaaagtgattaattaactaataattggttgtctattctaataaa

SEQ ID NO: 56098 - DNA, 519 bp, Heterodera glycines
atgccagccagagaaagagtgttggcaccgagtaaactgatggaactgatggaaaagctgggcaatgtgctggttacggacccaaaaatgcgccaaaagatcgacaaatacgacaaaaaaagagcggatgaggcggcgcgaagggcggcgatgatgccaccaaggcaagacccacaagcgattgcaaaacgcaggacgtggccgaaggaggacggattggcattagaaaggggccatttgcctcaaggcaacaaccagaggtaattaattatcagaaggggtaattagaggacattccaaagaggcaatcaaatttgagctgactgatcaatttgtacattttcccagtccgacgcgactccagtcgacgcccaggatttggattcaagaagatgaccggtggcgccaaccgatgactttctcccgaaaagacgtgcgggaaagaagttggctcgagtcggacaccgactcggacttggacagcccacttccgtgttgcgctcgcggcgaaggagtcga

SEQ ID NO: 56099 - DNA, 648 bp, Heterodera glycines
atgagggccacgagggagaaaaccgcggcgttttcacgatggccagtttcaggaatctctggccccatggggctgcaaggcccacccggacttcaaggccaaatcggaaattcgggcagcacgggccctccaggccctccaggtaaacaaaaaccaggaatttttgcatttgagcgctttttatgcgctcccacggagtattgtctgtgctcggaacgtttcaatggacttccgccggacgaaggaccgccggaaaccgccggtggccgaaacgccagagacggcaattggccaaagtgcgtatagaaaattggcacatgccacggcactgcgacgcacgcgacaccattagcattgagaaaagaacggacgaattgcaatttattattatttattagttaattaatgataaagacggaagaggataatttgccaaaagatgtcatcattaaaaaagagcgaaatttgttttaatttttaattaaacaattttggcgcgtcttcgtttggctgtgcgttggcaaatgaaatgccgtgcctttcgctttacttccgcgcgcccctcccatggcttttcctgccaaaatccacgtaaaccaacaaaaaattgttggcttaatgatgcatataatgaatgaaagcaataaa

SEQ ID NO: 56100 - DNA, 740 bp, Heterodera glycines
atgttcccaaagcgatggtaagtgaaagaaacaaccattttcgctttgattgaacactgttttcatgccctccccccctcccaattttgccgcggttcgacctcgtcattgtcctccgttgtgccaccgaatcgctgttcgatcggctgaccgaacggggctattcggagaggaaaagacgcgagaatttgtaggccgaaattttcggcatcatcgcagaggaggcaaagtgggcacatatatatcgatctgatgtttcattttaattccaattgttaagtcctttttttccgattttttagccatcgcgctgaacgcaaaatgggcaaggatcgactcgataacgccgcgccgggtatctcctgacaatttaatgatatttctggctttacctaccatttcggattatctttcattttgaagcctaatcacttccgtatcacttgggtggccatcgtacacaaactgtcaagcatttaagccattaccaacctttgcattcaactttataccatggaaaactttgacgaaaaacattgaatgaggcatttgttgtcacttaaatcggctctgtttgccgttttaaaatcctgtctgatttttctgtgccgtattccggtcaatttggcatttttgcaaatcaaaatgtaccccatagttttgtttaattttctcttctcagttccctccatccatcaatgaaaatctgtgtccgtatcagggatgggccaaattgaaaa

SEQ ID NO: 56101 - DNA, 547 bp, Heterodera glycines
cacgcggtggagggaaattcggcgattttgcgcttcgacccggacagagtggtgcagcaggagtgtctgatcaccaccttccagaccgcctacttcttcacgcgaaactttgaagaagctcagcaaaagcttcggtgcttttccaataaattctcaaaataaaagtgccaatttctatttggcactttccgtccttttcagcacattcacttccaatatgaaccgccccttcgttgtccgctacaatccgtacacagaatcagtggaagtgctgaacaacaaacgttctctgatgttggccgtcaattcagtaattcgtttcattaatgcaaacagagaccaaactgaattttgtgtcagagtaacaaataaatgcgaaattcgactttgttcgaatcgcatccggggacatcgaaaacatgctttcaagtcaaaaaatggtggtcgggagatggacaaacaaagggttatggctacataattttcaaattttcagcttcgttcggatatcaatctgttggctgcttcccttcacaacatcctttga

SEQ ID NO: 56102 - DNA, 1170 bp, Heterodera glycines
atggaagtgcccgatgttgaagcagcagcgtttaaagtgatgctcagcttcatttacgcggacgatttgagcgaattgaacggagaaaacgcaatggcagtgctttacgcgggtgaaaataattttaatttatatgcaattaagtcaatttttaatttaatttaatcttttgcgacccgctctcatttatgaaaataattacaaatcacttacgctttttgtttttaatatttcccagaaattttatgattgtttagctgataagtacggcatcgatggattggtcagtcattgtctgcaaattccaattcaaaatctgcccaatgttttcttggcccatgcccatgctcgtcttttcaatttggaggtggaacaccctttttttaattaagtgtccattttaatgtatattttccaaaaaaaattaatttttataatacctatataggattttgctcaccaatatttgcgttacatttgtcaaaatgcgggcgaattgttcgaatcagaggaatttttgcaaattgaccaggattttctttgtgaattattcgtacgtgatcagttggtgatcagcgatgaatttgaaatttggcaagctgtaatttgtaatttaattttattgtattaaattgatctttgtttttccgtttaggcactccgttgggccgacgaaaaatgccgtaaaaatgccatcgaatgttccgctgaaaatcgtcgtgaagctcttggcccggcactgttcaaaattcgtttccctcttattcatacaagtgagattgccagatgtaaattggagctgcgaatgttcggcaacccttcgaattgtttcgcaaaatctcggaacggaggatttgacgacaaaatgtgaccatgtttttaataaggaatcggacagctggggatttcctcatttcattacttttacagtgagtggctttaaaacaacttttattcgcttaataattgtaaaattaagaaattgatggacccggacaaaggattttatgaaaaagagggggacaaagtgacattggccattgattttacggttgaagaaaaaagggacaaagcgcaaattggtcgataaataagcccattcaatcactatttctgttgatttggtctttttgaaatttatacaaaaaaattcggaagcattttaataaa

SEQ ID NO: 56103 - DNA, 1717 bp, Heterodera glycines
atggcaccacgacgcaagagaaaggcggctcaattggtcgggcaggacgaagcggtggtgagcggaccgagcgcacaggtgaattgtgttcaccatcaaattttcacatttaaatttcatatgctttttatttcacagttgccaacgaatgacggacaacaattggcatcagcagcaccagtgacaaacaatggcaccgtccaacaagcggaaaacgacggaactgacgcggtggcggcagcagcagcagcaattgatggcaccggcggacaagtacaatttttgtcttttcgttagctaagggggggggggcttttggtttacaaaattcaccggatggtatatgaaaaaaaaaaacttgttaatttggaaaaaatttgggtcagtgttgcttaataaattctcattatatttaaatcttttcagcaattggcggcaaacaacaatggcggacaacacgcggaagcagcagtaatcgatggcactgggatgcccaacggacaacaaattgaggcggcagcggatgaaaatgacgacacaattgggcaagcggtaatttttcacaagcttttccaaaaaaattattcctttaatttgaaggggaacaaattgttgcggcgggcggtggccaatcaatgcatttcatcgtccggctcgcgcagcacagtctcgcgcacggcgtcgcccgcactttcttcgacttcgtccaatgcctcccgaagacagaggaagaattacaacaaaagtggacgcgtaccggtaagaaaaaatttgcaaattcaagccaaacacacacacacacacattcacttcctagataaatgtgaatgccgattgccccaatgttccgcccggtgtactgccgaacccaaaaactcgccagtaccaggtcaagagcgttttggcgcaattcactcatgcatcggggaggaaatgctatttcttggagtggctcggtgagtttgatgatgaaattgaaagaaaaaatgtgtgaatgaaaaggtggacggatggataaggaaattgaaaatttattgtaaaattccaaacgtgtgccgagttaacctggtttagcttcgccacttttggaacggaataatttgagggtgtgggccgagttaacacagtttagcttcgctacctctcttgctatttcactttaaattttctttttctttttccattaaccaatccattttcttctctcatttttttctcgcaattataggctttcgcggtcgcaactcatggtgtttgtcggaggacaccgactgtacagagtacattgaaagatttgggacagtggcaacagtcgacgcggtactctctgcgctattgggtgaaagcgtcccagcttcgatagctgatgagctccaggccaatcctaaatttggacaaggtgtggagagtgaggggaattaaaaattgcataattttttgtcagtgttggcaaagttggatgacattgaagatgaattcatattgaggacaactcagtataatattttgttcgcaaaagggcttatggaaagccccgagggcaaaaccataattgaggatgtaagcacacaaatgcacttttttaatttaaattatatatttcctaaggcgaagagtaaactgggacgcttcgtggcaaaatgtatgagctgatgagtgaactggccggccgaattgaacattttcaccatttaaatttcaccatttaatttcacca

SEQ ID NO: 56104 - DNA, 406 bp, Heterodera glycines
atgaaaagacgcgttgctcctcttactactgctgctgctgtttctgctgagcaacataaaataattggtcccgagtcgcccaagccacatgaagagacgcccaaaaatgttgagccgaaggatgagttggcaacgaagaaacgcaaagtggacgaccgagagttgtggaaattggcaaaaggcaaatttttgctgaccacctatttgtgccatggtaatatttactaacaatttcattaaattttaattaaaattttgagatgattggaatcgtctgtacaacaaccagcagaaagtgaagcgcctggagggggaccgttttgccttcggctttgagatgtgtgaggaatgcgtgtgggccaactgccgcgcaaccgaccttttggcgccaatgaagaaaaagtga

SEQ ID NO: 56105 - DNA, 779 bp, Heterodera glycines
atggttcttgtaagcacattttgcgctcagcttctcaactgccctgtcaagtcattgcgcgaccggctcaaccacccagaggatcgggcgcttgtgctgaaacacatcattggacgcaaagcgcgcaccacctacaacgaccgtaatgggatgaccaaaactttcttcgtcactggaatttcggcacaaggcgccgcatttcttcctgcatatgggcaattgcgcaacccgttcaacatcaatgtggcggcacatttttatacacggcaccgcataaagcttcacttcccgtatgcaccgtgcataattgaacgcttttcggggggaggggaggatcggcactacccaatggaacttcttgagctgattgatgacaacatggacatggacatcaacaacaacaacgagcattggctgggccgtcttttcactgaaattgacgacaaacaatcgtcgtcaaactcatccgacacaacaatgcgcctagtatttgagggagacatggatgaagacagcggacgcaatgaatgctcacagagtactgtaccgttatattagttttgtttttgctcactaattatgcatttttcttccttaaaatgaccacttccatctattaatttgaaattgcattttccattccttaatttttcaaaaattgtgtcttctttagcttaattatgcacttttttacctaaaaatgacatcttctaatgcttaattatttcataattgcatcttccattcattaataatgcacaaatttttattaaaaacta

SEQ ID NO: 56106 - DNA, 1384 bp, Heterodera glycines
atgggagggcgaactggaccactgaagctgctgcgcaaggctggaccgggagagaaaatctcctattatgacttcacatcgctctacccgtacataaagtgagcacagttaaagttgtaacaaattaacattgtttccttcacagcttcacaacccgttaccccatcggacagccaaacgtgcatgtgttgaaccaggaagtggattggcgcagtgcagcggacaacccctaccctttggcactgctcaaagtgtgggttgtgccgccccgacgcgtcgacgtccccgttctgccagtgaaagttggagagcggctttgcttccccctgtgcatcacttgcgccaaagagcacccgacaggaggagtgcacaacgactaccactgcgagcacaatgacagacagcgggggtgggtgagcacgtgcacctcgattgagctcaacgaggcgttggacgagggttacctcgtcacaaaggtcttccgtgtcctcgagtatgagcaaagtgacgacaagctcttccgcccgtacattgctgagtttatggcccagaagatccaggccagtggatttgacaacagcatcagaggcgatgcggagaaggaacaacagtttgtccgagagtgcgcagagcagttcgacatcaccatcgacccaaccaaaatggcggtcaacaaagggaagcggtccctggccaagttgtgtttgaacaacttatgtgagtactgtcgtccattattattatatatttttaaaaaattagggggtcgattttcgcttcgcaactttgggctcgctcaaacactcatcactgacgacccagcgactttggcggagtacctggacaacaaatccatcgaagtgacatcaatcgacgagttggatgagcagcacatactcatcacctatctgcagaagaaggactgggtggatgagcactcatgctcaaacattggtgagacacacacactcacaataaattgttaaagtacttcagtcatctctctatggaccacctcagcagcgcgcctcgttctgctcaaggcaatgcagaaggtggtcagatcaccgggctcggatctgttgtacactggtaagtcaaactacaaaaaaaaaaattttgtgcacaaacatttattttagacactgacagcctcatcctcgtccacccggaggagcggtgcccgctgaaaactggcccccacttgggccagttcaccgacgaataccccgaccacgacattgtggaattttgcagtggcggagcaaaacaagtgcattttcagttcatttttgtttacttttcaattttaccaccttttagtacggtctttgtctgcgacgcaagggcgcggagacgggagcccaattggaacatgtgctaa

SEQ ID NO: 56107 - DNA, 1898 bp, Heterodera glycines
atgcaaaaacctattccttcaaatcgccccaattcttctgtctccaaaacccttgcctgcgggcttgaaaaaatggtgaatgcgagtggaaatgagccactcacggtgccggtgctggcggatcggagtgatccgctgggactcaagtcggtccaacccgacacggtgccaatggaaagtgccgagggcaccaaggaagtggaaataatggaagtggatgaaatgagtggagaaaaagggaaaaaggatgaaatgggtaaagaaaaggtgaaaagtggtggaatggaagaggaagaagaaagtgaaggcagtgaaagtgaactgctaggagaaggtggatttgacaatttgaaattgaaccccagcctgagggcgggaaataaagcagttgaaaaggaagataaggggaaaccctatctggtcgcccaagtgagaagcgacggtgtgatcgcggcacggatgaaacttttctgggatttcccggaattggtctttgtcccttttagcctcttcgacaacgcccagccgatcgaaatcggcgatttgttccgcttacataagtgtgagtggacgaagagcgaaacaggatgggaagagcgcggagattggctgtatgaagcaaccggacggctgaactaccaagccacggcaacggacgtgagccaattgcgccagcgcatccccactcaggccgtcggcattttggtcgatgtgcaaagagcccgtgaccgacacgtcaaagtggccatggtgtcagcacctgagctgagctgcgtgatgcgcgcctaccgtcgccacttcccggccgatttcacggataacgacatccgctaccgctccgttgttcgtcttcaacttcggcagatcaacagtccgccatgggtgctgtattcacagcagtttgcgtatgttttgccatctgattttggtaaaaaaaggggcgatgaactgctcgttcatcacgcaaacgtcattgctggcgttgagcctgagccaatgggctatgagttccctttcagtgccgaactgagctgggcgaaggtccagctgggtgagaaggtcatggcggcggctgtcgcagcacaggcattcgatgtgaaggctgatctgcggaagcacactctgttcgtcgagccggtcgtcatcaatgagatctcgacaagaagcgtgatcatccagttcgtcatgccggtgccgagcatcgaagagctgacggaattgtgcaaaatttgggaggtcgatttggcggtgggttgcaaagtcaatccggcagccaaggcaaagccttgtgcgcatgggtatgtgctaagcatcgaaaagcgggcattctgtgtaggatacgaaattgatgttaaagtgatcctttcctaccaagaagcgaaggatcaggacgcgcaggaggaattcgatcagatgcgctgcggcgaactcgacggatgcgttgaactcattccgcagacgtcagtcagggccctgcaggaacggatgttcacgctgcggtccaatgactgctcgaaagtggcgaaggacgaggcaaaggtgggccgaatcatgtcgattttattgggccgaccggtaaaaccggaaagcccaaaggccaataacccattaatgacttttggggctctttcaaaattgaaagagggacagatcgacaccgcgctgtgcatgctcgacgaggtgccgcgccttgtcttccaacaggccgggcccggcaccggcaagacgttcagcgcggcgtcgatcgtggccacggtcctggccacggatcccacggctcgcgtgttggcgctggccccgccgaatgtcgccgtcgtcaagctggtgctagagatgcaggatgccctggccgccggaaaccacgtagagccgaatgcttgccttgttctccgggacag

SEQ ID NO: 56108 - DNA, 85 bp, Heterodera glycines
caaaagtcatttggcgaaatatttggagaaaaatggcaagaaaaggaagaagaaaaacgaaatgaactcaaaaaaagagaaataa

SEQ ID NO: 56109 - DNA, 1143 bp, Heterodera glycines
  unsure (1)..(1143): unsure at all n locations
atgtcaagaaatatgaaagaaatttgtgatcaaaatcgatttttcaatgaaaaacagaagagagaaattgttgaaaaatttcataaaattaaagaganaattatgcaaatgggaaagaaatattcaagaaaagaatggaaaaaaattgaaagaaaaattgcaaaaaaattgggtgttagttacgagaaaatttacaaattgaaaagagaatttggaatgatgaagaaaaaaaatcattcaattgaagaaaaaagaataatgttaaagcaatttgatcaaatatatgcaaaattaaaaatgaaattcaatgaaaaatgggagggaaaaagagaaaaatgcaaaaaaataatagcaaaacatttgggcataaatatcagaagcatttatcaatggaagaaacaattaaaaaatggaaaattgattaaaaatcaaaataaagatgagcaaaaaagagaaattgttgaaaaatatttaaaagtaaaaaatgaatttatgcaaaatggaaaacattcattgaaggaatgggaagaatttagagcagaaattaaacaaatttttggtgtgggttattcaacgattaaaagatgggcaaaaaaattaaaaatcaatcaaaatgtttcaaaaggtgaatttaaagatttattaacgtatttttttcaatttacagagcgaaaaatgttatcaattgctgaaaaaatggaaaagattaaacaatattatcaaatcaaagaacaaaatccaaaattgaaagaagatgaaattgccaaaattttaaacattccaaaaaactcattacgcaaatacaaaaccaaatttggcattaaaccaaaaaacaaattgctataattaggacgatcattattatcgaagaatatttggaaaatttcagacataaaaaatattcaattttttacaaatgtttttataaataattttttttcggtttatgaaattattaatccttatttcatcgcttataaaaaatatttgataaaaatcgttgattatgctaataacatttttaattggtttagttgaaaaaccaaattaatttttcatatttatttttattttgaaaaatgagtaaatatggccaaaaaaagtaaatttttagagaaaaattaattaattaaattcaataaa

SEQ ID NO: 56110 - DNA, 74 bp, Heterodera glycines
gccgagctcagcccaaagttccaatcttacgacgaagccatcaaatggcgaatgatgggcgtaaaccacgtccg

SEQ ID NO: 56111 - DNA, 610 bp, Heterodera glycines
atgaaaatctataaattgaattttgtaatatttttaattattaatttattcgacgaaactttatcagttgacgataatttgtgcaaaaagaatgaaaaaattcggccaagttttgccgaaatatttggccaaaaatgggaaaatgaaaaaatggaagcaaatgaaactgatcaaagtgatcaaaattcgaattggcaaaatgaaaatgaattaaattctgctgtttccattgaaagtaatcagaacaacaaccaattgaatgaccaacaaaaaatcgaaattgttcataaatttcacgcaacaaaagaaggaattaagaaaacggggaaatattctcacaaaatttggaatagaattgagcaaaaaattgcgaaaaaattgggaattggccgaacaaaaatttacaaatggaaaaaagaattaggaataaaaataaaaaatgaccaaaattattatgaaatgaaaagaaaggaatttattcaaagaattgatgagtttaaaagaatgtcagcagtaaatggaaaacagaagcaatttgcgaaagagttgggcattgacagaaaaacattaagcaaatggaaaaagaaatttggcattgaaatgagaaaaa

SEQ ID NO: 56112 - DNA, 635 bp, Heterodera glycines
atgtcttttaaacgcgtgaactccttccaacccgccgtgccaatggccaaaaaatgggatttccgatcaatcgggtaagtgatttttaataaattaaataaaaaaaataatttcttaaacaattataaatacaattataagataataccctttaagaattatttcaaaaaatttttttttgttcagaaataattttgctgaagaaatggaaaattataaattgatggattaccaatcgacaacttgcgaaaaaaagtcacgtgcagatttcagaaataatggaagagaaataaaaacccatcaatcaattttggttgacaggtgacctacttttgaaaaagttttttaaattatttattcattttcaatttttatttttaaataatcaattttattgtgcaattcaataattattcatggcattgtttgctgctaatatcaattaattcacacttcttccaaattccgttatcgattttttttttcgcggcggcggcatcgcgtcgccggacgggcggggagggaggggggaagaggtgataaaaaccgcacggttttggctaattttcaaaaagaatttttaatttcaggatccgaaaaacccatcataaaaaaaaatctcaggatttgagaaa

SEQ ID NO: 56113 - DNA, 1127 bp, Heterodera glycines
ccccccccccccgtttccactcgcattgtcccccccccccctaaaaaagtttttttttaccagttttcaccgttttcaagataggaagaatttactaagattttttcgtgaatattttaatttccgggggaaacgacgggggaaaaagaagtgcatctcctcgagcctgtacccggtacttgtatacataaccttaataaatttggaaattaagcacttaattgaacgattagaggaatgcccatttctgaggattttgctgccatggagtgaacggactatctgttctgataaaaggccatccggttattcctagaagacattttccataaactattcacttctttagaatccgatgatggaccaatttattggtgtcgtcctggtgagcaactgatccgaacggacgaatcgaaattcgacgaaataaagtcaaaacagcacaggaggggaagtgctggcactaaacaaactaaaagtgccggaattccgttgaagtggtcatctttttaatttgcccaataatttttcttttttagggcgttggagcggagggaaattctctttgaagatcgcactccttgccatgccgaccatgtgacagacgaaaacaaagcacacacaactgcagcagttggccttctgcaggcagtcagaagccccacggaaaaagggtaagcagcttcaaaccgaactaaaattacaccgaaattaaacagcaaaatcggcgaccgattagtgaaagatgtgatttgcttccatgctgcagacttcaaaagggtgacagatattttgaagttggatttgtatgagccgccaatgtcccaggtttgcaacacttacgattattaattataaaagccattttagtgcacccaatgggttgaggaggccaaattaaacactttacgccgtgagggaatacgttatgcgagatttatggttttgccaacaattttttattgccatattcaatcacaatttttaagctacgtgaaaacagtgtttacttcatgccacgcaaaatcattcaccaattccgaactatttccgcttgtggttccgtcgcatggcatgtgagactgagaaagtattacgaggacgaatgaacatgcggagaatcttgt

SEQ ID NO: 56114 - DNA, 303 bp, Heterodera glycines
aataaagtaatttaaataggcatattttaaaaaagcctatttttttgccttttcacaagagaatttattaaaaaaaggcaaaattcgccttaaattaataaggtgaaagtttgaaaatgtttattaaaaaatttcaggatgaaatacaattaaaataatcaaaaagaaaaaaaataaatttatttttctaaataaataaaaaacattgtcagaggcagtgcctgccgaaaaaaaagacaaaaaattttttgaaaaaaagccaaaaaaaaattgaaaatttaaataaatttaaaagtgaaaaaa

SEQ ID NO: 56115 - DNA, 549 bp, Heterodera glycines
atgttttttccaataatcaaaaattgcgttgctgttgtagacaccaaaacacccctcgatattgaaaaaatttatttaatatcgccctccacaaaatataatccacgtaaaattcatgctgtaattatgaaagtgtataatccaaatgctaccgccataattttctcaactggaaaattcgtatgtacaggggcaactaatgagaaagaatgtaggcaagctgctgagcaggtcacggagcgaataaagcaatgtgggtataacgaggctcgagtccacgaatttgcggtaaagaatttgattgcgacagctgatgcgggatttcacatacacctcgggccgctctatgattttgtaggagccaaatgttgctcctttactcctgaattattcccaggcctggtctacagaaaccaaaaccccaaaatgtcgatcattgtattttcaagtggtaaattaaacctaacaggctctagatcaaaagaagaaattgattttgcatttaatcaattttatcaaattatatcaaatttcaaatattcaccataa

SEQ ID NO: 56116 - DNA, 397 bp, Heterodera glycines
atggaagaagtgaacagcgtgtatcagcattattcccatcaaaatttaagtgatgccactgggcttttcccattgaaatttccaacgcaccgacggaacaaaaacgaaggcacaattgagatggaaattgaaaaagtgtctgaatttgcggtggaggaggtgggaagtcgccgatttagcgatgccatggacattgggggatttccatggaaaataatggcacaaatcgaaacgaaatacggaagcaatgagaaatggttggactttaccctttccaacgatggccttgaaaatggtaaaaaaaagtctttttcataaatctgtccgaatttaaattcaccaaaactaaatatgtataataaacgattatgcagacaaattagacaaagtgtaaaca

SEQ ID NO: 56117 - DNA, 525 bp, Heterodera glycines
  unsure (1)..(525): unsure at all n locations
atgatttttaacaatgaagcgaagtcttgggggaacaatttcatttcatttgcggtgagtggaaattaattagttaatttacattttaatattgtaatggcaaattaaggaattaatggacccaagcaaagggttgtacaacaaagacgaggacaacgtcaccttggcaattgattttacatgtgaatagcgtaaacatttcgagaaggattgaaaagggaaaggaaggaaatcagcaggatgagaagagagtcttggagggcacaaaattttcttggtgcttaaattttatatttttttatagtttgtaaagtattttggtttcataaagcaacatattccaatgatagggatggatttttantgtctaaaaatcgagaaatatatatacctaaaagagttgataaaaagctacttattaagtttaactagtccttttcacatgcattttaaattttgaaaattctatttttgtagaaaattgtctacataaatcgttatttagttcaaatgatttaaataata

SEQ ID NO: 56118 - DNA, 693 bp, Heterodera glycines
atgattgagccgataggaaaagccaactttagaaaggcatgcgcacttagagacacccgttccatgtatgcaccgacgtctgccgttgatgcagccagcgttccaaatttggcaaggaactctgccacaatttcagttgctgaacggtaaactagttggttatgagtgagttatgccaattagtcgaagataaaattcaaaaaattttaaggattgaaaaataatttaaattaaaataatttatccgtgtaaaaaatgctaatttgtccatttttagttgaagaataaattttaccacgctgattatcggcagaaccagcttcgttactgtcctcactgtcttcatcactgatttttgcgacgctgagtaaaaaaattgcacttgacagtgccgcaaggaataaaaatgttggcatcataatatgcttaaaatgaatgccattaaataaaaatattatagctgctttaaaatattttccgaaattttttcgattatttaaaaaatataatttcagcgcttgtttttgcgtttttagtcagtggataattaagttgcgctggagagcttctggactagtcagctggcacacaactcagctgatgaggacaactcagctcattttaatttttcttttttttaattatattttaatttatatatatcatttttaaacgttagaaaataatatttta

SEQ ID NO: 56119 - DNA, 421 bp, Heterodera glycines
ggcactgtcaagtgcaatttttttactcagcgtcgcaaaaatcagtgatgaagacagtgaggacagtaacgaagctggttctgccgataatcagcgtggtaaaatttattcttcaactaaaaatggacaaattagcattttttacacggataaattattttaatttaaattatttttcaatccttaaaattttttgaattttatcttcgactaattggcataactcactcataaccaactagtttaccgttcagcaactgaaattgtggcagagttccttgccaaatttggaacgctggctgcatcaacggcagacgtcggtgcatacatggaacgggtgtctctaagtgcgcatgcctttctaaagttggcttttcctatcggctcaatcattgccagctctctgcaaatttcaacaaaa

SEQ ID NO: 56120 - DNA, 1519 bp, Heterodera glycines
atggacaccataaacaattggatgggcaaaaacagaaatttgttttattattttgccttttcaatggcaattccttcgacaattttgtacattttggaaatggtgacaatcataagacataaacaatttgcgcagctgtccttctacaaattgttctgcgtccgagcaattacagtgagcaaaaagcaattttaaaataaattagcgaaaatattttgctgatatttatcataaaaagccctaatttaatgagtaaaaagtatttatcataaaaaactctaatttaataacaaatttggttctattcataaatttttacagcaaaaattcctttaaacatttcattaatcacccaatttttccataaatattttaaaattaaccttaacttatcggaccaatcctttgcccgtggcgcctatcgcctcagcgctttaactttacatttaaatgttatcccgttttaaattcgatactaaaaattattgaataatttttcaaatatgccatgttaaggacattctgtggtttctctcttccagttacggtaaccgtatcccagcactgtttggccaacaattgctgcccttttaccgtatgatgcccggctgggccatcgttctgtgttttttttttgcaacaacagtcgcttaccaagcctcaaatattgccacttttctcattcagatgaatcgtttcactgcaattgcatttcccctcaaacagaaaagggtttttaattattaaaaaattaattaatattttaatttcatccattagatttgggaaagtcaatcatttttgatgatattggcactgattgtgttcgttgtgccattgctaagctgtttgccaattatgaaaatgaacgtcactccaatggcctatgaaagggaaagcgacggatttttcatccaagaaaatgtttcggtatgaaggaaaagcatcggaaaacgcaataatcgagcagagaaatatttagataaaaattctgcatatttccattaaaaaaatattcaagctaaaataactgaattccgaagtaaaagccttagctttggcctctggacttaggcttaagcataagctagacttatgttggttttttacttgactttggttttagcttagaccgtcctagctaagttgattgaagtcggattaaaagccttagttttggcctcagataggcttaagcataagctaggcttatgtcgttcgctcagaccgacttaggtcacttgttaggtctatgatcactgatatattattaaatttttccgttttttagggttattccttccttggctatctcaacggtatgaaatcgcttacttctgttattttcctgctcttgtcgcttttggtcaatttgtcaacgctaattgcctatagaagaagcaaaagagtgcaccaacaaaattcccaaaacggaagtgacgtcattgagaagaaattgctgatttacgcccttctcactttttctggccatgcttttgtctcagtttttttggtttaa

SEQ ID NO: 56121 - DNA, 1090 bp, Heterodera glycines; identical to SEQ ID NO: 25375
  unsure (1)..(1090): unsure at all n locations

SEQ ID NO: 56122 - DNA, 624 bp, Heterodera glycines
atgcaaacgatcatttcggtggatgaaagtcgcgagccggcgacccctcagcagaaaaagcgcaaacaaaagcagcaagcggtagaacaattgcttgtggaagtgccggaagaagagcatcagcaaagcggaagaaagccggcgggagggaaaggcgaaattggcgaagaaacggaggggacgggcggaaaggaggggacggggcagcacttggaggaagaggcacaacttcggcaaattggcccaacaaccgacacaacgccaagagatgccgaacagacggggatgagttttgttggcaaagtgaacacattggaccagaagattgggccggaggcgaagcggctgcaaattctgttggaactcacgcacaaccggcacaacagggcgaatctgaacgcaaaacagctgcacgtggtcaatgaaatgttcaacttgttcatgtacaatcacacatttgttgtttacctttcattcattcgttattatctttggcaggtcgcgctggtccaaaattgtggccacaaacagccaatttctgaacacactgaccaacccggaaccgttgctgtcaaagaggaaggccaaccaacagggcacggaaaaggagggcaccgttgctag

SEQ ID NO: 56123 - DNA, 409 bp, Heterodera glycines
atgaacgtttcgactcacccgggtaaaaacattttataattcaaatgaagcaaaaaaaaattaactttttttaaaatttttaattgatacgacatttggttttgaaaaaaaaaaattcttcattaatcttagaaaattctgaaagcgaatatattacagaattacaaaaaactcaaaaaaatatctgcaagacacataaaaattccccggcactttaattcgcatttttccaggaatgtacgaatttttgccaatgtacaccaattttgagcctaacagaacatacacattgactggaatatatgaacaaagcacaaaaattgacccgccacagttcgaaacaaactttgtgattatgcacaaatccgagcaaacgcggcaaatgatgaaatggtaaaaggataataaa

SEQ ID NO: 56124 - DNA, 223 bp, Heterodera glycines
atgaactatcaaaattttgctgaatacaaaggcgtggcaataagaggagcagcggcatgggaaagacttgggcagcacgcctttgtcaatccgtaccaagacttcgcttcaatgtcacacagtaaaggcgatgaaccgcttatggagcgtccctacagcaaaaacaaaacaaatggacgcggaaatggtgtccgtagtttcggtagacagtcaatgatgaggg

SEQ ID NO: 56125 - DNA, 359 bp, Heterodera glycines
atgttgctgctgctcctcctcctcctcgacatgttgctgctcctcctcatcaacaggctgcgccgtcgacgacaacctccacgtccggtgatgggacccgggcgaaaacctggtcctaaatcatattatttttttaaatttttttttttctaattttttttattaatttttttttcttaaagtttttttttagaataattggtaattttttttttttaatttttttaaactgcctcttgattattaattttaaaggcacctttagcgtgattggtctaaggtagcaaattaattagttttttaatggattcgagaatgaatgttttttattttatttttttaatttttttaataattta

SEQ ID NO: 56126 - DNA, 484 bp, Heterodera glycines
atgtccggaactattagaacccgaattcctattttggttaaaagtttgaaaaataaaattgaaaaatattatgaacaaatagaacaagggaaatatgaatttgattccaatgatttacctggttgtttaaaattatatgaatttattaaaaaagaaatatttaattttgaaaaaacgtttgatagtttaacagaattggataaaaaatggaaaaagatacgaaacaaattaaatactgaagataaaaatgctgagataaaaatatataaaatttacacagaaaaacatgactatttaaaaattttagaagaagcggatagtgttatcgatgaattaaaatcgcttaacttagaggtaaagaaagctattcaaaatttaaaaagaaataagaaaaataattcaggggatcaacatgaaaatgatgatgagaatgatgatgatgaagacgaaccaaatgatgaacaaaacagaaaagaagaattaa

SEQ ID NO: 56127 - DNA, 575 bp, Heterodera glycines
atgtcctcaaagatcgaacatcgcactgatcagaaagaaaaatggacgaattacaatgacccgagtgggaatccgaacgtgctgctatgctcgtacattctgatcgctgtgagagaacgcgaacatctctgggaactgatcagagtttgggacaaacagtgagtgatcagtccgtttggggtagggattgagcaacaaggcaaattggtcgttatgaaaaggaatcttgattattgaatgtaaaaactgaaaatggtcagtcactgattggacgcctaaagtgcaatagagccgggatttccatctgaaatatttaatgtttagagtgttccaaacgaaaaagttgcgcgtccaattgtcaaaattcgacggcggcgatgatcagtgagagtgaagtgatcagagggaggaaaagaagaaggcatttgcgaaaggaaagtgttgcattttggaattgactaatgattagactaatattgtgtaaaactcattattttccattttaaacattacctattttaaattaaattggcttttccgcattattttctattcgttttttgctgagtaataaa

SEQ ID NO: 56128 - DNA, 676 bp, Heterodera glycines
gcgaccacggttcattattacaaacttctccggttggttttgtcactgtcgctgcttaagtatatgtccaattcccctcgtcagatcaaccgaattgtggacgaggagggccaagagtgggaggtggaggaagtgcagctggacgtgtccaagacgggactcggattctcaattagcgggggttgcgaccgcgagcctgacttgatgtataacgaccgatacattcgcgtgactgacatttcgaaaggggtgggtcggcacgtacactgtcacgcgttggggtggcactttagggcgccgtggagacggaccgacgcattcgcatcggtgacgtgattctgttcgtcaacgattgggagacggccaacagagagcacgacttcgcagtgcaagcactgaagaacgcgggcacttttgttcgactggtgagaattgtgccattggtaacaaatgggcagaaaggcaacactttcagttagtcaaacgcctcaaatatccgccgctgcaaaaatcgctgagtcaaagccatttgagtgagcccatcgccagcggcaccttccaacggtcgttgagcggagtcgcggccgacagccgaacattgcctctgcagccccccgtccgttcccgtaagagaatgaatgggatggctgtaccatggatacaacgattggactga

SEQ ID NO: 56129 - DNA, 795 bp, Heterodera glycines
atgggcttcggttttaacattgtgggcggcgaagatggcgagcccgtgtacatcactcgcgttgcacccggtggagcggcggaccagaccggcaacattcggatggtaaaaacgaattgtgaccatcggaaaacaaatattgactttcccaagggagacgtattgctgcgtgtcaacgatgttgacctgtcaatggctacccacggagaagcagcggtcgccctgaaggcgattccgcagggggcccaagtgaaactgctattgcaattcaggcctaaggaatatagcgaattcgatgaacgattgcaacagcagaactacagatgatgttcaggaatatcagtggggggggggagtaaggaacctaaccaaaagtggcaataatgctgtataaatctggatgaaatagctgtgaaagtgacataaaataacaaattaaacatttttggcatttaaaactgagaattaagtgcttctttcttgttcaatgcgagaatgttttgtcagcagttctttgttcaacattctttgttgtgtttggtccgattcgggaggaagcacttttatcgcgtgaagcacatacccaccagaaatctgaattaattgcagaagtatagcttaatcgttgttttctaaccaattgctgcatgatgggatgcgttcggtcggggatcacttgttggaaacggaagaattgctgactcaactgaatgtccacggccgagccaaccgaccggagccatttccaagcattgagcaaatgctgaaagaaaagattagactagaaaaggatta

SEQ ID NO: 56130 - DNA, 206 bp, Heterodera glycines
agaaaagtagagggtttttgacattacgaatcacaacactgctccagcgaaacaatggacgggacgaggagaaaacgaacaatctgaaaaacacggaggaaagggatccgggcaagcgagaggatgtggcagaggcaattgcattgcgatttgtttaaaatgttggaattgactccaggaacgccgggaacagcaaatacagaaga

SEQ ID NO: 56131 - DNA, 1961 bp, Heterodera glycines
atggaatggattggggccaatcgccgcggtgaagaaaaatgcagtggccaaaagggtttatccgttccaacacagcagcgccaagcaatccgagaaccgaaaggaagaaagtcatcaaatgggaatcaaatgcccaaaaataaggtgaccaacttggtcgaagacaaaagcattgcatttgccggagtgaagcccggaaagctgaagcatcagtccgagctggtcaattctaacggctcattgttaatttgattaccagtataattcagtaaattttaacctcaaatgtccgagtcgttcggggtcctttcggtagtaacagtcggccaaaaggcgaatattgggctgcaaaataacaacccggtcctaaaaaaacaaaaaagctttggaaagaaaagaacagtcgcaaaccgaatgcttttgaactttctttcgcatatatttttcttttgaaaattttgtacgagattggaaatggcaatttccgctgaccaatttggaaaccttaaaattgaattttgctgaatattaatgaagaggaaagttaaaaaaaaagatgtactaattcgtttgtagtgattccatcctcttttaagctcataatttgattgcttgtaagttgttgagtgctttctgaatattattaaaaattccaagaatgcatgttagatcggcgtttttttttaatttccattaccatttccgtggcccctatctcctgctgaattcccatttgaaaattcggttttaaatggctttgaggcgaattcaatggggcaaagcatgtcaccaccattgctgaccttaagcagaagtgtgttgtcagactgatattcaaacaattattgttatatgaaaaatacttcgaaaatcccataaaaatgtccaattgcgtctttcggattaaaactcagtcgttcaattagcacgcgttgcccacttatcaaacggcacaaacgaatatgttcaccaccaactttacgaacaatagcaaaaacaccttcgtgaattttagagggcttttggtgccaattcattaataagaataggaattttattctgaaatactaagaaaaactccgaccagcagacaggtaattactttattcactttcaatatttttccgttattcaattcattgcattgaactcgataaatctctcctttcctctctctttgacgttttcattgaaattgtttacttttgtttgatctttgagcagttgatgtgttcctttctcgttctcatttcacacccaacctccgtgctttttgagagaatgaacaaatcttaatttttaaaatttttttttgaaaaaaattttcatgaagaatttggctgatagaattcttgggtttccatcatttaggtaaatgtagtaatgatatatatataattaccaaatctaattaaggaaacaaaagacaaagtctaaaaatgaccatcaacacagacaaagcgaggaggtggtgggagagacaaaaggggcatttgttatgttgataagagaagttgagacgaaattgcaccaaacggaaagaaacaaagaattggaggagatgcgagaaaaggaacatgacgagcatcagcaaccccgaaaagaggaaaaagagaggggtaagtctaacgaagcagaagtagattacgcacctttataagggagacagaacagtgcaatttacaggagatgaagcagaaattgggctaaatgacgaggaagagagggcgacatggacaacggaagatggggaaaacgaagagatggatgaagcgaggaaaggaaggacggatgagagcgaattggaagaaagggtagacgaaacggaaaaaatgaaccaggagagagaatggcttcataggcaaagaaatggagaagtggaggtgggcacatcggagattagtccaaaaaatcaggatgtgaatggtggatgtgacctattcgcgtcacgaaagccataa

SEQ ID NO: 56132 - DNA, 608 bp, Heterodera glycines
ccccaccctctctctctctcatccaccttttgatgaaaacaacgggctgtttcgctctattgcaatcattaatcaacaatatgagagataagtcgataaaatagtaaacagctccgaataagaaagtttgattaaagggaccttggcattaaaagggatattggaaatgaatttttgtacgtcagtaaggtgcagctttacgtttgttttccaatgaggtaccggaattccatttgcgaaaaattatggctttcgtgacgcgaataggtcacatccaccattcacatcctgattttttggactaatctccgatgtgcccacctccacttctccatttctttgcctatgaagccattctctctcctggttcattttttccgtttcgtctaccctttcttccaattcgctctcatccgtccttcctttcctcgcttcatccatctcttcgttttccccatcttccgttgtccatgtcgccctctcttcctcgtcatttagcccaatttctgcttcatctcctgtaaattgcactgttctgtctcccttataaaggtgcgtaatctacttctgcttcgttagacttacccctctctttttcctcttttcgg

SEQ ID NO: 56133 - DNA, 1151 bp, Heterodera glycines
atggcggacgaaaatgaaagtgagcagcgatcactggagagaatggaaaagtgagaaaaggcaaagagaaagccaagcgcattttaaaatcaaaaaattcagagacatggaaagtgttcaaatgaacggaggacaccagcagcaggaggaagttgaggtgaagcaatgggagaattgttttgcagtcaaagcattgctcaaaacaaatcagaaactgcaaatgacactccgaacattggaagagaaactgcgaaataccaaccaggaaaaggactattacaaaaaacatttcaagggagagaatggcggtttgtgtctttgtcctgctcatccgacaatttattgttacaaatctttggctaatctttagggactcataatggcaattggcgtggacaattgacagacgactttggcaaggagttgctgatggccaataagagaaagtaccagctggagaacaggaccaagcagttggagttggaattgagagagacgcagcaggtgggagtggaaccacttttgtggaatgtaactgattcatacatttttttggggagggtcgcaaattttgaaattttcttaacaaattcattaaaaatccaaaaaattttccccggcggcgcctatcggcaccgccggcccccctgtttccttttttggaaaaaccgcgccgaaaaaaactgttttttgaaatgcaaaaaaaaggtcttcggcggccgaccctccttcgcaaaaattttggccgacccacccccctttatgtatgaactgattagcactcattgattggcaaagccaacatttcacttttttaagaggtgccatcatttgggggaaagtgtgaaaagcatggagaaattgttgtggctggagaaggaacgcagtgccacgttggaaagagagagggaacagttgaggggcgagttgggcgagctgagaaggcacggagacgcgttgaagagggagttggccgaactcagcggagaagaaggcgtcgggggcacggaattcagcaccgaatcacacaatcatcaggtgggcatcgacggagacaccggtaaggttgaatgagttcattctgtaggaaactatcaatcgaatgcatgccgaatttgaacagcagtataacgaaatgcgagatctgaaga

SEQ ID NO: 56134 - DNA, 892 bp, Heterodera glycines
atgacacggaaggacaacttcgaggaacagaagcgaaagttggagtggcgacttggagagatgacacagtggtggaacgacgcgaaatggaggtgggcacaatgcacacaacatgatacccgaaaacgcaccaccaacagaatcggcgaattggaggcgactttgggacacgagggaaacgcacgcaataaccgaggggaaggcaatggagacgacaagtgaaagggaagggacggcgaaaagcaattggtcggtttagcttagctgagactttgggacggttcagggaactgttgagggacggcattttgctcatcagaaaacagtcacatttggacagagacaagtggaagatgatgaaatagtacgtttttagggggggggggaagagactcaccctttgggtatgaccacttgcaaatgaattgaataattaatgattaattggccaattacagtgagcatgcactggagaaggatgttcgtctgaggagttgttggttcgaagtcgattctgaagggcatcaggaagtgtttctgattgtgaggatgggatgggctgaaatggacgttcaattggctgttctgtattcagggcacttttgtgaattgggagtgcgctttgttgtgtgagcaaattcctgaaaagccttcacgtcggggcatttggcttgaccttccccccgggcattatgagtttcgctttcttcgtgacggtttgtggcacacggaaagcaaatacggcgaatgttggaacgaacacgggaccaagaacaattggataaatgtcgagtgatttttcaattttgacaaaattctattaaattcttaattcaatattttgtcagatttattatttttcatcaaatgacttgttttcgttaaattaata

SEQ ID NO: 56135 - DNA, 2661 bp, Heterodera glycines
tcgtcggcgacggtccgtcgtcgtccctccgttgtgggctcggcttttgcactttcgattggctccaaaagctgcacaccgccaaatggttgttggccattttgtgcatgtaattttggatgattgccttggggttcaaatgcgcttcttcagatgcgccttcaaccaatccttcgttatcaatgcaatttttcccgtgggcctttcgacgttagagaagcgatttcaaatgagcaggtaaaaaaggtcagcagaggaagcgtacggctaaattcagcacgaggaccggcatcatctccagttggtacgactttgccgttctgatcgccgttttccccgtctgttactacggaaattacggtagggtacggtagaagcaaaggaagggaaacagagccaatcagctgctcggttgaggtctgattgacaaaccataatccatttcaggtcataagggccgatggatttctgtcggcagtcttataatggcattgggctcggctgtctgcgttctgcctcacttcagcagtgccccttggcacatggaccactcacagatggactccaataatgattttggccaatgcgccctcaggcaattcccccctctccctcgagaattgtctttaaatttttattttactatttgctgcctcaggaatacttctcgaccggactgtgctccttctgctgctgtttggggagcatccgacgcatatttcgttatgtttttgctcgggcaaactctccacggttttggcgcgacgccgcttttctcactcggcacggcttatttggacgaaaatgtgtctgaaaagtcttcgcccgtttttctcggtcctttcgatcgatcagaaaaagcattgccccattctgacagttcagccattcactcctttctgaccagcgttggccccatcgttgggctgttcgtcggtgggaagttgctgactttttacgacgatttcgacagagtctccggcagggaaaggtacgccgaagacggcacttggcacccgcgaccattggccactcgccgtttgtttaggttggccatcaaagactcggccgacccgcgttgggtgggcgcctggtgggtcggattcgctgcgtgttccgtcgtttctctgatcatctcctttccgatcatggtttttctttctttgtgttttcctttttcatttgggcattttttcaaatgttcgcccatgaattgcccgaggcgaagaaacggcgagaaaatgaagttgatttatcagttattttattaggcgggtatttcacattaatccattcagcagatgcacaccgtcacaaaaatggtcacaaataacgacattttatgcaaaaaaagcttcagacttttgagcaaagacattttggtgggtaaaggcactcactcagtgatctgttccaattcgaatcattttgatcacaaatctcattttcattgttttatcaattcatccatggacactttttaggtgcttttaagcagtccaacttttgtcgccattatttttgtcggcattttcgagtccatcgtcctcaacggcttttcctctttcatgcccaaaatcctggagataattctgaatacttctccaacagttggctcttatttgtcatgtatgccatctttcccattcagtttaattttgccatttagccgttataatttttggtgccgccgggggagtgatggtcggtggcattttagttcgacaattgcagttgcaagtgggaggaatgctaaagatggttttgctttgtcatttagtgagtttttgaggccgggtgtacagagacttggacaatcaaccgaatttgtagaatatcaagctttgaaggggggggggtgccatttgacccttttgtcgtttgtcccttttgacgttttgtccgtctgtccctccctccttctgtctgtttgtctgttccatgtcctttttatgggccgccctttctctgatctcctgcatgcttctcaagtgtccctctcgcgaattggtcggtatcaccgtcgcctacgaccacaagttcgtgctgttcttctgttcccttccctcctcttatccctctgatcactttttctgatcagttcgtcgtccctcactttgcttgaaaatctttgtaattccgagtgccattgcgacgccaattttcgccccgtttgcgacagaagcagtggccgaacgtattactcggcatgttacgcgggctgctcccttcgacaggaagaaattgatggaattgtgagttccaaaaaggaggtgggaagcattgacccatccgtccctccttttgttccttaattgccgttaattgctttttcccagggcactctttggggcgattgtagctgcgtacgaaatgtttctttgccgaccaatgccaatttttcgtccgctcgccatttggccaacggtttttgccccgttgattgcggttggactctttggctgttccttttcctcctctttttgtcggttgtcgccagttttgcggccggcattccgacccaacaggcacattccccaccatgtcatgcttatccctaattgcctcattagattatgctcagagtcattcccctccagcaaaggactttgggcatagcagtcaattggacttttctgcgccttcttggtacgctctgct

SEQ ID NO: 56136 - DNA, 2200 bp, Heterodera glycines
aatgacaatgcgtcgacgtcatcctttgctcagaattcgctggaggaactgctcaccgccactgatttgctgaggtttttgttctgtttttcttggccaattgtcctccgttcttcattgtttgtcagttaccacgacgcactgaaaaatgtgctaaaattgcgccatgccggagacataggggacacggacagcgcggatttggatgggattggcatgagcaggcccgagcagaggcgactgatgcgggaatacgccaaacactacgcattggagcaacggcagcagaacggcgtcgtttggaagaagttcagactgaaagtgtttggggaggcgaaacagtgcaaacagcgaaaagtgacgggggagacggaccattggcaggggccgggaggggaggcggagacggcgcagcagccgcaacaccacatcatcccgccggaacgcgtcactctgtgcaagaaaataggcaccggcgagtttggccacgtattccaaggtccgctccaaacatctccccgaataaaaggctcttttggtttaagccgcttggcgagacgcaacaggcgatgggaaaaaggcgattcaggttgagtttgggggggggggagttgaccagcagaagccaatcggcccactctccaaaggtggcggtgaagcggattctgccggagaagctcatctcgcaacacgcgtcctttctgcaggaagcggccataatgacgcggatgcatcatccgaatgtaatccgattgttcggcgttgtgctggagacaaaggcggtgatgctggtgggtgttggctcgcttttcgtctcccattagctagcttattattaggtgtccgaactcgccccctgcggctctctgctcgagtgcctccaatgtccgtcgtggagagagcccttttcggtcgctgtcctctccgattttgcgttgcaaattgcccagggcatgcgttacctttccagtcacaggtccctccccccccacccaattttccaattccttccgctgaccgtcgccccccaaaggctcatccaccgcgacctcgccgctcgcaatgttctcgtgtgtactccaagcaaggtcagaccagcgagtgttaccctgacaatgaccggcgcctgtgctttgccaggtcaaaatctccgactttgggctcagccgttgcctgggccatggcgaggattactaccgcagtgagttcactccgtccatgaaattgcccatcgcgtggtgtgcgcccgaatgcatcaattttctgcgctttacctcagcctccgatgtgtgggcttacggcatttgtttgtgggaaatgttttcttacggcaaaactccctgggaagggatgagcggctcacaggtgagcagaggacgaggaaggcaccgcagggggagggagggcaaagatgggaatgaataggatttggcaaaaacacagggggattggcaccagcaagggttgagcgcactgcgattcgcgtttttttcccgcgatttgcgaccgcgggcttttctgtatacgttcacctctgattgacacagttggggggatgacgagaacgaaatattttattttttgagtttgaaaaacgccgccgagaaaactgacagattttatttccacgaagattctccattccatcgacacccaacgcaaaaagttgcactgtcccgaggcgtgtccccgcgaggcgtatttgctgatgctcaattgctgggaatgggaggcgcatttgaggcccacttttgaacaaatctgtgaccgccttccttcgatggttccccctcttttggtgacaatttgcgaaagtggcaccgccaaaagtggccaactcaattacggaagagatgaaaccatcgcattgattgacaaaaagtaaggccaacccattaattacttaatgtatttccgaattagcccttgcgggaaggagggcttttggcgaggaatttcgaaggcgggaaaagtcggactgttccgtcccgaggacacaatcgcatttttgggtgcggaaaacccttcggcaaagggcgacgcgctttcggaacaactaaggacagaaaaaggcaaaatgaaaaagcaattggacaaagaaaagaagcggaaaaaggcggtggaaataagcgagccgaagggcgacttacggcacacgtgccatgtgggggcggacgggagaagttttggccttttgaat

SEQ ID NO: 56137 - DNA, 2079 bp, Heterodera glycines
atgaccacttcgatggtttcactgccaccgccaaggccaccgaaaaatgggacaaaacagagaaaaaagacggaggcggaaaatggggatgaaatgacaagaagtgtgtgcattggccaaattaacggttagaggggaggggggggaggggaatggacaattaaagcaccgaaagggcatgccaactaatgagcgtggatattggggcagttggcaacgagggaggggggggggcgggtttaaagtgtcacattcactaataagcattcgcctaattcaatgaatttcattttccttttgttgggcaaaatttatgggtcacaatgtatttcagaaaatttccaaataattgcttctctaaatgcaaaataacataattaggaaatgatcaattgcttctaatctctgccgctgggcattgttccgtcgcggagtatttaaacgcgtcgtccgccgccgcttcgctctctccgcccgcccttcccccgaaaccgccgcgcttccgctcgtttgccaatttctccgattggccttccccctccgcgcccagcgccagcccaacggacactttgagccaaccgaaatttggacaacatattcaatcaccaattaaccttcccgatcaaacgcatcctcctgaaccgattcatcacaactcaaaaccaactgaagaagaaaggaaacggaaaaagtcaaaggaaacagaggaggacagagggaggaaaagcgacgaagaagcagagaaaagaggaaagagcaaagaaaagagagaggggaaagacggaggaagagatcgggaggggaaggaggaggaggaggagagagagagaggaggaaagagagaggaagagagagaggaggaggaggaggaaaatgaggaggacgaatcactgatcagacgaccgtccagcgtttgctgcgagttcagcagcaaaggcgaggacggggaggaggagaagcgcattctgcaggtgctcactgacctccaacgcgacctcacaaacttttcgctttgttcgctggacgattgctcggaagggcggccattgctcgacggggagcaaaggagagaaaagtccgtccgatttgaaagtttaacggacgaagaccgattcatttaattcatttacaggaaacttaccgaggaggaggagaggaaaaggcacctcagggaattgtcattggaacggcacggaattgtgacgggacattcggcagaaattgtggggatggaccgagccgaattggagcgaagaaccaacgaggagcggaggagggtgctgaagaagctggtcagggacggcggcgaggagagcgcggacgaaaagagagcttcttttgtgggcagcttcatctcttcggcaagcaaaatgcttgtcggagggacaaatcacggcacaaacggcgggtaggcaaaagcaaaagccatgggggaaagtgaaagccatggaagcaaaagcaatggggtgcctttgggaaacagccaatccgaatggctagcccaactttggcatgcttaaatgcccctgtttatttattcctccaatgatggcatttccgcacttcagcaaagagccattggcaaattggccccccgaagcgcaagaagcatacaaactgctggtgcaatgtggccacaatctcaagggaacatcaatcaacgaagggcattccgagggaaaaaagccatcgccgaaaagcaacgacggaacacttggacaaactgcggaaatgatcgaactgccaaaaaaaattgaatatatcaattcgatgttggtcggctgggaaggagaaaaacgggggaaacgaagtgatcggaaagacacattggaaaggagaagtgatcgaaggaaggacgaattgcatttggcggaagcatcacttcaaaatgagtcgccaccaccagtgccaccaaagccaatggcaagggcgaggtgggcacaaattgggaacaattttgatcaagggaagacagaggataagcaaagtcgatcatttgattaattagcagggttgaacagcagtagtaaatgaaaatgcagagaagaaacgaagctacggaagcaggtgaacgaagca

SEQ ID NO: 56138 - DNA, 886 bp, Heterodera glycines
atgcgccgtcgtaatctgttcaagatgttcttcaacaagtatttgtttctgtttgccgctttccttgcctctgattatgtgctctattcgaaattgtcaaaatttttgttggatgaaaatttggatttggaggaattaaacgcgaagacattccatcgggtgaccattgaccaactaattgccaatgtcagccgcagcactccgttggatttgctgaccaaaattccgagtcggaacgacatcgacccggaggagaaaagcgcgttcgcatatcagaaggtgaagcaacaaaaaggtggggttgctgatcagagtgatcagaggcgagttgagctgatcagtagtgatcagaataaaaaaatgtgtgtaaaatgggagtgtcaatggaggaacggtaattagtgtaactttatctgctgcaggcagtgtgcaattcgttgacgcggattcgaggagatcgcaacaatttccaaatttgttatcctcctaaaagaaatctcaccggacaattggcaagtgaatgaagcaaccgaaaatcaaagtgcggagaatgttttaggcgtatttcataaatgggaaaagggacattccatttgagaggaatttcaaaacgatgctgaaccaagggacgaagctgaaagtgttcacgaaggtgtgctcagaggtcggaacacacattgacaaaacttttttgaacagaagaaccaatggacgacggaagacggacaatgggaggagggggcggacgttgtggaggatgtgaacgtgaagatttacacggaggaggaggaggacgagcacggacagagccagacgggcatcaaggacctgatcgactcgcaggacgattaccatctgatggaattcctcaaattcgaaatgagca

SEQ ID NO: 56139 - DNA, 558 bp, Heterodera glycines
atgctcatccgtctcgatcacttctcctacaacgaatttcgatatctgatcaaaagactcgcctatgccctttattttccgtattcagtgagcacaatcgaaattcaagctgataaaacgcatttctttcctcagattgaaagtgatcggaaacttcgagtgcatttcgtgtcgctaatgcacaaatattccatggacagatataatgtcattggattaatggaaactaaatgggccgaaaaagcaatgagtgaatgaaagagagaggaaagaaaagttcaaccgaattaaaagattcgatttatccaattgtttgttgaacattgattatgcaaaaatatgctatttcattagtaaatgggctgtgggtgagggggtgccatcagtggagaagccgaattggggccaagactgattcgtccggcctgttgctgcatcagctggggcggaaggggcgcggattggtcggacacaaatggcgggggttgggcagcggccccattgaaaaacacctgttgggacagggagcggatcagatcgatcaaaatgggaaacata

SEQ ID NO: 56140 - DNA, 477 bp, Heterodera glycines
atgggtaattcaaattcatcgtaaattttactcccaaaaacgacacaatcacttccaatccctcagaaaagcgtgcaattggaaagttcgtcaacagttttttacgttccgatggtgtttttctgctccgtttaattggtaattaatttaataattattataaattgtttacctcccattttttatttgttaagcgtccaatgcgggcgatttgatcaccacagacattgttttccaattatggcacatgtttctgaaggaggaaatggcacggacacaatcgccaagagaaccattgggccaaatggaagaagtcggagggggggacgacaagttatttttggaagacgtggacaacgcggacgaaaaacagaggctgacgacactcacttaggaataagcgaaaagaaagacaatcccaaaagatgattagtaaacatttttgaaaaaaacccaaactagcgaagaggcaataaa

SEQ ID NO: 56141 - DNA, 1114 bp, Heterodera glycines
  unsure (1)..(1114): unsure at all n locations
cgacaggaataggacaccgagcggaactcacacctccaggctagagttcangaacgaagnggaggaagcccattgggcgagggaacgaacgcgtggatcaaactgaacgtggggggaaaggttcatccaccggccaaactgcaattcatttaatgcccattctgttggccggcttcaggtgtttctgaccaccagacagactttgtgtcgtgaaagtggctctttcctcgcccgactttcccaggaggaccattcgttgcccagcgaaaaggtcgtagtcacaaaaggcagggagtttctcccactttctccggttagggtcctcttttacctatgatttttagatacctattttcaaattagcgtatttctgtgggttagcttttttgttggtccaaacaaactgcttattgtataattggaaaacccaaattttgaatttttcgaaatgtgtcatttgaatatcagcagaatattgtacaaaaacggggtcttcacttcgttttaatgccttttcttctccaggatgagtccagttcctatttgatcgaccgcgactccgattatttttccgcagttctcaattacatgcgccatggcaaattaatccttgatcatggactctctgaagaaggttttgtttttggcatttcctgggacattcttccgggtgttttcgggtcgctgattaaaatgtggcatacattcatacaatttacaatttttggcctctttgaatcccttgcctgaattggaccagaaatgttttttatttacggcttagaattgctttgtgcgttcgaaaattatttgaataggatcaattgtcttattaatgcatttaggacttcgcgaggaagccgaattttacaatcttccgaagctgataagtttatgcaacgagcgaatttcggaaagagaaaaacaaaaaaagatgggggttcgttttttggcacaaacgaaaaactgaaaatcgaattgcagacaaagcatgtctaccgcgtgctccaatgccacgaagacgaactgaccaatgttatttcggcaatgtccgacggatggaaattcgaacaggtaattccctcactataaaaagatcaaaggaaaatgggca

SEQ ID NO: 56142 - DNA, 754 bp, Heterodera glycines
atgatcgaaaatgggatggacgtcgcccggatgaacttcagtcacggggaccacgaagtgagttttatcactaaattttgagaatttgaactttttattttaaagagtcgtgaaaatagttttcctggagtctttagcgtcgctgaacataaatatggcatttatttttgcccatttcgaatcccaaattcgagcaaaaagtcgaaaattattatttttttttaaatttcgacttcttgttcgagtccgggattcagaataggccaaaaattaatttctatgaaattgcagtatcacggcggtacaatcaaaaatgtgcgtgaagcagctgccaaatgcaccaagaaacgcaacgtggcgattgcactggacacaaaagggcccgagattaggacgggacttttggcaggggtaataatttttgtttgtatttccgcaaaaatgtcatacattttaaaatgttcgctatttttcttggcgtattacctttctttcaatcgctttatcaatccgatgtgccaaattccagggcggttcggctgaaattctgctggagaaggacgcgtccattcgcctgaccaccgactcggcatttgagaagtcgggcaccgccatcaacctctacgtcgactacaagaacataacgaaggttgtgaccaaaggatcgcgtgtgtacatcgatgacggattgctgtcgcttattgtggaagaattttgtgggtttatttttaagtccctacggcgacgtttttag

SEQ ID NO: 56143 - DNA, 1914 bp, Heterodera glycines
atgggagcaagactgaaaaacaacgagagattaccagaaaatgagagacagacagacagcgaaagaatcagagaaaatgggagacagagagacaacgaaagaacacgagagaatgagagacagatagacaaccaaagaatacgagaaaatgagagacagatcgacagcatgatggtcgaagttagcaacaaaacaacggaccaaaggatcaacagtgaacagcttcatgtcggacaattcaccgctgcaaaaggacagactaacaacagaattgaaggtgatacttcattattgaggaaaagcacactgaaagaaaaagcaaaaggggagaaaaagcaatcgaatgatcaaaataatgaaagggaagtgatcgctgataagaaaatgggggcgataaagcagccgagcgatcggataagcgattggacgagaagcaatcggaacgaagaagcatcaagcggcaaaaaaatgccgaacggacgaatcctttggaccaaaattctaccagttcagacttccgcaagcaacaaatctctcccaaattctgctgataaggaaaacattctgccgacaacggatgggcgatcactcagaaatttgtcgggtgatcggccattttcatccaaacaattgccgacggatgagcaaaagaaatcggacggacagaagaaagacggcccggggggacaacagcggacatctgacatgaggacaaaagcgggaaacagcgaactttcgcaacggattctccaattgctgaaaaatttgcgaattgccaaagaggcggtggcaaattatgggacgggacgaagacggagaagaaagcgatcagccgaaaagattgctgatcagaaacagggccggagaataacggaaaacggccaagaaatgatcagtgatcagaaaagtgatcagtcattggctgatcagggccaggcaccgttgccgggtcagcagaaagcggcaattacgggacaggattttcgggagcgccctggggaagagaagccaccggatgagaagaaagcggaagaaaaagggatagaagaggaagcaaaattcgtggttgaagaattatttactggacaaatcggagagaaagccgaccaagttgaagaggaagaagtaaaattaagaggggaagaagaaattttggacggaatattggtggaagaagaacagaaagaaagggaagaaccatttggagacgtaccagaagggatggtagatgaactggttgagaaacaactgttaaaaggagagaaggacggaacaaaggcatttgcggaagtgatcagagcagttttgaaagaaattggagatgtgttatttgatggcgaagaggaacagaatcaaatcgaagaagcacagcaggggactcaaaaactgccaaaaatgaaggaagcgggagaagaagctggtgatcagggaaaagaggatacctatcaacaacaaatgccggaagtgatcggcagtgatcaaccagtgtttggtgatcaacgaaggccgagcataagggaagatgacaacgacggcattgaccagcctttatctgatcagcaaacaattaacagtggtgccattccggatcagctggacaaatcactgccagcagcagacgcacaaaatgacgggcatcaattccaggaatcagcgaaggcaccaaaattatctgagtttgatcagcaaaatgaagaagagaatgcgggaagttatgggagaagatggagtgatcaaagccagcggatcaatgatcgccctcggggcaattcggacgaattcgggacgagacaagcagacgatcagcagcaggggagcagcaggaagatgtttgatggagtgctgcgcgaccggggcggacgcgcggttcgagtcgaagatttgccgggtaattcggttttaaacaaaatttaa

SEQ ID NO: 56144 - DNA, 236 bp, Heterodera glycines
atgttggactggctgatgtccaatgtgcagggcttcaaggacagaaagtgcgcaagggcattcgcctccgccgtccttctcaaggggttcattaagcatggtaataaagtgttttgccggaatttcttttttttttaattttcatatcctaaaaataatatatttcagtggtcaatgtcagtgcattcaacgagaagtgctactatatttttgatggtaatttgaacagtttttaa

SEQ ID NO: 56145 - DNA, 153 bp, Heterodera glycines
ggaaaggaaagttgtcagatgaccatgtcaaatcacaacagaatgatgaattttaacaacgtaaatattagaaaatacgacaataaaaatgagagaaatggtgctgggtttggagcaaattctgacactgcggcgtttgaggtttaatctctt

SEQ ID NO: 56146 - DNA, 841 bp, Heterodera glycines
atggccttaaatctgacctatcttttaactctgagcttgtactgctccaactccatgcatgaagttggagctgtacaggtttgttgagaacccagagaccaaatctaaagccatattcggactcagcgtggtcaatttatatagtttaattaaattcggaatttccaaaaccacttttaaaacattttgttatttgatggtcttgaaaaatgccgtttttggagaccatttttagattccgccctccaataattcatttttgaagtaataaaatttttttcttataattttttatagtcctaactttgctctatttactcacgttttctctgcctctgtatctcttttcattttctttaaatcagccatcaaaaatacatacctcgaaaatgaccatttttacattatcaactctaactccttaaatacttttctaatgggatttatcccttgcccgataaatagcaaactcattctcaataataatgtcagatatttcggatcatgattgtggttttttaaatttatattcataaaaaaattctttaaaaaaagttgtgcggaaacttatgttacaccctaagtacctttatttgtaaaaaattttagaaatggaacctaaatacaaaaataaagaaattctaaacaaatttaagtattattttttctgtaaatattaatatttataagaaatattggaccatatcaagtattttttaaaagtattattgacttcattaagatgtataactttataaaatttaaattaattcattaaaaattaatgcaaaaagaaaattttattactttagctataattataaaatacaaaaaaaataaa

SEQ ID NO: 56147 - DNA, 209 bp, Heterodera glycines
gctcaggcagccaagtgcgcggacgacggtttcaagcaggtggagaatgggtgcaagttggagtgcgcacattggctggacgcgtacgcgccgacgccggccgcgggcaaacagcgggacgcgcatccgctgaccaattgcttcgggcgcaacgtgaagatggaggcgatgcctatgaacgaatgcatgcgcaagcgcgtggacaatta

SEQ ID NO: 56148 - DNA, 1214 bp, Heterodera glycines
atgccgttcacaaaaatgataaatattgttctggtggtaaactgcacaaaagcacagggagcagcagcaggtcaataaaattcatagcttccttgggcctacagcagggatggcattccgatttccgagaattccgaggctcaaaaatttttcggaaatcggaattcgacccaaaaacgtctaaaaccggaaatttttgaaaaatataaattaaaaagtttttaagtcattttacattgttttagaacatttttgggaaggggacatagggggggaggggcgtccggcggtgccgataggcgccgggaaatttttaaaaaagctagtgtaatttttaacacaattgtgtaaaaattactaattaaaaaataaaattccgaaaaattccgactttttacaaaaattgtcggaaatcagaatccgtgccatcactggcctacagtttcatttatgtttaatttttttttataatttcacctttcccctgacccgaacaagctgcagttttttgtaaagcaattcttccccaaaagcatacaaaaatagcaaaatgtacaaaaaaaaacatttttttcccgaaaattgcccaaatttttagcaaatctttcctcgtgggatttgttttgaaaatggaaataagtcatttttcttatgcttaaaaggcattaagttaagataagaaatcaaatctcacatccattttgtggttttgtgctgctgatgaaaaaaatgccgaaaaatgtgctgaaagttatcaaaaggatggttcgttgtgccagtgccaatacggtggggagggaattgaccatggcaatgagcagttcattccaacgcctccgccggttccttcgagtgagaaaggtagaacaaatgttcgtaatgttccgtttaatttgtctttttctccatatttcctccttaagtttcaatttccgccctatacataaataataaatatttttggaccattttaaaatatcttacataaaattaggcattttttcattttattttttccaataaatcgtaaaaaatttagatttaaaaaaattttacttaaattggcaaaaatatttaaagataaatattttaattattttaagtcgtacggtgcaagtatggaatgatctatgaaaacaagcttggctttgcctacccaagagtttgcgaagaagggtaccattattgctttgcggcaaatatcaccaaaaagg

SEQ ID NO: 56149 - DNA, 1918 bp, Heterodera glycines
atggacgagaatgaacatttcagttgtgatcagctgcaaatgttggtgatcgacgaggctgaccgaattttggacatgggatttagacatcaggtgactaaattataagtcgctgatcagcgaacattaatatcctaattctgatttttatttccgattgacgccatcattgaaaagttgccgaaagaacgccaaactctgttgttctcggccacccaaacgcgacggacggaggatttggtccgagtttcgcttcgtgaccccgtcttcgtggcggcccacgaacactccggcagtgcgacgcccgatcaattggtgcaggtgaagcggaccaaacctgaaattctgaaatgttgttttttattttcaatccattcttttttgcagagttatttcgtgtgcatggaagaagaaaaactgacatgctttggtagcctttgttatttcgataatatccgtctaaacttattgttagttaatctcctctttaatcctttcaggtcatttctgaagaacaatcggacgaagaaaacattggtttttgtcacttgctgtaaacaggtgatgaaccatcccatccgaattcttttgatttagtttttaagtgcttttcctttttaaggctcgtttcatcactgaaacattcactcatttgcggcccggcctttacttcaccggcctttggggcgacctgaaacagagcaaacgcattgaacgctttaacaagttcaacgctgtcgatggtggtgcggcgatggtgtgcacggacgtggccagccgcggcttggacttccggggcatggattgggtgctgcagatggactgtccttccacggtcgacgattacattcacaggtaatcacccttttatggtgttttttttctcttacgaagtggattttgtggaatacatttttagagttgggagaacggcacggatgaaccgaaaaggagaagcgatgcttatgcttacgccgttccaagaaccttttgttaccttttgttgctttgctcaggcaaaggaatgtccccgtcacagaagtgacgtgagttctctttaaatagattttgttattttttttccatttttaccttggttaatttcagagttgactccaacaaagtgtttgatgttcgtaataaaacaccaatttgatggttcctttcccatcggtgaagcaatttgctcagcaggtggtttatatttaaaacaaaaaatgacattttgtttttaagagtttaatcgcttatgcaaaagctctctatttttcggaattgaaggtaagcgctgaatacttaaaagttttcgttttatttattttaaaagtttttactttttgttatatcccaattaaatgcacagcagcacttttattaattctaggaagtgtttgatgtgcaaagcattgatttcgatgcactttctcaaaacgaaatggaggaggaagaaccatttctgaaggtgtcgcgaagggacgtgttcaattccatcactgaagtcgatatgaaggtaagcatttcgctgatatatagtcaagggaaaattgagaattttcaggaagaaattttggcgagaatttcttcaaagaaaccaaatggccaggacagccacgggtatggacatcgtgcattttcgacttcaggtttgtgtttggagctcgaattgggttgaaattaatttcaaattctttaaaatcggcagtgaaaaacaaaacctcaaaaaagaatattcaaataagaaatagaattttttaggtgctgcacaagaactgagcagcgcattggacgaggagatcaaagcggagaaggaactcgttcaggacaaattgggtggcacttccgcgccttcagtgcccggcttcaaaatcaccacgaaaggggccgaagtgcgactgagcaaaacgcacggaaacgaaaa

SEQ ID NO: 56150 - DNA, 577 bp, Heterodera glycines
gattgaagtcattctgatcgtgaatcattcggtcgacatcgaagaggacgaggagtacgaagacgacccacaagcagaaatggagaccagaggtttctattcattttttgttttgcttgggtctaagtttcatgtttgatttgacctgaattttctaggaaaatcctcaagtgttgcctgtatagtccaattttgggctgagtgtttgaatttgtttaaaagaagctacttacaattagtacttaaaaaatctaattgataataaacccaggcataagtctaactctgattttcaatatgatcaatcattttcagtctgtgcccgtctcgttgccacacttcaccattaggtgttttttcaattccgtttttacaaaacaaatgcattatttttagcatcacaaagaacaaccagagtatgttcgaagacaatgatggctatgaaaatgatcaaacgaatgggcgttgttgggaagcgaaagcgattcgaaactgagagagaaagcgacgaagaagaggacacgaaacagcagcagaagaagggggacgcaatttgttgttgatttttaaatgctaa

SEQ ID NO: 56151 - DNA, 200 bp, Heterodera glycines
gtttcatcagtgaacaattttcttgatgctttggagcaaagtgcgtattgtacaaattttgacgacaaaaaaaattgaggatgaaaagggggaagaaaagagggaggaacgaacagcagaagaatttcaaaaatgatgatgacccaattgtgtgcattcgtttttcagtgatttggaacacaacgaaaataggcaaatat

SEQ ID NO: 56152 - DNA, 2066 bp, Heterodera glycines
atggcaaattctgtgggtgcgcaaacaaatggcactaaaattgcttctccgtccaaatcgacaagccaagcggtgcttctcgcgcaggcaatccgcgcgaatgacaccgaactttttgcatcgatggtcaaccgattgggcaataattggcagacaattagcacaacaattaaggtacaaaacggaaagggatgcttctacaatataatacttcagtttggagccgctatttttggcaacagttctctttttttttttaccaatgctcacaaaaattttaaccattataaattatcattaaaattccaatttttggccacataatcagatttttagaaaaacgggccattttttaaatttactttaaattgtaaagctgctcatttgatgaatcagaagacccttggaattatttttgcaaattttaggagttgcccacgtccgaagtgttgccccttttgcggatgatcgacaagcatttgcaacaacacggaagagagataaaaaagtataacccaaaaagcaatgacaaataaatcccattatttttcccattttcattcagtctcgaattgtggctttcatgggtcaacaaaatcttgcgcattcacagcacacatttggccacggtatctctttttaaaagtaaattgacaatttgtaccggttaaatagctcaaaagttcaagcaaaaccaaatgggaatagaatgtgcccctaaaatatgcaaatttccaaaatccgatcgtttttcttaaattcccatttcacacgatttcaaaattctctcgggcaaatttgatcacgttttgatcaaaattccatttaacacaactgctaaaatgctattttgtattcccccgcttcgcataattttgaaacaaaacttgttggaccgggttagcccaaattacgccccagacttgcgcctatgtctaaattcgggttctaaattaagtttttcaatctctgatagcctaaacagcatttcaactgattgaaaatgattatgtctgataatttgataattaattaacttttgaaaaatctttagtttgaattcaaagacattgtgcaaatgtttagtcccggctcggtgcctttcgccaccgccagcagagccattgtgccattctttattagcaaaaattataatttttggcgcaaaccgctacaaattctatttgcgcattttcgccacggtgttgaaaattgccaaacctcacaccaacattttcattttcaggtgcccaatttgaccgatcattttgcaacgatcacccaatggatggaaaaccgcgtgcggcacattgacaaactgctccaactccagggcaaactcagcttcatgatcagcgcaatgccgcaacagagtgacctgtggagagcgcgggacgagcagccgatgatcgtttttgcagccgatgaatgccaagttgaagaggagcaacaggaagacatggacgactgactgatcagcctttttttttgtttacacatttttcatcaaaaaatttaaattgttacaacaaatgcttgcttttaattttagcatttgccgagagagtttttgaaatggcgaaaacatttcctcccataggtattattttgcctcggaaacgcggcattttgccggttatggggaaggggggggggggggaagtccatgccgcatttttgccgtttttattaacaaagcgaaaaattttttgtagccaagattcttggtcatcatgaaatgagccaaattaagtcaaaatcattctttaggattgataacgaaattaaatcatttggacacaaaaaccaaaaaaaaaaaaattttctaattttactgtcaaaatcaactactggcaggcggtgccaaagacgccgccagctaaatttttgaaatttcatcctaattccttagttgattttccaaaaaaaaaaaaccaaatttcgctgttttgtttcaatctttggcaatcctgaagaataggtcgcagggttcggttgaaattttcaaaaacaaccgctttcccggttttccctccaaaaccgggcccggcccggctcggtctcta

SEQ ID NO: 56153 - DNA, 362 bp, Heterodera glycines
aagtaacgctggagggcagaactcgactcccgcagagagtgcaggtcaactcgaatttacaaaaattaaatcccacgtgatgattttctttcttttaaggaactcgtgatcgacattggcaatgccatgacaagcattcaacaaacttcgggtcgtcttttacatttttacaattggctttatcctttatccgaatttccctttggcaggttctacagatttactgattacttcgattcgaaatttcacttctgttgatggaataatggcaaattctgaacaaaatctcgtcaaaattcaaaatcaaatggaccgaattgagactcaaacgaatggcgctgagcaaaaccttaaaaatgttt

SEQ ID NO: 56154 - DNA, 77 bp, Heterodera glycines
atggatcttaaactatttttaatactgaaaatgtcggacaatccgaaagaggaggagaaacaaatggacaaagaaat

SEQ ID NO: 56155 - DNA, 947 bp, Heterodera glycines
atgccattcccggtccgtctaactcttatttttacagttccgtccggccttttaattgcagaagaagtggtcggcattgaaaaataccgtagccaatcgaaaatgtgtggcacttccgaaggattactgtacggcccattgcaattcccgagcaattggcgaaatttgacatttgggaaaattatttttgacattgaaaaagtgtcggaatttgtgggagaaaaagtggggagttgccgattcagtgaaactgttcaaatcagaggacttccttggaatattgtggcaaaaataaatggaaaagctgatgaaaaatggctgggcttttatcttcaatgtgcagcagcagaagaaggtaaagtaaatcaaatgctaattattttacattaaaagttgtcttaatttaaattaagatgagaattggtgctgtgaatgttccgcaacctttcgaattgtttcgcaaaagttcgacgtgaagaattctaccggcaaatttttcggacaaatttttgatcacacagcggatcaagcaggattccatggattcatttcatttgcggtgagtggttgtttattgtttaattgatccattatggttaattaaggaattgctggaccctaacaatgaattttacaacagagaagaggacaaagtgacattgacagttgactttatcttaaaagatgctaaaatgggccaattttctgctccaaaaacagcagacaaaacaatttttatggaaattgaaaaagcttccgaatttttttgcgaaatcattggaagtgagcgaaaaagcgaaactgtgctcatcaaaggacttccgtggaaaattgtggccaaaataaaccgaagcgctgatgatgagaaatgtttgggcttttaccttttatgtgccgtcccgaaagaaagtgagtggaattaattaaaaataatttaaaacaataaa

SEQ ID NO: 56156 - DNA, 723 bp, Heterodera glycines
atgtcttccattgaagtgagacgagtgcgtgaagaggtaaaatagttttgacacattttataatttagttatattttttaagttgagaaaaataatctaccgctcacgtattgtctacgatgttgacgtccgcactatttatgaaaatctaattatcataactattttcgcttcttcccagttagccgatttttgcactgatccatttgtactgtgccatctcgacgcttgcttcgcgtacaatttgacaatttcaccacgcgacattttcattggcaagtaaaaacagacatttgggtcactcgataatcagatttagtgatttagccaacacaaattttcaaaaagatgccggcaagcgaaacaaggacgccgaaaaatagatcagtcagctaaagcaggagttcatcaatgtttttaaaatgaattgggactctgcataaaagcgtacttagaattgaactccgacgcacggccaatatacagaaaggttcgtccggtcccgtacaacgccaaagatgcagttgacggaaaattgaatcgtcgtgagaaaatggaagtcatcggaaaagttgagcacaccgaatgggcagcaccgattctggtcgtcaaaaaagttgacggtagcgacgaagcattaaaaaattcattcgcttattaacaaagaaaaactttcatttacttttattatttatttccagaagtttccgagcaaacaataaa

SEQ ID NO: 56157 - DNA, 227 bp, Heterodera glycines
atgtgcttgaggggagggagatgcaaaggaaaaacagtggaaggaagaggaagaaggaagacaaagcggaagagaaagcggaagaagaagaagaaaaaggtcgagaaagcgggaaaagaagcgaagcgcaagcaacagaaagaggaagaggaaaggaaaagaaagggaagagaaagcggaagaaggaagaagaaggaggaggaggaaggggaacaagaaggaagaga

SEQ ID NO: 56158 - DNA, 1244 bp, Heterodera glycines
  unsure (1)..(1244): unsure at all n locations
atggtcaccgctcgtaattttttttaatttccaaattaaattttcataaatgctttttagagtttgaaaattcattgataaaacaacattttttaattgatttgttgaaaaatgagaaaaaaacaaaagaagtgctggacattttgggaattgatggcttaacaattcacaaattgcaaaacgaaatcagcgaaaaaattgatcatttaaatagcaaaaacaaaagtaaaaataaaacaaaaaagaaaaaatatataaaaaggaaaaaagagaaaattggcgaagtgttaaaagggacagaagaagaaaacacggaggaaattagtgaaaatttcgatgaaaaaaaagaaggaatggaagaaaataaagaaaaaacgataaaaaatctggaaaaggaagaagagattggagaaaaagaagaaaaaattgaagagaaagaagaaaaggaaggaaaattagatgaaaacattgaaaaagaagaaaaagttggagaaaatttagaaaaaaaagaaaaaatgaaagaaaaggaagaaaaggaagaaaaggaagaaaaaattgaagagaaagaagaaaaggaaggaaaattagatgaaaacattgaaacagaagaaaaagttggagaaaatttagaaaaagaagaaaggactgaagagaaaaaagaaaaaatgaaaaaaaatttagtaagggaagaaaaatttgacgaaaatgaagaaaaaatcaatgaaaaattagaaaaacgaaaattggaagaaaaagtttcgaaatcaaaagattttgagacggaaaatggcacaaaattgaagaaaaaagatgaacaatttgccacagaaaaattggaagtgaatgaatttgcatttatcaaattgggcgattttgaggacgaccaatttttggcattaaaatacggtgaatttttgggaatattaagtcgaaatgacggagaaaaggcgagaaaagcctggtccccggctctgaaacaatttggggaaaaggaaaatttggaaaaatgtgagcattcgttggcacatctgttggacattggcattttggcgaacgaaatttggcattacgttcagacaatgaaggcactgaatggaaaaagcaaagatttggcaaaatttgaaaaggaatgggcccagctgaagcagctcaaattggaagaagaaataagtccaaaaaatttggaacaaacgcttttttcgcttatganacgaattgtggtggagggaatcactgcaaaaaat

SEQ ID NO: 56159 - DNA, 512 bp, Heterodera glycines
atgggcttcttcttctacctgatcgttgctgtggcactgttcggcggtggaatggtgcgtttgctcgttccaaatctgttcttccatcaatcattttaacggttttgttttcccttttcagttcgttggcatgtcacttggcggcaaaaagtcatcggatggagcgagcggcagtggggccaagaaggagaagaagcacaaaggatcgaagagctccagcagtgagaagagccaatgatgccgccgcagtacacgaggacggacgaacgatggaatggccgggccgacaaacagttcccctcccaaaccgatgctatccccaaaattatatgttgttgcccatatcatttgtgttttatcactgtaagcaaattttgcgatttccataccagtgatcatattgttctaattgtattgatgtgttctatgtgtgtacacattatttatgtatctatctatatctggtccaatgtaactccgtttcatattgtatgtaaagtttgaccaataaa

SEQ ID NO: 56160 - DNA, 896 bp, Heterodera glycines
atggaccttacgcctattcatcgcatccatgtcgcatacgtgtggctgaatcacttccatgtgcagctcgttgctctggacgtttcacgtgtcgatacacgcgccgtcttttcaactcattgctcggcacttttggctggtttaagtaagtcgcaatgtctgaagtcacttctttcattttttaaaaatgctttaacatgttaaggtggcacaagtgggcctcaattgtcgttggatggacaattgctggccctcagaacgttattgcagaacgttgacgacgcaaggtcgcaagcggacgtctttcgctttcaggttggggctgcattaaatcagtgtgtgcatttagcagcaacaaattgtttttgttaagggaatgctcactgggattagccgccagttgccgctgctgcttggacttttggacaagtttgaaaaggacaccaagttaaaaaaaaaccacccgataaatttgattataaatttttaaaatttttcagtttgacgagtcaagttgggctgcagatccacatcgacaacatccgactcaacgtctttgagctctacattgatttgaagttgttgtacgaccaattgcaccttttttttgacatgcaacagtatatcccaattgtgcgctctcgtagcgctgttgacctctctcgtaacgcgcgcccgtagcgtgaaaaaaaaatattgttgtatttagccgtttgctttgttttgttgttttctatgtgtattaaagcgttttgataattcgattttgtttattgcattggatttaaggttttagccaatttaataatgtttctgtttcctatcgttttcctcaaaagagtttgttttgagtagggaatattcgcagccttttattatggatgaagcgaaaatga

SEQ ID NO: 56161 - DNA, 1503 bp, Heterodera glycines
atgcactggtaagaattgagttttttggtaaaaataatgattttttattgaaaatctgttaaatatatagccaaaatttcaaaaaaattttcccggcggcgcctatcggcaccgtcggaaccttaaaatccttaattttctttaaaaaatgcctcaaattttcaaaattggctatttttggacataatctgacaatgtattgtatttaaatattcaattttttttccctgcggcgcctatcggcaccgccggcctctctcttccaccctggtcaccaccaaaaagttttttcaaaaaataagccgcaaaaaattgttaaaattaataaagggagtcaaaataaattatttaaaaaatttatttgaagaaatttgaaaaaatttctgattttcgaccaaaaatatgattttttaatttcaaatttctgcttactaaatttttctgtatttttttctctaaaaaaaggattgcccttcaaatttgtgcattaaaaatatttttgtgagtatttaattaaattttcgaattactcccgctcccgcccgggactcccgtaaaatttctgcgggattttaacgggagcgggattttcacgggattcccgatcccgatcccgctcccggaaatttttttttaccggactctattaaaggcccaaaaatggcaaaaaaatagtcactttttggcgaaaaatggctacactcaaatttttaaattaacgcaggccaaaaaatttttgcccttggagcaaaaaaaagtattcggattcccgccttcggaatttttttctggctatactaaaaagtttaaaattaggggtctaaaatgataaaatttattcgaaagtaacaacattaaaccaactcagtaagagatacataattttaaaaatcaaaaattcttatcaaggattaaataaataaattttggagatgaatttttgagaaatttttcatttcttaggggtgtatttttgaaaaaattttaggtcaattcttatgggtatatttttcgtttttattgcatttttgtcaataattttgggcaaacgccaaaatagttgaaatagttttttaaaatttttttatgttttaaggttctaaaaataaaaacctagaaaatcgcactaataactcgaaaagtagcttaaaaacaaccgaaaaaaacatattttcgtgcgtttcaggccataggaagtccagaaaaaaaggtaaaaaactaaaaattggagtcctattaaaagaaatttgtttaattaattattattcattaaaaaatgagtgcataattaaaataataataattaatttaaatatttactataattgatattttatgttcgccccattaatattttttaggttcgaccagcaggcagcgaacaattgtaaatttcttcgatttgctaacaatgcattgcgaaaatatttgctctaccttatatcgaagaaatttttaagagaaaaagaaggtttttaaaatgtttaaaatgccaaatattta

SEQ ID NO: 56162 - DNA, 288 bp, Heterodera glycines
ttttttagcttttttcgaaatatttttgtctttttttcggcaggcactgcctctgacaatattttttatttatttagaaaaataaatttttttttctttttgatttattttaattatatttcatccttaaattttttaataaacattttcaaactttcaccttattaatttaaggcgaattttgccttttttaataaattctcttgtgaaaaggcaaaaaaataggctcttttaaatatgcctatttaaattactttcattgctttcctttcgcttacgaccatacca

SEQ ID NO: 56163 - DNA, 429 bp, Heterodera glycines
atggaagcaacggcattggcattgataattgttggaaaaaatgataaattttgggagcataagcaaagatggtcaagatccgaagtttgccgctttcgtctgattattagcaacatttttgggtaaatattgatcataggccccaaactcaaaaatgcttaaaaacagtcagaatcgatgtaaaaaggtttgaaatgggttggaaaaatagaattaggggcgcgctttcctttttcaggatgaaaagtgccgaaaatggagtgccaaactcagctgggactcaagtgaccgtgctatataaagcactcaaaagacattataaataatttttctagggtaaattgtggcgctgaacacgaatatgacctttattttcaaaattccgaaccccgaacccaatcgaacaaaaactcaaaatttataaataaa

SEQ ID NO: 56164 - DNA, 910 bp, Heterodera glycines
atgctaacggccaattcccggcaccaatttcaaatgtttccgcctcctttccatgttgctccgtctgttctgaaccgtccaatggcactttctttggtgttccatcgtgccgcgcttgcagctcattcttccgccgatcggtgcttgccaaacggaactatttgtgccgtaaggcgaataattgtgccatcattaacaaaggtccggagagggaggacaaattggcaatcctaaagaatgggggtccattatttaagattttttattttgggctcaaaatcagtttctggaggttttcgaagatgctcattacgaatctgctctcgtgtttgcccaattccgaatcccggacccgaattcgaataaaaaaagttgaaatttttttcccaaaacatatcgttaaaaccggtcaaattttggcacaaattgcgcatttttatccaattaacaatttcagcagtgttttacatccaaataaatagttaactaaatgaattagaagtttttaccccagaaaaatacatcattggaaaaaaaattgttcaactttttgttcaaattcgggtcggggattcggaattgggcaaatctgagttcagaaattcgagattagcgccctcgaaaacctccaaatactcatttggagctcaaatttaaaaaaaaataatttaaatttaggaacccccattcttaagtactgccgacaaattgccatttcgaacaaatttgtttttttgttttgtttttttgtagaaggaatgcgaaattcgtgccgcgcatgtcggctcaaacggtgttttggagttggcatggacatttcgcaaagacactccaaaaagcctggccaacgttaattaattgtgaaggataaaatttaatattttgccaaatttagccgaaaatatagcaa

SEQ ID NO: 56165 - DNA, 1356 bp, Heterodera glycines
atgctgcaatttcgaagggtgatgaggacaattctgctgctgcagctgcttcggcttctctttccgctacatcatcaccagcaaaaaaggtcattccaacaacaacgaaagaacgccaaggtaaaaaaaaaaaattttgtttttaaatattttccctatttgaaatttcgaaaaattgccgaatttccatttttttttgtttagcgagtgccattgacattgtgcgtgagctgtgccgaagtggggcggtgcaggaacatcttgtgctgttgatgcaacagcgggacgtgcacggccaaaccgccttccaatgtgccatcaattttcgtgcctacaccgccgccctgctgctgtgggagactgcggttgagctgcgcgactggagccaaggttaacgaagaaatgacaaaaaaaaaacaatgtttccgggacaaaaagtcgccgcaaaaattaatgaaaaattcaggaaaaaatgcaaaaatattttcaattgagaaaaataaatcgcagtttttacaaatatatgaacttaaaaaaattaacattttgttcaccaaaagatttatttaatagaaattaaactaaaaattccacacatagcgggaaaatatttttgttttttgaagatgttgttgacattgtggcaccaattggggtggaaaattcggacgaatcggcactgttcgcgctgtgtgccaatgacacctgctcatacacatggaccggtgaggagcacacaccgcaggacatttttgagtgctacgcatgcggactggtcgaaacgctgtgttgttgtacggtatgagaaatttttaaattttttgttttttaataaattttgtaaaaatttactatttatataattgttatattttttaggaatgcgcatacacttgtcaccgaaaccatgattgcaagtgagtggtacctaatttgtttgtgttccattcattaagggggtggtggagtggagctagaaattttttaaaacgattttagttttttttttgattttaccaaaaatttgattttccgagagaatttttagaaaattcccgggaagggtggctggaggatcaagtattgaacacatgacattctgtccaaagcacaaagtcattgtgtgcctccaaaaaatttcgcccctttacatttttttttttaaaattaaacattttagaatcaaaaagaccagccccactgcgtactgtgattgttgggagaagtttggttgccgtgcactgatcaccggcaatttggtcaagcgagagcagttgctgaatttgtttctgcaaaacggcaaattggttgacaaattgaacgcgcggtaatttttgttgctataattaaaataaa

SEQ ID NO: 56166 - DNA, 1480 bp, Heterodera glycines
atggacacttcctgtggccgcaaattggccgacacatttttcgagccgttgatggacgtgccggagccagtggaacgcatgttttgctgcacgcttttctcggccattctgtcaaagggcggcacactgtactggaggtacgctaaaaattttttaaattttacaattaaactttcgaaaatttttttaaatttttagtagaaataagttttttttttaattttgattgtgtggtgggggtacttacttacttgtcagtttatccatgggagggatttcatgaattagtttttttttatagaatcacatatatatttttttaccatgggccatcgaattctcgtttttttccgttttttattcaatggtttgtgttccttttaataatgcaaaaaatgaatacagatgcaccatcactccccattccattttggatacaaaaaaaaaaaattttttttttctacggttattttaaaatttcagaggcatttttccgttcaccgagcggcgcaaattgtgggagaaggcacgcatgaagaagaagcaggtgaccagtgccagcagcaatgacattgtggtgggctctgaagtgcgcacaaagtcgtcgcccatttattcggttggctccgttgctgtcaactttgccggcggtcttccaatggtaaacaaaaaattttttctttagtttttcattcgccaatattttacatggcaatgttatgataatctctatctgattgctgaccttggtgccatgatacacggacagaaatttacttaaaaaaaattctcatctttcaaaaaactaattttttttttcacagattggcacactttacgaggacgcgtggacactcaacgagacatgccgtttccgtgtgcaaacaccggacaattacgatgcaattccaatcggaaacgacaaggacaagcagcaacaacagcagcagcatcgggaaaagcgcgtatcattcagccgtaagttaattttttttttttttgttgtcattttccttggcactaatttttttttttggcacactttacattcattttatgaattacttttgaccaaaaatgctggactgttcttttttgtggtcttttggatgaaatggaagggcctagctggggacctctggccgaaccaactgggtcccggacattttgtgaaaaaactttcatttttttatttttttttggtatgatttcgatcaatttcccccgccatttcctcaaaacctttttttaagaaaattgtaaaatgaaattgtccgggcccacttgtgttcggtcccatgccatagttgggtgaatgaaattggttgactttttgccattgcaattcacccatttgaccaaaaaacccaaatgatcaaaaaaaaaatccaccccccccccccattaaaaaattacacgcaaaacataaattaaccacaggcccgtagccagggggaattacacccttaccccgaataaa

SEQ ID NO: 56167 - DNA, 1048 bp, Heterodera glycines
cgtatcatgatgaccaggcctggtgtccggtccggtggcttctgtcgcactggggttatcattgaccggaaccggtccaatcggccaatgatcccggcatcgtctgtgcccgaggagctcattgtgcaatgccaggttcggagggggtgtcaaaaaattttttccgcaattaccaatcaatccaatccgctaacacaacaccctcccccccccatctcgcaaaattgagattttccttggtttgaacatacctaaatgggtttttgtgagaaaattaaaatttaaaaaaacaacccattcttattattctagcctgggttcgataggctttcgatttaaaaaaaaaatttgggttcatttatagaattttgtgattcctcattttttttaatgtcaattttaggtggttttgcaaggcaagtcacgggatgtgattgtgcgtgagttgcaacgcaccaatttgaatgtcaacgaggcggtgaacaacttgttgagccgggacgacgacgaaatggaagacttggacgagacgggcgaggcgtacctgcacgaggaattgttgtccttgttggacgccgggttgcgttctgatggtgatacgggtgcattttacgtgcattttttgaataaaaaaaatttcacataatttttggcgggggtgggtgaacacgaatatgacattcaatttgcaattctgcagcacgccagtttggattcgaacaaaaagtcgaaaaattcaaagagtataaatctgaaaacgaatcaactttgaattttcaacttttgttcgaatccgggttgaaagtgcagacttggcggaattggatgtcaaattcgtgttcagcgaccccgaaatccccctaaaaatgggtttttaaaactttaaaataaattttcgaaaaagtggggaggggtaccatcaaattattaccaagaaatattcgaaaatttgccgccttcagatggctacgagtatgtgatctcccgtgacatggcccgacgtcgtgatggttggaccaataagaaaaaaaattggggaccaatttag

SEQ ID NO: 56168 - DNA, 662 bp, Heterodera glycines
atgaattatttcatcgaaattctgctgttgttgctgtgtaccttggtccaaaaggtgctgttctgctggatgcaattgattaaaattataatttgattattcaattgatgctatgccctaggctctggttgtttatttaaacttttttagtgttttcagttcttccccaaaattttcttgatttgtgagtgagatttgtcgtttttcgatttttatgtctccaggaaacacttattctccttccttttttgacttttttttcatctcctgagtatgggcatccattttgtccagcttcgaagtcaagactccgactcgaacgaaaataacccgaaataattacaacaaaaggggcgataaaatagatgaaactgttaccaaaagcccattgaggatttttttttcaaattaaagattttctaaatctgcaaattcctgcaggacgaggccgagggtcgcattgtgtttgcggacgaccacctgccgccgacgtccaacgccatcggactgcacggccaccgccacgccacgcttgccgaattgggggcacagccactgcccaaggtggtggcggagcgttacgcgtgtctgaacatcgcctgcctcttcccccgcctcggatttttcacaggttagcaaagaaaaaaatatacgacaataaa

SEQ ID NO: 56169 - DNA, 136 bp, Heterodera glycines
atggagaaattagaaaagagacgaaaggctaaaatagcgtatttcctaaaatataagcccccagggcttctatttttcatattcttcaaaagtgggctcaaaagaatgaatgaggcggcatttgggctcttattca

SEQ ID NO: 56170 - DNA, 937 bp, Heterodera glycines
tggccaattggcgattgctcagcgcaacttcgtacgccttctgcgacgattcgctcaattcgctgcgaacaatggtcaaattaaagggcagcagcagaagggcatttctcagtcattgcttttcaaaatatttttggattggattttaattgggtaaatttttgatcaaaaaaaaaaaatccgtccgtccgtttatttctgatcactttttttctgctcattaaaaatgctctccgtcttcttcacagatcgacacgaagcgttgtgatcagaaattgtccaacgtggcgcccaccgccacaattttcctcggccttctcattttgggcgttggccgcacaatgccattttctctcggcctgccgctgatcgacgacaacgtgcgcaaaagcaatttgccgctttatttcggttggcttttctcccatttcttacaatcatttttgggttatgttttcagcgggaatgttttgcattcgaataatgggaccgatgctcggctttttgctcggctcctttttcaacaaaaattactacactttgggaaagggtgagttcgtgctgtgatgctgtgcttggctatatattttttatttgtctattttaattcaatttaattaattcggttttattttttaattttcccagtgccctacggaatgactccaagagatccgatgtggatcggcagatggtgggctggctttttgctgatcggctctgtgcttttgctcccttcgttggcactgtttttcttccgaaacccaaagcaaaaagcgtcggctggcgaagaaaatgaggacgaaggagggcatcgcccccggggattggcactagtggaccggcatttggaaaagggcgaagacggcgaagtcggaattggcattgacattacaaatttatccatggaatggcactcaggcaattgtgccgaagg

SEQ ID NO: 56171 - DNA, 242 bp, Heterodera glycines
atgggttctcgaaacgcaccaaattttcatttacatcggttagtttcaggcacttctcgacgcttttttctcatcaaaaagggagatgaataaaatttttaaaaatttttaattcctttttaaacaggccaaaaagtttagggctttaacttttttttttcagaaaactgatcagaagcgcaccaaactttgcagggatactgaaaggaagagaaaataacctatttttaaatattatctag

SEQ ID NO: 56172 - DNA, 662 bp, Heterodera glycines
aaacaaaaaaatcgattttttcaagtgtccgtttggggtactcaaacaattatggggagcaaaaatccaacgcagaattaaagtacaggctatagggaagctattcccgaaggattcggtctccccataaatctgggcgcatcggttcggggggactgccccgaaaacaaaaataaatcgattttttcaagtgtccgtttggggtactcaaacaattatggggagcaaaaatccaacgcagaattaaagtacaggctatagggaagctattccggaaggattcggtctccccataaatctgggcgcatcggttcggggggactgccccgaaaacaaaaaaatcgattttttcaagtgtccgtttggggtactcaaacaattatggggagcaaaaatccaacgcagaattaaagtacaggctatagggaagctattccggaaggattcggtctccccataaatctgggcgcatcggttcggggggactgccccgaaaacaaaaaaatcgattttttcaagtgtccgtttggggtactcaaacaattatggggagcaaaaatccaacgcagaattaaagtacaggctatagggaagctattccggaaggattcggtctccccataaatctgggcgcatcggttcggggggactgccccgaaaac

SEQ ID NO: 56173 - DNA, 199 bp, Heterodera glycines
atggccacaatgggtaaggatttttgctggtatctaaaaaaacaaaaaaaaaaagattttagctcttgtataggcttcaatttaattaatttgttctattttatccagtttcagatttctggtcaattttttttataacttttggcgcctgagccaaaattaacgtttttcctgaaatgtaagccaaaaatgcaataaa

SEQ ID NO: 56174 - DNA, 694 bp, Heterodera glycines
atgcatatgtattatataccattggatagaggagggttgacttctattttgaattttgccgatagcgaaaaacaaaagttatggggcctcaaaaatcgaaatttttggctgtgttttcacttaaaattggtggctcagttggttaaattcgcatttttggagctcggattcaaatccaacacaaaaatcaataaattttaattaatgtataatataactaaattattttaaaaattattttttaggcgaaaaaaagtcaactgtttgttgctcgtaagaaggtatatgaaaatttgtattttctaaaaatgaaattttatttccaaaaaattgacgctggaatttctgaaaatcagcaaagcagaaaatacaccccaaaactcgtgattacgaaccggaaaaactcatccagtcccggatccgaaacactaatgtcgtctcgagtggatgtgagaacaaatccacccgatcaaaacaggtcagccatcagcactaatcggtcagtcattcgtccgtcaattatttaatgggaaatgcgtgaccgatcgcccgccgccgacagtcagaagagggcggacaaggaactgctgacgacggggggtgcgcgacaattgaaactgcagcgcactctctccgtgtcccaattttttagggggggggggagagcgaaatgtgaattgtcggtttgggtaga

SEQ ID NO: 56175 - DNA, 2210 bp, Heterodera glycines
ttggcacggatttttgggtgatcaattgtcagccgaatttttcgtcactgatcagcaactgctgaaggtgggccatctcaaaacgtacaaagagagggcgtccggttccgttccggactcacggaatgtgccaaaaacagaaaaagatttttgcaaaatttagttcaaaatttaaaattcgttttaaagttttttaaattaagcactgatataaaattaataggagaatgggtcgacctttttagtgcaatttttgatggaatttttccaaaaatatttcaattatgaagtgaacacacaaattagaaattatttatggactaaattattatttttatttaaggaatgccgagaaaaacttgccaactccgaattgagggaaacgaaattggtgttcaaaaacggggaattgaatgctgagaatgtgagcaaaatgaaaaagacaaattattaaaaaaaaacaatgaaatttcagagggcgaggggtctaaatagagaaaatttcacttttttttttattcagagggctctcaaagcagagttggaaaagcagaaacggatgatggaacacattgaattgaaggcaaaagtcttcaacatggagcaggaaaagcagcaattcgagaaaaaatacggtagggagaattttgaaaattaattataaatttccaataccgtatcccgagacttactgttaaataagcatttaaaaaataatttctttaaattttcatattttagtttctgtcgaagtgttcaatacattggtggaacgcatcaaacaattggaaaatcagcagcagaagaaagaggagggcagaaatggtaaaaaaatgggaaaaaaacggacgtaaaatttaaaaatttccgaattcttaattaacatttagctgaccgtttaccaaatgcaattaaatttcagtttttgttgatcatcaattattggatatatttttggcatgggcaaagcagcagaaggaaaatgttggtcaacagcataaaaaggagaacgttcagcagaaactggatggaaaatgtgttatgttcgacaaaataatgtcgcgggtgtgcaaaattaaatgaaaatgttttaaaaaagttatttaagcgattataaaaaaaaatatttggatttttggggctcatcggatattcgttttgttagggatttgaatttgttaaaaaattattttatttattttttttagaaacttcaaagggtgccggccattcgccgccgccggcggttggccttgtgaaaattgcaaaggtggaaatctttttttcataaatgcaaattgaattcccatcaggatttgccaaattcgaataaacaaaattgttgggatgccaccatttgtcacaaagatattgaaatcaccggggaaagccaattgacggtcaattgtaagggcaacggatttggtaaataattatgaaatttaattatattaattttaatgctttttttaattaggatggcactctgtgtttgcgaaattttccgtctcgaaatgttgtcgtcccggaattttctacttcgaaatgaaagtcaccaatttggaaaggtaaaatgacatttaggtaattaaattttcaaatttgcataacttgctatttaaaattactatttttatgcatttattaataatttttcaaatattaatacatttttatagttttgcttcgattggattcgccaccaaggaaatgccattggacggaccaattggacaacatttgaacagttacgggtaccaaagcaatggctcatttggctgcaattttatcagtcgaccgtgtaaaatggcatttggcacgatgccaattccattcaacggggcggttggaaaacagaggggcggctacggtggaagtgccaattggccatttccattggattttgtgcccgtgccaatgccatcagacagggcattggcatatcaatcgccatcattttccaccggagatgtagtcgggtgtggcgttcatttggatactcgactgatctttttgacgaagaatggcctacgaattggtgggccaaacaaaatttaaaaaacaaattaaattaaaatttcacagatgactactcatttttcactacaactcccaccgattctctgtttccatgcgtttctttgtggactggcgacaaaattgaggccaactttgggccaagtttcaaattcaatttggccactctttga

SEQ ID NO: 56176 - DNA, 371 bp, Heterodera glycines
atgtcatcatcgagcggatccccagattcttttttccgttcagcaaatgatcaaggtaataatatctagaaaaaatttgaaaaaagacgaaaaatagaaaaatgattaatattttttattgaaaaataaaatactaatcaaattttttatcaccaccatcagcagcagcagcagcagcagaagaagtgggaaaatatgaagtgttcagttggcacggatttttgggtgatcaattgtcagccgaatttttcgtcactgatcagcaactgctgaaggtgggccatctcaaaacgtacaaagagagggcgtccggttccgttccggactcacggaatgtgccaaaaacagaaaaagatttttgcaaaatttag

SEQ ID NO: 56177 - DNA, 1176 bp, Heterodera glycines
atgtgcccgaatggaaaatttatgagcttagaagaatgggccgcttttattttgcgcattttcttgctaacccaaaaggtaattattggacaattaatattattgatttatttcttaaaatttaaacaaaaatttttatcaaatactaaattttttttttgtaaaatggttttggatctaataaaaagtaaaaaaaaattatgtttttttgaattaaacaattatgattgattttttaatttaattatatttaattattactttaatttttaatgaattatctaattgaacttttatccccttttttgcaaagttttgcttcgaacaattttttctgcaattcggcaccgacttctcattgttgcaccaccggagaaaattgttgccgcagatgttttgttgaaattaatgccaattaatggaaaaacggaaacaaaaaatttggaaagagaacaaatttttaatgacgtaattataaaaataatttaaattattaaattaaaataaatgttttattaaaatttgcatttaataattattttaggatgttaaacgtttatggaatatggacccaacatttttggattcaacttccaaagttcaaccatattggcgacattctcatctacagtttaatcagcagcaaattaattccaatttttacccgaaatttgaacaaaaattgtcagaaaattggcaaaacgatgagaaattcacaagtataaaaatatacataaataatatttaaaatgataagataattaaacaaaaacaaaacatttagttgttcttcaagcatatcgaagggacgcgcaattactgtacactcttaaaagcttggatggcttacggtatttggaccgtgtcattgtgatttggggtgatttcaggaggccaatcactgaacatgcctacacatggccacacattcatgtgccaatatttgtggtcagtgcatctgtttggcattttgaaactcaaaaaactacatttattaacataaattaatctttgaatgccaatttcggttcatcccaaaaaattgccgacaaaaaagcgcttatttgacgtacttaacattggcggcaaaattttggcctgcccaaagaaatgaatagtcattgaacaacggcatattttattttactgttcccaaattctcgtttgagcaataaa

SEQ ID NO: 56178 - DNA, 617 bp, Heterodera glycines
atgcttatacaaattaggattttaaattctttagtgctaatttttgtaattatttttttaacaatttacacgaccaaatattttaaaggtaaattttttaatcataattttatttctaaaaaaaatttttacagttcaaaattatgtatttattattgcatctaaagaagcagtaaactttttcgattggtcgtatgttttaaaatcaattcctttttattaaaataataattttaatttagaaaatgcgcagaatttggcgtttttatgccaaataattcgaatttgatgccaaaagaagaacaattattagcaaaatggatgataagcagcaattactggcaaaaggacattgaaaaagcgtgttttttggtgtatttcattaacaaaaagtcaaatttattaacggtaaattaaataaataaataaataattctataattaattaataattattcgttcacttttataaatttaaaggagcatcttccaaatgacggaatgaacagtttgatcatatttttgaatgacatcaaacccactgaagagtttagaaaaaagaattttcgtgccatttttgtagcatccgattttaatgaggggtactaattattaaa

SEQ ID NO: 56179 - DNA, 1246 bp, Heterodera glycines
atgaactccaaattgggctatttggatgaacaagtaagagaaatgctgactctttccttttctcagacaattaaatcgatttgtgattatatgttggagacgagaagatgggcagcgacggcacttctctcagatccaacaacttttgccagaaaattattccaatctggtaaactggtggcaagagtggctgggcctgaattgattaaagtgtggccatgcatcgaattgcaagcacacgattacgaatttgccaaaattggaaactcagcggactccgaattcgaatgcattgacaaaattccaattaaattccgagtgaaggacaacaaaagaatggcatttattgacccaaggacaatgattttgagctccgatgcgagactggcaccatgctcacaataccgcaaacaactcatttttgtgcgcggttcgctttacgaaattgatcaaatcgatgctcaagtaaagcaggtaaatgccaatcgcattgaaggttttagcctgaatctgtcattggcaccgacttatgctcgccattcctttctccaccttgcccttgtgaatgtgtctgactttattggccaattttacgacgccaatttggcaagagaaagcgaactcacattccaaatcaaaagtgaggacgctatagtcacaaagactttgtccgagcaatgggagcaggtgagtgagtccattcgcagcaaaatgattgggaactgggaacaaattggcaaaattgtcctgtcaataatgataatcattgtttttacagactttttgatccggtttggattaatgattagagacgaatacgttggcagaggaacaacacgacgcatgacttttggtggaaacaaaacgcagaaaattgtgaaatctccagcacgcctcaatatgatggatctgaatgcatctgtagaatttggtaacgaaattgaactcagtcccgttaagctcattgaacccgcccaaacccaggcatacaaaattgcaggaaaacgaaagagaccggtaaaaagggctcgcttcagttttcgggcgccaaaagtactcattgggtttttagtagtttgtcttcccaatgcttttgcaaaccccgatgtgaataaccaaatttcaattcaattcacttctccatcaatgatttatctgcttatcattccatttctgatttttatcactatttcagtactgctctgctcaaaacggaattcagaccttccaatgctcccaaatctga

SEQ ID NO: 56180 - DNA, 522 bp, Heterodera glycines
atggcatatgcgagattgcgaacaccgcttctcgaaataagcaacatgatcatcgctgatgtcaccaaacttgtaggttctaaatgaaataatcagcccctaataataatctgaaaattaatttgttttattaaataataatttttttaaaattaaggatttcattggaacaatttgctcaggaatcctttcaaaagggaacactcttgctttggaatctgacatggtaaaatatgatcaattgtcgaagggcatcaccgaatccacgcatttgtggtggaagaccgaatcttgtcagtgtgttatggtatgctttgtggcatttatctagggatgggtacggtgttaggatgttagtcaagatccatcacacccatttgtcaaaaaaaacattgtatgttatagatttactcaagaaagccgaattttaaatcttgatatcattagacagccctaattgttttatattatcctgcaaaatttcaaaaagttcgtcaagtttcaagaaagttaagacgacaa

SEQ ID NO: 56181 - DNA, 828 bp, Heterodera glycines
tgctaactaaaccaatttatctgcgcaaatatgttggaagaggtaaagcagctgcaaaaaagttacacaagttggagaaaaaagacagtttcaagaaccagacaaaggcggaaaatttacaacaacaacatgacccactaactcagcaagtaatttagaagcattctccgaacaatgccatgccggattccccgaaactttttcccttactttagaagcgtataacatgagggggtaattggatgcccccaaaaaaatttctgcttggatttcagtttcttaaaaattcacagaatacggaacctagatttctggacccaaaaagcactggtgttccctgaactggaacaaaatgcatcactttgtacaatttatgctaacaacgaaaacaattgtatgagatttcaagggcccatgtagcttgaaaaagtaagacatattttcaaggacaccgtgatgagcatttaaaaggattaaaaatttaatttttaaggaaaaattaaaaaaataataataatacttcagagacgtatgtcatttagcaatgcgttggacgcaattcgagcgcgtactttgagcaacaccaattcgccagcccatccgctttttcgcgaatccaatgagctgctgctgcaccaatcgtctgcagttgaccaccttcaaaaaatgaatgatgttaaatgccgtaccaagaatggtggcaatattggcgggcatcgtaaatattttacaatgttcgaaggtggtaatgaaattgatagcgaagaattgaaggcggaggacgaactgccgaatgaggacaaaaatgaatccaaagagatcccctga

SEQ ID NO: 56182 - DNA, 439 bp, Heterodera glycines
atgctagttgacaatgtgccagagaaacggcaggaaaacaagaattgtaagcgtttttacacagcacaaattacaaaaaatattaaatgaaggttttaaaaagaaaaatatatcataaatttatttaaaatatttttaaaattttattttaattcataacataagatgtatgtaataatatttaaataaatgtttataaaattgctaaataatcctaatataagcaattattcttaaaataggaatatcgaaaaataatattaataaaaattattatttacaatttctttacaaataacgcaattataagtaattatgaacacttaaaaacaatatcgaacaaaaggacaatgtaaaaatttcagatttcaaattactttagttttatcaaatgaaaatattattaccaacttaatattgtaattgttttataaataaa

SEQ ID NO: 56183 - DNA, 1267 bp, Heterodera glycines
atgtcatcatcaaaacgcaaacatcagtggcatttgttggcaaatgtctcggattattcaaaatccgagaaaggatttcagagtgacgagaagctggatgataatgaccttgaggtgcctacccattaagcgcatccttggcatttacagtggggaatgatttaaaaaaactacgcggcaaagcatttgaaccaatttgaaaagacggacaaatattttaccttttttcgggttttgcacaagttctaaaacctcagatggcgtcggttcattcctttctatcttttttcggcataactcatgagcttttgaatgacctcctatttgtttaggtcttaccttttaaaatgttttgtccatttttcgagttttgaccggttcaaaaaccatttaaatgctttgtcgcgcattttttttacggtttaggcatcttcatcagaaatttcccaaaaaagacatgcgcataaaatatgttgacaattttaatgcaccacaatttttcaagaagcatcaaaattgaatattcttggtatcatccgatagctcaaacaataagatttctctatttgcatgaaaagtttgaaggaattattttatgttttaaaaacgaaatcaaaaaatatttaatttggatgcttctagatggcgctaattggctaaattataaattacaatagacccgaaaatcaaaattttcttttaatcatctctctaggttgcgatgattaatgaatcatgtttgttcggtgacacggtcttccagcaacaatcggccgctttttttgccttgccttcactgcttccgttcaacaatcagaccaacatcgtctcttccttcgtctctccgtttaacgaagaacagaattcagacgagtccgatgctgcggccaaatcggtttttttaaatctatgatcatccattatatgatttttgtaaagatcgcgtatgacgttgtctcttcactgtttgatggagagcctttgtattcttctgagtcgttttcggatgacgaggggagcatggtggtcaatgccagcattctccaagtgcttcaagacgacgaaacggagtcagagcttgaacaagagaacactgaagcgacaaaggaaaatgaaacggcaaagagtgtttcggaagagagtgaatcgattgaattccaaccgacggttccgacttgtaacaactcaatgcccactctcctgtcgcaaatgtacgcagcagacgagcagactttgccagtgtttgattcatgggaggaactcggag

SEQ ID NO: 56184 - DNA, 1492 bp, Heterodera glycines
atggtgacaaaccgctggaatttgctgtcttcgcccaatgcgtcgacgctcgaccttccaatggctttggccggccattcggcccatgtgatcggcaacgaaatgcacattttatttggatataaccctttcgaaggatatatgttcactccgcagatttactcatttggttggtgtgcccattccaattttatattttaattatggcttttcacaatttgctcatttggcagaaaccggacgttggcgttggggtgcggttgacccatctgttcaaggccgatttggccatgcatcagctcaattcgccgaatttaatggcgaggaaatggttctaatccatggcggttataatgctccgattaacagttactcctattctatcagcgacgaactgttgctttacgaaccgaagcgtcaaatttggtttccatttaattaaaagttaactaaagatctttttttactgtataatattctccaggaacaatttgggtagttttggtgcaccgttgtttcgccattctgctgttattttggatggaattatgcttttggtcggcgggaatagtcacaatgagtcgtcgaccactcggaaaaaggactgttactcggaacaaatttatgcttatgacatgagtgagttgtgttgatgttctgaaacaatttttgtattattttagcctatttagaagctgtttctaacaataagcattgcttggtgatcagatcaagcccgtagccagaaaaattttcgggggggggggagatctgaagaccttttccttctttctttttttttttttgctcttcgggcccagggatcagataattaatcaaaaaagttataacatggaaattgcaaaaaaaaaaaatcaaatttgaaaaaaatctttttttctaaaaacattttgctagaatttttttttctttttataaggttattggagtgggtgaacattgaaaatcttacgcatgataccaccattgttgggtttggttgacaatgaaaaaaatacctcgcttaacccctcggaggggcctctgattacgctgataaaattttgctcattttcagtttgcaaaaggccagtaaaaatatacagcaaagagtttgaggcaattgcacgttatgggcacagtgcgtttgtgagcggtgggaatatgttcatcgtcggaggattcaatggggagatgctcaacgacgtgctgttgttcacaccgggtgagtcccagctaaattcacttttgtaaatgctgttgcgttgtttagccaattgtgacagtcaggccaccaatgcggaggaatgtttgcgattgtccaacggcgtgcgctgtgttttccacaacaaatcgtgcaccaaaactctgcccaattcgtccttcaggcagtcctttctctcaattgccaagggcgaaacggcgatggtctcttaccaagaacactgtacagggactgccatgggagacaagtaaagacaagactggttga

SEQ ID NO: 56185 - DNA, 465 bp, Heterodera glycines
gtttcaaatatcgtaagattgattgatagggccagacaaaagaaggcaactgttggtaccaagtttgcggtaaaaaaatgataaaaaagagatagccatttttggtcaagaattttttttgtttgcgtttcaaatatcgtaagattgtttgatagggccagacaagagaaggcaactgttggtaccaagtttgcggtaaaaaaatgagaaaaaagagataaccatttttggtcaagaattttttttgttgcgtttcaaatatcgtaagattgtttgatagggccagacaagagaaggcaaatgttggtaccaattttgcggtaaaaaaatgagaaaaaagagataaccatttttggtcaagaattttttttgtttgcgtttcaaatatcgtaagattgtttgatagggccagacaagagaaggcaactgttggtaccaattttgcggtaaaaaaatgagaaaaaa

SEQ ID NO: 56186 - DNA, 99 bp, Heterodera glycines
atgctcttctcaaatcctttcatcctgtgccttctgctgaattttctgatcattggcccgtcccaattcatcggccaattcattaacattattggtgaa

SEQ ID NO: 56187 - DNA, 487 bp, Heterodera glycines
atggccactttcaatgtggcccatctcatcactttaattggcgttggggtacaaaaatttaaattaaattttattcctattttttataatatttgattttgttttagtcaattgctcataggttgttgctgatgagcaacaaaatcaaaacaaaactcaaattggaaaagcaaaatgaaaatggtaagaatttttatttaaaatataatttatttttaattaaaaataattttattgtatatttaaattaatattttattttgggaatgcgagagattcaaaatgcgatggccgagaaaatatcgggaactgaggccaaattgtaaaaacaaattgaaaaaggtaaaaaatagctagctacccaatttaaattttatttttgattatttgttttttttaaatattttaaaaaattgttttagtattcactgaattgcacgacaaccaaaatggactgtcaaccaaattggaaaatggtggaaaatga

SEQ ID NO: 56188 - DNA, 264 bp, Heterodera glycines
atgcgaagaggtgcaacagtgattagaagaggtgcaacagtgattagaagaggtgcaacagtgattagaagaggtgcaacagtgattagaagaggtgcaacagtgattagaagaggtgcaacagtgattagaagaggtgcaacagtgattagaagaggtgaaacagtgattagaaggggtataaaagtgattgaatgtggtacaaaaatgattagaagaggtacaaaaattgaatgcaatttattataaattttaaaaaataaa

SEQ ID NO: 56189 - DNA, 759 bp, Heterodera glycines
atgagttggtttattgaaaaacctttcgaattacttcctgtttattattattattatttaaacacaaaaaacaaaacgcagcgaattgttagttcattatcattttttgagatggtgtgtgaaccattttgggttaaggatcaaataactcattgatagtgacaaattcaaataatgacgataaattaacggtttaaattaagtgcaaatgtttaattttacgtatggttttctttaaaaattagcgttttcctatccctatttattcattgcaagttgaacaaacaccaggacgaagtgtacacgcggttcacggaccttgatgtttttaaagtgagcagaaattggcaaattgtattaagtcattttgggtaatactgtttttagagctcgattttttgaaagtcattttaaaaatcaaaaaaatgtttgaaaaatttaattatttgcttagaaacatctaaaaatatctaattaatgataataatgtgttttaaaatgtatttaatctgtttttgaaaacttgaaaaaacatcggtcacttgaaataataaattttaaaattttgtccaggaaaatccagggtttttcctgttttgcctggacctggacctggatttttttttcacatttgacctggacctggatttcctggacaaaaatccaggtccaggaaaaatccaggttgccgaaaaatggcctggacctggatccaggaaaaatccaggcctggatccaggtccaggtcgagctctactt

SEQ ID NO: 56190 - DNA, 1048 bp, Heterodera glycines
atgttaacggcttacggcgaatttaatggccgaaagcgttcccgttttgacccgtcatattccccactaaataatcagcactcattggacaaaaaacaacaactgctggacggagtggcaaaattaaatttcgacaacctcgtcaacgaccaaaccatctctgaagaaagctgggcgcaaatcgcacagctcaccacccttctcaaattggcagcaaacatcattggagactcgatggcgccacaaattgacaatgccgcggaaatggaacgtcgccgctcggtggtggcaactggtattcctgaatcggtgtccgacatcccgtcagagcgcgtggcggaagatcacaacactgttactcgcctacttgaccagctcggggtcgagtgtccggtaaccagctatcggatgggcaaccaagccccaaatggtcggcccaggcctctcaaaatcgttctggccgcgtcaaagtttcagcgcatcaccatcacacattggagcaaaaaaagagccgaactgcgaaaaattccacaaatgcaacgactcaatttgcgcgaatcgttgacacccgaacaattgtcggcccgccgtgagatgcagaaagaatgcacggccaaacgagcacaaactggtcaggactggatcatctacaatgatcgtctgattctgcgggatgatatcaaaggaaaaagcactgcgatgtttccgccgactgtttctctgatcacaaatgttcatccgacaaaaaactgacttccatttgcaatgatttgaggtttgggggctttttggaacaacaacaaacaaactcaaacaaaaataatgcccccacacctcatccacttcccaaaaaaacttccaattatgttgctcatccacctgcgatacccatgacattatctacctcatatgacgatatttctttcacattatcaccatttatttgttctagggaaaaggccgtaaatactaatctcaaaataaccccaaaagtcagatctcccacaaaaccggtacatacctaattcaaatgttaattttcaaaaaa

SEQ ID NO: 56191 - DNA, 1291 bp, Heterodera glycines
aaaaaaatttcttgacaaaaatcccaaaaatatttacaaatttatcgaaaaagattttcaaagatgggaaaccccattaattctttatgaaaacaaaactatcatagacgacggggaaaaagcagaaatttttgccaaacattttgcattgactttccaaaattccagtaattatccacaaccgcccacaactttctcaaatagttccaatttaccgactctttcgaatatacaattcaatgtattagacgttcttgaaattttaatataccttccaaataaaaataacacttcaccagataatattagtttcaaatttcttaaaacttttcacttaatcttagctaggcacctgacagatctgtttaacttatctttatgttcgggcaaccttccaaaaatctggaaaacttcattagttttgccactcttcaaaaatggagacaaaaatttagtaaacaattaccgtcctatatctattacttgttcctgttgccgaatttttgaacgcttaatagcaaaaaaactcactgaattcttacttaaaaacaatcttatctctgaacaccagttcggattcctaaaaagtagatcaacaaccctccaattaatctcctcactggaagactggtacaatgcaatacttagaaaccaaaaaattgatataatttatttagatcttcaaaaagcctttgatcaagtcccgcatgatcttttaatatacaaactcaaaaaaacggaataacgggcaacttattaaattggcttcgggattttcttcttggaagaacctttaaagtaagaataaatcaaaaattttcaaatgaatttcctgtcaaatcaggagtcccacaagggtcagttagccctaatttcagtctttaattgggctgaaacatggggcttaaatttttcagtaaaaaaatcttccgtcttatatttaggaaaaaataacaaaaaaataccgtacacaattaaaaatgcaacaattcctgaatcaaaaattattcgtgatttaggtattttaattgacaacaaactcaaattcaacggacatgtttcaataattctccaaaaagcttatctcaaaagcagaattctttttaaaaaaattaaaaccaaatcaaccaagacttggattacagtttataaaagttttatttgatcccttttagaatacgcaaccgaaatttggaatcctcaaaccaaaaaagaaataaatcgcctggaaaaatttcagaaaaactttacaaaaaatgttttcagaaaatgctgtctcccctacatctca

SEQ ID NO: 56192 - DNA, 1110 bp, Heterodera glycines
atgtttcccggactatcattttcttccgtggtcgaaatcgcctggcacggccaaggtgtttggcaccatcttacgttaatatttatatttgtattaattactagagttcggcgcgagattttgaggggtcctagttagagaccggaaatttcaaatttgcggatcctgttgcaggattggaattcaaaattttttacaggacaggatccggcaggattaatcctgcaaatcctgcatttaaaatctgcaggatcctgcgcaggattgcggattttaggaaatttcaaaaaattctgtattaataaaaaagtctttcaaagtataaaaaagtattcaatatatttttaaaccaaaaaatgatgaagatgaaaaattaataaactccaagcaatcggctgaatcttctttaatgcgtttaaaaagaccgatttgcataattgggtggctcataataatagcttaaattaaagtaaaataatttttatttaaatttctttgcaaaaaagccaaaatccattatgtatagggatgggatttttaggcacaaaaaatcgcgaaataggcacttaaaaaggcagaaaaatcctaaaataggcacgaaaatagtaaaaaaaaattttattaacgctttttaggtcgcaaaacacataaaaaattcaattgtataaacttttttcgaataaggataagtttttaaacgaaaaatttttattaagaaaaaattttttgaaaaaagaaagtttctgaatatttggcattctattttttaaaattttcaaaaaatcaatgcaggatcctgctgaatcctgcataaaatctaatttgcgggtcctgttgtaggattggaattcaaaattttttacaggacaggatccggcaggattaatcctgcaaatcctgtattttccaaaatatgcagaattgcggactgggatcctgcaaaatcctgcgcaggatactgtcctgcgccggtctctagtcctagtctccaatcccgcattttttgtaaatttcggggttttacgggagtaatctcgtgggcttccatcgcgttgagttcaatcccataacgggatccacaatttaaatttacaaagaacagaatgccaa

SEQ ID NO: 56193 - DNA, 876 bp, Heterodera glycines
atggacatttggtcagctgggcttaccattttacaattgaccctcaaaaaaacgtttggctataaagaaaaggtggatgagaaaattggcgaattgtttcgaagcgcaaaattgaaatttgaaggaggaaagtttaagcctgatcctgcaaaattatcactgccaatagacatttatgaatatagtagggaccacttaaaatatgatgaatattggccatcgggaaattggtggtacaattatttgacagtgatccatgatattcttacgttatgggacaaaatgccagagattgtcttcctatcagtggtaagtcctagaagaatgtctaaatttaaagaccattttttgggttttcttgagccatattcagtccagcccctttttcaagtgggtaggggattcacacagaccgagtccaacaagaaatctaggcccagttttttaaaaatacctaaaactatgaaaaatttttcgtgggtttctctgtgaataaattaacttgtatagaatatgctaaacattgatgcagaaaagcgaatgagtgccaaaggaatcattgactatttggagggcaaatgtaagccaaaggaatacgagaaaaatgcagagaaaatggcactgtttggcgatgtgtcagatgaaaaattgaaaatttttatgggaacagaacatatgggcttctgtatttttgaaaaatatttgaatgacggattaattctatttggaggggataatgatgaaagggaaaagaaggtaaaggaagactttaacaaaatggaaaatatcaagcagaatttgatcaaaaatgcggtgaagagcatcgaaacatttatgaaagaattggaagaacgcgacgaaatttgtgaccattaa

SEQ ID NO: 56194 - DNA, 868 bp, Heterodera glycines
  unsure (1)..(868): unsure at all n locations
acttctttnatcccattttgtttctcaattctcatcgaacaaatttaattttattaaaatcaaataaaaaaatgatttttctttttttgtgttcagaagagcattagccaaatcgcccgtggtgaagcgagccgccgccattcaggagcaggagcagaagcgggtcagcaagcacaggacgagcagatattggctggatgaacaggtgggacggattttggatgtttaatttaaataatgcaatttgattaaaaataaatataacaactttttttaaatcaaaaatacacttataatcaattaaataagcaaagtttttcgccaattttgttaattattccttaatcattaacaattgggaattattatgctccttcgcttttattctacattaattaacaaatatattttttgttaattgtttacacaataattaattgttttggccctttccctaattggccaattagcgccctgccatttcggcccagtttagttgagtccctctgagcacatttggctgccctcctccgcttcatccgcttcttcgtccgccgtggacaccgaatgttatttgggcgagaaggactgccagaagatgggggagaagcgccgctgcagcggctgtcacattgtggcacacacggcatgcttcccactgctggccaaggcaaacaatccgccaattaagcatttaaacgagcaaattaactaatgatcatttatcttatggattataaaacgatttttaatcttaataaaaatttaatattaaaaagcagtaaaaagttaataaaattaaaaattgatttgcaaaaattgcagatgaatttgagctgcaaaatgacttttcgcgactgcgcacaaa

SEQ ID NO: 56195 - DNA, 915 bp, Heterodera glycines
atggagaaggagtataaacagagtgttcgtaaggtttgttatttcagtcattttgtgtaattcttacctttgtaaaatcgtatttcagctgtatgctggaaaacaccgtggctatctgctaatgcctgtcgaactccctaatccaaatgatccaaatggggatcgttttagtggccaggggcatgttttgtaagcattttttgtgtctttaattgaccgatttatgaaaaggatggaggatttggtgtggcaactgagaggcaaaacacgcaacgcaacccatgggattattatgttctacgtaatcagaaatttataacctttactttatgaaattgtatccaaggtgcaatacgcgaattggacgctgtataacgtcaaatataacttttagtggttggttaaaaaatagacaatttggcgctagtgaaaaagtcaccacatttgaattttatcaaaaaataaaggggggggggacccttttgtttaggaaattttttttgtaataaaacccatgaaaattgtattatccggggttttagaggttgctgatcagtgatcacgaatctgacatctaattcgaggtcatggacccaaaaacccaattgaatattcaaaaattttgcaaaccaaaagggtccccccttttgtttttacattttgatggaattcaaaagtgttgactttttcactagcgccgacaatttaattgaaaataacagcgaatgggtcactaatttagttgttcaaacattattttttaggattcatagtgcgatccggtcgatgaacaacactccaattgctgatggctgagtaaaagtgtattttctcaaattaacatcgaatgttattaaatccccaaattatgttttttgcgcttttattattgatcattttcaatatgcaaataaa

SEQ ID NO: 56196 - DNA, 847 bp, Heterodera glycines
atggacgacgccgttgaattggtcactgccttggagaacatgcgggtgaacatcgacctgctcagtgtaaaaaccgacaaatattttattccggacatatttctgagaaatcttgccaatgcaaaaatggtttaaaacctttgctggttttgtttcgattcaatgccccagggtttgatgctcgtaaaaactagacatatatattccaaccttttcaggtacttttccgttttgatgacacaccccatttaaaaagagcacagaaaccgttcagtatgcatagacttattttgtacgcataaaaaaattgggttgggttcaaatgagataaagttttctcatccttctgctattttgatttacttacacatattgaatgggtttgttgtgcttttttaaattggggtatgtcatcaaaatggaaaaatacctccttttcacatttactctagcaattttccacaaaatctcatttccaatttttgcgcttttcagaaaactcgcattggcgctgttttgaatgaattccgcaagaaaatcaaagacgaaaaattggccaaacgctgcaaggcattgatcaaggtttgtttttggatgagagatatgcacaaaaacaaaggaatcaaaaacattttaaacactcaaaattgtggcacaaaattatgagtttttaccgttacaaacattttgaatttgttgccagaaactgtgctctgagatttgttggcacaaactcgaaaatgcatccaaaatttgggtgaatttaggaggaggtctcgcaattttgaaaaaaaaacctgggcccaagttttattattcgattccttggcatgaattttggattaaa

SEQ ID NO: 56197 - DNA, 883 bp, Heterodera glycines
  unsure (1)..(883): unsure at all n locations
atggcgccactaagtttgaagggtgggagggggtaagaatttcaattttttaagaattttcgaaatttttttgttgaaaattacccgccgccgctggccctggtcattttcatcaaaaacattgtacaaatgatgaccatggaaatgagcataaaaatgccaaacagaaacaccatatgctccgcgggggcctcctcaaaggaaaccttaaaaattgcgaaaaacattttttttaaaattttatttgcaattagaaaataaattaaaaattatttattttttcaacatttaatgctaaacaaaaaatgaattaaccattttattcaaattaacaggagaatttaataaaatttaaaacaatttaaatatcaaataagctaaaaataatttcaaaaaattaatttataaaaaattcgtttttaaaatttaatttaatgctgaacaataaaaatttaatttattaaaacggagacaattttattgcctttaaatttgtcggttgagggggcccaaattttgggtacgatcgctgctgaaaaaattgagaaactgctggctttgcatttgctgaacctcggcttgggaggcctaaaaatttccaatttttcaattttttccattttaaatgggggcattttttcagcagacctgagaaattaatttgctgcaaattttcaagaaattcattttgtgtagtaaaatttgccaagccatcgcaaaatgggagcataaaaaagaaagcaattagagtcaatcagagattaattagcaaccgttaattattttttattttttacttttcaggcaaattgacaagttgtacaaattgacaacaaattntctcctcaatgtttgcttgagaagcacaaaaatgtgccgatga

SEQ ID NO: 56198 - DNA, 393 bp, Heterodera glycines
atgaaagtgcgttttgagaaattccaacatttgacagtatgccttaaaaattacagtacacggaaaagtaaaaaattaaattttttaaaattgtaacagcaaaatactgtacaggttaagaaatgcattaaccatttgttaaataaatcaaaaaaaatgcattaataatttgctaattaaatcaaattacagtactcggatggttactgtaacaatttattgaaatccccaaaatttagctgcacgacatcagcgagctcgttatgctgctcgagggcgaagtttcgtttctgtggtgtcatcgagcaggcaaatgaagaaacagaaacaatatttattaatatttttaattgcaaaaataaaatttgtttaattactaatccaaatttttga

SEQ ID NO: 56199 - DNA, 413 bp, Heterodera glycines
atggagtgttcatcaactcacttggatgatgttgatcggaccagcaacttcgctgaggcattgcattccgtcacaaagtttggcggaaatttagttgcagtcatccaacaatttggtgcttcattgacacgatcagatgtgagcagaagacgattgatgccgacatggcagtttgtgtggtgggagaattcgaaccccaaaagaaaaggaagtatcatgatggcgatgctcaaattcttctcgtaaacagttataacgatctctcaataacaacctcgtcccaccaaatgatcataatcatgtcaatgtttatcaaattttatgatatgcaattagtttgctatggaattttgttgttttgttttcgtatatgttaatgaattttcgatataaattttataaatgaaattaaa

SEQ ID NO: 56200 - DNA, 479 bp, Heterodera glycines
aaacaaaaaaatcgattttttcaagtgtccatttggggtactcgaacatttatggggagcaaaaatccaacgcagaattaaagtacaggctatagggaagctactcccgaaggattcggtctccccataaatctgggcgcatcggttcggggggactgccccgaaaacaaaaaaatcgattttttcaagtgtccgtttggggtactcaaacaattatggggagcaaaaatccaacgcagaattaaagtacaggctatagggaagctactcccgaaggattcggtctccccataaatctgggcgcatcggttcggggggactgcccagaaaacaaaaaaaatcgattttttcaagtgtccgtttggggtactcaaacatttatggggagcaaaaatccaaggcagaattaaagtacaggctatagggaagctattcctaaaggattcggtctcccccataaatctgggcgcatcggttcg

SEQ ID NO: 56201 - DNA, 827 bp, Heterodera glycines
atggtaagacctttaaataaaaacagaaaaaattgttttataaaacaataatcttgcaggaaatcgtctcgaaaaataatccaaaaacccaattacggatcaaaattatggaaaaatcccaaaaatccgtaagccgtaatccatcatgacggggtccaaaaaggccgtaatttccgtaatccataattacgcccagccctgcatctgaaagccttgatcagcattacattcactaatgagaatttcttcaattctctataatttgtcaactataaaattccttaaaaatgtcgcaaaactgtttccatcaatgattctcccataccgtatttattccatcaccgatcgtactgtattccctccccccgtttggtcctatcgtatccgtccgatggtaacaccgtccccatttcctccgccgccgtccctttctttctgctgccgttgtggtgctgctgcttcaaatgtttgctcaaatagctgcgcaaagcgaacacgcggccgcactgctcacagtgccaacgcttttcgtctgacaaaaagccgacttttatttttggaattttttgattgaaacgccaaagtggggaatgaaggcactgattaaccaccggttgattgatggtcagtgctcagatcactgatcaccatcaccctcccccctctttttgagaattcaccccaattccctaattagggttattttttccctaaaatggaaaatccgagacgacaagcgacagctgctacttttgactgctgctgaccattggaggagcttggcggaagcgcattctatcaaagaaactgatcattggaaaaataaa

SEQ ID NO: 56202 - DNA, 981 bp, Heterodera glycines
atgaatgttaagggatttcactctcgattgactcataaaaacaggtagattttgaatttggttaccccacatttgcgcccaggacatttgcgccccagacatttgcgcctatgtccaaaatcggagtcaaacttattttttcaatccataatagcctaaacagcttaaaataagcgtttgaaagtgtttgtatgcgataatttgatcgtcaggaaatttttaaaaaataattaatttttcaaacaagcaaatcattaatcctaatgaaccaaaagaaccagtttctaaaatttaatgctgtttaagagctctaagactgaaaaatgtaagttcgaacccgattttagacataggcgcaaatgtcgggacacgttgaattttattttacgacaatttttttgtttgattcacttcgttgaattgatgatttcttcgccgaatttccatgcgatgacagtgtgccaatgctttgaatggacaagcggtggccaaatggcttttcacgccactgcaaaacaatgtgccaaaggtgttcaaatgctggttgaaggaggattattggcattttgcgtcatggattgaagccttcaaagcggtgcttacgaattgattatttggcatttttacagtcttttgggttcgctgacaaaaatattttggaaggcactttcaattcgtttttggcgacagttttttttacgaattcaaattgtgaaattttaatgctttttaatttttcacagtttttaactgtttttccatcattttagacatttgccaatgcttcttctcccgttaatttcattgtcgttattcgatctgaccaatgaattgactcgggaacaattgatgctgaaaaggaagaacgatattggccgttttcttctgatccgttacccgattgtgcgcgacccgagcaaatgggcaaaattcgaattccgtgacgcaatgatcagcccaagtgatcagcagcagaagtga

SEQ ID NO: 56203 - DNA, 565 bp, Heterodera glycines
atggccagacccaggggcagtggaagagacccattcaaagcacgcagtgccagggcaagacgtcgcgcgggcaacaaaagaaaggcggccgcagggactgctgcaaacgtgggttttattctgctgctgtgctattcggccttcaattgttttttcgtttcactttttggcacttttccagcagacagagcgaaggtcgaaatttcatttctccctttttcaggtgcaagctgccaacaggcgccccatttgtctgatctgcttgaagaaaatgacccaagtccgtcaggtgcgcaccatctgtgaccacgtgttccactacgtctgcttccaccgttggctcaaatatcgtctgttttgccccgtctgtctgctcaactttcgcacggaattgtatcattcgggaaacgccgtgtttgagggcgcgtacaacgatggacacgttgtgctcatacctgatggtgaacaaagcaacagtggataagtgatcggcactcatctccaattgtgatcggacaaaaacgatatctaattttgtattgtacataaataggttattcggaca

SEQ ID NO: 56204 - DNA, 1279 bp, Heterodera glycines
atgacgtggacacagggaaaagtcggaaaagagagttgtttaaataggcaatgaatgaaagaggagggaaaaggactttttatagtacgacgcagcggggaaaggggcaaaatttccagtgcccaaatccaaatattttttctctttataaatggtgcttttctcatcggattgttttttttttctttgaatagagcagcaatctttgtattaaccaaattgcttaatttgtctcttctttgctcaatcctttgtgttccaaaattcctttttgttttacattttcgaccagcatattgtttttctcaggatttgcctggcctctatcacccatcctaaacttggaatttaatcaaaaaaacccaaaaaattgctttttccctatttgtaaaatttataattcatttcattatttatgtttttatgctttttcattttttagaacacaactatttgcgtttatcatcatcatcccttcattgtgcaacaacaacaacaacacttcaaaagcgacctcatcgccgtttctcatcgttcgttcgttcgtccgtccttcacatcaattcgctcgccgttttcgcaatggcacttcgacgcatcaaacaggtggcgaaatgacaactctctgatcagccaatgctttaaatgttttgatccatttgcaggaactggcggagctgaagcaggaaccgatcacgggttgcaccgcggcaccgatggatgacggcaaagacatgttccactggaaggccaccatcaaaggaccgcccgagtcgccgtacgagggaggcaccttccatttggacatcgttttccgtcgcgactacccattcactccgccaattgtcaaattcgaaacgcccgtttaccatccgaacgtcaacaagcagggtggcatttgtctggacgtcctgaagacgacgcagtgggcgccgtcgttgaccatttcgaaaggtgaaagcgacgcgggaaagagcagacaaaacgccgacaaaatattgagacgacaaaacgatccaattcaaaacgaccaccaaaaccggactttttggaaaagtgtcgatattttgtcgtgtgaatgggatttttcaaattcggaaatgccgttttaattcattgtctcccctccatttcagtgctgctctccatctcttcgcttctctgcgacccgaatccgaacagtgcgctggagatgaacatcgcgattatctaccgcaacgaccgcgagcagtacaaccgaaatgcccgtgaatggacgcagaagcacgcgatgaaatga

SEQ ID NO: 56205 - DNA, 784 bp, Heterodera glycines
atggacgaagaaccacgcgatgagatgacacgacaaacgaccgatggatgggagaggatgcagaagacaaccgccgaagagggaggaggaggaggatacattcaactgaccctattcccacatatgatcccaactgtaaagattgtattattgtatctcactgtatgtacagtattatgtcgcctggttactgtttaagcgaccataattgtctgttgttggttgatcaccattatcaatgtgttatgtctctgtgttatcatttcaaatgacttgtgatcaattgtttcgcctaatatgtattaactgtgatgaaacgtgaattttattaaagacctatagacctttttgattgcaaaaaatgtttccataataaatcatgaaaattcattcatggattttcggggttgctcgcatcagcaactggcaattgtctaaatttgttgtcccgataaaaaatagctagaattttcggctttccttagcagcgattttagggaaaaagttctgattaagaatatttcgttaaatgatttatcgaatctaaatttttcacattcattttttcaatggcggcgagaaagccacaaaacaaaggtgcggcgagttgggcggtgccctccacaaaatttagaaaaccacagccaatttaaaaatgcacattacagttttattgtccgaataaactatttatgtacaatacaaaattagatatcgcttttgtccgatcacaattggagatgagtgccgatcacttatccactgttgctttgttcaccatcag

SEQ ID NO: 56206 - DNA, 209 bp, Heterodera glycines
tcgactttcgcacggaattgtatcattcgggaaacgccgtgcctgagggcgcgtacaacgatggacacgttgtgctcatacctgatggtgaacaaagcaacagtggataagtgatcggcactcatctccaattgtgatcggacaaaagcgatatctaattttgtattgtacataaatagtttattcggacaataaaactgtaatgtgca

SEQ ID NO: 56207 - DNA, 304 bp, Heterodera glycines; identical to SEQ ID NO: 51570

SEQ ID NO: 56208 - DNA, 185 bp, Heterodera glycines
ctaaatataaaaatcctctgtgaaataaaatggcgatcgcaccagccctccgtctcatacgcaagcgcttttgtgaggtataaaatttctcaaaaaaagagatagccatttttctgggatagagtataaatttaaaaattccctcaaaaataaaaggtctattgcgcaccgccctccctatcatg

SEQ ID NO: 56209 - DNA, 572 bp, Heterodera glycines
atgcccctcatcatttatttttccgttctttttttgcttttaattccaatttgcaatattgatataaaggaatggaaattcttacagtattacattttattgtcatcaattccaatgtttttaccctctgccataaatccaattgtttcaatttgcaccatcaaatattaccgttacgaacttgtttcgggattaaaacgttcttctggtaagtgtacaattagtttaaaagcaatgaaaattaaattttttggatttaaaaatataatttttaataaataaactttattttttaccattctaattttcattttttaatctacattaaaattttgttttttaattatagaaaaattcgtaaagcttttctttcgccaaaatattcatcctcaaaatttgaatgaaactgcgcacaaagaagaccaagcaaaatgggctaccaatgttgcaaataattgaagcaacatatttccaaatattatattgattcagttgataacatacttcatcaagctctttaaatttgttaaatatcaatttaaaaaatcattaaaatcaaaatagtgaataaa

SEQ ID NO: 56210 - DNA, 821 bp, Heterodera glycines
atgccattggacgaatgtgtcggatgtcattgggacaactatggatacaaaagcaatggcacttttgagaccagtgggtctgtctggctaaacgaagaacgttatgaattttctcgtggtgataccattggatgtggggttaatttggcctctcgacggatcattttcactcataatggacgacaattaggtagaaaaatgtgtggttggccaattcacaaaaaatgcgcaacttttgaaattttttaaatattttaaagttcacattacagcgcaagcggtgttccgaaaagccagaagcatgggcatttttaatttattggacggagatgacgacgaagcaccggttcaaaggaaggctgttcacaaaacattcaggtgtctttcattagctcatgtgtatttatttgtttttccaaataagatcagttctctctttggcactcattccgccactttacgttcggcgagctttttcaactattgtcagcgcggcaccgcctagagttcaaggatggctggcgtattttggcaaaacctacattggcaccactcaatttgagattgaccatggagcggaggcatttgaacccaatgctgatgtcggacgcttctttctacgtcgcactcaaagcacaactcgtaagcgcatatatgtactgtttcatgataattaacataattttaaatgatttagcgttcagtgtatcacagacgtccacaatagcaggcagtggaccaatacaattcggactgcattcgccacaaccatcaactccgacaatcccattgtccgaagaaagcagcttgcagcttattag

SEQ ID NO: 56211 - DNA, 101 bp, Heterodera glycines
atggcacacgagtgctacggctttggcaatgtgcgagcaattaagcacgcacatcgggccagatgctggggcatttgtgctgcaccgcaagcggcgcataa

SEQ ID NO: 56212 - DNA, 769 bp, Heterodera glycines
atgagagatgggtacattttataattgaatatattttaaaattttaacataaacaatataaaaaataaataataattgtaaaaaaagattgaatggcccaccaaattgagaatattaattaagaaaatgtttttaaaaaataagacagcttcacaaacgaaacaatgaataatttacaaaataaaaataaaaaatgcttaaaatgaagatgaagaataatttgaaaagaaattaatttttcatatttttggcaacaaataatagaaaataacataacgaattaaataaatttaaaaatgctgctcatcaaaatagaaaaaattatgatatcccgagcgagagaattgaacctaggcttttaaccgaaacaaataaaataattgatttatttagaaaagaacaattaaaattatcaaaattattttatactaattacagttaatcatattgaatatacagcaatgttaacaataaagatgtattatgaagatacttacattttataaataaaattgaaagttggtactaagaatgaactaaattaatttaaaaaagaataatagtagaataaatagtattatagaaattaaaaatataaaaattaaataaacataaattttctttgagaaagaaaaattaattatgaaaattttcaattatttttttaatattttacattcaaatttctagaacgttttactctaatttcaaatgtgcgagtattatgtattcagttataaaagaagcaaaaatcctgttctaaaataaa

SEQ ID NO: 56213 - DNA, 771 bp, Heterodera glycines
atgttcgagtttcgcgttagggattctgaaattcatcaaatagagttcatattcatgatcagcggccacaaaagcccctggaaacacgtttttatcattaaatcaaaattttttatgtgggtcaaactgtataagtacccaaatcctttatccatttcgaccaattcagaaccctgggcccgaattcagacaaaaattcaaatttttcgagtttcactctgtttccttgaaattttatgacaaaattcatgatttttttaagtttggaaatttagaaaataaattcgatagggaaatgggacgttctgtaatactcatctcaatttgtcttaaaattgttgctgaatttctttctcattttacagtgtctcttcgaagttgccttcattcaactggactgttccgacaatttctctgttcaccaatttccctgtcaaacaattgaactgcgcgcccgactggtaccggagcgagtttcgtcctgctgccgctgcttctgttgctgctgattatgtggagaaaaaaataccgatgacgccgactctgttgttggcacttttgctgccgttggccttgtcaaatcggcaaatgtcgtggtccgggacaacgatggaatgtgcgcacgttttttattttgtgacttattccccacattgcagtttgttatgcaccgatgttttgatggacaccttcccatttttggacccaactcggccacaaaatggcactgatttcgccacatttcgactttttagtcgacgcgcattttga

SEQ ID NO: 56214 - DNA, 1499 bp, Heterodera glycines
atgtcctttttcgaggtctttgctctttgtgctcgtccatttgttgggaaggcacgcattttttttgtgctccgtcgtaacacaacaaaaggcttcggcggtgaattggcgagaagaagcaattgccgcatacacaattatccaaacggggatggagaattgtatcccaaattcaaaatctaaacaatttacttttacgattttaaagtccgaggcagcaaattaaatacagagcagaaaacaaaacgaagaaatatcataaaacaaaacgaatgaatgagggaataacaaaatatgtatttacataaaattggcagccctattaattaattatataagcaccgctccattttttgcgatcggcaaaacattggacggaaatgcggacaatttgtcgaacaaaaagaaaactaagccaaacgcggcaacggcgccgccccaacacattgcattccattttggaatttttaatacatttttgattaaataattccgacctcaactcggcctcaaattggcactgctttctcctcgtttcgatgttttagtggacaaacattttggtggaaaatgcgaattgataatttggaggccaatcaaaatttccgctgccaaacaaaattcgctttaagaacttcaaattacgtaattcaaaaaaaagcacagcaagaaagcataaatgttttttaaggtacattgaccatttcgtcatcgcatttctccgctcaaataaacaaatttttgacaacggaagaggcaccaatttgtatttaaatgtgttttatcatttcaacaggaaacgtgtccagcgaattttggatgatgtttttctcagtgaaattttgcccatttttgcgccaaacattcgtcgtttggactttccaaatgacgatcatctgcgtcatctccttcgaatcagttcgccgtcacttctcaccgatctcaatcagttgaattcaatcgattccgattatctggtgcctgctgctgccattgatgattttgatggacaaaatgcaacttctgctgaacaagttctgtccaaatggttgcacacgccgagaaaagacgggcagccgaagcgattgcgttgttgtattggttgtgcattgcaaacgaaaaaatggatgaagaaattcaagcaggtcgccccaattttctttcgacattaattctttccttgttgtaaccaaacaactgaattctaacaaaaagtcgaaagtatctcttattaaaggattgattttgcacacttgacaatgttacttttaaagaatatattaattttttttcctttgactctaattttcatcactaatttttcactcagacccccattcttaccagtgcttgtttttcccggttgccctaccgggaccgggacctgagcttttcaaaatccgggacctcggatgaccgggaattcccggcccggtcccggtcccgtggcactctactttaaatcttaaacattttttcgaaaaatcctcatttttgca

SEQ ID NO: 56215 - DNA, 1504 bp, Heterodera glycines
atgggcgatgaagcgatgcccaattggacaaatggttcagtgggaagagctgaaaatttggacaatttgaacaatgtcagcattatttttcgtggtttcactaattgcattgggtgagcagaagcaactgtattgtgtactgtattgaaaagaattttaaaaaataagtacttgaatatatcttgaaattttttccaaaaagaaggacctccatcagtaagattactgtttttattgaaaatttaattaatattttcaattttttttcaatttatatgtttttgtcggaaccgctcagtttgcgcgcatggttgggcgccagcacgtttttctactataacttttttatttattatccaattagaatacctgcaactgccgacacttgaaagcaggcgaaagctttctgatctgttcatggctcataaaataatttatggccgaacagatctagatttatttaaaattttcaaaccttctaaacgctttaacattcccttttatagacttaactcgaaatataaattaggcaaaaaatttataccttttgcggggcgggtaacaaaaatttggaaccaactcgataaaaagcttattgaaataaactcattaaatcaatttaaaaataaattaaaactatttcatttctgtaagattgaccggaaaaataaaagtcgaattattaattcattaaacaaaaagtgatttggtcattatttttattttttttattgatctcacattatattttattttttggcggcgatctcgtttttaattgtttatgcgctttcttgaggacattttaattaatgttttgccctcaatgtaagcggatttttcccttttgtggactttttctttattgacaaataaataaataaatataaaaaagttgtaaagaaaaaatttcaaaatttttgaacttttgcaattttcgtgtatttttaggtctcgaataaaataattaaaatttatctaatattttaaataaattattaaccgaaattacttagaattttataaatattttaaagtttcattggccccataaattttacaaaataaagcctaaacataggcctaagtccaagcaatttagcttgagatgaagcggatagaaatattttaaaatttgatttttattttttaatttagtccaattataattgaatttgaaatttcaaaataatctggttattattttatttaatattaggtaaattttaactattttattcgagctttaaaaaaacttttagaagaatgtttatttaagtatcaatttaattaaatgttaacatattttaaatttaaaaaaatgataaaaaatcataggaaaaaattgatttttgaactttttaggaatcgaccaaccacagttcataatcatctttcacgaaaaaaagtttcaagccccctaaaaatttttttttctgaaagttttctggttttaagccattttaaataataaaaaattttcaaattaatttttaggtaatta

SEQ ID NO: 56216 - DNA, 634 bp, Heterodera glycines
aaattcaaaaggtccaattcgatcagcggatgcgacagcgaacggaagccgctgattgagtggagcaacgaagaagagatcagcacaacggaggtggagcccgaactggtcagcagaacaacagcaaaaacaacaaaatgccaaggccaaaaagaaacggaggcaaaacaaattcaaaaattgatggacgaaaagtacaaaagcagagctttaatggatggactgaaacagtcgggactcttatgagcatttgaccattcgagattattgaacaattttgaacagtctattttttgtacatttatgcaaagcaatgtaattgagtgtttatttatgcaattattgtgtgtaaaagtaaatttattaacgatctgccaaagacccaaaaaattatatttcagaatttataaatattaatttaaaaaagaacattaaaatggccgtgccgccacaggcgatttaaagtagtgcagcgggaccgggaattttgggcaaaactgggaccgggacttgccgggacctgagaagccgggaccgggacctcgattttttttcgggaccgggaaccgggaccaaccgggaaattttaaaaattcaaaaaaatttattttaatttatttcaattgaaaataaa

SEQ ID NO: 56217 - DNA, 221 bp, Heterodera glycines
cggtcgacagtcgtggtcagcagattggccgaaatctccgcgtcgctggaggcgatgtcctccttggccaggattatgttcgccattgcggacaacaaatacgaaaccaactcgccgacacaatgcgtcagcacgaaatcggacagcacctgggaaaatgcggcaaaattgatgcgtttattggcattttattaagaaattcactcttttcccacacctct

SEQ ID NO: 56218 - DNA, 442 bp, Heterodera glycines
agattgccactccgttgcgttatgcctgcactttggtcggcattcgtatcgctttcaacactttgcgtcgtctgggcaaattgcgcaccacgcgcgagattgacctgacggtgcgccaacggctcgacctgctcattgagcaccgggatcagaaacggagtgccaaaagggcggtacggcatcagaacagttgagttttgccatcattcgcaggagcagatcgaaatatctgtccagattcaacaaatctctaaaaattcaaaaaaaaatatatatttttttcgactacggatgggccacttttgggacttgtgattttcccccaaaaatcactttagatagcatgaagaggcattcactgtgttcctcgcggacgaggacaaagttggactaattagtgcctttgaacttattgttgtagcatagagaactgctgaccgac

SEQ ID NO: 56219 - DNA, 653 bp, Heterodera glycines
atgagcgctcggcgtgtgctggtcgctgttggtcagctgaatgtgcagcacgacttgcagcagaatttcgagcgatgtgcgcggatggtccgacgggcgggcgaacggaacggctgtaaggtgggaggactgaagaggaaatggtgaaaataaatggacaggaaggaaacaagcgatcccacagcattcaaaaattaaacattttcttcatgaaaaaaaactttgtaagccggggaataaattgaaatttctttgagttagctataaaagaaaatgtattcagatggttttcctgcccgaatgcttcgattacattggccgtactgttgccgaacagattgaccaagcgctggatacccgtggcccatacattggtaaattccgcgagttagccaagcagcatggcctttggctgtctttgggtggcttccatcacaaggtgaatttgttggattttcatgggtttcatttccgggaattgaatttttcagcgtcccgaacttcggtccgaccatttgccccgaaatacgcatttgctgattgactcggatgggcaaacgcgcgccgaatatgacaaactgcacctgttcgacttggacttgccgggcaaagtgcgactgatggaaagcgaattttcttcccacgggcacaaa

SEQ ID NO: 56220 - DNA, 408 bp, Heterodera glycines
atggccaccatcatacatttggccgcaatttatgagcatccggccattttgcgagctttgctggaccaggacgggagtcacattgacgcgcgggatagcgtaaactttaaaaatttcatttttttccgttcgtcaattaaaaatttaaaaatttccctttttttcgtgagggtcaattaaatttttcaaaaattttcttaggagggccgtacagcgttgcattatgccgcggcacttgcaggaacattgcgcgaggatgacgcggacggaagcggcggcgacgacaaagagaagtcgcgcgatgctgcggagttggaatgcttcgacattttgttggacagcggggccaacgaaggccttttggatgttgagggtcggaaaacttggaaaaatggaattttgatttaa

SEQ ID NO: 56221 - DNA, 677 bp, Heterodera glycines
cggacgattttgacaatgccacggcattggccgaccatctgaaggcattgcacaaggacaaggaccgatatttggggtcagtatttaatggacaaaagggtcaatggcaaaacttataaattttaaaattgttaaaaatagtataatgccattaattgccaacaaacatttcgccaaaaaatgccttttaatttttaagatatttcaattggacaaaattctaccagaagcgatgggtgccgactgtgaagacttccgccttttgtcagctgtgtgaaatggtgcaccaccaaatggaggagggcggcgaatttgtgggccgaaattacacagtgaaatcgcacaaaaaattgtggggagctcaaagatgtcgggagaattatgtgcagaacgactccaaaacccccagaaaaaatttaaattttgtgatttttgtgtctcaacccaacagcattccaaacaatggactcaaatctccggcattccaaacactgggactcaacccactaacgttcaatgacattccaatcactgaaaatcaacccatcagcatttcaatctctgaaactcaattctcaggctttccaatcgctggagctcaacccaccagcatttcaatcgctggaactcaacccaccagcattccaaacaatggactcaaagctccggcattctaa

SEQ ID NO: 56222 - DNA, 1155 bp, Heterodera glycines
atgtacaactgtgataaaaagggtacaacagtgattaaaataggtacaacagagattagaagaggtacaacagagattagaagagttacaaaaatgattagaagaggtgcaaaagtgactaaaagaggtgcaacagtgatcagaagaggtaaaacggtgattagaagaggtacatcagattagaagaggtaaactgttattagaagaggtgcaacagtgattaaaagaggtacaacaatgatgagaagaggtacaacagtgattataagaggtacaacagagattagaagagttacaaaaatgattagaagaggtgcaaaagtgactaaaagaggtacaacagtgattagaaagtgggcattcaaatagagcatttacggtaattaaggaattgtttttattcaaaatagataaaaaatcgatgtgttatatttttcattttttaaaatattatacactttttattaatgaaaaacaaattatgaaatgtataataattgaatagttatttaaattgaaatgaaaaaaattttacaattaaattttaaaataatagctgaaattctttaattaaatataataaataatttaaatgaaaatcattattcatcaaaaaataatttaattaaactaaaaaaatttattattaataaaaccaaacatttaagtttattaaaagtaatgaaaattaacccaaaaaatacaaagaaaaataatgtacaccgtccggcttcgaactttgccccccccccccaaaaaatgatgcctcagaatccccaatcacacagggatcctgaggtcttaacgatgtcaaaagtaaaatctgatcacgtattcgtgatcagcggcccaaataacccctaaagacatgttttttgaagatttttggtgaaaaaatttttcaactcaaaaatcctatgctcacccctttggtcccgaatctcaaaatcacttttatttttataaaaattcttaaaaaagtgatacaaatgccaaataaaatttatacaatagagaaaaaaactgcggatttttgtagtattttatttttccagaatatcttttcagaaccgagttatgaatttttttctgaaaattcgaatttttccagaaattctggaataacttttttccttttttagatagaaattccaa

SEQ ID NO: 56223 - DNA, 155 bp, Heterodera glycines
atgattgcacagaattgccgaaaaaattcgagaccaatttccgaatgttgaccgactaattgcaaaacgaaagccgtctttgtcaaagcgtcttaccgagtcaaaaaatttggaaatgtatctcatatgcaatttcaatcaataaatttgaagaa

SEQ ID NO: 56224 - DNA, 4198 bp, Heterodera glycines
ttttgtacctctactaatcactgttgcacatcttctaatcactgttgtacctcttctgatcactgttgaacctcttctaatccttttgtagctcttctaatcacttttgtacctcttttaatcacagttgtacctcttctgatcacagttgtacctcttctaatcacttttgtacctctactaatcactgttgcacatcttctaatcactgttgtacctcttctgatcactgtttaacctcttataatccttttgtagctcttctaatcacttttgtagctcttctaatcacttttgtagctcttttaatcactgctgtacctcttctaatcactgttgtacctcttctgatcactgttgcacctcttttaatcactgctgtacctcttttaatcactgttgcacctcttttaatcactgttgtacctcttctgatcactgttgtacctcttttaatcatcgttgtacctcttctaatcactgctgtacctcttctaattaccgttgtacacctcttttagtcactgttgtacctctacctcttctaattaatgcattttaagttattttcaccgttttaaattaattttaacctttttgttttattaaaaattaataaataattttaaatttaaattaaattatttttgatgaataaattttttgtttcaaattaattaattttattgtccataatttgtatttttttatatgccatctgtttatttcattctcatgtttgagatggtgtgcgttattgatttactcaacttttacgtctattgaaaaattgatttttaccctttgtttgtgtaagtaataaaaacacagtctgataatgccttacttagctttttttttgcaaaaaattttttgttttaaaatatccatattcattttttggcttttttcatgcaatttttttcacttttttcagctttgtatgcaacgatatttctgatggatattttcccccttttggaacgttctcaactcgaactcaaattggcactgatttcgcccctttctatgcgctggtcgacaaacatttcgatggcgaaagtggattaagtcgtaagttttattttttttttaattgaccattaaaatattttctaagctctacaatttttggtttgcacttaaaaaaagtgaaatttttttaggaattttctattattttgaatttttcaaattatgattttttgttcaaatttagattaggaaatcggaattgatcaaaataattgaaggattcgtgatcggggaccccaaaaaccccagagaataaatttttatgactatcacaaaaaaattttgcaaaacaaaagtgtgtccccccttttaaaaaattttcaaaaaggcccacttttaatatagcgccgaatattttttaagcagtttgtgcccaaacgggggcctacatttcaaaattgctctaaaaataaaaattttccaaatttggcaattttttaaatttatttttgtaaatgaatatggcacttctttcgccatgtttcgaactttggtggacaaacatttcgatggtaaagagtgattgttttttatgctttttgttgttttttaaggattttgtacgaaaaggggcctccaatttcaaacactttgcctaaaagcaaaattcggtttttttgtaaatgtgaactattttagtgtttttttttttttttttgtaattttatattcttaagattttcagcaaccgccaaaatgtttggatggacattttccaactgttgaccatgctcaacttggcctcaaattggcactgctttcgcccgtttcgatgtttcagtggacaaatattttgatggcaaaaaaagtgattttttaggggtttttttaaggattttgtgcgaaaaggggcctccaatttcaaacgaattttgcttaaaagcaaaattcgggttttttgttgtaaaagtgaacttttttaaaaattcgaaaatatttttcaattttttggtccttggaaatttgggttaaaatttgaaaattcataacaaatcgaagggttgatcaattttacaggaataaagccttaaaaatagagaaaaatcaggagaattttatggactttatttggaatttctatctaaaaaaggaaaaaagttattccagaatttctggaaaaattcgaattttcagaaaaaaattcataactcggttctgaaaagatattctggaaaaataaaatactacaaaaatccgcagtttttttctctattgtataaattttatttggcatttgtatcacttttttaagaatttttataaaaataaaagtgattttgagattcgggaccaaaggggtgagcataggatttttgagttgaaaaattttttcaccaaaaatcttcaaaaaacatgtctttaggggttatttgggccgctgatcacgaatacgtgatcagattttacttttgacatcgttaagacctcaggatccctgtgtgattggggattctgaggcatcattttttggggggggggggcaaagttcgaagccggacggtgtacattatttttctttgtattttttgggttaattttcattacttttaataaacttaaatgtttggttttattaataataaatttttttagtttaattaaattattttttgatgaataatgattttcatttaaattatttattatatttaattaaagaatttcagctattattttaaaatttaattgtaaaatttttttcatttcaatttaaataactattcaattattatacatttcataatttgtttttcattaataaaaagtgtataatattttaaaaaatgaaaaatataacacatcgattttttatctattttgaataaaaacaattccttaattaccgtaaatgctctatttgaatgcccactttctaatcactgttgtacctcttttagtcacttttgcacctcttctaatcatttttgtaactcttctaatctctgttgtacctcttataatcactgttgtacctcttctcatcattgttgtacctcttttaatcactgttgcacctcttctaataacagtttacctcttctaatctgatgtacctcttctaatcaccgttttacctcttctgatcactgttgcacctcttttagtcacttttgcacctcttctaatcatttttgtaactcttctaatctctgttgtacctcttctaatctctgttgtacctattttaatcactgttgtaccctttttatcacagttgtacatcttctgatcactgttgtacctcttctgatcactattgaacctcttctaacaccgttgtaacgggcgcgaggcgcccgtccgatctcaacaaatttaaaaaacgggcgcgaagcgcccgtctgaggccgcaaagcggccgaaaaggcccaactaaatttaaaaacgggcgcgaagcgcccgtctgagcttaacaaatttaaaaaacgggcgcgaagcgcccgtcaaagcaaaacaaaatatgaaaaacgggcgcgaagcgcacgtgcgatctcaacaagtttaaaaaacgggcgcgaagcgcccgtctgaggctgcgaagcgggcgaaaaggcccaactaaattgaaaaacgggcgcgaagcgcccgactgaggccgcgaacggcataacaagctaaaaaacgggcgcgaagcgcccgtatgagtttaacaaatttaaaaagggagcgaagcgcccatctgaaccaacaaaatttaaaaaacgggcgctaagcgcccgtccaaggccaataaaattgaaaaacgggcgcgaagcgcccgactaaggccgcgaattgttgtacctctctcttttaatcactgttgtaccttttctaatcgcttttgtacctcttctaatctctgtagtacctcttctgatcactgttgtagctcttaaaatcacagttgtacctcttctgattacttttgtacctcttttaatcactgtcaattttttaaaaattagaaacgggcgcgaagcgcccgtccaagcccaacaaaatttaaaaaacgggcgcgaagcgcccgaaaaacccctaacatgcttcggattctgatcagtgttgtagcacttttaatcaccattgtacctctcctaatcacagttgtacctcttttaatcacagttgtacctcttctgatcactgttgtacctcttctaatcactgttgtacctcttct

SEQ ID NO: 56225 - DNA, 517 bp, Heterodera glycines
atgattaaaagaggtacaacagtgatcagaagaggtacaacagtgattaaaagaggtgcaacagtgattaaaagaggtacagcagtgattaaaagaggtgcaacagtgatcagaagaggtacaacagtgattagaagaggtacagcagtgattaaaagagctacaaaagtgattagaagagctacaaaagtgattagaagagctacaaaaggattataagaggttaaacagtgatcagaagaggtacaacagtgattagaagatgtgcaacagtgattagtagaggtacaaaagtgattagaagaggtacaactgtgatcagaagaggtacaactgtgattaaaagaggtacaaaagtgattagaagagctacaaaaggattagaagaggttcaacagtgatcagaagaggtacaacagtgattagaagatgtgcaacagtgattagtagaggtacaaaagtgattagaagaattttttaacaaatttaatttaaaaaatacatgaaattctatcaa

SEQ ID NO: 56226 - DNA, 938 bp, Heterodera glycines
atgattaagagaggtacaacagtgatcagaagaggtacaacagtgattaaaagaggtgcaacagtgattaaaagaggtacagcagtgattaaaagaggtgcaacagtgatcagaagaggtacaacagtgattagaagaggtacagcagtgattaaaagagctacaaaagtgattagaagagctacaaaagtgattagaagagctacaaaaggattataagaggttaaacagtgatcagaagaggtacaacagtgattagaagatgtgcaacagtgattagtagaggtacaaaagtgattagaagaggtacaactgtgatcagaagaggtacaactgtgattaaaagaggtacaaaagtgattagaagagctacaaaaggattagaagaggttcaacagtgatcagaagaggtacaacagtgattagaagatgtgcaacagtgattagtagaggtacaaaagtgattagaagaattttttaacaaatttaatttaaaaaatacatgaaattctatcaattaaaaaataattaatttaaacttataaaatttatttatcaaaaaaaaattaaattaaatataattttttatttattaactcaacaaaatattttaaattaattaaaatcattgaaaataacgtaaaaatgcacagaaaaataatgttacaccgtacggattcgaacttcccccccccctcaaaatgatgcctcagaatccccaatcacacagggattctgaggtcttaacgatgtcaaaagtaaaatctgatcacgtattcgtgatcagcggcccgaataacgactaaagacatgtttttggaaaatttttgacgaaaaaattttttcactcaaaaaccatgtgctcccccctttggacccgaagcacaaaatcacttttatttttatatctttttttaaagaagtgataaaaataccaa

SEQ ID NO: 56227 - DNA, 983 bp, Heterodera glycines
atgggcgtcttccaacattgtatggatgaagcaattattgacagccgtcaaagtggagttgaaccgactcatctcggatgtattgtttctagccagaacctttcttccgacatttggatccccattcggcagcttactcctgacaccattaacacaatactaaatcgcttcaacgacgttgcacagagcaaaaaacaggatgatgtgacgctgtggggtgaaccatttactgttacagtaacaacacttaaccgtaatgctctaccggcgaagcgtcaactgaaagggggagtagcccggaaattagcaccagttcaccacaatattcatccaaattgtcttattaaagttaataatttataatgtcttaattaaaaataaattttagatccaaaattttgatgatgacaattactgtttattttacgctatccaagcaaccttggttcgatcaattggtgacttggatcgtcgtcgctttcatgattacgtcaatggaaacagtgaaatgagaggaaaacttaaaaatgatgctttggaaatgatgaatgctgttaacgcaccagctggtcaaccaaattacgatgcggaagtatatgtgccaagaattgtggactggtggaatggggaaaaattcgtgggccaatggaaattcaaaacatttctcttcggatcagcaggccattacaagcctttattcaaatatggaccagaggactatgttgtgccgatcatcctttacttcgaagaggaacattttaatggtgtgcagaaaagtggcaatttgttcggcaaaccatattgtctaagttgtgaaaagacttacgatcggccaaaacgtcacattgtcaattgcaaagcccgctgcattaaatggtaataaacaattttaacaatgaattaattatttttaagctcccaattgggtccaatatttccatgcaaaccaaataatggattccgacaaaaatgcaaagagtgca

SEQ ID NO: 56228 - DNA, 2474 bp, Heterodera glycines
atgtttggcttggacgttcaagacaagccgttctttccacatttggcaaacaggccggaaaattacggctgccaaatatttcctacgaaatcaaactatttggccggtgggataaatcctgagaagcgtaaagaatttgacatttggtatgctcaaaaccaaaatcagccgtttctgcttgatgaagcattggccaggtattttttataattttttgaaataaccaaattttcagttattgtaaaaatgacgtggatattttgatggctggccttatcgccttcagaactgaatttttggagatgagcaagcgacctgctgatcccgacggaaaggcaaatcgagcaacttacacaactccacacaacggaattgacccgctcaagcattgcataacaattgcatcagcatgcatgcgtcatttccgaactaatcatttaaagcctggtcacttggctcttgttccggaaaaaggatacgatagctgcggcgacaatcaaagtgatttggcaatgagttttatgcagtggtacaccgaaaaatatgcggttcggattcaaaatgctttttcggctgaaggagagaaaaggtaattttagagtggggattctgagcaaaagttattctcaagagttggcaattttcgtttggacggttggattgagtctcaacgaaaaggactagaaatccatggctgtgtatggcatgcatgctcaaaatgttatccggatgataatgatgtaatgccttgtggcaaatctgcaggccgaattcgagagagaaacaaacagagaatggaatttatattgaccaaagtgccaaatgtggaaatcttttggcaatgtgagattgaggaaatgctgtccaaggacagggaaatgaagcagaaattcaaagaatatacgggagatggcgggccaatcaatattcgtgattgttttatgggtggaagaacaggtgcattgaagctttatcacgagttggcagcggacgaagaaatcagttattatgactttaccagtctctatccattcatcaagtaaaattgaaaattttattttccccaaaaaaagttatagttgtgtaacttattatccggttggacacccaacacttcatgttccgtgtgaggacgttgattggcggagaccagaggacaatccatatccgcttgcaattctcaaagttttcgtcattccgccacaaaaaatcgatgttccggtattgccagttaaagtggatgatcgactatgcttcccactctgcatgagttgttgcaaaaaatgccctaacggaggtgtaagggaaacatacaattgtcaacacacataagcaaagaggatggatcagtacatgcacatcattggaggtattaaatattttattatttttattaatatttttagcttaatgccgcactggaggagggatacagagtcaccatgcttttacgcgtccttgaatacaacaaaagtgacaaccaactttttcgatcatacatgagtgaatttatggcccaaaagttacatgcatcagggtttgatgaagaaattcgcggaaattctgaagccgaggaacgattcataaaggagtgccgggaaaaatttgacataaaaattgaccgagcaaagatgataccaaacaaggggaagcgagccttggccaaattagctgtgaacaatttatgtatgttgtataaaaacccaaaattttttaatgataaatttagggggtcgtttttccctccgtaattacggactctcttaaacttttataactgatgatccatcagagctgggaaattatcttgacaatcggaagatcgaagtgactgggctcgacatgttaactccggagcggattttaatcagctacaatcagaagaaggattgggttcaggaacacccctgctccaacgttgtcatttcacttttcacaacttctgcagctcggctgcacttgctaaaagcaatgcagaaagtcgcgcgaacccctggttgtactattttatacactggtaaatataatttattaatgaaaaaattaaaatttttaagatacggattcgttgatttatgttcacccaaaaggcgcaaatcctttgaagacgggtcctcacttgggtgagtttacggatgaatttccaaaggtaattgatttttgattttaaagaaataaatttaaattcagcatgacattttggaatttataagtggtggagcaaagcaatatggtctgaagcttcggaagaagggcagcgaaaatgagtttgactacgtgctcaaacttagagggataaccctaaattatgatgtgaccaaaaatcaggggctttgttacgacactttcaaaactcgcaccacttcaaaaagtatataaaccatatgttggcaaagggattgtttgctctcgtgattttcgtgtgcttgattttggttattccactcattgattcgttgtataaagttgaaaaa

SEQ ID NO: 56229 - DNA, 540 bp, Heterodera glycines
atggtccttcttactgaaaaaatagcacaacttttgaattgtcgaattactgagctccgtgatcgcctaaatcatccatcagattgtgaaatcgttgtgaaagcattttatggaaagcatattcaaacaacatacaaggacagaaatggatacaccaaaactttggtttttgggggtattactgcgcaaggagctgcaactacaatggcatatgggcgattaggtagaccttacaatgttaatgtggccgcacatttctacgttcgacatcgtattaaacttcgccatccatttcttcattgtgtcatcgaacgctttcctgaaggacaagaggatcgtttttatcctcttgagttatgcaaaattgaggaagttgatgaatcaaaatggcttggtcagattttcaccgagattaacaacaacaatattagtgcaactaattcaacaaattttgctgacactcaaacttcaaatgatgattcgaaaagtgttgatgggcgcgatgaatatagccaaaatgattgctactctttgtggtag

SEQ ID NO: 56230 - DNA, 2250 bp, Heterodera glycines
atgtccgttccatcaaatgacaaccaatttccaaaaactacaaatgaatgccaagtcgatgacggtattttatttttatttattactcataacaaaaaattatgaataacttaagatgacgtcgacactgatccatcacccgaggaagttgagaaatggactcccgaggaagtgatcgagtgggagaagcgaatctttggaaaaatgcctccggaagaggagttttggcaggaaattatcgatgatggagacaaagatgtgagatattcattaaagcatattttatacgccgaaagaaaaaagcggagagatgaaatattgaagcgaaagctaatcgaatacgaagaatcactcaaatctaaggctgataattgatttaacagtttcgattgtcctattcagcacacgaatttttgttaatatattcatgaataaagaattgaaaacaaactccgctcaaattaggttaagcaaacattaaatggtataaaaactctaaatttaatataaattttcattttcattactcaaataataaaattttatattgcaaaatgcttgacaacgaaaatggtggttcaaatgaacctcagcaaataaacgaaaatgttcatgtgaagaattcttataatgttcagccctggaaacttttccgtccgaaatacatgctcacctaccgcatgtgtgaatgtaaacaaaataattaaatttcttttttaatttattttcttcagtgtgtctttccgcattgtggaacaacaaaaacaaatatataccaaatgaacgccgagcattaatcagctttgaactttgtgaaaaatgcacaattgacaattgtcgtgcgaccgaaatacttgcaccgttcaagccgaagaaataaatttggagatgatacgcagattttctcacagacaaaaaattccagttaattatttaaatctttgcatattcgtctctctctatttcaccaattcctcaattatttgcttgtttgcacgatggtgccaaataaaaaaaatgtggtattcaagaaccatttgacctctctaatttgaattcactagtggattcaccaaatatgtttgcatacgattctcggttaggggttaattgcggaacgataaaagagattacggatttacagttcaagcactgcattcgtcgaatggtcacctcggaaatttgagatatttggtgagtattgccaatgcggaaaggcttgggggtctagtaggcggaacgaacggcaagaaggttatttggcggatgccaaagcaaattagttgcttcttcttctaattttatttactttttctattttcttttaaaatatttttagatatcaattaattaaaattcattttcaattagcgacgaataaatgtccgacaacgtctcgaattcgatccaggagttaaggcggatggtcagcgaccaaaaccggatcattttcaacttgcgctcccagatgatagaccaaagagcagtcattttgcagaatttatcacggattgagagattggaatgtttcgcttcgaacgtaatttaaatttatttattggattttttaaattttataattttattttaatataataattcaacattgttaaaattaaaactattttttccagaaccgcggtggtcgtggtaactttcgtctgcggtataacccattggcggctgttgaactgaccctgctcggaaatcgtcttgaggacagggctcgtagacaccgagtggccataggcgcatcgacgtcagcatcgctggtcaggctgtgcagcagcctcagctgttagaaggcgaaaatggtgaatttatttaataaattaaattatataaattattttaataatattaaattttaatgccttcttttgggccaacaattgagcgccatatggagagatcgcgtcaccggttgctccatgacgagatggttcagagatcggtacaacagcatttccaacaccaacaataacagcttgtgttccaagctcaacagcaggaacaccgccgacgtgaagtgcagagacagttcgaggtagccgaacagttgcaagaagagattcaggcagcggaagagggggaaaatgatcaagagaatgaggatcagcatcaacagcagcaacaaggaggggaggaagcgcaacacggaggggaggaagaagtgcaacaagctgcgcagcaaaactttgagcgaacagtacgactccaattgcgcgagtctcagcgctttcacaatgg

SEQ ID NO: 56231 - DNA, 411 bp, Heterodera glycines
atgtcaatttcgaccaattcaacaaatggcgatttcataccaacagatggaggtaatgagaaaaagagaaagaaaccgtagaaagtaaattgagttttggtaggtgtgaaaataaatattaatttaagtttacgaattaaattttgtatgattttcagaagttaattgtgaatcaattagtttggacaacgatggacaatctgatggaaaagtcactgttcagcagcagccaaaagtgagcaattaaaattaatattaatatattaatttaaaaaaattaaaaggaatttcgtgaaaagtgtgccaagatggaaatgaacttcaaaattatcaaattggaacttgagaaggttgcttttacataaatgattaaaacccgaacaaaaagagcacacaaattaaacaaataaa

SEQ ID NO: 56232 - DNA, 1239 bp, Heterodera glycines
atgaaaacattcttcgtattaatattatacgttttattattaaaaaatgcaaatgaacaaactgaagcaggcaaaataaacaaagaaaaaagttttgatcaaatatttggccaaggatgggacgacggagaagaagaaaacatttgtcgaattgatcaaatatttaatggacagacagctgatcaggataaccaatttgatcagatttttggtgaaagtttggaagtgaaagaaggggagagtgaagaaatgtccacaaacagtgatcaattggaacaattgcaagaaaatgttggacaaatttctgatcatttttcaaatgctattggtaaaaagaaaagagaaattgtggaaaaatttgataaaattaaagaaaaagttaagcaaatgggaaagaaattcacaagaaaagaatggcataaaattgaaagaaaaattgccaaaaaattgggagtaaatcaaaggaaaatttacaaatggaaaagagaatttggaatgatgataaataaatattctattgatgaaaagcgtgaaacagtaaagcgatttgatcaaatatatggcaaatttaaaatgaaatttaatgaaaatttggagggaaaaagagaaaaatgcaaaaaaataatagcaaaacatttgggcataagtttaaaaagcatttataaatggaagaaacaattaaaaaatggaaaacctttgaaaaatcaacaaattgatgatgaaaaaagagaaattattgaaaaatattttaaattaaaaaatgaatttatgcaaaatgagaaacattcacgaaaagaatggaaagaatttagtgcaaacattaagcaaatatttggaatttattatagaacaattgaaaaatgggacaagaaattcggcattaaacaaaatatttcaaaaggtgaaattttttaaaagaatttttaatttaattatttaaatattaaagggcggaagcattatacaattgtcgaaaaaatggaaataatgaaacaatattttgaattgaaaaatcaaaatccaaagctcaccaatggagaaattggcgaaattttgaatattccaaaaggatcattagaaagatataaagcggaattcaagagaaaaagtgaaggcgttccgaatacggaatgattgagaatttatttcaattttcaggttttagtcaatgtgttgttatgtttggtaaatttttgtaatttgaaagaagaatcaaaaaaaggctggaaaaatatttta

SEQ ID NO: 56233 - DNA, 341 bp, Heterodera glycines
atggtaggagaaggggaagcaaaagaggagagaataaatcagtttaattgcttaagtcaaacaaccaaagttgaagagaatgtcggggacaatcggcgaataaatgaaaaaaaggaaaaggaagaaaacggttggttaaggcaaagaattgaaattgggaaaccttaattaacaactaattaataaattaataattggagaatggcaattggttggacggaagcggagctcggcccgaagcgaacaaaatctgctcggcgaaatgaatgaatggccatttattgcgagtggaaaagcgaaaaaggcgccaaaaagtgcgatggatttgccaacagacgaag

SEQ ID NO: 56234 - DNA, 381 bp, Heterodera glycines
atgtccatatctgacaaaattcgagaagcccgagaatggagctactgcatcgacactctaaaagcatcagtcgattcaatgtacgaaatctgccgaattcagcaaaatattttgggctgtgaggtaaccgatgggaccaaccgaccaatattaattaatccctttaaatttgttaaggaagcgattatgtttttaaaaaatggcattcgcgactttctcagtctgatcgatacaattaaaattgagcagaattgggagaattctgagaagttcgcttctttggtacttttctgctttatatcacaaaataattgctaaaattaaaaaaaaatatttttagagtaaaaatgtaattcctaacttctaactgaattaaataaa

SEQ ID NO: 56235 - DNA, 103 bp, Heterodera glycines
tacggggttcggaattagtcgaatgaatgcagttcgtgatcaatgggccccgaaaacccacggaaacatgttttcacaactttacacaaatgtttctccataa

SEQ ID NO: 56236 - DNA, 291 bp, Heterodera glycines
aaaatgcaagaaaatggacgggaaatggcacttgtgaagttcacgaaggacgactttggcatttaattactttgataagctcctccgaaactatagtaggtaatagccggttcattcttttgctgtatgtattacataatttatgctattttatttatacaatttttgtacattttcaatatttattaatttattcattcggtctttgtaaaaaaatgaacaatgaatcatttgttgggatgtgctctattcagtgatgtggtgaaattacacaataaaacattgtcatta

SEQ ID NO: 56237 - DNA, 59 bp, Heterodera glycines; identical to SEQ ID NO: 52421

SEQ ID NO: 56238 - DNA, 59 bp, Heterodera glycines; identical to SEQ ID NO: 52422

SEQ ID NO: 56239 - DNA, 59 bp, Heterodera glycines; identical to SEQ ID NO: 52421

SEQ ID NO: 56240 - DNA, 59 bp, Heterodera glycines; identical to SEQ ID NO: 52421

SEQ ID NO: 56241 - DNA, 59 bp, Heterodera glycines; identical to SEQ ID NO: 52421

SEQ ID NO: 56242 - DNA, 59 bp, Heterodera glycines; identical to SEQ ID NO: 52421

SEQ ID NO: 56243 - DNA, 59 bp, Heterodera glycines; identical to SEQ ID NO: 52422

SEQ ID NO: 56244 - DNA, 369 bp, Heterodera glycines
atgaacgctaaaattatcagagtgccgaaaatcgcatgtgatctaagcctagcaaaaaatggtgtaagtaaaaatcgtaattacgctcaaaaagcttctcaaacaattttaacgcttccaattccttctacaatcgcctttatacatcccattatgagcgctaaaattatcagagtgccgaaaatcgcatgtgatctaagcctagcaaaaaatggtgtaagtaaaaatcgtaattacgctcaaaaagctcctcaaacaattttagcgcttccaattccttctacaatcgcctttatacatcccattatgaacgctaaaattatcagagtgccgaaaatcgcatgtgatctacgcctagaaaaaaatggt

SEQ ID NO: 56245 - DNA, 485 bp, Heterodera glycines
atgtcttcggctcgacttccgaaggggtcgaacgaaggaacgccaagcagtgacgaaggggagttcaaaaaggtgggtttggaacgaaatcgatcgaaagctgcattgggttatcgtaacttttcgcttttcagattgtgatcggaatatgcgcaatgcaacggaaggccaacagcaagccgatgcgttcgatcatgcttaaaatgaacgagttctacaaggtatttaccggcttacaatgaatgcccttcatctctatttaaatattttccaatattttataaaatgttttacccttttaggactttctcgattttgtaatttttcccgaggaaaccattctcaatgaatcggtggagaattggcccctctgcgactgtctcatctcttttcattccaccgatttccctctcaaaaaggcaattgaatatgaaaaagcgagaagaccttacgtgttgaatgacttacaccgccaatttgatttg

SEQ ID NO: 56246 - DNA, 4704 bp, Heterodera glycines
atggtggcatttggaactgagttggacgaagggacgcgtgacattggaattggcggagtgccaaacggaggacgaaaatggggacgaatgtgctcaaaagagtcatggcgtttatctagtgcatgtccaccttcagcaagaaaacaatttgctcctacagtatgctactttctcttccccaactgtgtctctaccgtaccccttttcagtccgccctctcttcgtttctcacccttcgtcattttcggtgatctctccgttttgcctgaccttctccgtcattctgctggtcggacttcggacttttcattcgttggctgtcagcgacgaattgccatcgacggaatcgaaataattggccaagatttggccattttggaggagagattagaccaattcatggcggaggtgtttgcccattttattacaataaattgctctcttttgatcagatcaatgcaaccacttcatccatgtgtccgttcattggaagtgcgcgaaataaaaggccaaatgtttgccatggagaaaatgcccggaaggcatgtggaaaaggcatttgtatgcctgagggaagcgattcattcacttgccaatgcgaaagtcagcaagttgagtccgctaattgtgagcagggtgagaattctttgcatatttctgcttattcattaattagttaattaattactcaatttccccaaaaagttctcttcgccgcttccctccgcttcagtcctctccgttttgtgctctcttctcgcactttcaatcgtttgtccttcgtccctttgcccggcaatttggtccattctctcccccgccgtccgttgtccctccgtcgtggagaggacgaaaatattcaatttgccgatggattgaatgtgttggcattggactttcattcgtcgaattcggaaaatggaaaaggcgaagaaacacttttgtgcattgaatttgatgatttgttgctgatgatagcattagaggtgaaaacagcgaaatgtctgataataaacaaaatgaaaatgttattaattcatgcaaatggcacttttgtcaaaaaaatgccaaattctattaattgaccatttaaataataaaaggcctccgcttcagatgaatgtcaattctatgcgcttcgttctccaccggcacaccaacaacactcagccgacgccgtttccgctcagtttccaattgatcgttaacagttcgacgccgttggacatccattggcaccgattggccatgggagtgtcgccagacggaaaaatggtaaagcaatgaacggatgacagcgaaatgtgtcatgtccgtttccctccccttttgtgcagctccgtctccaacttgatgacatggctcccgtcgtccaccggtcgtccctcctcaatttcttccctctccttctccgttctcggctaaaattgctgtcgttgggttcgacatgttcttctctcaacgcgcatcaaaatttgtccgtttttcggggctgcgttcgccgctttctgatcaacaatcagttgcagcaaatccatccccagcagatggctccgtttccctctcacaaaaaggtctctcctcgctccgtctgtccgtccctttttcactgtctttccctcttttcagtctcttcggctgctaattgaggagaatcggccggaggatgcgatttcgcagctgtgcctatcagccaaatcagctgaccattccgttcttgcctcgatatttgccgtcatttctgtcctttttctgctctctttcgttctctttgccatcgtttttcgcttcaaaaagcgaaagagaaaagaaagtgccaaaagaaacagaagtgtccaaatatcatcttcttttgtgacccaaagtcaaactccgccgattattgtgccatcgcaatttaatggagaggaagaagagcagaaaatggccaaattagaaaattggcgggcgatggccgtctcaacggacactttttcctcaattggcttcagttcgtgttcgactttcccacgccactccaacataatcggtccaagtgatgccgaaggtcagttgaaaatagtctctctctattttaaaacgcccctatctataaattgccgcagattcagcatgagccgtccaattatcattcaatcgcttccaaaaaaggccaaggttcgtttatcctttgactggttaaagttcccttttgacaatgggatatctatgctcagtttctgttatgcctttttaattctcttttttcaccccaaagattgtgaaaatgaatgctacgacacgaagcgcttaacgacggcagcgaagaaattgaaaataaagaaaaatgaaatttacgggtgaagcaccaaaaagaaaaatatataaaaagaaacgggtcattaatagggctgccaattttatgtaaatacatatttttttcctggcttctccttgctctaaatagcaggaaaaacactttcttttttgtgtttgcgaacaaaaaccgggacttttatttacatatttcggggtttttatacatatttcgggattttcttacatatttgtactagagtgccacgggaccgggaatttttgccaaaaccgggaccgggacttgccgggacctgagaagccgggaccgggacctcgattttttttcgggaccgggaccgcaagaaaaaccgggaaccgggaccaaccgggaaattttaaaaattcaaaaaaattttaaaaatttaaaaaaaaattcaaattttaatttatattaagtgaaaataatacaaaattatttggttttttataataaattaaattaatgaaaattttcaaacaaattttcttcaattatttcaaacaattaatcatttttggactaaatcatcgaatattaatagaaattcagatttgattttcacatcacttttttcggagcgctttttcaaaaaacttttgggaaagaaggggtccggcggtgccgataggcgccgccgggggaaattttaaaaatttgggtgcaatttgttaacagatttttaacaaaaaaggttggtttttgcgattattaagctcaattggtaggattttcatttaaaaaatgataaaatatgtatcaatttaaaaagaaactatgaggaatcatattttctttataggaaacccacgagtatacaaaaaaaaaattgaaaataatctaatttctgcagagggattgaaacaggggaaagaagaagggaaagccaaggagactagccattaggccatttgcacacttgggcagtgttacttttaaagaatatattaattattattttttatttttccctttaactccaattttcatcactaatttttcactcagacccccattcttaccagtgcttgtttttcccggttcccggttgccctaccgggaccgggacctgagcttttcaaaacccgggaccgggaaccgggacctcggatgaccgggaattcccggcccggtcccggtcccgtggcactctaatttgtacatattttggatttttttcatatatattttcatttttttacatattttgagtattttttacggaaatttttggaaatcctcaaaaaaaaatccaaaatttcggtaaatatttttatacatattttcatttttttacatattttgaagatttatagaaaaaataagtttgaaaatgttgcctaaaaataccaaaaaaagtaatttgtatgtcattttgtggctatttcatactttacggggattttctttcccaaaaaattccattaaaaaaatttttatttacatattttgggatttttcttacatatttctttttgtacatattttttgcagccctagtcattaaaatgctgaacatttatagaatttgaattttaaaaaataattaaactttgtttgtgtgaatagcaataaaattagtactacggtagtcaaattcaaaatattcatttttattttgaatttaatttattttaaaatattttttcataatttaatttaaattctttgtctacaaattgtattacttttttttcaattaaatattaaaaaagtccatatgtacctgtatatgttcttccttgtctcatgtcctttttagatgaaattgttaatctttttgtttttattgctctccataactctgagccaatgctcattaagtgccaatgttccagccgatggagatggagtgattagtgacaatgaatttgccgaatttgagtttatggatgaagaagacccaatcagtgaccagcagtcaaatgataattaccaacagaatgggcaacagcaaaaagagcagagaaatggtgacaaaatggaccaacttaacgaccataattccaaggaagaacaaattggtaaaagagcggatgaaaatggcgcagaaaaggtgacaatgatttatgggattggaattttatttcaaaaaataatgtacaaattatgcattttactagtatgtcggtttagatcaagtgaaattgattagaggtgcatttcagtacctaatcaaacttaatttcaacatttagtcagctcggagtgaaggtgatttttcgtttcttgtcgacgaagaagaatttgatgaatttccggcgaaaacagtggaagaaatcgaccaaactcacaagggggaagtgcctgtcaacaaaccaccaaaaccattgacttttgctgagatgagccttctcggcgctagttaa

SEQ ID NO: 56247 - DNA, 1328 bp, Heterodera glycines
tcgaacttctcgctttgctcatcatttttgtttatgcgctgaattacgcttacggaaagtccaaaaaccattccattgctcacaaatggttcatggacaatcgtgaacgtttggagaagcaattcgcactggttggcgatgatggcacttcgcaggaaaatatgggcggttgtctgatccgcgagactgactttgcatattctgtgtggtgcacagggcgaattggttgtcgctcaatgcacagccaaataaaggtgcgttttgggttttccatgtgtcaaaatttgtttatgacaaattttcagctcttcaagcgacaagatctgcttggtatgatgatcggactcgtccgtccccggccggataacgtagtgtacaaaatcgacctggaccctgatgagatggattcatttgttcttatctttgggcagcgtaaaaatgtgcaaaaaactgtgaaggaaatgcatgatttggtttgtttattctgcaaaattattaatatttattgtttttcgctatattttagtcaacgtatgtcactgagcgtaaaaatgtggacaaagttcagctgccatcttcgatttgtgtctttgcagaaattgccgagaccattccggccataatcgacgcttcaacgctgcaattcctcaagaaatgcgagaaatacgtggagtacattcatttttccgatcaatatgctggcgcaaaacagccggagtgagtttgatcagactattatttaatataattattcggaaaatgaatttagtgatcaatatgtgcgtcttccggagacgcacccgacgttggtgttcagctacataataacagatgacaacgaagagggacatttgatggattcgatgctgctgaacttcacctttttcatgttggataaagtgcggcggtatcggctgagcaaagaggggaaggcaaaggcggacaagaaaaggcaaaatgtgcaggagaacttcctcaaactgacgcatcagcagagacaggaagcagcacaggtgaggaagacaataatttacaataaatgagacgggaaaaaggctgtttttgttcgatttatagacgcgacgtgaagaaaagacacgggagcgaaagcaacgagtgattgaagaggaggacccggatagacagaaacggttggagaggctagagcagaagcgagatgcgaaacagaagcagccgaagatgaagcaattcaaaattaagtagctgatagcgtataagcagggaacgatggcatacaacttgtaaaaatagctatgaatgccacttcgtattgttatttactcccatttctatttgtccattcctta

SEQ ID NO: 56248 - DNA, 159 bp, Heterodera glycines
atgacaacggaaccaaatggtgccgttgaccagcagcagcagcagttgctgtttgcctcaactgcttgcgcatgtcgtccgaacaccatggaatggtgcaaaacaacttcatttattgtgtttgcttctcagaggaccatctgcattgtctctgatcag

SEQ ID NO: 56249 - DNA, 307 bp, Heterodera glycines
atggcaaaagaaactgatgattggacaataaaagccgattggactcataaagtgcattagagccgcaaaattttaaatttaatctgcttacaaagaatttatttgaaaaaacaaattaataataaataattatttttaagttcgaagatgacttggcagtcaatgataaatgggcaatgagcaatttattgggcatggcatctcaactaaattttacattccaattgggaccacctggtggaaaacgtggctacatggtgcaaatctttgtatttaaaagatcaatttaaatcatatttatttaata

SEQ ID NO: 56250 - DNA, 797 bp, Heterodera glycines
  unsure (1)..(797): unsure at all n locations
atgttgaatgtagctcgaccgccaaaatatgtgtggtatgtgaatggatacattgccgatttgtacctgaagcgtggaatcacatacacatttatgtacagttttaaataaattaattttaaaatatttaatttttatttttactattcgattaaaaaagttcgtttaatgtaaatttaaaataatttttttaaataatataaattttaacatttaattaacagtttaaaaagttaattaaataaaaataattttttgttatatttaattttatttttaatattagattaaaaagttcgttattgtaatttgaaattatcatttaaaattagaattatttttttaaataaatttaattaaataaaattaattttaataatatttaatttttatttttaaaaaagtttgtttcaaatatatgaaaattattaaaattacaattaataaacgaatataaattttaacaattttagcattgaaggcggccataacgaaacagttccagagctgtataacccgttctacctatccgatagtccatacggtgcttattccaaattaaacaatgacgagaaattggtaaaaaagaaaaaaaaagttttttttaaaattttttttcggtcttagaaagtaagaaaggtaacccaagaggagactggacgactttgcagatggactgaaacaaaattggatgccaacccggacgaattcgctactttttctgacttcagagacactcttttgtgcgatttgaaatttaaatttgtanaaataattttgcaaatttacaggcttga

SEQ ID NO: 56251 - DNA, 278 bp, Heterodera glycines
atgtcttcattgtcgtcctcctcaaaattggccgcttctttgatggcacgatgctcctccctggtgattggcacctttttgagaattccaaaatattaaataagtaattatttaattttaaaattctatttttaattttgactcattttgtcaccttttctctggtcattaaattctctcattttttaaatttcagaatccataaaatattaggcatcgaaagagtgtatggttgtgagcgtattttcatggattacccagaaatttctcttgcgaaa

SEQ ID NO: 56252 - DNA, 268 bp, Heterodera glycines
atgatgggaattcgcgatagaaaaaactggcaaaactttgcagttttacgagaagcacttgcgttggcacaatcttatttctacatgtggcagatcggagctaagaaaagggaaatgagacaaaaactgtttgaattgtatccatcgttcaacagcggcgaattattccgcagagacatcaccaaaaagcaccctgctgatcaactccgacgaaaagccgaccaccatcagcacataaatcaaagaattgggcggggtggcggaatgg

SEQ ID NO: 56253 - DNA, 444 bp, Heterodera glycines
  unsure (1)..(444): unsure at all n locations
atgtcgggccaggattcagggattcaggcaggtcaatgcggccagaaaagttagcattcgagacaggaaaagtttcaggccagcgccgggacttgaggggacgagaaaaaggggtcggattttgggatttggacggcacaaccctggtgatggcgtcattattatttttttcttggcataaagccaacaaaacgcacggtgcttccgctgccgcttcgctgcgaccgcatggacagactgtcgcggtccgatcgtgcggtgactgcatcaattttttcacgttccgccggtgcgatgaagcattggacttcttgcagcggaaaatcggacctgaaaaagtggaaaattcgttttaaaaaaaaaacttggaaaaaatttggagaggacgatgatccagaaaaanatcggggggagactgacactctctgtttcaataataataaa

SEQ ID NO: 56254 - DNA, 983 bp, Heterodera glycines
atgtggcggctccgttggtccaaaacgggacagccggacgagcattcgtcatccatccagcaggtgtgttaacttaaaatcccaaaatcttcgggtttttcaaaatctcggctttaacggcaaccaacatttaaactgatggacagttaaaaaatgccaaattaataaaaaatttaaaaaaaaaaattaacttttccctaattttcaaggcctccctcttcaattgcttcggctgactcacagcagaaattgcaccaaattgtcaacaacaacaacaacactgaggaggacgaatacattctcagcagcaaacaatgaaaaattcaatttcaaatttcaaattttattatttatttttattttttaattccgaaaaaacacttctcatccctctttctcactctctcattttataatgttctctctctctctctctctcatctctcgccgtttttttttgtcttattgtctcaccaaatataacactatttatttttcgtatggaccaatgaaaatatttttttcaaattgaatatgcttaaaatccccaatatttttttttatatatttattaatttatttttattttgccaacaattttatatgaaaatgttttttgttccctctcatttcatttttttgttttgtcactttatttttattttgaaaataaatgtttccgtcaaattttggttttcaatttgcttcttcaatcccatccaactccattgatgccgtcattaaactgcttgaggatgaagctgaaaatggagaaaaattatttttaaacaattaattggtaatttgcgggtttttgtcgacttttacaaataaaagaaattgaaaattctttcaatgggttttcaatttttctactttcagtttttttaaaggaatgtttttttttgcccccaagatggcaaaaagttgaacctggattttttgaaaaaaaacacaatctctaccgaaaaaaaaccgacaaa

SEQ ID NO: 56255 - DNA, 1212 bp, Heterodera glycines
ttattgcaccaacgatgttgggaatatgatggcagctctggtcgcctttcgccgggaattcttcgaaattttcacggcgccaaaggctacgttgatgggattgacgacaaggagaacccacgaccggggattgagtgttgcgtgagtgcatgaccatcgcgggggcatgcatgcggcacttccgcaccaaccacctgcccaacgagcacttggccattgtgcccgagcgcggctatgacaacgcgcagaaccaaagcctgctcgccttacgcttcttccactggtacgccaaggagcatggagtgcaagtgcagacagcccacgcggctggaggagagaagcgcattgggccctactcactggatgggtggattgaggcggaacgacgcgcaattgaagtcaatggtagctgaattttatgcacaattattttaaaatgtgctattttaaggctgcacgtggcacgggtgcaaaaagtgttaccccaacgacaacatgctgctactgggaatgcgagatccatcggatgctggagcggagcaaagaaatgcgcaaggcatttgaagactatgtcgatgacggcccgctggtgatccgcgacgcgtttatgggagggcgaactggaccggtaaagctgctgcgcaaagctgggccgggagagagaatctcctattatgacttcacatcgctctacccgtatataaagtaagcacagttaaagttataacaaattaacattgtttccttcacagcttcaccacctgctaccccattggcactcccaaagtgcatgtgttgaaccatgaagtggagtggcgcagtgcagcggacaacccctaccctttggcattgctcaaagtgtgggttgtgcctccccgacgcgtcgacgtccccgttctgccagtgaaagttggagagcggctttgcttccccctgtgcatcagtagcgccaaagagcacccgacaggaggagtggacaacgactaccactgcgagcacaatgacagacagcgggggtgggtgagcacatgcacctccattgagctcaacgaggcgttggacgtgggttacctcgtcacaaaggtcttccgcgtgttggagtattgtccgagagtgcgcagagcagttcaacatcaccatcgacccaaccaaaatggcggtcaacaaagggaagcggtccctggccaagttgtgtttgaacaacttatgtga

SEQ ID NO: 56256 - DNA, 573 bp, Heterodera glycines
atggttcttgtaagcacattttgcgctcagcttctcaactgccctgtcaagtcattgcgcgaccggctcaaccacccagaggatcgggcgcttgtgctgaaacacatcattggacgcaaagtccgcaccacctacaacgaccgtaatggattgaccaaaactttcttcgtcactggaatttcggcacaaggcgccgcatttcttcctgcatatgggcaattgcgcaaccctttcaacatcaatgtggcggcgcatttttatgcacggcaccgcataaagcttcacttcccgtatgcaccgtgcataattgaacgcttttcggggggaggggaggaccggcacaacccaatggaacttcttgagctgattgatgacaacatggacatggacatcaacaacaacgagcattggctgggccgtcttttcactgaaattgacgacaaacaatcgtcgtcaaactcatccgacacaacaatgcgcctagtatttgagggagacatggatgaagacagcggacgcaatgaatgctcacagagtactgtaccgtatattagttttgtttttgctcactaa

SEQ ID NO: 56257 - DNA, 428 bp, Heterodera glycines
atgaaaagacgcgttgctcctcttactgctgctgctgtctctgctgagcaacatcaaataattggttccgagtcgcccaagccacatgaagagacgaccaaaaatgttgagccgaaggatgagttggcaacgaagaaacgcaaagtggacgaccgagagttgtggaaattggcaaaaggcaaatttttgctgaccacctatttgtgccatggtaataattaataacaatttcatcaaattttaatttaaatccataaattttgagatgattggaatcgtctgtacaacaaccagcagaaagtgaagcgcctggagggggaccgttttgccttcggctttgaaatgtgtgaggaatgcgtgtgggccaactgccgcgcaaccgaccttttggcaccaatgaagaaaaagtgaactttgcccaaaagaca

SEQ ID NO: 56258 - DNA, 963 bp, Heterodera glycines
atgtggccgccgatcattcgctctctgaaaggggagcgcagctaccgcgtgaaggctgttttggcgacctacacccatagcacaaaaaggatcggatattacgtagactggcttcgtaagtggttgggatgaaaattaaaatttttttttcatttcttctcatatttttgtctctatttgtttggttattgatgagttgtcactgaatagctcctccataatcaaacagtccggggtttgaatgtttgttgccgagttgtctttgaatagctccgcgcaaacgttttaagttccgttcctccttttcatctctctctcttctcgctgtctctcaattttaaatttatcacagtcctaaacactgtttattattaattaggtgcgaggggccaagagagttgggtgcagagcgagtcatgtgattgtatggaactcgctattgacttcacaaggaaggcgaatgtccacgatgtgttgcgtggactacttggcgagccaattcccgagagtattgccaaggaagtgatggcgagtccaaaattcgtagaaggtcatttttttttttgaattttcaaaattattctttaagtttgtaatttgttgggccgggaccccgcaacagtgctgaaaattgacgacctgaacatttcatttgctccatcgctcaatgtacaggacattccgtacaaaaaagtattagcttattaaaaaaaaaattttttttttaaatttcattttttttttccaggccattgcacagttgggcgaatttgtcaaaaattgtttggaagcgccggcaccagagcaaagtgacagcgaagacgaatgaaaagaaaaggctaacaataacaaattcaatcatttttaacatttctcaccaatttgctcttacataacacattcctcaccaatgtgctcttacaaacatttttcaccaattttacaattttaaacagaaataaa

SEQ ID NO: 56259 - DNA, 859 bp, Heterodera glycines
atgtcgtctgctactgaaaaaatacttctttttctgttcgtcgttgctcaacgaatcggcgatatggtaaaaggaaggtgagggggaataaaaatgaataatttctagcccaaaaatatggacctttgcttttttagctgttcaatccctcaaattgttccattgtccgaatacatttttttttcatttacagccccccaaaatggaccgtcgcgtcagcctggagctgctcgacttgcactgcaaccggttgccggacgaactgttgcggtgccgcgtgctgcgcacgttggacatcagcgggaacaaattgacggaactgccgctgaacattggcgacctgcaaaacctggccgagctggtgctgtgcgagaaccaaatccggcatttgcccagctcagtcggtcggtgatgcctcatcaattaataatattatatttaaaaaatgtagagctgaattttgcaaaaacccggacccggatttccgttctatggggtttttaaataaaaagtgatttttgtctttctttttgggaacggtttgtttcgccccgccatttttcctcgcataaattaaaattaaaacaaaaaatagatatttttttttgatttgttttcagctaggttttttcctaataaaaatatttttttcattcttaagaagggaaaacgcattgcaccttttttaaaaattcatggcccccatttttgcaggccaattgaagcggttggaagtgctgaagtcgtccaaaaacaatttgacgctgctgcccccgtcaatttgttcacgtgcggtgctcaccgatttgattatgtgcgacaatcaactccagcagcaggttcagcaccaagggcgtag

SEQ ID NO: 56260 - DNA, 951 bp, Heterodera glycines
atgccaccaaaacggagacgctgctgcttgaatcagagttgcgaggattgccgacgtaagcaagctattaaagcaatagaggcagacaacatacgcgcaaaggcatgccaaggggagcacgaccccgcttgcgttgtcaatttgcgcataacaaatccagagctccaccgcgaagcatacgatggcatggatgccgtcgtagagcgaatcacggacggttagtttttaatggggattttcaaaagagaaattttttaggccctattgatgtccattgcccggactgtgatttggtgtatagtcattacgccgtgaagtggattgggagtgaacgcgactggcatggacttgggccaggcgttacaattgtgggcaccaatcaactcgtaagaaaaatatgaaataataggaaaaaagttaaaaaaacaggactcaaacgatgtgcgtgaatttgagacggaaaagagagagagagagaaggaggtccatgatggactaatgttgggccgggtcaatgaaaacattgacctgctcaaccagatcaacgagttcgaggatttcgctgctgacccgggacgaatggcgaagaaaattgtgttcgagttagaagaggaggaggaaagggaagaggaacaagaggaggagagggaagaagaacaagaggaggagagggaagaggaacaagaggaggagagggaagaggaacaagatgaggagggggaagaagaacaggttgggacatcatcagatgtcgggaataaaaagaggaggaagaagaagaaaaagcgcagcagaggtggcaaaggtttccgggattggatgaacaaggaaaaggaaaaagaggcaagtgcctcgggaaatgatgccggaggtgaggaggatgaaaattctcatgccgtttcaatcacctcgtcaacagcaaagaaagcgataatggatttcgcactctga

SEQ ID NO: 56261 - DNA, 1346 bp, Heterodera glycines
gatgctccgtcgggtgatccttttgctgccgacccgcctagacatcccgcattgatcgtcaacatgcaaaagccatttaacgcggaaactcccccgtcgttgctgatcgacagttttctgacacccaaagaactgttcttcgtccgaaaccacatggctgtccctcgggtgaacattctctttgatcgatagtcttgaatttaaaattaatttagcgctttcctatcaaaaaatttccaagtttttaacactttaattttagacaaatgaagaaacgcacaaagtgcgcatcgatgggattggtgtggataagcaaattgtactttcgcttgaccaattgcgcaacaatttcgagcccgtttcaattgtttccgccattcaatggaaattttttttttgcagaacatttcacttaaaaaacgacagcacaggaaaaatgctttttgaaattttatttttttttcgtcgggaccacaattccacaccattgccaaataatgagtctaacaatcaacaaaatgttcagatttatcaatttctaatctatgaatataatgaagataaaaacattttcggtcattttgcgtgacaattccaacaattaaagcaataaaattaatttgtatctgttcgcaacggtgaaaagcgagtcgtcaaatatttcggtcgtattgtcaaatgcattcatcccttgaatcatcgttccggcaagaccaattggaattgaacacgacttaaagggaaaaatatttttaaagccgtgaaaaaattaacacgtcttttcgtgaaaatctgggttagggtcagtcggaaatccgggtggtccaaataactcttatgatagaaaatactaattatttagaattagatttttgcggctagaatgcgttttttatttcttgaaaaaagtttaattacaaatctagattaacttagtgttgtggaattactttggcaaaccacatacggttgtggataaacacaaaacttcgccaaaatgatcgaccaaataagtaatttccgaaggcaaatggctgaccaacattggatttagacaagatctgactaaggtcaccggttccaccgagagcgtacagttggtttctgcaagaaaaataatttcgaaaaattttttataaagtgaattatataaacaaaaagtggaattttttgaaggacacctgggttgctagtgaaaaaatacattgaatgcgcccacttgttttgagtgcccagtaataccaactttatcgccttttctagggcaccgcggtgctgttgaatctgtgaccgggacaaagccagacggtttcaagggtcttcttcctgttcatcaatgcgagtga

SEQ ID NO: 56262 - DNA, 852 bp, Heterodera glycines
atgcaccaacaaaaacaaagacagaagaaggagaagaaaaagaagcaacaacaacaaaatgtaaaaataataacaacagcagcagcgatgcatttgacgacagctcatttcactgcccgtacattttgacgatggatttcaaatcgctcggttcgtttcagaagaatgccacacaattttttttttttcaaatttgttatttgtacccttttttcttacaattatttagatccgtcgttggcacttgggtttttgacacgcgacttggcggagtacgaggacctagtgcatcggcttaaggtaatgccgccgccgtcccaattgttaagaaagagggaattggtttcgaacatacatgtgcaaggggtgtctcagcccaagggccatacgacggacgattgggacagggggggggtgtctcgggaccgatttttcatacgaaggtggtccattttttctccggcgattaccttttttcgttgcttaactactttttttttgcgacgcgttttttccaaaaaactttgaaagggggggtggggccggcggagtcgagaagtaccgccggaaaattttttgaattttgaaataaatttttctaaatttatggaataatttctcataacttcttcatacttgctagattatagtaacactttcaaacatgactaaatatgctattaaaaggcattttataagaaaaaacactgtaaagctaaaatttattcatttttagcgaaaaaccaacccgaaaacgaaattttacttttttttttgtttatttttgacctaaaatttaaaaatttttagaaaaagtaacattttattccatatttttcgggaaaaatttta

SEQ ID NO: 56263 - DNA, 782 bp, Heterodera glycines
atgcgtcaattatccacagtgtgtttaaaaaaccaagttactgtaacagggagttttgtacaaatacagtatccaatgacgcattttctggacaccaaaattgatgtgaatggtgctgtcccttcgataagtgatggaaatgttgaagaaattgtaagggattttctcaaagttcgcactgccaaggagcggactctgtttttgtgaggaggaaaacaattaattaataattgatgtaattaattaattttggtacgaattaattaattagggtaaataattaatgtgtcgtgaaaggttcatagccagcgaaagggccactgggctgaatttggccaaaatggctcaaaaaccgagaccaaaaaacccggaaatttttcaactcgagatttttcacgaaaaatcctatcttttggaagaaaaatttcaaaatgtttgcatcagtttattttatgttttttaaaaatattaacaattttctatcaattttagaaaattttaaaaaattgtgtatttgcatttgacccattgtttgtccgtttatcaaaaatgaataatcaataacctaattatcattatactaattacctcatgggacatcataacatacagctaaatgaaggcaaaatattataaaattttatgtcgaaaaatttaaaaaataataattttcacctgctcagcacgacgatggcgaggcaagtctctcaattggtcgccagtgtgccatatcacaacggaaacggctttttcacttgaatttttattgtgaaataattaaa

SEQ ID NO: 56264 - DNA, 146 bp, Heterodera glycines
atggctatctctttttttgagaaattttctatgcaacaaacgctctcgaacatgaaacgaagtgcggtgcgccatggccattttatttttcaaataatttttatatttaatagatattccagaaaaatggctatctctttttttga

SEQ ID NO: 56265 - DNA, 146 bp, Heterodera glycines; identical to SEQ ID NO: 56264

SEQ ID NO: 56266 - DNA, 146 bp, Heterodera glycines; identical to SEQ ID NO: 56264

SEQ ID NO: 56267 - DNA, 146 bp, Heterodera glycines; identical to SEQ ID NO: 56264

SEQ ID NO: 56268 - DNA, 414 bp, Heterodera glycines
  unsure (1)..(414): unsure at all n locations
atgagccgaatttacgtggggcatattccatacgaagccagggaaagggatgtcgaacgcttctttaaaggatatggacggattcgcgacattctgatcaaggtctgtgtgatagcagcacatccattgggcgggaagagacagtttttaatgcatcaattgcattcttctccaagttcaatttttcgttcttagcgcggctatgctttcgttgagttggacgatcctcgtgatgctgatgacgcggtgtatgaccttaacggtcgctcaatgatgggatggaggntcgttttccattttgatcgcgagttttaatcatcatttcgnctaaaattaatcgttttagtcaatccgtttttatgtngtatatgtataggactatctgactttttctgctgcactctatataataaa

SEQ ID NO: 56269 - DNA, 775 bp, Heterodera glycines
atgccttgtggtgaaaacaatatttcactttcactccataactttgtgagttcggcacggatcgagaccgggataagaccattggaaagagcagctcgagctctacaagaaggtatggaaagaaaaaatagttatttctgggactttttcagaaatcagaattaattctccaatgtggcccaaattttaggcccccagccacagccccttgcttctcccagttttaagtcttggatttgtcaaataaattcaagacttcaaattaataatcaaaaattctcttaaaatttttttgaacccaattcaaaaaaggaaaaaaatttgcagtcaaaaaattattcgaatttctccaattttgtttccataatttccgaaagttattcggtatcataatgccaaaacaaaacgaaatcgttttaaaatattcctttctggacttgacttggtttcttgatatcgaagctgttttctacgctatttctaaaacggttataccaaaccccagatttttgaatccggttttcagaaaaaatgccttgtggtgaaaacaatatttcacatttcactccataactttgtgagttcggcacggatcgagaccgggataagaccattggaaagagcagctcgagctctacaagaaggtatggaaagaaaaaatagttatttctgggactttttcagaaatcagaattaattctccaatgtggcccaaattttaggcccccagccacagccccttgcttctcccagttttaagtcttggatttgtcaa

SEQ ID NO: 56270 - DNA, 513 bp, Heterodera glycines
atggttgagatgggaacagaaattcaaacatcccgaaatgaacttaaatcttttcaagaagaagtagataaagccaaaaacataacattggagcatgtggaaaagaatgacatgaaagaagcaaagaaatcagccgacgtcgcaaagggaatcgccagacaggcaaagaccaaatatacatcaactctcgaggaatataatgataaatcggaaaagggttttagcgggatggtggttaggcttaacgaggcgctcggtgagcattttaaacgtaaggaaattgaaaataaagaagtttcagaagctgaaaaagggccgcaaaaacgagagagattagccaatgaggatgttcaatttaactacgacagtattgatcaaaaatttattgtctatctttcctctgccgtcacccatatagatttgtcaaaacacctcgcatatgttctgggatttaagaatacaaggctatttcacgcggaagaggcgacttatatgccggatttgacgggaggt

SEQ ID NO: 56271 - DNA, 215 bp, Heterodera glycines
atgaattttttatttttatttttaataaatgcttcagcaattaaacatgttcttgggaatgatagcatctgtggcgaaaacgaagtttataaggcggacttcgaaaatatgctcataaaattaatcggtaatttttgaaaaagttttactttattttcttttattttttagatattaatggaagcagcgctgaattggagaaagagtttgggtag

SEQ ID NO: 56272 - DNA, 621 bp, Heterodera glycines
gcaaaaattgaactgttgcgcagcattgaggcggacctgaaggcggagcgcaagctgcgcgaggagcgcaagaagcaaagccaggaacgggagcgcaaacagcttgaggagcaacagcagttggaggagggcggcgcaagtggtggcgacgctggtggtgttgacaaaatgccgccaccgccgcccccaccccgccaactcgaggctgctggtggtggtggcaatgatggcattattggtggtggtggtggtggtgaaggaggtggtgttgctgatgaaatgccgtcgaaaaaggagaggaatttgcatcgatgattcattcaatccgttttgttttgttgtaaaaatatcaaaaaaatgttattattatatacctactcttttttcacaccattcattcacctccctcctcctctgccctctctctcctcacaatcagcaaagcaaaaccatcatcatcatcaagcattttcttttttgtttctttttgccaaagttttactttttagacacttatatgcacagtgaatgataaagcaatcaaggcgcaaatgtgaatcacatggaaaattgggccctatgttatttaccaagacacaagaatagaaagaatgaaataaa

SEQ ID NO: 56273 - DNA, 864 bp, Heterodera glycines
atgccaccaatttcacgtgctattggcgcctgcgtgcaccggcctcccattacattgaggtcaaactgttccgtctggacgggttcacatgtgagcagtcgtgctacaactttgtcgagatcaagcatggcaatttggccaattcgggtaaaattggacaacaaaatttacaaatttaaattcgttgcgttagaaaaactcgcttatttttgtgcgttttttaaaattccaacgcttaaacgttaaaaatttccatccattcccaacaaatttaaccattttcatcgcagtcaaatgggatttctgtactaaattgtcgttgaccaaaaatcctaatttttaataaacttgaaaatcagaaattcataagtaagcaccccaaattaaaaattctcagcctgctgaattttttttctccttgtttagataaaattttgttagatttaaaaaagaagtactaaaaaatcaaaaaattattttgattaacatcaaaaacaaatttttttaaaatttctatttgattaacattttcttaataaattaccttttctttttttttaattttaaatgtttagggccacgattttgttgtgggctgccaaccgagtcgatgttcaccgaagtgaaaggccatgaggtgatcatcattgccagtgctgtacagaagggcaattattccgttgggctgacctacagtatcactgaataatctgaaggattactgtgaccattttattagcttaatcaattcacacaacgaaaaacatctaattgtactgtatttgtgtaattgctatttttgaccgataattttttcaatttgaaaatgcttaaatgtatacttactgtaaagcttggaataaa

SEQ ID NO: 56274 - DNA, 680 bp, Heterodera glycines
atgtccaaatttgtgattattgcacgttttctactgccaatcgtgctgttgttgatcagcagtcgtccagtctcggctagttatcaggacgatttggacgatgatgacgaggaagtggattatatggctggatacacgtaataattttgtacattatttaaaatcttttaaatctgtcaaaatgtgcgctttttctctaaaaaagagatataactttaagcaaaaacaaccaaaatttaaattcaaatttaaggaaaaaatttgaaatttgcctctttctgagtaaagttgtgatttcattttaaaaaacccattttggcggtttcacaaacataacctctgatatcctgataaaaaagtgctaaagaaacaaaaaataaatccaaaagtggtcgttttggtgaaaatttttcaatatttttgagattttaaatatttatttccattataaatggcatttttgaagggaggagcaaaagaagtgttgtacggactggctacaagcagttcaaaagctgtttccaagaatgctacactaaccagtcacagaacaatgtgtgcgtgctgaactgtcccatcgacttgggcatctgtgtggacaaaaactgcagcctgactgtgtgtgtcctcggcccaaggatttcgggtcagtgccatgagaactggctgacaaatgcgca

SEQ ID NO: 56275 - DNA, 787 bp, Heterodera glycines
tactcaaacaattatgggggagcaaaaatccaacgcagaattaaagtacaggctatagggaagctattcccgaaggattcggtctccccataaatctgggcgcatcggttcggggggactgccccgaaaacaaaaataaatcgattttttcaagtgtccgtttggggtactcaaacaattatggggagcaaaaatccaacgcagaattaaagtacaggctatagtgaagctattccggaaggattcggtctccccataaatctgggcgcatcggttcggggggactgccccgaaaacaaaaataaatcgattttttcaagtgtccgtttggggtactcaaacaattatggggagcaaaaatccaacgcagaattaaagtacaggctatagtgaagctattccggaaggattcggtctccccataaatctgggcgcatcggttcagggggactgccccgaaaacccaaaaaaaaattttttggataaaaattatttaaatgaactgactagataatatttaaaataggttatttctcttcctttcagtatccctgcaaagtttggtgcgcttctgatcagtttctgaaaaaaaagttaagcctaaactttttggcctgtttaaaaaggaattaaaaatttttaaaaattttattcatctccctttttgatagaaaaagcatcagagtgcctaaactaacatgtaaataaaatttggtgcgtttcagaaccctttctgaaaaaatatttaagaattaattttgcaaaaaataaataaaaacgaaagact

SEQ ID NO: 56276 - DNA, 123 bp, Heterodera glycines
atgaactcattaccattcctctccctgtggttgctcattggcacccttttgctgctgacggcttttgtggcgaattgccaaaatttgttccagcccagccaagtgtcgcttggcagtgagaag

SEQ ID NO: 56277 - DNA, 803 bp, Heterodera glycines
atgctggtggcggtgcagcggcactcgctgttgctccaactgttgccatgtctgcgctggttcaacgagtccgcgctggtcgagctgttcttcaggtgggagcaaatgcatttttaatagccctaaaatttattgaaaatctaaattactaataattcaaaaaatattatatttaattataaaatttatataatttacgaataattctcgaatattttagcacattgctcggctcaatccctatcgaaacagtgatcccattcatcctgaacaccaatttgccattgaataagctgtaagacatttttgaaaaattaatttttataaaatttttgcaattttttagtgatgaacaatgtgacgggaagaacagcgccaacaccgacgcaacaacaacaaccacgaccacaacaaccgctgaagcaacaatgtctgagcagaatggtggcgcgaatggcacgcccgaaaatggagacgaacaacatggagacagggcggatgttgcggtagaacaacaccgagcagtacaacctgctggagcaggacaaggactaccttctgccgcggttgcggttgcagctgccgcagttgcggaactgttgtccttaaacagccctgctgggcaccggaaggaaaagcatgtgaaagtggagcagtcagaagcagttgattctaatgatgatgataaacgtgacggatgcgcggtggaagatgattaccagcaaagggacaagcataattatgagcatgagaaggaggagaagcaaggacagcaggagagcaagcagtaccagcaacactag

SEQ ID NO: 56278 - DNA, 1496 bp, Heterodera glycines
  unsure (1)..(1496): unsure at all n locations
atggaatttctaaatgatcatacccaagcacgtgaagacatagaaagaatggaagaatcgaaccgccaaaaccggaatttcccctctaatagaccaccccaaaacagagtacaaagacaatactatccaaatttcccgcacaatcaaatgaaaccaaacccacggaatcaacagacttccacaccttttccatacacctccgcattcacgaccaaatcaaaaccagtacgccttgcacagtttaagccaaatccaacacaaaatagaacccaaaataaaacattttgccgcttttgcgagagagaaaatcatgcaagtaaagagtgcaaaatttattcaacccccgagaaacgaaatgaacgtgtacgtgaactcaaactttgtctaaattgtctaaataagggacatatggccaatgaatgcaaatccacctatttatgttttaattgcaaatacaaacataatactctcctttgtacccgcaaacaaactcagtacaaaccgaaagagcaaaaaaccagagtgaatatggctaaaaattacgaaaatcatgaagagacacaaacattcatgacaatggattatgataaaaatttatctaattatgaggaagaagaattacttatgactgctgaagtaaactgcataaatcccgacaaacataaagtaaaaaaggaaataattttatttgataatgggtcacaaaagagctatataaccgaagaatgtgcccaatctcttcaattaactacgattgaggaaaaattattagcaatttccactttcaatcaaaataagccaaaaatcattaaatcgagactagtcaaagttggcattaaaacattaaaaggtgaagtggagtacataacactacaaacagtggaaaaaattactgatgttacaaaaatggttaataaagaaaatgttgatgtactcggagtaaaaatcccaatcagtcacgcatctcctcaaattctaattggaatcgaccattattggcatttcatgttaccaaattcacaaattcaattacttccatcaggattttactcgataaatacaaaattaggaaaaatattatcaggaaaaggaactattgaggacacaaattgtaactcagtgaccgaaaaaagaaaaaaagacgaaacgaaccaaatacttcagaaattttgggaattagaaaacattggaattatcgactcaccacatatgacggatgaagatgcagcaatgatacactttgataaaaatgttacatttaaaaataacagataccatgttcgatggccttataaaagagagaacccgaatttaccaacaaattttggattatgcatgggaagactaagaaatgttgttaaacaactaattaaaaacaaccaattcacaaattatnacaaaatattacaataacaaatatatactaacataaattaaattnctcaatttaaatcaaataatttacttcattatctcccacatcatccactaataaa

SEQ ID NO: 56279 - DNA, 622 bp, Heterodera glycines
atgacattccaaaatgtgccttcctctctctgtcaggagcgtatgattgatgcgcaaccgttgccaatcatttttggccattcaattggtggcccatcatcatccacctcgggcggcacaaattgtggctccgttggacgacgcgtgtccaatgccgggggcaaaagacggagcgccggcaccaacaacaacggcaccggcacaaatcaccaacatttacggcattcattgagcgccatgctgaacatctcgtcctcctcggtttcctccgttgattcgtcgtcgtccctgttgttgttccccccgctttccgcgtcatcacattcagtatccggttcatctccagccaaacagcaacgacggcaccaccaacaacaagcagcatcatccagcaccgcaaattgttgtgccaatgcggacgacggcatgggcgatgacaaaatggaagaccatcaaaatggcaacaaattgttggccaagatggtggtagacgggcaacagcagcaaacgaaccatgccaatggaaaagggacggccaaacgggaggcggacgagcaaatggaggaggaggaaggcagcagcaatgggggcgaaggcccacacgaggccgcgaagaggccga

SEQ ID NO: 56280 - DNA, 618 bp, Heterodera glycines
atgaatgaaatggccgaactcaaagctattattaatcgcctatctgcaattgagaaactaatttcaacaaacaacaacaacacattggcgaccgaaatgactgcgcagttcagcgccatcgcggaccgcctcggcgaaattgagcgcaaattaaacaacaacaacaatggaattggcagtgcggaggataaggagcgaaaaaggagcctcgtgctcattggtcttccggaatcagaggaggaagtgccatcgcttcgagcgaaggatgacgcgaaaaccgtggaggaagtgttggaccgtttggacgtggaagtgtgcccgcaaatggtctacaggatgggcaggaggagtgacgaaaagaggaaggggccgcgcttggtgaaggtggtcctgccggcgtccaccttccaacgcttcgcgctgatgcagtgggggcgtcgtcggacggagctgaagaagagggctggttgggagcgtcttctggtcaggccatccctgacgaaggaggagctggaaattgaacgagaacagcgccaaaagaagtggatggaatttggacagaagaaaacggatgaaaacatcacgacgcgacgcggaggcaatgaaaaaaacttttga

SEQ ID NO: 56281 - DNA, 696 bp, Heterodera glycines
atgcctggccaaagcttccaaaatcgaatcattcaattggtcgctgaggtaaaagcagaggcgagtctgaagcattttgacataaatatttttcaattaaaatattaattaccaaattccgaccaaacattggccgtgacataagcccaaagcacagttcggagtttaactgaagcggattttggctaatcaaagaaaaaatggcacaatcacttggtcatgggatgcgaaaaactccatcaaacgttgtttacagtcgcaggggagaagagaaaggtcggcatcgaacaccaaactgcgctggcaaacggaggccagacaaatgtcgaacaaagaacggaccatcgcaagaggaagtgatcactggtcggttgaaggacaatcaattagtgatggacaacagcagcagaatggaagggaaacattcgcaggcgaattactcgcaaatggactgatcaattgatcagctgggcaccccaaatgattgccatcttttacacaaattaatttcaaaaatcttttctgtgctagaacggaagaaaaaatgatatctcggagatatttcagctaattttgatcagaaattcccctcacaccactttttttctttcttcttgttcaattctctgccataaaattgttttattttgccttttctcatcaaatgtattttaaacaaaataattagctaataaa

SEQ ID NO: 56282 - DNA, 481 bp, Heterodera glycines
atgcttcagactcgcctctgcttttacctcagcgaccaattgaatgattcgattttggaagctttggccaggcatttcttaatcacgaacttttcagttaaatcgctcttttcagttttaaccaaaaccttcgcattatttcgatcgtcgaatgcccccgggtcactgatacggtaatgcatttgccaatatcatttgtaaatatagatagcatcagttttcattactctttttaaagattgtccgtcaatttaaaaattgtattaagcaaaataatgtattaatttttaatcataaattattttttaattaattcttttatgattttttcaattcattccagggaattgtcagcgtcactctccgccagaataaactcgtctgcctcgagttagtcggaattccgctgctcacttccaatgcgctcaaggctgtgaattcgaaccgtctgagaagcgtcgatttgagtggatgccgaaag

SEQ ID NO: 56283 - DNA, 2605 bp, Heterodera glycines
atgcgcgagccgaagcgccgaaccgaatcaagaccggaccaaagccgacacgccgaagggacacagaatcgggatcagttcccgagggtgttcatggtcagaagcaacccctcatcccaacgacccataacacctggggcatccgcccttcggaccggaactcacgcgccacaccggaaagtggctgatcggaaccggaatcgacttgcccaatctcgtgggccggccccaactgacaacggctgttctctatgccaaaattggggccaccgtccaagcaattgcccgacttatcccacgttccaagaacgacgacaacgtttcttcgagcaacggcggtgtctccgatgcctttcttctgatcatattgccagttgctgtccccgcccaaaagcatgccggtggtgccagcgcgacgaccatcactctttggtctgttgggtcggaccagggaaaccaatcgcaattcgtgagccagcgggaccggaaacccgcgaacacattgggtcgaaaccagtggaaagtgtcatgatggtacaaactgtgctcaattctgagagcaactcccgcccacccgaggcacgtgcaaaggccaagcgaaagaggccgaagcgacgacggagtcatctgaccaaacaatcggagaatcaaggggaacgatcccctggcactgatctgcgagcattcacagcaatgggtgagagcttgccggctttcctgatggtctgccccgtgatcgctgccaatgacgacaccacgcggcagtgtcgaaccgttctgctcatggatcccgggagtcaggtggattatgcccaaacgattctgacaaagcagctcgaactcccgaatgcgggatcatccccgctggtcgtgcaagtgttcggcggatcaaagaagaaagtcccgtcggccaaacatcgagtgaaactcaaacggttggatggcggatgggagcagctggaggtgtcatccgtaccgaacgtctgcacccccattcatacgaagctggtcgagccgggaacccatcccggcctgctcaagccgatggacgcgacggttcagcctcaaatcgtgatcggaattcgcaagttttgggacttggtgatcggattcaaaaaatcggccgagggggcctttcttgtcgacacagtgttcgggaccgtactttgcggagagcatttcggggcgcccttggggcaatcagtgccccgcgacaccatcctcatggcaataagcggagaagaaaacagatggaaccgcatgccagcctcatcgggagtggaagcagcggacaaatcgaaaccgtccatttacgagaacgatcgtctggggattggtcccctcaacccaacgccaaagaacccgcgcgatcggaaggaccctccgcatgtccagcccgagaagcgatgcagggtggagcagcaacggaccaaatgtgagttaccggaatcggaccaagacggaacaacagaaccgtgcgaaagaggcctcagccagtgcttgctcggggcgtctctgctgtggaaggtgatgacatgggtgactcggcacccaatccgagtttttaatcgtttgacgggtggggacattcccgagccgaccgccgatcaggtcaaaggtcaagaacgagtgcaattggccagacgagcccgcgcagccgctagagcttggagaaatgccgaacgaggacgggcatccaggcccggggccgccatggcactgcttccgctgctttgttttgtcgcccttttttcttcatcggagcccatgtcggtgatgctccgctcggaggactgcgcaagcacgccatcgggattcaaatgttccggatccgcggccatgatcatcggcccggaagtcggtgaactcagggactcagtgaacggcatcactccaaaggggattggtcccctgtgcctcttccttcaatgggaaggtggcatttcgactgtggctcgtcttggcccgcctcgccgccgcccccaatgtcgcgaaagcgacgagagaaaaaggatgggctttggatggccgggattgttcccggcggactgaaggaagcagggggcccgatgccaaacagtgattaatttatgatcaccatcccccatttttgcctccttttcccttcctttcacttcaacaatttgccttccccccccccccctctttttccgtcttatccaatttgtttaccatttcccttccttttgcttctcagcatttctcatttgcatttttgtgcccccgctcactttcatttcaaatgttttcctttgttgccccgccgcggggcatctgctctcaaatcgcttcttttgtcccaattttttgcccgtcttttctcaccattcaattcaattcattttgtaccttgggccccaatgtcatcgggtaaatgttcttcccaactttgtccccgtccgaaatgcccattcacgtgatttgcatttctcattgtccggcctatttaaccccccgccggtaatctctccggcgttcactctctttttccttcggtcatctttcccttttctttcgtccttcccttcacttggtctcccctttaacacatttttcctccaaatatgtgcccttccctttggca

SEQ ID NO: 56284 - DNA, 494 bp, Heterodera glycines
atgacgacaaaaacagcaaaagacgagaaattgcgaaatgccaacaaaaagtgggcacggcaaatcgacaaaataacgcaaaaggacgaaatgggcaaaccgatggtaaggcaaagcgaagagaagaaacagttgcaaaaaggcattggcattttgaaattgacccaaaaagcgttcattaaggtcccgctaattttggtggacgatgagtcaacttccgagggcatcaattgtttgaacagtgaaatttcggaaaaatttttgcaaaatttcttttcggtgtccaaccgaatttttttctgccacggtttcggcgtcgtttccgcctcggatttgaaagaacggcttcgatggattataagagataatgcgctgctcgcactcgaaaacgcgcacccccaactgatgcatttcggtgggaaaagcccaatttggacttgcggcatttcatagtgaaaaaatatcttcaactttattgtcaattattgacggga

SEQ ID NO: 56285 - DNA, 1296 bp, Heterodera glycines
atgcaaaaggcgtgcatttccccggtgagcacacttctcaatgaaggtaagtaagtgtactcatcaaatggtgcaaaatttgcaaaatttcctggcaaatcaaaagaataaattttcctttattaataaaaaaattttttcgttttttcttacccccctctcctccggttttttgcaaattcaattgccaacttgaaaatttctagtcgaactggcccgcatctttaatgaaacaaagtgcaaagtggtgttctgtgccgattctctgctcgaacgaattttggcgactcgtccgctttgtccccatttaaaggtaactttgctttttcacaattatttcactttcggcctttctttgtccacttttagtacgttgtgctcatttccaccactaattgtcagtccgctgtttccttgccaaattcgcaatttcaatctgtttttcattggtccgatgccgtcggttcatcgaattccgtcgatttgtcacgaccattgcccaaaattgatgtcgaaaaagacgtgatgtttatgccattttcgaggtggtgcttttgtatttagtgtttctatcacttaaatttccctttcagtggcaccaccggtctccaaaagggagtgatgctttcccatcgcaacgtcggcacaatggcacgaattttcagcaggcaaagaaatgggatgaattcccaaatttaccccccccccccccccttttagtcatttggaaaatcaaatgctgagaaagatggaaccgaattgggattggagcaaagagcacatcatgttgcacttacccttctatcatggtttttgagggggaaacattttaaaaatttagaatttatgtccggctttactgacagcggcgagcagaatttttgaataataattggtacaattcccatgtttcccttttttattttcggaatttgtggccttcaaaatcgaacgattaagaaatctattcgctgtccaattacattttgtaattcgtccgtttgtcagtttatggcttcgttctcggcctcaattcccttttgtgcggcggttcgggcgtcgttttcggtcgttttgacttggacctcttctgcagaaccgtccaaaattaccaagtgcctttggcatggcttcacacgttttgtctccactcttttccaggtcaaagttgccttcttggtgcctccaatcctcgtccttctcgccaagtcggccgccccttctcgttacgacctctcatcactgaaactgattatgaccggtgctgccccggtgggcaccgatctgttggacaaa

SEQ ID NO: 56286 - DNA, 95 bp, Heterodera glycines
aactgacaaacggacgaattacaaaatgtaattggacagcgaatagatttcttaatcgttcgattttgaaggccacaaattccgaaaataaaaaa

SEQ ID NO: 56287 - DNA, 556 bp, Heterodera glycines
  unsure (1)..(556): unsure at all n locations
atgggattacaaggtgattnatttgcattatttattatggtttcgcaattattctttcggtcatttattttactgtgttaatatcttgttttatgtattaacttaagctttgatattaacttatattattggaaattttatttccgtacagtaaactttgtaaaatataagtaagtttttttaaaatttttacttaatttatttttttataagaaaatattttgtaaaagtgtcaaatgtccttgttctttaaattttaaactttattcagatataatttagtttaatatcatgtaaacagacagcaattgaatttatggcacccgctgacatcaaaagtcaaaccaacaatgagcaagaagatgatgattttggttatgccaaataataaaagaattccaattttatttatttttatatataagtcttttacatatagaattatgttataatagcataattgcttttattaatttttttaaaattaattatttattaaattagatgggatccaattaaggttggttgtgtcacgaaatttaatattatttaatga

SEQ ID NO: 56288 - DNA, 1022 bp, Heterodera glycines
atgttcaatgcgtcgaccacagctggtggtgatgaatgtggaacaaatggcaaaatgaaaattcaaatttcattcacaaaccgaacgattattgtggaaaatgagaattttatgtttaagttagtgcatcattattttttaatttaattttttttggaatgccttttttcatctctttttaacatcgcttttttgggttgcgcaatttcattttctctttcatcattcattttcaacacttcattatgggtttaaaggactttcattgttttttcagttgatatttctagcccatttatttttgaccatttttctaaagcctcaattgctttaatcaactgatttgaatggtcatcatattcttgggcataatataatttaacttcatctgcatgcatttttataacaacagatgccacttcatttgcaataaaggacggcaggtcattaatataattaaaaagagtaatggccctaagacacttccctggggcactcccgaaaatattttgaaactttctgacaattcttcgccgatcttaactttaaaactttgatttttttaaattaccgtatttactcgattagaacccccctctcgaataaagccccccttctgagagaggttgaacaataaagcccccttctcgaataaagccctccttttgaggggggggggggggggtttcagctacaccttatttaaaaaagtaattaatcttacactcaggtataattaaataaaacaacatgcattgaacatgctacagaataacaattaacgaacttattatttatgtatcagaagaccatatactgtatacgcatttattattctaataattttttctccatttacgaaactacggagttatataaatgttcatgagataattatgagagctataactcaacttaaatgaaaaaataatttaatttaagttttatttatataaaaatattattattctataaattacaaaaatgaatatatattattctgcatttcagacgaaaataaa

SEQ ID NO: 56289 - DNA, 252 bp, Heterodera glycines
atgataaatacaggtgatggtggtgctttgactgttcttaaggacgaaaaagcaatgacatattatggcattggagaaggcgcaaccgttttattgtttactcaatttgaaattgccgtaaaatacaaaaaagataatgcagagaaaatgtgcaccgttcgaatgaaaggcacggatcttgtggcagaattgagagacaaaattgtggaggaaatgaaaaatgtttttccactgattgtttataattctata

SEQ ID NO: 56290 - DNA, 902 bp, Heterodera glycines
  unsure (1)..(902): unsure at all n locations
atggcaatgctttcatttgtgttttcaatcggtattttgacttggacatatgattatatgntgggaaatgaccatttaaatctttccttgattaatgctgaagaaatatttcaaattcaacaatttttggatggaaatctcagcgattttgtattatattgtggacaaaatgtgagtgagttcttcttatattttataatgtttttttttttaattttgaaggattattttctcgggcaaattacaatgggtctttattttgtcgaaaacataatttgttatgcggtaattgtcatttgtggatataaaatggccagatttgtttacaaaaacttggacaaaagttcagcaagaagacaacaaattaaccgacaaatcacaatcaatttgattctccaggtaaaattgatgaataatttgaggtgaagttggttatctttttagattattgtcggtttagttaattagtatattatgtataacttaattaatacatcatgctaaaaaaagtattgatgctagcaaaagatgatgattgttgtttaaataaacactcatcccgggtttataactcagattaatttaattatatttaggcatttataccgttggctatgaatttaataaaccttataatttcggttgaaatggtgatttttgaattccaattgtccccgagttttatgtttattcaaatgtgcatcactcttccctttcattggttgcccgtactgaatccgctggtctcaattctctgtgtcggtgactaccgtaacgcggtggccaatttcatccggcatacgatatgcagaagacaaaatgccgttgcacaacagcaaattctgatgaataacctccgaaataataatcgaaatgcacaactgcctattgtcctttcataa

SEQ ID NO: 56291 - DNA, 363 bp, Heterodera glycines
atggtcgccaaatcaaaagttttcgggcaaatcaaaggcaatagccccgccgagcaattgcaatcgttgcggagaattgcactggacacaggactgccagagaaggaaaatatttgccgcaaatgtaatcgcagaggtcccatcgaaagtcaatgcgacaaaatacgagcatatcaccaaaacaaaggccaaaatttcaacaccaatacggttatgctcccagcggcctacatcaattccgtccattcatcaaatctgcttaaagcaccgattaatgtgcacggcataacaattggcttcatcctggacagcggtgcggtgataatcatcatcaatgaagatgattacaacgcaatgggctga

SEQ ID NO: 56292 - DNA, 267 bp, Heterodera glycines
atgtgttgcaaaaattcctcttttacccatacaattggacatgtgacggaagcaattataaaggtaattaacgaaattatttcgaaaaagaaatttttttgcctaatttagcttatgaaaaaattaaacgcggaaaagcttatgtcactttgcccaaaagtcgtccgacaatcaaatgcacttcggttaacgtcggctgcaaaaaggacatgtgcaattgtgacaagtgaatgggcaaaatgccaacacaaaataatcattaattag

SEQ ID NO: 56293 - DNA, 315 bp, Heterodera glycines
atgtttcttttgctttctcaaatttttctcctttcatttgcgtgccaaatgagcgcaaaaaatttgtccaatttgcatgaaatggcaaaatgccatttgggctacgatatttctgtttataatggccatggatgctggtaaaatgaaataattaaaatttaaatggaatatgtctaaaaccaaaatttaaaaaatatatttataataattgaggtgcgctgtgaacgacggaattaagaagaaatcagttgatgccattgatgagtaaggaaatattcggtgaaatgttaattttctttcttttttcgcaataaa

SEQ ID NO: 56294 - DNA, 1276 bp, Heterodera glycines
atgacagcccccatacaggcattaattagggggtgtgccagcaaattgggagcattattgggtaccgaaattccacccgacttgggaataaatgccctaccgaatcaatgccaaagaaggctgtacaaattcagaaaccttcttaatgacttagaaagggtggtacaaaagattgaagataatttgggtttggctaatgagtatattggtaaactgagtcgagacaatgcaatccgtaaggaaacggaaatgcaggaattaatgcaggagttacaaattaatgagaaacaaaaggcagctgacgttctcattccaattttgagggacaaaattgaggcattagaagagaagttagacataactcacaacacggatggtgacactacctccggcattggacccctctcaaggagcgtgccaatgcgtaaaaatttgccaaaaactgagcttaagagatttgatggtagtccatctcagtggataccattttgggattactttcgtacaataattcatgaggactctcatgtcccaaaaatcgataagttcagttatttagactcatgcattgaaggcaaagccagtgccatcattcagggtattccaattagtgagagtgggtatgatgatgccatagatttacttttaaagacatacggggaaaccaaacgtctgattcgaacgttgaaccgggaacttatgtcgcttccaattagtgagtcatttgaagacgacgagtccttgtacttgaagtctgaaaagatttttcgacaactgatttcaatgaatcagaatgtcgaagatggtatgtattacagtaacctggagggcaaaatgtctccagaggtgttagataagtactgtgttatcaaggatgccgaagataatgatgattgggatacgtcaaagtttcggaatgcattctcacgtgcattggaccaaataaagcataggcaggaattaaggaaaaatgtgattgagcccaaaagggacaaacatgaactgaccatgtctttcacggcattttccaaaaatgataagtaccaagggaggaataaatttcctcaaaggaattcggatcaatcgcaccctcgtgggcggaaatttgaaccaaggaaatttcgtgatcagaggcacgataatagtgactcatcagtcagccattcaccaatgagggataggaggaattctccttatcccaaaagggattggtcaagctcaccagagcgtgaaaaatggaagaaggatgagcagagaaaatgccaattgtgccaag

SEQ ID NO: 56295 - DNA, 764 bp, Heterodera glycines
atggaccacatttattacggtgttcgactcggtggagcagccgaacaaactccaaattggccacggaaacggaccatcacaccaaagtgtgcctgttcaggtcaattattttttaaaaatatatattttaagaattttcgctttttatgcacgaaaaatgaattggtttttggctttaaatttacaaaaataatttttttggtcaaattaatgcattgtaatataatattaataattattagagatcgacattttgaaaaaagcctggacctggaccttgatttcctggacaaaaatccaggaaaatccaggtccaggaaaaatccaggctcctcgagacctggatccaggcatggacctggattttttgaaatttattttaaaaatcaaaaaaatgtttgaaaaaattaattatttgcttagaagcatctgaaaatatctaattaataataataataatgtctttttaaatttatttaatctgtttttgaaaacttgaaaaaacatcggtcacttgaaaaaataaattctaaaattttgtccaggaaaatccaagttttttcctgttttgcctggacctggatttttttcacatttgacctggatcttgatttcctggacaaaaatccaggaaaatccaggtccaggaaaaatccaggttgccgaaaaatggcccggacctggacctggatccaggaaaaatccaggcctggatctaggtcaaggtcgatctctaataattatataggccaaattaattttta

SEQ ID NO: 56296 - DNA, 2844 bp, Heterodera glycines
atgaagaggcgtgtgcatgtcggcacctgtttcagcccacttttcctggcagaacattggcaattggttgtgttggccatcgaaatttaccggcattacggcattcagttgcaagttgtgtatttgatgagcgcagttgagggcttatataaaattttgaaggtatttcaaaataattcgcaaaaaatcacaaattataaacaggcgttttttattttatttttttcaatcacaaaaaggacaaattttcaaatttacaaaaaattattttgaaattgtcaaaattttttttgattgttttattttttaaattcgtttaattttaatttgctttaggcatacagttcaaaagaacatatccaattggagccatgggcatcaattgaaattgatggacaaattgataaagagatgaacctggaacttgattggaggaatcaggcaacggcacacactgattgccttttaaaatatggagtaatttaaaaaacaataattaattaaattgatttaaataatataaaaaattaattaattataatataatacaataatgattgttttttaaaatatgatagataaaatttattttattaaaatagcaacagataatggttgtcgtaatttaaaataattattttaataacaacacgcacttaaaaatttggggtattaaaattgttattttaaacataaaaattattaattaattacaccaattgattaaccgcctattcaacatttttcaagtttaaaaatgataatatttattatttttattatatatttaaataaaataattattaattttagtattctgccgaatttttgattgttggtgatatggatgacattttgatccctgatgataaagaatattatgcagaatttattcgaaatgattatcggcataaaaagaatgctgtcgcacttttataccaaagatatacagtggatatagtcacaagtaatgccaaaaatttataaatttagtaaaaaagtccaatgaaatttattttaaaattttaaatgatttaaaattttagcccaaaattcgtcaaaattctcattgttcgatgcgttaacatcagcaaaagttgcgttttatcagcccgatgatcccaaatatgtggtgaacacttcgcgcgcggaatcgttgtggattcattggccagtgatcataaagccgaacactgcaacacgcctggtgccatcaatggaagggcgaatgttgcatttccgaaattggcactttttggaagacgaaaatgacattttggcatcggaaaattatatgcacaggaaagtggtaaaaactattatttaaatgtgtaatagcgagaatcaaaattatataatagtagttatggtccggtgccattttcattttcacgaatatgcttaagtaaaaaagaacaaaagttctagaatttttctcatgatatttattcaaaaaatgtgatgaaaaacctcgaaattatagaaataaaataaataaacaacctaattttaatcgaaattaaaatcccattcaaaatatcataaccaataaatttatttattagaaaaatgcagctctgtggcgctcagtggcactgaatgaatcatttcttagcacgaaaacggcacgacaaattagcagacgatttaaatccgacattttcaagcgcaatttcggcacatttcttaaattgccaaccaagagaatgtatgctgaaatgatggcaaaatgttatgacaaaattttttatttgcatgataaacaagtgacggattgtccgggtaagaatttcgacaaaatttgaaaaaaattatatttttaaaattaaatattttttaaaggaccacaccgatgcagaatcaaaccaattaatgggctaaactgttttattgcaaaacgtaaattaattgaacaagagttggtgcccggaattttttggtacatttcgccagagaaaggaaaatttcgcttttcaaacgaaggatgttcactttaaaattttttatccaataaaattcatatgcttacatattcccgcagtgccaatgatgccgtcgagaaaatttttgatggaaattttaatgcatgtaatagaaaaaagggattttggtttgcaattgtgctagcgaaatggataaagaatgagatatattttttgagagattaaagtatttttgagcagttattgttccaattttacaactattttgccaacttttttggcattttcggtttttttgcttgtttttcattaattttacattttcgccaacttattagaggtattaattgctaattttatggatttgctttcttctgatcagtaggattttcaattaattttatattcttgccaatttatcagaggtaatttaatttctaaaaaatggtaaataatttttttagtgttttatggatttgctttcttctgatcagtaggattttcaattaattttatatttttgccaatttatcagaggtaatttaattgctaaaaaatggtaaataatttttttagtgttttatggatttgctttcttctgatcagtaggattttcaattaattttatatttttgccaatttatcagaggtaatttaattgctaaaaaatggtaaataatttttttagtgttttatggatttgctttcttttttaggtaaaacattggatgacttttgccgttatcaaggagataagaatcattgtttagacggagtcattccatgtttatacaaaaatgatgaatgcgtaccaaatcataaattagatggtgtgacaatctcaagcagtgtaagtaagcgggaaggggtcaatgttataattattcaggtgtggatttaa

SEQ ID NO: 56297 - DNA, 206 bp, Heterodera glycines
atggtcatttttggcaccgtttctttccctttttcctccgtttgtctgctgcaaaaccttcgggaaacggtcgtaaaatgcctgaattggcagtcggtcattgctggcacagatttcccacgcaatgctaaagcagaaaatagccaatggattcattttggtgtgttttttcaattaccttcgccattgctcttcgttctgccaag

SEQ ID NO: 56298 - DNA, 468 bp, Heterodera glycines
atgcacgaattttggcgctgcaaaataaagtgtccatattgcccggccagaatcactgtttcacgcatttggcaacaaaatgaacaggggaaacgcttcaaaatggggcattataataatgaaaatcataatcacccgccaagaacagggaatattatggtactgtaactttaaattacagtatactataatttttagtaaatacggtagaacttaattaattttgctaatattttaatgcaggtacgaaatgctgaagacagattgaggcaggaagcaaggcaggccaatccgatgagaacgagggatattgttgctgaagtgagatcttcaatccctgttggtgtacgggtggccgtcgaatctggcactccatcatcttctgcaatggttcgtgcctttaactggcacaaaagcaatgcccgacggcttcaaggagatgaaggactcgatttggatggtagttaa

SEQ ID NO: 56299 - DNA, 657 bp, Heterodera glycines
atggaaaatcaaaatacactgaagaaaggagaagaagctgaagaggaagcggtaaacagtgaaatgggaatattcaaaaaagaagaaggaaacaaaaaagcgaaggaaaaggaagaaaaaggggagaaagaaagagaaaaagaggaggaggaaaaggaaaaagaggaagaggagaaaaagaaaagggaggaaaaaagagagaaagaaagagaaaaagaggaggaggaaaagggaaagaaagaagaaaaagaggaacagatggagaaagaaattgaacaagaagaggatgaaaagggaaaagaacacaatgaaaagttggaagagatgaaaagggaagaaggcccttcaaaaggagtgcgatttatggagagaacagaaacagaagggacgcaagagatggaacgattggaagaatacgaacgcaaactgcggaggaacaccaaagaggccctggaattggtggacagactgtgcgaattgcaacgagggcaaacggcaccatctgaggcaatcagtgggaaaataatggcaattagcaatgctaattggacaatgatcaatgctaatggagatattaatactaattgtgatgctagactcatgccaaactttgattctatccgtttagcgccttcggatgccaccatcaaaaagtaa

SEQ ID NO: 56300 - DNA, 1316 bp, Heterodera glycines
atgaccgcgcacattgtgcaaaaacatccgcaatatgcggccaaattgctggcaaaacagctcgaatttggtgaccaccacagcgaacaaccgggcaacacaatgccaaaagtggaggagggggtaaaagggccatttacaccaaatagaggggaagtggtcaaatggggggggggcaccaaaaggtagaaataaattttgacgggttttaaaaatgagagcattgtcaccggatgcgaaaaattgaaggatttgacgcaaacagttcactgattctaatatattagattttgctgtttttatatcaaataaatgtatttttggtcccggggccgagggaaacaaacgccaaaatactaacttgcatttttgaatttctgagtattttcctaaaaatatttttaacaccaatatttttttgttattaatttcaaatttcgaacaaaacagaatgcacatttcaaaaattttgaattttcaacttttcatcgaattatgattcaaaatttgtcaaaaaggatctcagggccgttgaaaaggacctgaaaatctccggtaatatgtgtttgatgactttttaaatttaatttttaatttaagcaatttaataactaacaaaaattattcaaaaaagaataatttttaatatttttcagcagttccctgtgccaaattcggcttcttcgctggctgccactggcattgccaatactagcagcaacgacaatggcacagagaaagaagcattgtccggcactgaagaaggcgccagtttgtgccactctcgcggatatggcacggaaacaccattttcgacaattgtgccgtcgtcaccatccgtgtccatttcgaactttgagtgggtcgaagacattcaaatcggcgatttgcccaaccaaaatgaatcatttgcgcgggtgccatcccccgccactcctccgccattggcaccatcggcacagagcaaagacattccattcgatgccacttttgaacattttcgggtgccaccgcccgccactccgccgttgtcgtcctcgtcgtctgtgctgacaatgaacacaactgcagctgaagacagtagcaattgttctacgatcttttccacgacgacgacaccaaaagccgatgcaattgacaacgaaaacagtgccaattgctatttggaccgattcggcaaagagtggcgtttgctcgtcgaagcggccgccgatgtcaaacagttggaccaaattgcgggcgaacattgtctaaatcgcaaagggccgacgaaaaatgatgggcgcatttacttcaagtgggtggcgatgagctga

SEQ ID NO: 56301 - DNA, 93 bp, Heterodera glycines
gacttaatgtcccatattttcgagaaatttattttcacatatttgataaaatttaagtaatttataaaaagtagtaataaaaaaagtgagagc

SEQ ID NO: 56302 - DNA, 97 bp, Heterodera glycines
atggctattcgaacagtggtggcagtggaaaacacggcggaagcaacgattccagaaaaagacggacagttattcgacgcgtcaacgaaaccgcgag

SEQ ID NO: 56303 - DNA, 904 bp, Heterodera glycines
atgggaagaaagaacctaaaaacttcaaagtcacttcgacccttagaaaatatcaatgattcggttggaaaaataggggaagacttggaggacgaagaactcgaagaagcggacgacaacgaatcgcttgaagacgaaattggagcggaatcgggagaaggtccgtcccaacaattttaatcggatttaattattccaatgttttagaaccttttgaattagaatttgttgggtataaatcggcaacaaagtcggctaaatgtttgcttttggaagcattggaggacaacacaattgcaacttcgcgctttgttctcttcaagttttcggatggcataaattaaaaggaggcaagcgatccggtggtcaagtagttagtgtgccttcctttggtgctggcttcccatgagttaaagtcccatttcttctgattattttaaagcaaatattatattgaaattattctaatttttgttttttttaatttatttttttaattaattaactttatggtattttaaattaatgataatgattttttgaattaataaaataataaatatttttaattaatagaataataaagtctaaattaaatattaaaattaatcgaataaaaattaaaaataaacaaatattaataaatatttaaataatttataaatttcaaaatgagttaattttagggttagacgaatgtcgggtatttgggcaaaactcgggtcctggatatttccgggtccagaaaagccgggtccaagtttttaaaccgggtacgggaggaacagagagtggaagaggaacagaaagtggaagagaaagtggaagaggaacagaaagtggaagaggaacagaaagtggaagagaaacagaaagtggaagagacacagaacgtgaagagaaa

SEQ ID NO: 56304 - DNA, 278 bp, Heterodera glycines
atgtcatctcgacgcggcggtggtaataatgttgagggaaaggtttacgttgacggtctgccagaggacgcaacttccgaagaggtttcaaataattttttagttaaattagaatttacacagttcatatgtcacaatttcagctcgacgacgtcttccacaagttcggcagaattcgtaaaatttgggtcgctcgtcgtcctccaggttttgcctttgtcgaatttgaggacacgcgcgacgcgcaagacgcagtgcgatcattggacggaacgtaa

SEQ ID NO: 56305 - DNA, 1608 bp, Heterodera glycines
atgccgcgtccgcttttccctcttcctttcccttcttccgcttctccgcctctctctgccattcctcgcgttcgtttcctcactctttccctttccttcgtctccgtcgtgtttttcctgctcactttggcattttctgtgctcattctcaccaacatcaatgccctgcacacggaagtgatggtggacatcgagcagttcaaagtaaatttgggaaaggttcggatagtgagtgaattgtgtcccatggctaagggcgtcgtaagcaaagcgtgggacggaatggtcgaacttcaagcggcggacggaggccaaaacaacgggaaaagtgccggcaaagaaaacgcacaaacgacgattgaccgacagaaaagacagtacggcacaatgccatcgtacagctcagcctatgttaacaaacagcagacatccagtgagttggcaagcacaagcaaaaagataacaacttcctaaagattgcgctgcccgagcaaacaaatgccccgccggacctccggggcccccaggcgccccgggattgcccgggggtatgtcattagggggaatttcctaatgaaatttggttggtcagagccaggaacacgtggacaagacgggattccaggaatgcctgggatgagtcagagtttcgacagtggctatcaagatgttgtccattttcgccatgcaaaatgccctttcgccccttaagggctgtgtccaatgccccccgggcccaccgggcgttcaaggcattcaaggcgtgccggggactcctgggcctgacggacaagtgaaaagttggacttgacaaatacacagaattctttagccaggaacacccggcacaaatggaggagggggctacgcaggcgcaccaggaggttatttggctaattactgatcaatcgaatggaaatcttttagaacccggagaacccggccaaccaggtgaaggtggtgcggaacaactccattcgaaaatgatttaggcactcccggcaccaacggatctccgggccaaccaggccaagcgggacaaacaggaaaaggtgggattaagcgggaggagggcccgggagcagagcgattttcaggtccgcctgggcctaaagggccaatcggaccggcggggccaattggacagcccggacagcccggtaagtgaagcgatggggaggcggcatttagaaaaagcaactgtcaggcgcacccgctgcaacgggcgcacagggccaaatgggacgagtgggctcgtcgggactgaatgggaacagcggtgggatggactcaattgaaaatttgcaacaaatactttttaggatcaccaggccaaataggaccggttggacaatttaatgatccctaattgaggagaatgacttgtaaattacagcctgggcctccaggagcaccggggcaagatgccggatagtgaggagcaatggccaacggcaccaaaaataagcaaacattccgttcagttgcccgtgcccaccccgagtccaagcggcgccgtacagacagaagcaatgaacaaagaatcgaaagagaaagagaggaagagaagcaatgatatgaaaatgatgtgtttttctaaatttagaa

SEQ ID NO: 56306 - DNA, 1427 bp, Heterodera glycines
  unsure (1)..(1427): unsure at all n locations
gcgttatgcgattttgtgtgcncaaacgtggccacaatggcacggggagccaaagtatcattaagtgaatgctgtcggtccgttgatttggcncaattaattcagaaagggttgcgaattgatctgtcgctctgccgaattggcggacactgaattccgactcggacacaccaaaatttttgtgaagaatcccgagtcgttgtttctgttggaggagggccgggagcgtaaatttgacgcatttgctcgagtgattcaacgcgccttccgacgcttcaccgccaaaaagcatttgaccaagcaaaaagtatcacaacagcagcaatgttttcgaaataacgatacatttggccaaatcaatttaaaatttaattgattactaatttggcattgttaaaggatgaagccgtttcgttgttgcaaggccgtaaggaaaggtgccgattttcaatggaacgccgatttgtcgcgggtgagtgagcaattagagtgattcactaactccttacggaccgttgcacttcccatccgaatttcgctgttctttccccacagattacattggcatggaccaacggcccgggctgcaggccatcatcggacggcgtgaacgtctttactttgctgccgctgttgtcaaattcgacagacgatttcgggtaaacaactaattatggcattttggtgcactttctcattcaaaggcttcccgaattgaccttctgctcacggccaaatatttatttttggtcggtcgcaagccgttgaaaagcggcgtaaacaaaggcaaattggtggaagttgtgaagaggtaaagcgcataaaatggggaaataaattcaaaaataatcattccccccaccctaaggcaaattccgttgacccaacttcaagcggtcactgtcagcactttgcaagacgacttggtgctcctttctgtcgccgattcgtactgttccctggtggagacaccgctgaagacggaactgttggctgcacttcagtaagtaatgtaaattcatttcttttacccatttttaaatatggtttttacccctccctcaatttcagcaaacgatgcaaagaaagggtcggttgtccgcctctgccgttacaattcagcgaccgtttcgtcgtccatctgaaacaagcacaaaaatttccgcttgcaattcgactcattgacggcgaccaacgttttgtggaatttcgacacgcggacggagagggcgaaaggacaattggacaaacggtgaagacgcagctgaagacgaacgggcgactgatggtggtcacagtgctgaagggactgccatcggagagcagtcagtttttttgggggggagggtttatccngagangtccccganatcaccaatctagtctcttaatannaccattcattctcatttttaaattccgaatcg

SEQ ID NO: 56307 - DNA, 356 bp, Heterodera glycines
ggaatcgaaggtgttgtaagctttttttccttttttcacttgtaaatttatttaaattttcaatttttttagctttttttcgaaaatttttttgtctttttttcggcaggcactgcctctgacaatgttttttatttatttagaaaaataaattgattttttttctttttgatttattttaattatatttcattcttaaattttttaataaacattttcaaactttcaccttattaatttaaggcgaattttgccttttttaataaattctcttgtgaaaaggcaaaaaaataggctcttttaaatatgcctatttaaattactttcattgctttcctttgcttacgaccatacca

SEQ ID NO: 56308 - DNA, 351 bp, Heterodera glycines
ggaatcgaaggtgttgtaagcttttttcctttttcacttgtaaatttatttaaattttcaatttttttagctttttttcgaaaatttttttgtctttttttcggcaggcactgcctctgacaatgttttttatttatttagaaaaataaatttttttttctttttgatttattttaattatatttcatccttaaattttttaataaacattttcaaactttcaccttattaatttaaggcgaattttgccttttttaataaattctcttgtgaaaaggcaaaaaaataggctcttttaaatatgcctatttaaattactttcattgctttcctttgcttacgaccatacca

SEQ ID NO: 56309 - DNA, 71 bp, Heterodera glycines
aaaaaataggctcttttaaatatgcctattaaattactttcatggctttcctttcgcttacgaccatacca

SEQ ID NO: 56310 - DNA, 1693 bp, Heterodera glycines
atggcttttccctgccctcccctcgcttttcctttgcttttcattttcctcctttcgctctcttcggtcggcactgtccctttgatgggttccgccgacctcgtgcatttgccgcgtgaacatcaatcgactcagagaattcagaggttaaaaacggcgttgaatgagaacgaagcaaagagagaaggtaaagctttgtcggagaatgcagtctcgcaattccttttttgctttagtgccctccgggggaaatgcgccgccactgtcgtcctccgcttccctcttcacttccacaacttccgctccttccaacacttcgtccgatgcctcggctcgtctgctgtgtcaattcttcattttcagcacattgttcggctccgtctgcaccatctcagcgtgcacttgcctcttccgcactcgtcgctccatcagcacgcaacagagacgggtcgcgtcgatggaagacgcatccattagccgtgagtttttcattctattgaaacaaattatccccgtgttttacccattggcttcctttagtttatattgcttatcaggcctgggcccgttcagtttcctgactttttcccttttccatgcttttgcaaaattttaaatgatgatgaaataattagcaaattggagaggggttccccgtccgttgccttttcattatcatttgagaaatttgaaagaattatggggaaggggaggggtggtttcccaatcgcgtatcttttggtgttccccactttttgtaccttcgagtggggggggggaggggtttccccaatttctcctctcaatttcattgatgaatatgtttatcataaatcttcaggattgacacggatacgagagcccttcggcccggataagccgtactgtcttaaggttggactccctttttgtctgaatgccttaaatacgatccctcaaattcagttcgatgaaaagggtctctgctacgccagtcctctgactcgcgaagtgccccctttgccaacttatgaagacgcctgcaaaatgctttctttggctgaaataatggcaaattgcggtgaaaataaaggaaggaaagagcaaagtgaatgcatagaaaacaaaggaaagcagcagaaaaacgaaaaggtctaggaaattgacaaatggcagggaacagagtgagaagtgccaatgccaatgccccccccccacatttgtacatttctcaaattttgtgcattattgacgacgcttacccaagcaattaacggaattacaataacaaatacctcaaaatgcacaaaatttcaaatgatctcatcaacaaagtgccattgtatttgtttcagtaatttataaattataaaagttaaaaaaatgattggagtggaaaatgacgagggacaatttaattgtatgaatgaattgactcaataacagtacccggagtggaatttgcttgcttcacatgtctgtcaaacgcacgtcccatcgcagttttcccgggaaacggcgtcacagttttggtcctgtcccatgatttggtcgtggctcccggcctcctgcaattgtcgcgtgccaatcaccgcaaaagtcggcttctcccccccccctcactcacttgtctcgccaatatattcggtcgagcccaagtgcaaatgattccctcctgacaagcagtcacttaagcagcaaaaattggaataaa

SEQ ID NO: 56311 - DNA, 2384 bp, Heterodera glycines
ttctataacgaagaattgtcttcgcctcagatgccaataaattaccaagtcatgaagcaggtgtcgcttaaaccgcttattaaaaaaaaaattttttttgaagggcaccgattacagtgttcacggatgcaaggcaaaggctgagagaaatccaatttaccgatggactgttgggaaaggagccatcaacaaatttgaatttgccggtcatgacaacagtctaatggcaactgctggacaggtcgtcaatcggaaaatgagcaaaactcggtatttaacttacggatttcttataggatgggtttttgcgagttttcaattggaagacgatggatttggttggctttttcaagtcctatttcggtggactcctctgtcttgcttggagtccggacaacctttacatcgcaaccggtggagaggatgacctgctcaccgtctattccctagctgaaagtgggtggcgttagcacagttttgaaaatttaaactttagatagggtcgtatgtcgtgggcaggcgcataagtcatggatttctgaagtttttcccttttgaaataaataaaaagcgaacctctaaaggtcgccttcgattgttatgcacccgaatttatgttggaacaaactcaaattttcgacgaaaaacgctgttgtccgcctttgaagggtgagggcacctgttcatcgtttgcaactaatgaaggttttttgtgtttaatttaagtgagcctttttggaaaaaacattgaatgaatccgattttttcaaaaggccaactttcattcagctccatagttgttttttttctaatccttcccattcctcaggaaacgcctttcaaaatgggcaccatttcccttctggccatgaagaaagtgtttcttctgccccgcaaattggccatttgccttttgctaattgcgacgacctccgcacgaccaacgcaaattcgcttcaattgcttcccaacggaaaagtaacgcacagaaacggctcatcggatgatgcaaatgacgtttctcactgtcagcctcagcttctctatagggttggcactgttggccacgactgtcaggcattgttttttgtttttgtctccaaatgttcgcatttcattggccatttttttagttgtgcctttgggacctttccgaagacattttggcttctccgcccctttcccaacatcacttcgacgaaatcaccgtttctccttcaccctcaaactttgcaaatgtttcccctcgaaataccacggtcattcccattggcttcgcaaatgcattgtccacaaccgaaactgatgtgagtcatcctttttaagcttaatttagaataggaaaaaggccggcttaaggtgagaacagctgacaaaccttctgacgcaaatagcaaaagcagcggacgcttcagaaaatttcataagcgtggcttcagtttcgggtcccgtttgacgggaaatgaacggtgtgttttcctatacaattttcaaatcttgaaatgttagaggtctgacaatgagcggtgagatggtttacaattgaactttacgaactttaagtgggaagcatatatgaattcggtatcaatggatagataaagtagagtcgacttctatgaattttcaattttacagacgcagaataaaaaaagtacttaaaaatctgaatttttaggcctaattttgaggggtattccagctttttcaattattgcctacttttgcattgcctatttttcatttaatttctgtaaattgaagaatgaaataccacattttttaaatagctattaatttttaatgaaattgtttaagaaaacagcacgggaattcttcgaacggggcaaattcgaatgaaagtacattgaaaagaggcgaaaattatgcacaatttctcggaactgtgcaatgtccacgactcgaagacgtgccaatgattgagcctttgatgtgcaaaaaggtcgttgtttttcgcttcgctgcaattggcgtgtccgttccgttcagattgcacacgaaagactcggcgctttgctcttccgcgaggattgcatcggttgtcaattttaatctagcggagttttattccaatttttgctgcttaagtgactgcttgtcaggagggaatcatttgcacttgggctcgaccgaatatattggcgagacaagtgagtgaggggggggggagaagccgacttttgcggtgattggcacgcgacaattgcaggaggccgggagccacgaccaaatcatgggacaggaccaaaactgtgacgccgtttcccgggaaaactgcgatgggacgtgcgtttgacagacatgtgaagcaagcaaattccactccgggtactgttattgagtcaattcattcatacaattaa

SEQ ID NO: 56312 - DNA, 277 bp, Heterodera glycines
  unsure (1)..(277): unsure at all n locations
catgaaagacgtttggtcacnncacaaaaagtncgatggacganccccaaanaaatgaaattctcccgggaacggttcaccatttgctattaaagaaggtgactctgtcgcctcccttttattgccttgtttatttgttaaggtcggcgtcctccgtcggtcgtttgtatgtcatttatttcaggccaatgttgcacttttcgcttattcattttgtttcggttatttgtcaattgtttttgtaaatattttttttattaaaaataaattttaaatg

SEQ ID NO: 56313 - DNA, 2253 bp, Heterodera glycines
ctggggcgcttaagaagaaggaagccgagcgaaggaaggagcaacaaagtgccaagaaaaatgcaaaagaaagcgctgagaaaggtcggtaaacccagccataagagaacataacgggattgaatgataagtttcagcaaatggccaaaaggaagttttatcggacgaaaagaaatcgccaaatgtaaaaaaagccgactcaaagaagacaaaatgatggaacgtatgacttatgatggattcgacaacttcccgagtttctgcctttaaatttaattgtttaccaattggagttataacttaaggtcacttccacttttatacatttattaattgttactcaataaattatatattagcgcttttacaaatgattgtgagactattgccaatcatcatttgtcttcgtaaatatgcgtacaaaatatcgaaataaacaactcacgagtctggttttgattgctttcatttcggcttttcacctgctgatctcattgccgatgtgcgcttccgctgctctttccgcttttgcttttttggatgattctgaggccgaaatcgactgggacgaacgatgtccaattgtttattccgaggattacaacatctcctttttcggcattgagaagtgtcaccccttcgactccaataaatggggcaatgtcttccgctttttgataggcaataataccctccttaatcctttaagtgtcgggccccaaatcgacttgtttcattttcagtttagactttctcccattttccagcaagtggtgccctcgtcgaaagtgccgtcctccgaccaatcgaagccaaaaaggagcatcttttgctggtccactccaaaaaataccttcgctcgctgaatggccgcttcactttgactcgcattttggaagtgggcctcgtcctcctttttcccatttgcctaatcgaccgtcgcatccttcgtccaatgcggtgtgtctctttttttggcccttttttcctctgatacagcgactgctttcctcaacagaattcaaacgggaggaacggtgttagccgcgagagtcagcctaattaggggctgggccattaacatcggtggcggctttcaccacgcctcaggtgagaaatttgagaagcggcgagatgcattggacaagaaagtgtacttatgttatggcattgtgccactttctcttaactaatgtaaaatgttttttcgcagagggaaaaggcggcggattttgcgtttatgctgacgtcactttggcaattaaacttttgttcgctaatgaattgatcaaaagtgcaatgatcggttggttggttttttgaaattatttttatttgagaaataatgatagtcaaattttgatattcccctgtttttcaaaataatgaaactcaaaaattatttattttttggtttcgctcacaatttaatcccaccatgggaatttgttcacaatttgaaacccaacatttgtcgattcatttaaagttcttaatgttcacatatatatttttttcagttgatgttgatgctcatcaggtgccttccctttccgtcccttaaatttgccttttccctcccttaagggaaatggccatgagactgattttgcctctgacagtcgcgtgtatatcctcgaccttttcaacgcgtccatttaccccggtgactccgatgcactgagttcgccctttttccgtttgtccgtcccttttcacccctcccttttctcagagtccgtttcgcgcgctgttccgctcccttttggcgctgaggatgatttttacctccgtcgactcgaaatggaattggacgccgcctttgccgatttctctgttcccgacttcctccttttcgtcgccggcaccgattctctgatcggcgaccctttgggtggcctcagtctctcccccaaggtgttgtttctcttttcattcgtttcattgccaaaatcagtgtcatgttctaggctaaataagtctgaaaatttttaaagaaatttcggcggcgaaatttggggtgcaccccgaaatccgggcaccttttcattatatctttttattattttctcatccgttatcattgttttcttcctttctaaggccatttttcgtcgtgacgaaatcgtttttggtgctgcgatccgtcggagggtgcccattacaatggtcaccagcggagggtacacaaatcgatcagccaaagtgatcgcggactcaattttgaatctcaatcaaaaggggcttattcaa

SEQ ID NO: 56314 - DNA, 572 bp, Heterodera glycines
gcatcagtttcgggccttgcattacccaaactaaacgagttggaaattcgcctgctcacttctttagtaagtttttattgaaaattaatttgtgaaatgactgaatattttattttgtttttttttacagcgttgggatgtttcaattcaatccgaagattttgaaaaagttttggcgagattagaagggttcgttgccagcgaaatggcccagcaaaatggcgttatgagctacaatgaactttgcattctgtccaacacacatggcttcaaccgttccattctctgtttgctcacagttctactgaagtttttgtttgtgttattggcttttcatctcgctttgttagccggtttatccgtgctgaatatggcagtctcgcgaaaacaggaattggcggcgagtgacgcgtgcatttatcatcacggatgggatgattgttcgcatccaccaattcttttagcaaatgaacgaaaaatcgatgcgaacttgacgaaagttgttcacaaggatgatttttttgcatttgttcatgcctttagcatcagttgatttttattttggaaataaa

SEQ ID NO: 56315 - DNA, 146 bp, Heterodera glycines; identical to SEQ ID NO: 56264

SEQ ID NO: 56316 - DNA, 146 bp, Heterodera glycines; identical to SEQ ID NO: 56264

SEQ ID NO: 56317 - DNA, 146 bp, Heterodera glycines; identical to SEQ ID NO: 56264

SEQ ID NO: 56318 - DNA, 1438 bp, Heterodera glycines
atgcaaattttttcatgcgctgtttgcaatgcaaaatgtggaatatcaagcagtcaacaactactaccattcctggatccggagcttcacattctcacagcgtcatcaccattcgcagattgtggaaatttctgctaccattatctgcagctgagccagggcaattggatcaaaatcgacacacgcaccgctacgatccagaaaatcgactccagcagcatcggagatccacgaagcctcgggagacaaatctttgttggaaatcacgccgctagtttttcatcgatggacgatcgacaacgaaccaggcgaagggctattcgcgcacttggacgaatggctgcgtttggatcaatggaagtcgaaggagaaggagcacaaaacggcgcgtgcgctcacactaggagctctcccgagcgtgtgattggcctcaccgaagaatggttcagggacaaacttcggctgctcgtctcctactggacaacggcatgcttcatttacgtcacattcattttagggcgcgatgtcctgatacccttggtatgggtctacttaatggggcccgtcatcgttaccatccgcaatttggtgacgggaaatcaatggacgcagcggaacagagctacacgaggcacacggcgagcaccggcaatttcaaggattgaagcaattgagctggtaccgcctccaatgccccaggaaatgagagcgaatgaaacggcaagttcgcaacaagaggaacccgagctgtcaccgctcgtgatggagctgaaacgacaaatgatcgcgttccgctccaaacgacgttttcaaagccgtcggaatgtcgcgactgaacgtcagccgcgaatgtcccggcgatcatttgatggaaagaggcgaatttgcgggagatcaaattcgcccggacccttcccccctttttctccggtgatgtgccccccatttgtgccatttttcctttgcatttacccctcccattttgtccccattgacacaattccccacccccttttgtatttctcgcacatttattgtaagtgtagggtttaattacccaagtttgagataaacttgcggagtatttttggtgcgatttcttgggcggcaaattgggcaattggcgacggctaaatcggaacaaacggcgcagacactcccccatctgcgtcactctcccaaaaatctcaattttatggtttttatctacgcacatgaattattttatgcatattctttcagttgtctgcgggtttatcctatttttacccaaataaaaaatttataaatataattatttcctattattttctatgaatattacatttttagatttcatatatagatagacaaggcacattatattaatacattaaaaatcatagaatttttcttcgaagaaatgtatgattcaattgataaacaactaaagaataaa

SEQ ID NO: 56319 - DNA, 236 bp, Heterodera glycines
ttttaggtcgattcttaggggtgtattttttggttttattgcgtttttgttaaggaattttccaaaaaatgttgaaatagtgaaaaaatagtgacaaaacgccaaaatagtgatttttaactattttagtgacgaagtcgccaaaatagtgatttctagtgacgaaaagtgacgtccaaatgaaaaaattttaacgcagaaatgcgttttttgagctcctttcttcaaatcaattg

SEQ ID NO: 56320 - DNA, 78 bp, Heterodera glycines
acgggcgcgaagcgcccgtctgaggccgcgaagcggccttaatagcccaacaaatttagaaacgggcgcgaagcgccc

SEQ ID NO: 56321 - DNA, 1196 bp, Heterodera glycines
  unsure (1)..(1196): unsure at all n locations
cagcggagtcaagtcctttcgctggacaatgggtaattaatcggcaattaaatgggcaattaaaccaaaaagagtaattaattccaaccatttcagttgcatggattactctacaataattcacgaggtaataaaaccattcaatgggaaaatgacttttgagtttgttatccctttccaatagataatgcatgtcgttggcttttaccacgaacacggtccatttttgttaattttcattaattaatcagctaatatgaaatgatagtgtttaattatcataattattaattattcagagcgatgggaccgcgacttttacattgacataatatggcaaaacatcgacaaaagtaatttatacttaatgttgcgtttccaaaatgtcggagtttcgaagtgtcaacattaaaatttatgcgaatttttagaagcaataattttattaaattattaaaaattaaatggggaaaatcacttttatttactctggtcattttgttgaggtgcccttgaccaattcggcaaaattgacttgaccaaaacgagttattacggtcagccgtacgactacaaatccatcctccattacgttcgtttgacctttgatttgtgtcttgaatttggcaaataaatgaaaattaggacagtttggcattcagcaagaacggattcccgacgatgttgccaaaaaaaggaggtaagacaaaggcacccctccccattcattccgacccctccccccaatgttttgcggccacaatcggaaacgccaaggacttcagtgagatgtgagactttgtagcggaacttttgaggagtgaaccaaaaattcggatttagcgatctggcgaagatcaatcgaatgtacggctgcgatgcgatggcaacgcaccgactgaacccggcggaatttgccgttgccagccaaggccccgcaaaggcacaaatcgcgccgacattttccggcacaaaggacggcactttgccgcagatgccaatcggacaagtgccttttggtgacgaaaagtcgcacttggacagagggcaaagcgaacacggacaaagtgaggcnttcgggaagggtcagcnttgtctntggcgcttcctccccttcaaggcagcatgcgcagntcggntcgccgtttgctggtcatcaaaggaccgatgccatgccacgaatctccaacacgtaa

SEQ ID NO: 56322 - DNA, 713 bp, Heterodera glycines
atggcacaagcagcaggaatagcatcgacgagagcactccaccgtcaagaaaacagtaaaaaatggccatggaaaacagacaaacggttttggccaagttcgacagaaaagcgggtggacactgctttaatctaaaatatttggagaatttaatgaaataaattttaaaaaattagttgtgtatataagagcattttattcgtttataaatttgaaattattcttatttaaaaaatatttatttaaacacatgaaatttgatcggactattttttaatacaaaattaattgaataagttaatatcatctaaatggataaggaagaacttttgaagcaccctaataaaatttgaattaatttaaaattattaaacaatcgaaattcattgatttaaatttcttatattatgtacaaaaaaagaaaatatttttaatcgaaaaaatgcaataataataaaatttataaattaaaatttactttaatgaagcagggtatattacggcaccaacaattgccgaaacgtggtggacaaggtgaaaaattagcggaaaccaatgcaaatgctcaacgccagaagattttcggagaaaaagcaatggaaacaatgcccttgacaggccaaaagcaatggccataatggccaaggtcataggatcgagatgggattgggacaacattcctttactaaaatttaaaattcaattttctcaaa

SEQ ID NO: 56323 - DNA, 2218 bp, Heterodera glycines
ttggacaaatacgagaaaattggcaaaatcggcgaggggtcgtacggcgtcgtgttcaaatgcaggaatagggacacaggcgaagtacgtcccgcttctgctgattggcacgaaaaaataaaaatttaaaattcagttggtggctatcaaaaagtttttcgaatccgaagacgacccggcgattaggaaaatcgccctccgagagattcgaatgcttcgggtcagttcgggtcggacaagggtttaatggtgaagcgaggacacatttaaaataccaattcaaatatttaacggtaattttctccagttttatgtggaagagtttaaactttcaatttgaaaatttgcttaaaaattttaaaattcccaatgcctttaagcaactgaaacatccaaatctggtgaatctgattgaagtgttcaagcggaacagaaagcttcacctcgtctttgagcattgcgaccgcaccgttttggacgacttggagagatttcccagtgggtcggtcggttttggtgccattaaatttgcaaatcgtccaaaatgtcagttgtcccgagtcactcaccaaacggctgatttttcaattgttttccgccattcgcttctgccattcgaggaattgcattcacagtcagttcagtccctttttggccaaaggcgaaagccccggccgatttaatttgggggggggagaagccacggagggaggcgaaaggcaaatccaaaaaaaggaaaagcggcgaattaatcgcgccacatggagaagcacgaacacagaaaaagagaccatactgataggtcataggcttaaacattttcaagctgaagaaaattaaaaagttcctttttccattaatcaaaaaataattttgtgttttgggcgtaaaatgttcaattaaccaacggcaaacgaatgaccctttgccaattgcttaaataatctaattattggtgttcaattgttcaggggacataaaacccgagaacattttgctcacctccaacgacgtcgttaagctgggcgactttggatttgcgaggataatgagtgggttactgtggttttaagttatttaatcaaaatgaatttatattctattacaaatgttgcaattacttaattaccgccccccccccctcaattagcgcaggtgttaatgaaatatacaccgattatgtggccactcgatggtaccgtgcccccgaactgctcgtcggcgacacgcactacggttccccagtggacatttgggcggtcggctgcgtttttgccgaaatgctcaccggagagccaatttggccgggaaggttagccgcgctgagttggtccaacatttaaagaatccaaaaaccaatggccgttttccaatcccatttcagatcagacgttgatcagctttacctaatcattcgaacaatgggtaaagcagcaataacaacagcagcaatgctttcataattaacagtttaattgacaattatttttcattttctcggaatgcttttcgtatgttttgcttaaggtaaaatcacttcccagcaaatgaaaatcttccacaacaacgcctatttccgcggcatttctatccccgagccggaggaacacatcggactgctgcagagattggcacagacggcgaaccccgcggtgagcgtcgattttgcagcgatggatttgctgaaggtggcggcgtaaatgggggagggcacccggtgctatgtcgttacttaaagaaccatcattatgatttgatgaaaaattatttattagctgaaaagtaaccgaatttttatttcttgatatgattcgatagccctaagtgttctctatcagtctacaaaatttcaaaaaatttcatcaagtttcaaaagagttagggccaaagatgctcgaagatcaaggttttttgagttcctctagccataactttttttaaacttaacgaaattttttgaaattttgtagacttatagagaacactaagggctatcgagtgatatcaagaattaaaaattcagttgcctttcagctaagttataaataatttttcattaaatcataatgatggtttttcaagtaacgactcagccccagggcacccattaattttaaaaatgaatttggcatttttaattagcgatgcgtcgaaatggaccccaaaatgcgatggagtgccgaggagctgttggaccacgagtattttagaagcagcg

SEQ ID NO: 56324 - DNA, 339 bp, Heterodera glycines
gtctccaatcccaaaatttggccgatgtcttaacaaccataacggactgtgctcggttcattcgcgagtaccctttccccggctttgttcacaacgttttgtttaaattggctcaggtaattccatcacttttcgtttacccattttttccgcttgttatttaggccttccaaggcgaattgttcgggcgcaaattcgagcagtctctgaacgccattcggctgcgcattgtcaccgccatccgcgagtgcagcggcgtcaatttgggcgtcacaattccgtcggaggacatcgtccgctgcattatgaaagtgtcccattccaacgattacaaagcgc

SEQ ID NO: 56325 - DNA, 520 bp, Heterodera glycines
atggctgttcaaatcgcacaattggcggatgaacggaaaaagtacaagaaaaaatgcgatgaattggaaaagcaactaaaacaacaacaaaaacaacatcagcaggagaaagaaaagggcaacaacggtaagggaaggatattataaaaaaaattcataaaataggcaaaatgattttgaaattctttaaaaaatatgcttatagaattgttatgcgattgcagataaaaaagctttaaaaatatttaaagaagggaatggcattggcaaaactgagaaaagctgtggaacttcttccgctgatcaccagcaacagcagaaggtgaactaattacgctatatttagtttcggcgggggggggggggatacggtggctgagtcggggatacggtggctgagtcggggatacggtggctgagaatttttcttttcaaaaaataagatgattttttagctttaaaaatgcaaaaaaaaggatggtgtgatctatacatatttattatgattgccattagatca

SEQ ID NO: 56326 - DNA, 259 bp, Heterodera glycines
atgtttattgcgaaaaaggaaatggaattgataaactcagaacagaggcgacaaatttcgaagttggaaattgaaaatgtgagaattttaacacaacaattgatattttagttaaattttaatcacattcattagagagcatttggagaagaattgaaacgccagaaaatgatttcatttgcattggaattggaaaacaacaaaatgatgatggaaaaaaagcagaagcaaaaagaggaaatggcaaaggcgaaatacg

SEQ ID NO: 56327 - DNA, 446 bp, Heterodera glycines
atgcaccaccatccaccgaatcatgaaaaagctatcaatctgtcaatccttacggtgtccgggccgggtgagtttccccgtgttgagtcaaattaagccgcaggctccactcctggtggtgcccttccgtcaattcctttaagtttcagctttgcaaccatacttcccccggaagcggaagactttcgtttccgggaagctccccaccagggcgaataaatccgtcggcggatcgctagttggcatcgtttacggtcagaactagggcggtatctgatcgccttcgaacctctgactttcgttcttgattaatgaagacattcttgccaaatgctttcgctgtagtccgtcttgctacggtccaagaatttcacctctcacgtagcaatacgaatggccccgtttgtctctgttaaccattatctcggtcagcaaaaccaaataaa

SEQ ID NO: 56328 - DNA, 1635 bp, Heterodera glycines; identical to SEQ ID NO: 25588

SEQ ID NO: 56329 - DNA, 650 bp, Heterodera glycines
atgcgaaaagcgaaatgcgaaacgccaaaaaatgcgaataatgcgaaaggcgaaatgcgaaaagcgaaacatcggcccatccctgcccggcactgttcaaaattcgctttccgcttttgtcaaatgaggaatttacgaggaaaattggtaaaaaaataagtcaaaatttcaaactcgttttctgatgagatgccgtaaaatattcatagtttttgtggcgatttttaaaaatgtttttaaaaatttatttttcaataagttaatacatatttacagttcccttcggtgttttgtcaaaagatgaagtgatcgccgtttatcagttcaaatcccttccaaattgtcatgggatttccgacggaattttcccaatgccattttcgactaatggacggatttctgatcgaaaaaagggcacacttttgatggacattgaaaaagtgtcagaatttgcacgagaggaggttgagagcagtcggtacagcgaaaaagtgtacataaatggattaccatggaaaatattggcacaaataaaaatgaaaaatggaggcactgacaatgagaaatggttgggcttttatctttggtgctatgctccaaaagaaggtgcaaaattactaataattaatatatatattaacaacaattaa

SEQ ID NO: 56330 - DNA, 1049 bp, Heterodera glycines
atgaattttaaccccttatacacaattgattatgaaaattattttcaattgtttttggaaaacctccttaatattcaaaatgaggccaaacaaaatttggatgagtaccggaaaagaagtaaagattggtatgatgcaaaacctcaagtgaaagccaataaatttgaaatttcggaacgagttatggtggcttttcccggaatgcatcgcaattcacgacataaaaaattattgtggaatcattttggcccttacaccattacaaaaatctccgaatcgtccgccgaattagtcccagttgataaaacagctgctgaccctattactgttcctttggaaagactcataaaagtgccaaaggcagtccccgacatcgcaacattaccacggggaaaaaacccgtataaaaatgtgctaaatgcaatgattttcatgatttcggcccaactgaattttgaaaatatgccaaaacgtgcgaccgaaaattggcaattggggacaattgctaaagaatgtgtgggggcggataaatatggaaaggaaaaaagtagtgcaaaaattctcagagttaattgcctaaacctgaaattgaaggtaaaaagggaaagaaaggcgaatttttcaggacaaacgcaaacggacgccgggatttgttggacttcggtttgcagtcaaaaagatgccgagcacgaactctgcacgactctgaaattgggcgaattggaccctgttcttggacagtctggcccaggcgccatgatcgtacagtcgccgcttcaagctcttttggccgtttttctgcttcgctccggcacagtcacttcaaacaccgcagcccgaacattcgtcgaaatgatcattaaaagtggaccacaaatggaaatggccacttattcagagaagcgaggggattatgttggcaccgggaaattcccacaggaaaatgaccaagtcaaagcgctcgaaaaatgcgtcgaaatgtgcttcgttgcacgtgccgctttaagcgcaactggctacaaaccgcttgcgatggcaccaccaaattg

SEQ ID NO: 56331 - DNA, 460 bp, Heterodera glycines
atgagagtcgatttcaagtacgcacttgccattcaagtacgaatccatgctatgcgctcaacattcaaatcaaaaacaagatttcgtgcatttgaacgtgcatcgatcggtgagaattacaaaattcggaaaaaaccctaccagcagagctcgtttttccacgatagcttttttctttggcatccaaatccaacaaatgctctattaaccttaccaaaatcgaaaggattatcaagcctggaaaaattttattaagaaaaaacttcaaaaatctcgacttttttaggttttaactaaattttttgctcaattgttttgaagaaaggagctcaaaaaacgcatttctgcattaaaaattttcgaatctgatgtcattatcgttcactagaaatagaaatcactattttggcattttgtcactatttcgaaattttttggaaaattccttaacaaaaatgca

SEQ ID NO: 56332 - DNA, 70 bp, Heterodera glycines
atggatgttgatgaacatcaaccgccatggaaaaaactgtcggtgaacaccgtggacaatttgactcttc

SEQ ID NO: 56333 - DNA, 178 bp, Heterodera glycines
atggcaaacagtggtgaacattcctcgcgccgtcagcagcaacaacaacgccatcctaacaccacggcggaaaacaactcggacattgagggcactgcgcatcgggtggcgtccgttactttgaacacggagtccgactcgcgcacatccgccgacctgccggcatatccttttcgga

SEQ ID NO: 56334 - DNA, 990 bp, Heterodera glycines
atgttttctcgccaaatgctaaagggatattatgcaaagcgtggatataactttgatattagaacactttttggtttgttacgcttttggactagggttgcaacttcaacgtcggggttgggaaatatcgggggtcgaggtcggagacaaatttcgaaaatcgccaaaaaaaatttcggagacggtttgcaaccctattttaggaattattgcatcaaattacactttttttatctttttattattttaagatggtattgataagcgaattgatgcatgtgccaagggattcaacgaagatccggtggtgctttatggtaaaaaaaacaaacaattttttaactgatttattaaaaaaacaaaaataattgttgtttttttgggctttcgaattttgccactccatcaggcggacagagactttcttgtacaaacaatgggcacagttatcaatgaattatgtccaaatgtaattctacaaaaaaaaaataccggattttttttttttaatttttcgatagataattgcatttggactgctcatcgcccaccgtcaactcgtcacattagtacgcatgaaaaaactgaacttggacgcgccagatttcaacacaattgtggtaaataataaaaaaaattctaaattttcaacaaaaaaaaacaactaaaaatttcagaatctaattgaatgtcataaaacgaatctcatgcaaggtgatcaccaagtcagttttggtcaaaaccttgtgataaattaactaacatgtttttctttaggtgccaatatgtctgccaaaatttaaccaaaagttggttgatttatttatttttttgtttgtaaaatattttagtttaaatttgaattatccgcgaccccgaaaaccgtcagaattatctttttgacactttttttcgcaatttttttaaaggagagggttcaaatattctcatttaatataaaaacaaaattttttttttgattccatgcca

SEQ ID NO: 56335 - DNA, 711 bp, Heterodera glycines
atggcattgacacggctgcaccatttcaccaaagcgctcgtcaccgaagcaaatgcgctgtcgaaaggtggtagtagttcaattgtgcttggtcacagtgccgaattcgaacgttgcattcattctatgcttgtcatggcacaggtaaatcctgagattttttttaaattctcaaacagaaatttttttggaagaaaatctttgaaattttttaaaacgccaattaaaaaaataatgacaaatttttattttaaaaaaatcgctcactgtgaacattttttgatttataataaacaaacaaacaaaaatgtgcacaggtttttgcgccatgtttggccacggaacagtgggccaaataccaagcggtgccgaaactcaacgaccaactccagcgacaggctgagaagccgataaatgagaatgaatggccaacggtggacgaggacgacggcgacgtggtgcacgaagcagaaatgaaataaatatgtctgcttgttgtttttgtttgtgcattttttcaaatggttgtgtttttttacaccgtacaccaaaaaaatgttgcgaattgtgctgtgcccgggccgtggtaaagtggaactccacttcagcggtccggcacgcaattggtacaatgcatgcaaaaaaaacaaccattttttgttttgttcaattatgtttggtgtacttttacaatttgcaggctcaattaaa

SEQ ID NO: 56336 - DNA, 1442 bp, Heterodera glycines
atgagttgggtatggaagagtcggatatggatgagttgggtactggatatatggatggatgagttgggtactggatatatggatgagttgggtatggaagagttggatatatagatgagttgggtactggatatatggatgagttggatatatggatgaattgggtacggataagttggggatggatgacttgggtatggatgactaaatgtcgggtaaccgaaaatttttatgaattaccaatccctcaatcattttctcaactgatttttacttttcagctttccctctggctggggtcgcgtcgaaaccgacactctgtaagaaataaatgatcaattaattaattcccttccaccggtttcattccttttaattcccttcccattttccagtgacacattcttcgattccagttggtattatttgcgttatttggacccgcacaattcgaatgcgccgttcgacccggacattgtcagcaaacacatggtgagcatgaaatggagacgacttgaacttgaaatcataagcatagagtatggatttggataaatttcaaaaaattttgatcctttaaaaaaatttaattggagaatttagaacaaagtttttatataattttggccttttgtagtgcaatacttaattctacagtaccctatataaaaatactgtattgctggcgcattttccgggaggggagcaccccgtcccccaaaatccaaaaaatgaaaaattagacaattttcagcccgttgacatctacattggtggcatggaacatgccaaggtgcatctgttctacgcccgcttcatctaccatttcttgcacgagcttggcatggtgcccagccgtgagccgttcgcgcatttcattcagttgggcgttgtccgggcgcccacctacaaattgcctgacggcagatatgtgcccgactcggaggtggacggcaacaaaagttggttttactgaacaaacccaacgatttttgggtgttttgaacattctaaaaacagagcactcttttcttgaaaatttaaagggttgtaagaaaattggtcagacggccttattgggctaaaaacaggaaaaaatatttaatttactttttgtctcacagaattgcctaattctcggctggtgcacaaagggagcggccaagccgtacagaaggagtttgagaagatgtcaaagtcgaagcataatggcgtggtaaattttgggaaaatttattgggaacatgaattgaattttctcgaaaattcggggcctaattgttttccgcttttttaatgtaattttttattaggatcccatgggtgtcatcgacagctatggtcttgacgagacaaggatgcaattgttgatcgaagcgaggcccaactatcagattgattggccctatccgtaccccacatttcgtatgttagcatcctaa

SEQ ID NO: 56337 - DNA, 2272 bp, Heterodera glycines
atgcgcatacagttgtcaaaaactggcgtcaatttcgattggaatcgcgtgagtgccctcctctgtcactcgtccaattgtgccgaaactgcgatttctcccccttttcaattccaggagattttcacatgccgaccagattactttcgctggacccagtggatttttatccaactcttcaggcatggcttcgtcaggaagacgctttccgaagtgaactgggacccacttgacggcactgtgttggccgatgaacaggtgacctaaagtgccgtacccagaagacccttattgcttcggcgagggggggggggaggcgagcgaccgtttttttaattaaatcgaccctctatccagtggtatatcacacatatgcattttccgactaacagctcgcgaggttcccttgttagtttttataggcaccgccggagaaagaaaattctgagaaattttgacgaagtctgttttaaaattgtataattttaaaaaatccccattttttcccattcattttttcgttttcaatttctggttgcttcattctctaccaccgcaaattacaatatttttttttcattaaagattgatgacaacggttgttcatggcgctcgggtgccaaaattgagaaacgactgcttcgccaatgggccattgaaacgccgcgttatgcaaaggttaaaaaaaagttttgctgaagcactgacccaatttttctatgggcacattatgttgggtgcatttcattccccttaccctcggtttccaaaaatttttcaaaaaatctcaagaaattttttttattttcttaatttgttttcagcgtttgttggacggactgtcatcattggaagcggaatggggcggtgtggtcggcactcaggccgattggattggcacttgtgacgtgcaccgattcctcctccaaacggaggtggtgtacaatttattaatataagtgtacacaatagatttggatgtggtagtggaaaatgaaataaaaactttataaatcagattaaagtgtcataggtttgaagaggttttgggtggtccacaatctgacagagtagacaatttgaagaaaaaaaaatcttgttctatattctcgtgaaaaaaatgggggaaaatttttttttgtttctttttgaaaatcatttcaacaaatttaatagaaatttcttccagcacagcagtgggcatggtgttgaacaacaacagtttgaccttcgtctgacggacccgacccaacttggcaccgcacaatttgtcgtcatcacaacagagcattcgcttgccgaagaagcggccaagcacggcaaattgtcacacaacgaaccgttcagtgagtgggaaatcatttgtttatttgtgaactcattttgggagggagcagacgatggaggacaatattacaaatatttatgttttttttcatctccaccataaaaaatttggcgctatatggaaagtcaccgattttgaaattttttttcactttttttggtcaatttttttttgtttatttttaatgcagaatttgtttttttaacatggaacgtattgcatactatttaataaactgaaaaaaaacattttaaaagaaaatttagcgctagttaaaaattgacaacttttgagttttatcaaaaaccaaaggggggaccctattgttttgcaaaaattttttgagataaaaaatcgtgaatatattttttattcgccataattatgctgttaatacttaatattcatcattatgtgtcaaaaaaaaaaaattgaccaaaaaaaatgaaaaaaattttcaaaatcggtgactttccatatagcgccaaaaaaacgatataagttggttgactaaatttcctttaaaaattttcaaaaaattcctacatcaaacaatcgcgtattttaacatttttcccactcccttcaacatgcttcaatttaagcaatatctgagccaaaaggggtgtttgtttgtccaccggatgtggctgctcgtcgcaaacatgcttgtccaagacaaatttatgccaaaattggcgattttaccacaaaagggaaatcgttttaagtggcataaaatgaattgtaatttcacgtttttggtgtgcaaagacacagaaaattaattgcaacttcacgtttgtttggtgggtacttacttatacagtttaggccacatggattttttttttgttaaaagacataaaaaatgtaaccatggggtttttggggtcgctgatcacgaatatgacatccaataaa

SEQ ID NO: 56338 - DNA, 1179 bp, Heterodera glycines
atggctgcaccgaaagttcgttttatgacaaaggtatgttttttataatcccagtaaatttcaaatttgcgattccttcgggttattttgtaccaaataatatatgatttcagatttatcatccaaacattgacaaacttgggcgaatttgtcttgacatactcaaaggtgcgtgtcgctacgtttacattatttttttttcaaaaattgaatttcgtaaaatttcttttactcaaaataaaacgagcaaaaaatcatgtccctcttccattttatcatcgagaaaccgtcgggattgtttttgaaaaaattttttggtctaaatatggtgtttgttgtttggaattgtttttcagataaatggtcaccagctttgcaaattcgcaccgttcttctctccattcaggcgcttctgtctgctccgaacccggacgacccgttggcaacgttcgttttgaatgaattctagcaacatggaattcggaatttcatgacacactctatgatgaccggtttttcaaattttcttgtttagtgatgtggcagaacagtggaaaaacagcgaaacagaagcgattcaaactgcaaaacaggtcggatgatggggtgcacacattatgtgacattattggttagaccaaactttactataattgcgcattgggctatcatcacccgcctaaattcaaatgagacacattttacgtcaaatggtgaaaacgaaggagagtgaaatatattgagcaatattagattttcaaaatttgtcaaaaatccccaaaagtgacccaatttttgggaaaatcgacaacttcactatttttttataatttccggaaaacctttgccgcttatttctgattgagtggtttatgtatgatttgaagcctaaaaattgtataattgagccatgcaaattcagtggacccgattgtatgcgcatgcctgattactgtgtgagttggtgaggacttggcttggctggcgctagaggggcggaggaacatcttttttttgtttttgtgaattaattcgtggatatgtgatctgtttgcttggacggaaaagaaaacgtacagacgacgacggcgacactttctttcccactctttttcctccccctttttttgtgacaaaatcaaaagcaaagccattttttttgtatttttgtggaataaa

SEQ ID NO: 56339 - DNA, 1767 bp, Heterodera glycines
atggcattaattatgaagccaacttttctcatgctcatttcaacttgtattattgcgttggtttacgcatctgcggagtatgatgaatgtgaaggtaaatatgcagtatttgctgggatcagttttattcccggaaaggacagacaataaatatcgaaattcatttatgataagggtaccccattttttgggagtttggcctcttccgtgaaccaatccaatccttgggaccatcactaaatattggcaattataacggaagtatttttcttttatgacacataaataagtgtatattccttaaattttttctctcaaaattttcttaattcgattttttcaatccccatttttgttttttaagtttgcactgatctgtttacggaggtgatgaaaaaggttgatgagtctggtgaaaagggagagccggcagtgaagtatttttcaacaattttcctattttttttttttcttaaaattaccagttttttaggaaaatgattattgagcattgcaagtctgtcaaaggtgtggatgataagaaagaaaaattggttggcattttcaattaattcttttaaaaaatgaaaaaaacaattgattatttcagtgcttctttattggcgctcatcctgactcgtccacttcagtcctgggcgatattgcgaaaccattgagcttccataaaccgccgaataaagtataatagggctaatatttaagtgagattttgtaatcattaaagactggatttattttattcaaactctgatgggtattcaaatgaacaaaatcgattgacaatttttaattaggtagaagtttggcttgattttttttcatattttttaaattatattaatatatagtacatacctatatgcttttcaggtatgctctcaactcaaggaaagggattctcagatctgcgcactgaaatatggtaaaaatatcataaataaaataaaaataataagactggcaacgagttcacatttttgtctaaaattcaacctaaaacttcactattaaaataatttgcatttttcgtaacgtgaatttggatgataattgtttatttttgtcccctaaaatcgggtggatctttttgtaaaaactgttaaaatgattaaaaaatttctaatctgtccaatttaaatcactttcagataagccaattggtgagtttatgcttctgttttggcggtggtaatgtttaattgcttctgtcattgtgttgttttgttcagattgggacagtttggtgctggagaaaatgcgtgtcaaacagctcaaggaacttttgcttaaattgggcgattcctgcaaggcacggatttaaatttaaatttttcggaaatcgaatgaactctttttaagcctcacttttttttgaggaaatttcactgtcggtcgaaattcttacgtgcattttttgcgcaataattagtaacatttttatgtatgcatgagttagttgggttttgactgggcatccaaaactttaaagattaaaaaaagccaactttctaatagtttaaaaaaaatgcaaaaatatggaaataacgattcaggccttccacaatccagggggaaaatatggctttcaatattgttggatgctatcttacattattcattgatttgattcttaaaattgaataaatttcgcaaaattccaatgttttttttcagggttgtacggagaaggtggactacattacgcggatcaatgagctcaaaccgaagccgaaaggagaactttga

SEQ ID NO: 56340 - DNA, 896 bp, Heterodera glycines
gacaaaaaatggtaccttgagccggttgtcatcgcactttctgccggctttcttccatttggttcaattttcattgaaatgtatgtgttttactctaattggactttttggggataggaaattgcaattaatttttgagattctttttgttttcacaggtatttcattttcaccagcttttgggcctacaaaatttattatgtgtacggcttcatgttgttggttgcactgattttgattgttgtgactggtaattaatttttttatatattttttttgttacaagccttgactaataaattgtttcatctcacaatttcagcctgtgtgagcattgtgggcacttattttctgcttaatgctgaggactatcgttggtgagtaaaatttttttttaattgtcaaaaaatattatgttttaggcgatggacgagctttgcatctggtttgtataaagaaatgaaattttgaaaatttttataataagattttaaaaatttctaaagattttcacttcccaaaaatgtttgatttaattttagccatttaaattaaaaaaaaatagttgttgtttcgacaataaatatcttctgttttttctttcaaggtgcttccgttgctttttacacttacaactacgcgttctattactatttcttcaagacaaagtgtgtgcaattgaattggtcttttttaaatgggacaaatttgaatttgcctatttttcattaaaatttgttttgtttgtttgaaggatgtacggcttgttccagaccagtttctattttgcctacatgctgctgtttgcgctcgcacttggccttttgtgcggcaccgttggctatgtgtcgagcgccagttttgtgcataaaatttactccagaatcaaactggat

SEQ ID NO: 56341 - DNA, 461 bp, Heterodera glycines
atggtcccaaggattggattggttcacggaagaggccaaactcccaaaaaatggggtacccttatcataaatgaatttcgatatttattgtctgtcctttccgggaataaaactgatcccagcaaatactgcatatttaccttcacattcatcatactccgcagatgcgtaaaccaacgcaataatacaagttgaaatgagcatgagaaaagttggcttcataattaatgccatggtaatctattcaaaaaaaatgtgcattaatttttaaataaaaataataaatgaaaattacatataggtatgtaaaaaagcatataaaacagtataaagaaaaagaaagctatgcatatgtcatgcaaacgtttatgtgttatcgctcgttcgcatatcaatgtcaaccgaaaggaaaatcgttgtgaaaaaaaatttaaaaaaattatgtcgtggcaaaaaatcaa

SEQ ID NO: 56342 - DNA, 4028 bp, Heterodera glycines
atggctcaacaacagcaagacaacaaaatcaaatcggccaaaggaccaggagcatattcacaggaaatgtcatgggattcttgggcggaaagattcgattttttcatcaagctcagagggatcaccgacccggagatgaaaaagctattgcttttcaccgaaattggcccaatttatgatgagttaagaatgatggcacagcctgacgacatccgtgatatggattttgcggaaattacagcattgatgtgcgagcgttacggcgaagcaaagtcaattgcggcaaggaggcacgagctgttcaccgccaggcaacattccggccaatcgattcgcgacttttccattcaattgcgttcacttattgccaaaacggagtggggcaaggacagcatcgacatgtgcttaagcgcattatttgtcaatggaattgtcgacgactcaattcgtgccgaactgatcaaaaaaggggacaaagatctcaaattcaaagatgccgtcgaattggcagttgtgctggagcaatcaaatgtggacgctcaagcgattggatcggactcattgaaatcattgaaaggcaatgtggccaaaatttcaggaagaggaggaggatatgatcgcgccaaaggaaccaacaatagcaaaagtgccgacagtaagccatgctaccgttgtggaagaagcggacattgggctaatatctgtcccggcaaagccgacaaatgcaccaaatgcgggagagtcggacattgggcgattgtatgcaggacaaatggaggcaacaaaaacccggccagagtggaaagtcggctatggaaaagcagcaatcgcgtgaagcaaattcagctgcagtgcgatgagaagccaccagtaatttcgagtttggagcgagagtcggctaaaactgagactgttccgccgagcttcatccaactcaaagtgcataaaggaaatgccgaattcgaattggacagtggtgcagatgtaacaatcatcggtagccaagattggagccatattggaaagcccgaattgaaggaaagtcaaggactactggcttatgggggcattccgatcaaaggcgtcctcggcatggccaatgtaaatgtggaatacaatggcatgcaaatcaacacggatatttatgtggttaaaggaaataagaggaatttgtgcggtcgtgatttgattcgcggactgcgcattgatttgaacaaagcattcggcattaacgcaatccaaatcggatccacgaataatgatcagaaagaggtggacaaaattctcgaaaaatttcaagaagtatttcgagacgaattgggccgatgcactcgtcaaatttcattgaaattcaagcctggagtgcaaccgaaaaggtgtaaggctcgtcctgtaccatttgcgctcaaagccgaagtggagaagattttggatcagtgggtacagcagggagtgctggagccgacgaacaacagtgattgggccacacctttggtcattgtaccaaaaccgaacggaaaaattcggctctgctgtgattacaaagtgaccgtcaaccaatggttggacgtgcaccaatatccactaccaagaccggacgacctattcagtgtgctaaatggcggtcagaaattttcaaaagtggatttgaaagacgcctatctgcagctgatgttggatgatgaagcaaaaaagtgtttggcagtatgcacgcacaaaggattgttccaatttacgagactcccttttggcgtagcgtcagcaccggcgattttccagcaggtcatggacgaaattttgcaaggaattgaaggagtggcagtgtatctcgacgatatactgatcacagcaccaacacaggcagaacatctttgccgaattacgcaggtgcttgagcggctcaaggcaaatggattgagagttaaacgggacaaatgcgaatttatgcgtgaaagcatagaatatttgggacaccgagtggacaaaaacggagtccatgcttcagaggaaaagctggaagcaattcgcaaaatgccaccgccccaaaatttaaaggagcttcaatcctttttgggtatggttaattattatggcaaattcgtgcccgcaatggctaccgtttccgagccattaaaccaattgcggagaatggaagaaaagtggcattggggaagtgaacagcagaaagcatttcaaaggattaaagaaattttgtcataaccgaagtgctcgttcattatgatcccggccagccattatacttggcaacggatgcgtctgattatggcgttggtgccgttcttttccataaaagtcaacaaaatggaaaggaaggcgtcatcatcgcctatgcatcacggacattgaatgcggcggagcgaaactattcgcaaattgaaaaagaaggccgcggaattatttttggagtcgaaaagtttaaacaatttttgtatggccgaaaattcgtgctacagacggatcacgaaccgttgaaaaagatttttgggccaaaaagtgaaatacccgtggtggcggcgagaaggctgcaccggtggtcactcattttaatgaacttcgactttgacatcgaatattgtccaacaaaagaatttggaaatgccgatggtctatcgcgacttccatgtccggagatagcaaaaattgatttggacagtgcagaagtgagagccgtacaattggaaaacatcgactcgctgcctgtcaccgcaaaatcgattgccagtgaaacagcaaaagaccaaattttgaagaaggtcaaagaattcattgaaataggatggccgaaaaaggtcgaaagtgatcagctgaagccattcgagccgaacaaaaacagtttggaattggtaaatggatgcatcatgttgggaaaccgaacagttattccgagaaaatttcacggaaaaatgttagaacttttgcatgccacccattctggaattgttcggatgaaagcattggctcgacagaaaatttggtggccaggaattgacaaggacatcgaaatggaacgaaagaggtgcagaaattgccaatctgatgcacccgaggagaggaaggttccattgcatccgtgggaaacgcctgacagagtttggcagcgacttcacatggatttttgtggtcctttcatgggacacatgtggctgatcatcgtcgacgccaaatcaaaatggcctgaagtgatcaaaatgaagaacatcacggccaatgcaacgatagaggccattcgaattgtttttggcacacacggattgcctcaacaaattgtcaccgacaatggacgacaattcgcctcggctgaatttgagaactactgccgatcacgcggaattgaacacacactgacgccgccataccacccgaaaagcaacggattggctgagcgcttcgtccagacttttaaaaatggacttcggcacatgatgggcgattccattggtttggatttggcagtttcgcaatttcttttgcaataccgagtcacgccgcatgcatcaacagaagtttcgcccgcagaaatgcttttcaaccggcgattgaggacattattggatttagtccaaccaaacccacaggggaatcaacccgaaatggcaaaaagtaaaagcggcgaaagaatgaaaaggaattatgataaaaaggctggtaaagcgaagaattttgaaaatggacagccgatttttgcgcgaaattaccatggtgggccaaaatggatacagggacgaatcttagaaaagattggagcagcaatgttccgtgtaaagaccgcccgtggagtttggtgccggcattttgatcagctcaaagctgatttgacttcgacagctgacaatcgtgatcaggagtccgaatcggaaagtgaggcagatgcggaatcggacgacgaacaacaaccgcaaccaattccgattgggagtccacgccaagaaattcggcagaaaattgcgcctgagggaggtgtgcctgatcaggcattgcgccgatcaactcgcgatcggaagaaaagg

SEQ ID NO: 56343 - DNA, 128 bp, Heterodera glycines
tatagcacggaaagacttccggtttccgacatttttggggtcggaattccgacttccgaaatttttgatgaaaagttggaaattttttaaattttttttttcaaaaaactagtaagttttctacattt

SEQ ID NO: 56344 - DNA, 388 bp, Heterodera glycines
atgggtgtccaaatgggatatattattaacctcacagagttagttacatttgtcgtcgtaggtctaaaaagtaaagcacatatgttaaaataattttttttttggataatttttttggaaataaaatatttagaaaaaaaaaattctgaaattcacctatcggaaccgccggactcttttctactaaaagtctttagaaaaacgcgccgcgaaaaaaatttaaaatttcaagaaaaatattaatattatacaaaaatattcatgataaaacagaaatataaaaaatataaacaaataaaatgattattatggaaattaataaatattttttcagagtgatctgatcaatttattgcaaatgacttttttgatcagtacacaaaactaa

SEQ ID NO: 56345 - DNA, 100 bp, Heterodera glycines; identical to SEQ ID NO: 51845

SEQ ID NO: 56346 - DNA, 1318 bp, Heterodera glycines
atgaatcgacggtaaggaaatttgtgaaaaattaaaatttttgtctacccaatttttttccttgtttcagttggatttgtggcgacgtttggatggacattctgccatcttttgaccgtccccaactcggactcaaaatggcactgatttccgaccgtttcgactttttagtggacaaacattttgatggaaaaacggaattgacaatttggagaagaatcaaaattgtaaaggacgaaggaccaaaagcgaaactgtctgttctgatcgatgacaaatgcgtggcatttccatttcccgaccatccgttgcccaacaaaatccgttttaaggaccttcagatttagtaaatcaaaaattatacagaaaaccaatcttcatttttccccttttcagttacgttgaccattctgtgctcgcatttcttcgttccaacaagcaaatttgggacagaagtggcatcaaattggaattgtttgtgcctttatatatgaccgacgtcaagctcatttgggatgtttttacccgcgaaatttggccactttttgcgaaaagcattcgccattttggctttcacgatggcgattatttggacaaattgcgtcgccgcatttcaccgacacttctcactgatcttgatcaattgtattcaattgattctggtgctctattccccgatggaattgctgatgatgggccaaatggaaatgctggccaagttttggccaaatggcttcacactccgacaaaaaatgggcaaccgaagcgattgtatcgcaataatttgttgggtccactgaatctcgaatgggtcaacaacttcaaagaggtgtgtctagccatattttctataaattgttgttttttccaattttttatttagacatttcgccgtgccaccacttctgtcagttacaatattcaactttattttcttgtggaaccaatgccaattgaatcatttgaattggtgaatgaacggaccaatgagaagctgacattgaaacagagcaaagaatacaatttggttaattggctgttgcaacggtgcccaattgaggagacggcgacggcgccagttaagtgggaaaaccgtgaaaattcgggtgccaatttgaactatatcagatttgaacttcggcatgacaataattcgggcgccaatttgaacaatatcctatttgaggtgtggggtggaaatagttgcattgggtgagcagcaaaagcaatttttgattgttgaaaaaataaaaataattttaggccattgtcgctgccagcggaagaagaagaagcggatgaaagcaatgaaaattaa

SEQ ID NO: 56347 - DNA, 253 bp, Heterodera glycines
atggagaagtcctgcaaactttggagagattatatcgattgttagtgcgctaggttcgatgagactctcaaaaatataagcctacaatctttcgcaaacttaaaaaccaattaaaaatttttagattttttattcatctcccttttcgatagtgaaagcatcagagagccttatttgtcgtttaattaacatttggagcgtttcagagcgcgttgtaaaaaatatttatgaagtacttttccgaaataataaa

SEQ ID NO: 56348 - DNA, 586 bp, Heterodera glycines
  unsure (1)..(586): unsure at all n locations
atgcatataatgattttttccaggtaattttaataccattaattaaatattttaaactataaaatttaaaaaaaaccaaaaagtgaaaaaatcaatcaaataattgaattccatgaaatgtttattaagcacttgatcgagtgcacggaacatcagcaatagttcaataatttaattttaaaactaaaataagaaaataattccatagcccgccaaagtagtacaaacaaatcaaactaggttgctgccataaaataaaactaatattataaatgaagctgcattggtataaaaaaaaattaaaattaataaatataatgatattcattttaataaacaactcttaattatcgtaataccttaaaaactatggacaagtgacacaaccagccaaccagccgctcaagaaaaactaaaaaatcaaataattttatttaaataattttttctgcattttaacttcagttttattttttggtttcaatttatataaaaatttttaatatataattgttttataaataatctatttatatttaattacagatgttcagccaacatgaggaactgcatatatttntattaa

SEQ ID NO: 56349 - DNA, 332 bp, Heterodera glycines
atggtcgggtgcgagagataaaaaaatggcaaaattaaaatttctttgttatttaaaaactttaaataaaacaataaaaaaatattacattgaagaatcaaaaaaatttgagaaaaataatttggaaatgtataaaaatattgaaattgaaaacaaatatagaaaacgtttttcatgggttttctttcagaaaacacaataaggagacaaaaagattaaaaacaaataattcaaaattattgtatttttttaataaaccatgtcagagacacgcagaactaagaacaaacaaatggagactagcttgaaattttatataaggctctaataaa

SEQ ID NO: 56350 - DNA, 2042 bp, Heterodera glycines
atgttcaacggtgagcaacaaaacgacggaaatgacaacgggcgagttgtgcgcaaaccgccacgccgctctcgcaatgccaacggcgacgtgccggcaagttcaaaattttaaaaattgaaaatttcattaaattttaattttaattttccccttccttttcctaaaggaaagcgacattgtgcggaaacgggcgcggcagaacagcacgagcaacagcagtggcgccactcgaggcactacgagcagtcaaagtggcggcggcggcaatgactggccggctttcggcggcggcaacaacaacaacaacagccgccgcaccggcacttcagcgctggacttggacatgctgctgatgccacagatggtcagcagcgacagttcggcaagttttttttgtgggttcttggccaggttttcggggccgctgatcataacaattgggggtttaattaagccctctcctcctctgcgctctgctcaagcggaatttgtacaaaaaatttaatttttgagtttcagcgcggttcaacgagcgctgccgctgttgtacaacaggtgccgcagggaagcaacgcgacttcggctgctgctgctgtcatgccaatgtcgtttttggacaacaataacatcaatgtgagtgtttgggggtgcaattggtccagtgacttatgttaaggcttttggcctcattaatttttggaaaataaaataaatttttaaaatttacagttgccggtggctttctcaagtggcagcgatggaagcggcggcggcggcggtgcattgacagtggcggggcacatgccgtggggggtgagcattgttttttgggggcacgcgaatgaataatgtccccattttaactccttttcccccgttttcagctgtcgacaactggtggcggaagtggtgaaggcggcagtgtccagcatttgcaaaacttggtctacatggcgggtgtgccgcagagcgcggggcaagcgcaggccgtgacaatgacgacggcggcggcagcgacttggacggccaatgtagggtttgaccaggaatttggggggttgctatccgagataatggttaacctagagacttatttttgccgactctggccccccaaaatggggatgggtggaccttgtcctgagctgtcctaattttaaaaattttcaagtcgggcacatttgtcagcggcggatgtgggggcactgtcgttgctggcggcatgttcgggcgcgcgagctgtggtggcagtgctggtggtgctagtgtatttggaggaatgcaggtagttgggggagtgaacgggaacacagttggcaaaatttagtgtgaatttaattaaaatttttcttcattttcttaggccctcccaccccacattcgtgatgccatcgagcgggttcacgcaaggcaaatgcagaagatgatcaccgttcaacccgacttcgccgacattttgccgccgtgtgccgacaacgggatgtcgagcctcggatggctcatgctggactggcaagccgacatggtcatggggtaagccagaattttggtcacttcatcaaaatgtttatgcaatgccccccattgctttttaaggcgtgtcgttggcattgttgtgttgtgtggcccattcacaacagtcagcgggctgaacggcttcgatgtgcggctgatgttcgaccacaacaacgcgcaacaagagatggctgtccactgttgggaggagtgcatgccgcgtctcgccaacaacattcagtgcggtgccgtcgtcgaattttgtcgcctgaaggtgcgcgaacaagggaaaaacaacaaaggcagcttccccttcacgctgctctacaacaacgagtcgcggcaccgcattctctccgcgtccagcaacatcagtgcgttgctgccttttttcatattccaaattgtacgcatttcacacaaacatttccaggtgcgaatttgatgagcagcagcaacacgccgatcattgtggaggcggtggaacagcagcagcatcttgcgggcagcagcatcacagctag

SEQ ID NO: 56351 - DNA, 1594 bp, Heterodera glycines
gtgcgaatttgatgagcagcagcaacacgccgatcattgtggaggcagcggaacagcagcagcatcgtgcgggcggcagcaccacagctagtgcccgtccatcttctgcaaccggcaccactgccattgccagcagcagccatcacagcaacatgtccatcacagcggcccaacagaacacccgaggcggcggcggcagccaagacgtgcgcgtggcaaaaaacggtaagcagcggcaaaagcattactgatcagcctatgcaaagcgctcttactgatccgatcacattaaaaattatacacaaaataaatttttcaggcaatggaaatgcgacggacgtgcatgagcagcaaagtgaggacgacggaccgaatgcgacggcggccaatttgaacagtgtgggtgcgcagcgcgtcgtcgatgccgagcccgagcatgatgatgatgaagagggcacgagcgaaacggttagcggaaaataaaacgaaacgcaaagaaatgaaacgaaacgaaatgatccattgtgacatacacacacatacaacacacacgctcgcatttatcatgacaataaataattctgtcttttcacactttctcataaatcttttttttacaattttgctttgtaaatgtttttttgttgttgtggaaggccatgaccgttttttttggtgcatgggttccaataatgcgggcgtgttgtggcggtcatgcaattttcggaaatcaaaaaaaaaattcgttcacattttcaaaatgctcatttctctgtaggcatggctgtccacagcacgccccccgccgccatcatgtacaccggttggccgccctttttgccaccgccgccgccgtcgtcgtcttcttcacagcatttcgccgccggctgggcccagtcatggtcgtcgttcgtcgccacctccccagagggcctgttcaatcagcgcccagcgcaacctgcacaccgtcgtgcaacgaatcaacgaccttgaggcacaagtcgcgcgcgatgagcgcaacgcgcgtgaacgtcgtcagcgcgctcgtcgtcaacaactgctgttgcagcagcatcagcacatgcctttgtcgtcgtcatcgtcgccgtctccgtctcctcatcatgttgccaatgccgccgaagcggacgtcatcaccattgacgatgtcgaaccgctcgggctcgcgcagcaacaacagctccacaggggtgatgcgcggtattttgcgcacgaattgatgacactcgaagatgaagccggagcggcggagatgatcatcctcgacaatgagccactctcggtggccgaccgagagtggctcatctcaacagccttcaaaatgcggcagcttccgtcatctgtcaaaggcagcgttgaggtggacgagaatggcaacagcaacatcagttgttgcatttgccgcgactggatcgtttcggacgcggacagcgtggtccggctcgcctgccagcattttttgcaccgcaagtgttttgctcaggaagcaatgcggcggagcatttgtcctctctgccgccggcactttgtgactggcgagacaatgccgacaaacgaggacggcgggaactga

SEQ ID NO: 56352 - DNA, 6283 bp, Heterodera glycines
cgttgctgggtgcgcgcccacagcaactccgcgctgcgtccccccgccaacagcatttgccggtcggggtagcactcccgacaaccttaattgagctcagaaattaaaacattattgtaagtgtgtgttgtgtgtgtgtgtgtgtcccaccgtgcatgtagcagccgttgaactcgatgcacaacggtcgcagtggtggatgacggtaggccacgcagtcgagccggaatccgtcatcgtcggcgccggcacagctgttggtgctgttgttgtcgcggcggcggcggtggtaggagcgcccgctgttccccacaacagcttcgccgatggaccagcgggcagtgcgaagcgggcccaggtcgggccgtacggcggccagcagcgtgaagaagcgccgagactccaccgatgctcggcgtccgcgcaggaatccgccctccggcgtgtgcaccatcgtgttggggcggaggtggtgctggcggaacacagccatggccaggctggcaattgttgttgcggccagaaagggttccatgccgtccgcacactcccccaccagctcgcggaagcgcaggcaggcggtgcgcaaaattttcacatctaaatgcataaatgggtatagccgtatgtgtttgttgtgctcccccccccccccccccgcccctaccattccaacagtagcggagcagctcgcggcggagcaaaaagggctggcgcccgggccggcgcagctcgtgcgcgtaccactccatgaaccgctcgcgttgctcggggcgcatcctgtccgggtcgtaggcagcaggtggtggcagcgtgccggccggcagctcaacatccaggttgcgcgcgtggatgtgatggtaggggaagaacggtttgtccggcaccccgcgcagcccaaacgtgcgcggcagggtggccagcgcacagtggaagtagttcagcgagtccttgcagatcagctcccgctggtgcgtgccgcgcaactccaacatgtacacgcgcaacccatgctgaaccgcctttcgcggccgctcaccccgacgctgcaactcctccagcaacagatggatgtcgtaacggccctaagcggacagagaaaagcagcataacaataaattatgaacgcatttgtaaaggcatcaaagcttactccgttatgtgcaagcatcacggtgcgcacaccttttgggccggtgtggagcataaagtcgacaaattgctccatcgcgccccgcccggtgcctggctccccgtcgcagaagaagcgcagccgacgcgggttcagcccgtccaacggcagttgttgtccgacgacaccgagctcatccgctccaatgtcgacgccgctgtcgtcgaacaactgttcaccgatgcgtgagcaccagcgtcgacggttggcgccccgccacggcacgccacactgacagcgcggtgctcggcgcaacggctcccgctccagctccaccccgtgcgcgatgcaccgctcacaaatcacttccgcacagaccagcaccggcacgtgcttcagcaacacagcgtggtcgaatgccgctggtgccgcctctccatcaccaatgccacccacgtccgcgtcgtcgtcgtaatcgtcgcccccctcggctggccattcgtccgcgaccctttcctgcaacatttgctgctgctgctgctgctgctgcaccacccgctcctgggcacactccacatcccaaaagatgaaccggaccgctttgttgtcgcgccgctgttgctgccgctgaccacgggtggcatcggccccctcctcctcctcaccgtccgattcattgtcttcctcgtcttcgtcctgctccccttgagcatcatcagcaatgccgttggtgttgggctgttgccactgacactggcgagcgaactgcttgggctggacaaagtgcggcgtgcggctggcatcgtgtggacctccgcatttttgacaatgatgttgttgctgttgttgttgttgttgttgtccaactgctgcaaccgttgctacggtagcagcagcagccggcggtaccattggagcagctgttgatgcggtagcaatggcacgcacgtgctgctgctgctgctgctgcggatgtcgacgacagtggtgtgcgccggaacgggcccacaccaccacattgcactgtgcgcacagccggcgctcctcacacattgagcgataggggcgaccacggcgccggtccaccactgcaccaccaccaccaccaccgccaccgagcagaccaagcgccggtggcgggtccacgcactgacggtgcgtcgcaaaacagtccgcattcgggaacacaaagcggcactgtgcacagaacagcccgccctgcggcgtgtctgcatcccggcgacatgggaagtgcagcgcatcatagcgcaaacacagcccacacacggcgcgacagcccaacggatgcgagcgtctgtgcacgggccgctcgcactcgacgcaatactgtttcgcctggggaaatagtttgaaattagaaacagaaagaagtgtaattttttgattccgaatgtccatgctttttttacactctgctttgatttgctttacatttccgttattcaacaattaaatttaaataaaattcgtttatgcttctttctttgaattactactttgcgtttaatgtttttcagatttatttaattaattttttcgtttcgtttgagttctttctttgaattactactttgcgtttgattgttttttcagatttaattaattaatttttttgtttcgtttccgttctttctttgaatttctactttacttttaattgcttttcagatttaattaatcaattgtttcgtttcatttcactttttggctacatttttctcaatttctgatagctctttaagactcatttctttttacatttatttcttttttacgttacttggctttttggtttttaattaactttactatcgtttattttttaaatttttactttgcgttgaattgcttttcgtatttaattaattaattaattgttcgtttcttagcggttcgttctttctttgaattttttcattgcgttttgttgctttgcgtttcgtttctttacaaaatgaaatgaaaattttttacccgaaaaagttgttgtggacgctgaatgtatccgtagtgggcactcctttgcagcagcaggcaaatgttgaagtgtgcccgattcggggccttccacagcacgcgacagccgtgctcccgctcgaagatgaccagtcgcacttgctgcgcgccgagccgcgagtcgagtgtgtgctggagtcgttgagcttccgccaccccgtagctgggccgatccagcggcagggtggcggattgaagcaactgacgggccgcctgctcaccgccatgcccatgttgtgcgagccaaaaggtgcgcaggtgcgtgaacgcctgtcggctgtcggcaccgtacaggtgctggaagtgccggtcggccaaccccaacacgacggcacgcgcaaggcaccacgcgtcatccgggttcaccaccgggaagaatgagcggcaccggacactgccccgtgcctctcgctcatccgcggcacaagcacccgcgcctgtgcggtcaaatgatagtgccaaaagtggaccaaaatcagctgccacccccctccccacccacttccacccttccctccccttcctttgtaccgctgttgcgctccaatggccacacggcgctgatgcggaacaatacagtgccactgaacaggtcgacgccgccggctgactgcgcggcgagccgctccaactcagcggccattgctgcggcggtgttctgctccggagcgcggtgtgggatgtggtagggcgaggcgaactgcggcggctggcacgacatgccaatgcgcagcggacgcacccgcccggccaatactcggtccaacagatgcgcaatgcattgcgccagcaaagtgtccgggcgccgcgcactcgcccacccattcagtgccacttcaaccgcctcacaccgagtgttgcgacttcggcactcggtgcgctcccatatgccaaccaccttgcagtaacggcccagctgtgcactgtcgtcctcgtggttctcagcggtttctgcattgctgctgtcgctgccagtgccattgtcggtggtggtggtggtggtggtggtggtggtggtggtggtggtggtccttcggtgttcgcccccgcccaatctgtggccacacggtgcgacgctaaacggcttattgataatgacaaatcgacaattccctatgcttaataccctcccctccctcctccgcattgtcctaattatgtcgaaaattaaagacagaaaactctcacacacatacacatacacactcgctatggattaattaaatgttagggtacaatttttaacaagaaattttatttaagtgatgagaaaatttgaaatggcaacaaaattttgagaaatgtccaaaaaaattttaaaaaaatgattggcaaatgaaaaaaaataaaatgtcaaaagaatttttcgcgcgctcagttcccgccgtcctcgtttgtcggcattgtctcgccagtcacaaagtgccggcggcagagaggacaaatgctccgccgcattgcttcctgagcaaaacacttgcggtgcaaaaaatgctggcaggcgagccggaccacgctgtccgcgtccgaaacgatccagtcgcggcaaatgcaacaactgatgttgctgttgccattctcgtccacctcaacgctgcctttgacagatgacggaagctgccgcattttgaaggctgttgagatgagccactctcggtcggccaccgagagtggctcattgtcgaggatgatcatctccgccgctccggcttcatcttcgagtgtcatcaattcgtgcgcaaaataccgcgcatcacccctgtggagctgttgttgctgcgcgagcccgagcggttcgacatcgtcaatggtgatgacgtccgcttcggcggcattggcaacatgatgaggagacggagacggcgacgatgacgacgacaaaggcatgtgctgatgctgctgcaacagcagttgttgacgacgagcgcgctgacgacgttcacgcgcgttgcgctcatcgcgcgcgacttgtgcctcaaggtcgttgattcgttgcacgacggtgtgcaggttgcgctgggcgctgattgaacaggccctctggggaggtggcgacgaacgacgaccatgactgggcccagccggcggcgaaatgctgtgaagaagacgacgacggcggcggcggtggcaaaaagggcggccaaccggtgtacatgatggcggcggggggcgtgctgtggacagccatgcctacagagaaatgagcattttgaaaatgtgaacgaattttttttttgatttccgaaaattgcatgaccgccacaacacgcccgcattattggaacccatgcaccaaaaaaaacggtcatggccttccacaacaacaaaaaaacatttacaaagcaaaattgtaaaaaaaagatttatgagaaagtgtgaaaagacagaattatttattgtcatgataaatgcgagcgtgtgtgttgtatgtgtgtgtatgtcacaatggatcatttcgtttcgtttcatttctttgcgtttcgttttattttccgctaaccgtttcgctcgtgccctcttcatcatcatcatgctcgggctcggcatcgacgacgcgctgcgcacccacactgttcaaattggccgccgtcgcattcggtccgtcgtcctcactttgctgctcatgcacgtccgtcgcatttccattgcctgaaaaatttattttgtgtataatttttaatgtgatcggatcagtaagagcgctttgcataggctgatcagtaatgcttttgccgctgcttaccgttttttgccacgcgcacgtcttggctgccgccgccgcctcgggtgttctgttgggccgctgtgatggacatgttgctgtgatggctgctgctggcaatggcagtggtgccggttgcagaagatggacgggcactagctgtggtgctgccgcccgcacgatgctgctgctgttccgctgcctccacaatgatcggcgtgttgctgctgctcatcaaattcgcacctggaaatgtttgtgtgaaatgcgtacaatttggaatatgaaaaaaggcagcaacgcactgatgttgctggacgcggagagaatgcggtgccgcgactcgttgttgtagagcagcgtgaaggggaagctgcctttgttgtttttcc

SEQ ID NO: 56353 - DNA, 2659 bp, Heterodera glycines
atggccgctgagttggagcggctcgccgcgcagtcagccggcggcgtcgacctgttcagtggcactgtattgttccgcatcagcgccgtgtggccattggagcgcaacagcggtacaaaggaaggggagggaagggtggaagtgggtggggaggggggtggcagctgattttggtccacttttggcactatcatttgaccgcacaggcgcgggtgcttgtgccgcggatgagcgagaggcacggggcagtgtccggtgccgctcattcttcccggtggtgaacccggatgacgcgtggtgccttgcgcgtgccgtcgtgttggggttggccgaccggcacttccagcacctgtacggtgccgacagccgacaggcgttcacgcacctgcgcaccttttggctcgcacaacatgggcatggcggtgagcaggcggcccgtcagttgcttcaatccgccaccctgccgctggatcggcccagctacggggtggcggaagctcaacgactccagcacacactcgactcgcggctcggcgcgcagcaagtgcgactggtcatcttcgagcgggagcacggctgtcgcgtgctgtggaaggccccgaatcgggcacacttcaacatttgcctgctgctgcaaaggagtgcccactacggatacattcagcgtccacaacaactttttcgggtaaaaaattttcatttcattttgtaaagaaacgaaacgcaaagcaacaaaacgcaatgaaaaaattcaaagaaagaacgaaccgctaagaaacgaacaattaattaattaattaaatacgaaaagcaattcaacgcaaagtaaaaatttaaaaaataaacgatagtaaagttaattaaaaaccaaaaagccaagtaacgtaaaaaagaaataaatgtaaaaagaaatgagtcttaaagagctatcagaaattgagaaaaatgtagccaaaaagtgaaatgaaacgaaacaattgattaattaaatctgaaaagcaattaaaagtaaagtagaaattcaaagaaagaacggaaacgaaacaaaaaaattaattaattaaatctgaaaaaacaatcaaacgcaaagtagtaattcaaagaaagaactcaaacgaaacgaaaaaattaattaaataaatctgaaaaacattaaacgcaaagtagtaattcaaagaaagaagcataaacgaattttatttaaatttaattgttgaataacggaaatgtaaagcaaatcaaagcagagtgtaaaaaaagcatggacattcggaatcaaaaaattacacttctttctgtttctaatttcaaactatttccccaggcgaaacagtattgcgtcgagtgcgagcggcccgtgcacagacgctcgcatccgttgggctgtcgcgccgtgtgtgggctgtgtttgcgctatgatgcgctgcacttcccatgtcgccgggatgcagacacgccgcagggcgggctgttctgtgcacagtgccgctttgtgttcccgaatgcggactgttttgcgacgcaccgtcagtgcgtggacccgccaccggcgcttggtctgctcggtggcggtggtggtggtggtggtgcagtggtggaccggcgccgtggtcgcccctatcgctcaatgtgtgaggagcgccggctgtgcgcacagtgcaatgtggtggtgtgggcccgttccggcgcacaccactgtcgtcgacatccgcagcagcagcagcagcagcacgtgcgtgccattgctaccgcatcaacagctgctccaatggtaccgccggctgctgctgctaccgtagcaacggttgcagcagttggacaacaacaacaacaacaacagcaacaacatcattgtcaaaaatgcggaggtccacacgatgccagccgcacgccgcactttgtccagcccaagcagttcgctcgccagtgtcagtggcaacagcccaacaccaacggcattgctgatgatgctcaaggggagcaggacgaagacgaggaagacaatgaatcggacggtgaggaggaggagggggccgatgccacccgtggtcagcggcagcaacagcggcgcgacaacaaagcggtccggttcatcttttgggatgtggagtgtgcccaggagcgggtggtgcagcagcagcagcagcagcagcaaatgttgcaggaaagggtcgcggacgaatggccagccgaggggggcgacgattacgacgacgacgcggacgtgggtggcattggtgatggagaggcggcaccagcggcattcgaccacgctgtgttgctgaagcacgtgccggtgctggtctgtgcggaagtgatttgtgagcggtgcatcgcgcacggggtggagctggagcgggagccgttgcgccgagcaccgcgctgtcagtgtggcgtgccgtggcggggcgccaaccgtcgacgctggtgctcacgcatcggtgaacagttgttcgacgacagcggcgtcgacattggagcggatgagctcggtgtcgtcggacaacaactgccgttggacgggctgaacccgcgtcggctgcgcttcttctgcgacggggagccaggcaccgggcggggcgcgatggagcaatttgtcgactttatgctccacaccggcccaaaaggtgtgcgcaccgtgatgcttgcacataacgga

SEQ ID NO: 56354 - DNA, 338 bp, Heterodera glycines
atggtcgaagtgtcaaccaattggtgggaaattgaagcgaaaagtggttattggccacgggaaacgccaaatgttggcttcgataatatgagaagagcaaatgttggccatttagtcacagaatttgccttaatttacgcgaagagcaaaagttgccatttgtccctcagggatatgagacgagcaaaatttggacatttggtcacagaaaaagcaaaagtttggcctcagggatatgagaagagaaatagttggccattttgtcacagaaaatgcaaaagtttgcctttgaggccgttagggcagaaatgagatgaagggccaggatgagggtagaa

SEQ ID NO: 56355 - DNA, 185 bp, Heterodera glycines
gacaatttggtcaactccttcgggaggccgtgcagcccggacaacgaacgccatctcgtcagcaccacgggtaacacggaatggcggagaagagcaagataaacaaaaaaaacgtatcaaaagatgggattgggtaaaattttggtggtattgtgccagaagtggaagtctctcgattgctctgg

SEQ ID NO: 56356 - DNA, 140 bp, Heterodera glycines
gaattttttgattttttaaaatcttttttgaatttttaaaatttcccggttggtccctgttcccggtcccgaagaaaaatcgaggtcccggtcccggcttctcaggtccccaagtcccggtcccggttttgcccaaaatt

SEQ ID NO: 56357 - DNA, 1062 bp, Heterodera glycines
atggcagcccatcaccagcatccgcatgccgttggcgcaggtggcatttcggcagccggactgctccagcagcagttgcagcagcaacaactgcagcagcagcaacaacaacaacaacaacagcagcagctacaaaatgccacaaacgccgtcactgctgccacacagcagcatccgatggccgccgcatttgcagcgcaagcacaactcacagctgccgcggttgctgcagctgaagcttctcaacagcagcagcaacacaacgccagcaacaacaacagtggcaacgccaacaacattggatccggcgctatggcaactgtgcacacaacactgccaaccgcaacaattgctggaattccgtcagcgaacgcgttgcaacagcagcaacaacaacaccagcaacaagtcgcagctgcagccgctgcagctgcgcaacaccaacaacaacagcagcaacagttggttgtgtccagtcaccaacaacagcagcaacaacaaaacaacgctgttgcaacacagcaacaacctccagtccaagctgtacaaccacttcagcagcagcagaccgcaatcccatcgttggcgtggccaattttttatgtgagagaaaattaaagttttcattgaccgttcatcagtactttttgaaaattatggtccttttcagtttgttttatgggtagggtgaggatttttagtgacggaaagtgttttaagaataagaaagcctttcagttaaaatctttgaaatttgggattttttaaagttatttcacaatcctattaaaatttaaacccttttagaatgaaggtggtcttattttaaggtttttttgtgtgaaattccaaagcttctgtgaggctttcaaattgcctctttgttagtctgatcacattcgaaagataggagtcgaatatttattaagctgatcttgagtcccactctcgactcgagaaaagccgaatttgtgggtatagccagcatatcgggtctcggctttttagtctcggtctagagtagcactaaccatcaattatatatttccgagagcaatgcaa

SEQ ID NO: 56358 - DNA, 252 bp, Heterodera glycines
atgggcagcatggaaattgtatgccaaatattattatttttatttggttatatttaaattttatgtttttttttcagaaagtgccaaaacatactcttggccaccgcccgtttgttgcccaatgcctgtggcattttgttgctgctgaagaagtgccaactgttgctgctgttgctgtgttggctgattttgtgaactgtaaatatttttaatttaaaaagcaaatattttaatatttgcgatgataataaa

SEQ ID NO: 56359 - DNA, 424 bp, Heterodera glycines
atggacagttttctggcattgtgagttcatggactatccccatggctacactttgaagaattttatgtttgaaaatttaagaaaaagtcagggagtgcacccccgtcaaaatttctattttgaaaactttaaaaaatccccagcgaggcacgacttactccccttttgaaacatgctgctgaccttgacaaaaaaatattcccttttcagtgaaaatttgcatgatttggcgccggagccccacacaaaggcaattcgcagtttccatctgttcggtgtgcgcctcttcgagtgcaaaggcggcctcgagcaccgcgtggtggaggagtaccgggacgcatcggagcaattcccaagcggcaacgacgcgagaagacgcgcgtttttggcccttttacgacgcgaaccattctacgggtgacca

SEQ ID NO: 56360 - DNA, 450 bp, Heterodera glycines
  unsure (1)..(450): unsure at all n locations
cgtgaactgtcgcgnatgcggtcattgatttcactcgcacagcaaagggtctgttggattttgagatttttgatggcattatatttatttacggcacttcattanaccattgncatgtttctgctccctaaattactcgttcaccctactttttgtgcccattttcagtgactttgtgtttggtgtgtttcccaacgacgattggctggagacggcaccccaaatggattatttctgtgccctttcttccgattgttgcggtgctcatttggaaatgtcgtcggtgcagcctcggaattctggcgagggtattttgggcttttcgcccgttttgtcggccgattcttcgcgccattggctgccgggcgagcggaaaattgtgttcagcaattcgttcattctcttccaaaacactgataaattggcaaaggaagtgaccgaagtggcgac

SEQ ID NO: 56361 - DNA, 451 bp, Heterodera glycines
ttacattgatcactccgtcatcgcttttcttcgttcaaatcaccaaattttcgacaaaagaggcaccaatttatatttgtggcttccttcttcaccactcaacatggatacccagcggattttggacatttttgttcgtgaaatttggcccattttttctgaaaacattcgccacttgggcttttcccgtcgtgatcatttggaccatttgcttcgtcaaatttcgccgacaattctcatcgatcttaaccaattggtttcaatccattcatttgatctgttgcccgctgcgattggtgatggttttgatgggccaatttcaacaatttctgctggccaagcattgtccaaatggttgcactctccgagaaaagatggacaacccaagcgattgtgttgcgataattacaacgcacaaacgaacactgattggatcaacaatttcaaggag

SEQ ID NO: 56362 - DNA, 659 bp, Heterodera glycines
atggcaataaaagcttcttccatttccacagttacatcgatcacttcgtcatcgcttttatttgggatgtttttgttcgtgaaatttggccaattttttcggcaaatattcgccacttgggcttttacgatggtgatgatttggacaatttgtgtcgtctcatttcaccgacaattctcactgatcttccgggggatggggtattccgaggtattttctgaaatcggaattccggctccaaaaacgtcgtaagtctgaaatttctgaaaatttccgaattttatcaaatttcggaaatcggaattccatgccatccctggtgtggccccacatttttggcaaatcactgtttttttgttttcaaattgtttagcattttcttcgtgccaatgccatttcttccgtcagttacgaaattcatttttctgttcatgtgccatcaatggaaatggtgccatttgaattgatgaacgaatggacaaatgaaaagttgacattggccaaagcaaaagaaaatgaattggacaaaagttggataatgaaacgatgcaaatttgggaagaccgcggcggttcattgggaagacggaaagtgggacaacaattgtaacaatgtgttcttttggctttttagtggcactaattgcattgggtgagcaa

SEQ ID NO: 56363 - DNA, 87 bp, Heterodera glycines
cagtccaggaaaaaaatatggatttccatgtaaatgatagccctaattattacacaaatgccttttttaattgctcacccaatgcaa

SEQ ID NO: 56364 - DNA, 109 bp, Heterodera glycines
ttcgtacgtttcagacctctcacagtccaggaaaaaaatatggatttccatgtaaatgatagccctaattattacacaaatgccttttttaattggtcacccaatgcaa

SEQ ID NO: 56365 - DNA, 327 bp, Heterodera glycines
atggcagtgcaacggctaacaccaacaaggaagagttcatcagttgccaagcgaccagcattttcttccagcaaacaaccaaaaggaaaagcagcgaatcccacaaaaacaagccaaacaaatgaactcaacagaaaaatgaaagccgtgtcgccaaccgcaagtggatcaggcgccaaccatcattgcgtcgctacattggccagaagctcggactcaacaacagtaattgataagggcagtcaacagaattgcccaaacatgagctcggcaacaatcagtaagacaccatgccaacagcactcgtccgagaagacgttaaactaa

SEQ ID NO: 56366 - DNA, 842 bp, Heterodera glycines
atggacaaagcgttgtgcgcactgatcagttctgatcggattatctacaatttgaaggagtacatcatttggacccaaagagagttgctgcaggacaaaatgtttgacgatgagacctcatccggcttgatgagaagcatgagggtgggtaatggtgctgaccagggatggcaaggaattcagacttccgatttccgtcatttttgggggcggaattccgatttcagacttacaaaaaatgttggggctcggaattcgtgtttccgtgtaatttttggggcctcggaatgtcatccggggctgacaatgagcccggactcaaaaacaaccaaaatgaaaaataaattcgtagaagatagacacaaaacctaaaatgttttttgggttttcaaaatatttagttaaatttcattttgaaaacctataaaaattttttgaattttgggaaaacccgtaaaagacggccagaaaactcaaaaaaaaacttacttcttcaagcattttttggtgatattttttgaaagttaaaacgaaattcattaaatttttcaggctaatagagggacacttgggactaaaattaaatatttattctatattattgaataaaaccaacaaaattcaaaaattttaagctgaaacccgagggttttggctgtaaatctaattgaaaattataattaattcttaaaaactaatttttgaagaaattaatctgtttgatctttttcttgaaatttgcccacacagggccaaattttagtgaatttttgacatttcctcgaaaatttccttagtaaaatgtcaattttaaatggtatctattttattcaaagaataaa

SEQ ID NO: 56367 - DNA, 958 bp, Heterodera glycines
atggcatttgcagaggaacaagcgaatggagaagccattgtcacactgaacttccgttctggaagagtgtgcccttattttcacgtgtgcatttatatgctctggacggaaatgccaatcaacgaaaatgcaatgaatgcggaaatgccaatcgaaatgaatccattgacacggaatggcaggagcacttgggtaaaaaatgtttcaatgtctaaccctttaggaaatttgttaagcagaaataaaatttttctttaaagattcacaagtttttcaaaatccggggaatatttgtaagattaattttcataattaattattattttttgggtttttgttaagcccgttccttatctgcaagatgcgatcccaaacgatgggctgaacaagtggattatgtttggcaactttttcaatctgaccattgggcccgcgttggagacgcctgaccttttttaccactttcgcgtgttttgtgatgatgataagctgaaaagtaggatgcagaaaattgacgaggaggacaaaaaagtggagaaatggacagtttctgaagagtacgatgactacaaattcaagtcgttcaccaaggggaggacgtcgaccaaagttgtgttcaacagcgagctaagacaaaagtgcgaccgctatcatatcaaagtgtgggctacgcataaggaatggatacgcatggacgaaacggcgatgacggtggggcaagtggaaaatgaggatttgtccaattgggaaatgaggatttgtccaattgggaaataggatttgtccaattgtgaaatgaggcattgaccaattggggggaagataattggcatcggagagggacaaatgggcgggctgccagccgatttacgcaccggttgcgcaccgacgtttgcggacggctttaatgagaaaataatcatttttagcaaatatcattttttggccaacaaataaa

SEQ ID NO: 56368 - DNA, 951 bp, Heterodera glycines
atgggcatcgtcgttgccctaaatggctcactccctaacgtgagaagcgtccagttgcgaatgccaaatggtcaaaccgtcacgcgaccaatcagccgtctttgccccttggagaccgaaaaccagaccccggaacccgccccggacgccaccgtatctaccccgactgatcaaagccccagagacgccaaaaacaccgaaatgtctgtaaacgaaatgccgccgatcccttcactttccggagaaccgacgatcagtaagcacaacggcatgcttacgcgacgaaaatcacggcttttcgcgatccctcccaccacgacaatgatcattgccattttcgtcactcacctgtgggcccaagcctccccggcacaaggaatttggccattcgacccggaccatcccgggccacccccaacatctaattgtgtcggaaatcacgtcaattgcacccgaaaaggcgtcaaaatctcgtcaaattctgcggtacaaaaggtgacgatttgttgttcgaacgcctgctttgatcgtctcgccgcctctgagatcagctacgagttgtcctccgacctcctcgtcaacgagtatgtctgctccgcgacattcggtctctcttcgacccgcagctgtaccgccgaaattgcctgtccggcagtcgacgaatgtgaattgatcgattgttctatctgcatcgaccgacccgccaattggcggtgtaatccccggctctcccttgtcctacttctggtcattgggtcactgatcagttgtctgaccggatggattgtctgtttttgctcctccgcccgcgtcgtgctcaatcgcggctaccaaatcgccgcattcctcctctcctggcccattcgactagccttcttcatcgccggccgtccctggacacgagaagaccgggaacgggttgcagaacgcctcgaacttggtgtccaaagg

SEQ ID NO: 56369 - DNA, 292 bp, Heterodera glycines
atgacaaccccccttcccgacttgaaggttgcgcgtctcgaatcgctacctattaaaccaccgatggatgacattgacgagagcgatgaggaggacgaaggagaagaagaacagggcgaggaattgaaaagcaaaaatgggactgaaaaagaagtggtggaagaccagcagaagacggaggagcaaaaggagaagacggaagaaaagggaggcgagaaagggacggacgaatgtgcggaagagagagacggagagcagcaggacgaagcggagaaggccgacaacgaaatgg

SEQ ID NO: 56370 - DNA, 271 bp, Heterodera glycines
ccatttcgttgtcggccttctccgcttcgtcctgctgctctccgtctctctcttccgcacattcgtccgtccctttctcgcctcccttttcttccgtcttctccttttgctcctccgtcttctgctggtcttccaccacttctttttcagtcccatttttgcttttcaattcctcgccctgttcttcttctccttcgtcctcctcatcgctctcgtcaatgtcatccatcggtggtttaataggtagcgattcgagacgcgcaaccttcaa

SEQ ID NO: 56371 - DNA, 755 bp, Heterodera glycines
aatatgtccaacaagcacccgaggtgattcgcgagtttctcagcaccaaacatttgccggttggctctcaatccgccgatatgtacagtctcggcatggtcctttaccaaattctgttcaaaatggagcctttctatgaacgaaatttgcctctaaacagtggggaaaataggggaagatggaaaagcagaattggccacagaattattgaacaaaattgcgatggctggggacaatgaccaaatcattcggccgacttttcccaaccaaaatcaaatcgcggccaacgaagaggcgtacaatctgcaactgctttcggtaagaattggcctaattatgagttgcctttgctaattgtccctaaggcaatcgaggcgtgttggctcgaggtgaccaaattggccaatgtttgccattgcttctccacccgcagatccccgaaatgcgcccgaacattaagcggatgaaggccattgtcaatgccaacctccgctccacgtcggcacccctcccctccccataatttgaatttgcctcccttcccccagtgggtccggctctttggtggaccaaatgatgaaaatgatggaggatgtaaaaagcatctttttctttgtcgccattggataatctccgccccctttcagtacactgcgaatttggaacagctcgtcaaagtaaataaatggcgattttgacaattacaaaaagaagttatttgaaatttttcgtttttgaaattttttaataaattt

SEQ ID NO: 56372 - DNA, 1588 bp, Heterodera glycines
caattggtgatcactgcccatggctacgataagaaattcatcgaggacttcgaattgcgtctgaataaggtgagtcttccgaattatgaactgatagaagaaacaatgtttggatttgtttaggtcaccggaatgatcagttcgtatgtaagtccaactcatttaaccctttttcattctctttcccttatctttttttcttatttcactttccatttccatttccctttatctttttttctttatttctctccccaataatattttcttctttttttcctctctctctctctctctctcatctctcgtctctctgtcctacagtaatctgcccaccgttgcttttacagtatgctatcctcgcttatatgtctctgtacgatgcgctgtttctgtacggattggccgtaagagatgcttatgaagaaacgaaaaaccaaagcgtttttctggacggactttacatttggaaaaaaatgacggcacgacaattcatcggttttggcaatggacaaaaaaacggaataaaacagagaatattaaggcgccacggggcaagtgctgatgaataacaaggcaatccgagtgccgagttacgcgacttatcacaccaaaaatggtgggggggggggaaatgccaaaagaggaaagaaatgccgaactgtgaaggcacaatgaaaatcgtggtcgaactgacggctcggttgggcgacaagctgaagtgtgccatgtcagagaatgactgctcggaacacgtcactaattggggggggaggggagggagggccaaactcttcccgaaaaggtggcgcacgaaacgatgtcccattattactccaccggggacggctcaatgccactggacatgcccaagtgcggctttgacggcaatctctgcgactacacgctgatctacattctgttcggtgtcattcttttcctcggaggtgaaccgtaatgccaaagaaaggggcgaaagagtgccgtttagtgaccattcctctcggatatttcctccacaaaaaagagtgagtgaagtcaaaagcagcgaatggagcaaaggctttcagaaaggagcgcatattgtacgaaatgacctggcgaatcccacgggagaaagtcagacttttggagcagaggtcgaaggtcggaatttgccaagggaaagggcgacgaagcccggacattccttggattgttcagacaaagtccatgtccattcgaagtcggtcgcaggaaagtcactcgtacggtacggcaaggccaattaatcccttcgtccaattagcgttgaattcgcagacgaaagcattgggtccaaagcgaactcgagactcttggccaagcaggcgttggccaacggagtgaagtgcgccttcaaacggtaccagcagaaccgaagcatttccttcaacaaagtgacaaatcaatggagggggggggaaagcattgatcatttcccgtaaagaatgacctatcgagactgaaggagctgaagatcatggagaacgagaatttgaacaaggcaattgtggagaaaaggagggggagggggggggaagatagagagagggataatgaagagaaa

SEQ ID NO: 56373 - DNA, 2941 bp, Heterodera glycines
ttgcccctttttggcatcgtccagcaaaagcttttcaacaaaacatcacatttcaagttaatgcgtcttcttcatatagcaggaatgaagagaaggattaaaagtgtgctaattgacggattaagctccagtcgactccgcccaaaaggcggcggcatcaatctgcttttcagcattttcttttgccgacaccaaaattgtttctctacctcaaatttggccattctcccactcgtacagtactcttctaccgtttcctcagccaatgattttttcgctggccttcgtgccacagctcattgtcagtttgcttcttctgctcctctccgtttgggcaccttcggcccacccaaacattgtcatcaaagtcgcccatcttcagccgaacaatccgagcatcattaacgaaccgcaagtgttggaaatgtgagcaaagaatgaacaaacagaaaaagaacaaatgaacgaactgtcaaaagttgcaggtgttacaacgacatgaaagagagggccattctcccgcgcgaaattcggctacagtacgcccaattagcactaattgaccatgctgatcagcctaattaatgtcttcagattgtttacgatggaatcgtgcaaccgattcagcggagttgagtacgccgcctatttgcactacatgaaaaatgtgagtggggcaaagccacggaattccgtccctttacccgtcccccccccttagacaagcgtttatttcggccccggctgcaacaatggcaagtcaatcgaacaaaaaggacattttattggaaatgcaacagcattttcataaagccagatattttatcatttcaaatttattctccgctcttttcgtcctttagaaatgctaatcatcggtcgattggtctctcgttggaatgtgccgatcattgcccatttgtcaggcgacgatgctctctccgatcgcgcaggtgccattccttcccgtgccattcccttacatgccattctctctcctccgtgccattccttcccgtgccatttcgtttttcctttttcacatttcacttcttccaaagtgttcgatacgcttggctccgttgcgctcacttcggccactgaaatggcgcgggcaatgtgcttggaattcgatgcgtttgttttgtcaattattttccatctgttcagattgacctttttacaattgtatggttggaaacaggtgaacattttttgaaggagtaaatgcaaattaattaattttaattaattataatcaattattcgcaaatgcgtgccaaaggtcggcttggttcggcccagtgtgcacttcgagcgcctttccctgcattccctgcgcaattacctcaaagatgccaacatcgagatcaacgtggagatcgagttggacccgtacatgacacccgacgaaattattgccacggggcgcctacggcacttgcgaaatcgcgcgcgaagtcatttctgggaaggaccaactcaatttgttggcatatttcagtcattatgctggagatgggcatggatcttcacagtgccaagtcgtttatgatcgctgcacttcgctcccacatgaaaacgcccgattacgtgtacattatcccgtggcttgcccatgtgagcaaataattatgagagtaaattatgctttatcctctccatgttcagcttcatgatcactatccgtgggaggcatcaaacattgaaaagcaggaaacgaggcaaaaagaatgggaaaatgggggaggcggaaggggacaattggcaaaaggggggggggaagattgacggattgttcatccatcacaccgatggagggaaaagttgagggggacaaagacgaaaaatcactccgcagatcagcctttgacgacacaattgtgatcactgcccatggctacgataagaaattcatcgaggacttcgaattgcgtctgaataaggtgagtcttccgaattatgaactgatagaagaaacaatgtttggatttgtttaggtcaccggaatgatcagttcgtatgtaagtccaactcatttaaccctttttcattctctttcccttatctttttttcttatttcactttccatttccatttccctttatctttttttctttatttctctccccaataatattttcttctttttttcctctctctctctctctctctctctctctctctctctctctctcatctctcgtctctctgtcctacagtaatctgcccaccgttgcttttacagtatgctatcctcgcttatatgtctctgtacgatgcgctgtttctgtacggattggccgtaagagatgcttatgaagaaacgaaaaaccaaagcgtttttctggacggactttacatttggaaaaaaatgacggcgcgacaattcatcggttttggcaatggacaaaaaaacggaataaaacagaatattaaggcgccacggggcaagtgctgatgaataacaaggcaatccgagtgccgagttacgcgacttatcacaccaaaaatggtgggggggggggaatgccaaaagaggaaagaaatgccgaactgtgaaggcacaatgaaaatcgtggtcgaactgacggctcggttgggcgacaagctgaagtgtgccatgtcagacttatcacaccaaaaatggtggggggggggggaatgccaaaagaggaaagaaatgccgaactgtgaaggcacaatgaaaatcgtggtcgaactgacggctcggttgggcgacaagctgaagtgtgccatgtcagagaatgactgctcggaacacgtcactaattgggggggggggagggagggccaaactcttcccgaaaaggtggcgcacgaaacgatgtcccattattactccaccggggacggctcaatgccactggacatgcccaagtgcggctttgacggcaatctctgcgactacacgctgat

SEQ ID NO: 56374 - DNA, 426 bp, Heterodera glycines
atgttcacctgtttccaaccatacaattgtaaaaaggtcaatctgaacagatggaaaataattgacaaaacaaacgcatcgaattccaagcacattgcccgcgccatttcagtggccgaagtgagcgcaacggagccaagcgtatcgaacactttggaagaagtgaaatgtgaaaaaggaaaaacgaaatggcacgggaaggaatggcacggaggagagagaatggcatgtaagggaatggcacgggaaggaatggcacctgcgcgatcggagagagcatcgtcgcctgacaaatgggcaatgatcggcacattccaacgagagaccaatcgaccgatgattagcatttctaaaggacgaaaagagcggagaataaatttgaaatgataaaatatctggctttatgaaaatgctgttgcatttcca

SEQ ID NO: 56375 - DNA, 372 bp, Heterodera glycines
atgccaaccccggggacaactcccgagacacttcccacccgaacgacaacaaccggtgagtgagaaaacgagaaaaagaaagaagacacgacaatttcagagccaagtacaacatcccctaagggcactcccgcaaaggacagaaaagagggcgatcagacacgaccgacgccggcacttccgatcattttaccattaatcaacaacaattggtggtggaagaacacgccggcaccacccctcaggagagaaaggagcgaaagggacggggagaaaaggagaggcaacaaggaacagaagggagggaaagaaagaggcaaaggaagagagagaggaaaaggaaaaacacagaaacgatcgtataaatcctaa

SEQ ID NO: 56376 - DNA, 1141 bp, Heterodera glycines
cgtttatcaatcaattcgaaaaggtgcccgacacggacagcacaacgtacggagtgaagtacgactaccaaagcgtaatgcattacgcgaaggacgcattcgcaacggcagcgggcaaaatcacaatggaaacattggacaaacaattccaagtacaaacaaaggacacgcaattggccaacgaaatgaaaggacatttgcggagggcccttttaattgacagaaaggagcattatcacagcactaaaagagaaaaaagcaaatttaaatggcaagttccataaaacatggtactttcgccaccattatgaacatttagctgaatgaattaaacgagaaaatgccgaaaaaacatggaaaacgcacttagttttacttttcaaacagaaaatccaattaaatttaacttattacattagaaaggtttttagcaactgacttatgttggcaaattaagtgatcatttcttacgctttttactgttttctttttgcggataatagttttgtttttgtaactgttgtgagttacgcattgattcataaggcccgtcctccgtcagtttaaataggcgtccgcaaatgtctgatagccgagcagaaaaaaccattttgaggatgttatcggaagagtaaaggacgcctccccgggggactatgtgaaaatatgcaacatttacgcatgccaaacttgcatgggaattccgttcactcccggacaaagccgaccgacggaaggccaaaaggtggtcactctcgggccaccgactatgccaaccccggggacaactcccgagacacttcccacccgaacgacaacaaccggtgagtgagaaaacgagaaaaagaaagaagacacgacaatttcagagccaagtacaacatcccctaagggcactcccgcaaaggacagaaaagagggcgatcagacacgaccaacgccggcacttccgatcattttaccattaatcaacaacaattggtggtggaagaacacgccggcaccacccctcaggagagaaaggagcgaaagggacggggagaaaaggagaggcaacaaggaacagaagggagggaaagaaagaggcaaaggaagagagagaggaaaaggaaaaacacagaaacgatcgtataaatcctaa

SEQ ID NO: 56377 - DNA, 1673 bp, Heterodera glycines
atgtcccgaacttgcaagacattttgcatgccgctggtctccctgtgcctgacggtaccaatgatcgcgtgggtttggtagaaatttatgaatgtcaattccaataatgaattgttggcaattagctaattgattcgatgtttaggcaaatgtttttctgaacagaagtgttcaggtcgtccgaattgtgtcaattgatcggtattttttgtttccttaaaatactttttgatgtgccatttttgccctctctgattaataaattttcttcagcctaaatgctgatttatttaattgcaattatatattattataaaattggttatctaaataatatcttcttttcttggttcaaaatagcggtgccgctgattgaccccatagataattaaggcccccaaaccaaatgggtgagctcacacaacaaattattcatttcccattaaaatgaacccaaaaaaactgcccaatgaattgttttttgaaattgtcattttgcagtttcacaaaaagtgggcccaacttcgggtgtcctctgtctttgatcactttcttcttgctcacatgtcccaatttctgatcaaatacaaaaattcggtgagaatttcgcaattagcactgatcaacgggaacttaaaaattcttttattatataattttgttattatttctttgtttaaggcggaaaagtgtttaaatgcggtactgaagctgtgcaaaatgttgttaaaactgccgggcattatccgttataacggaattgaagagcctttagagcattttgtaactgaccgcgaattgttttgtaagtaaagcaaaggtcgtagaaaaacaattaaatacataatgcatcactgatcggaaaaaaaatttgcgttttttaaaagccaacattcaaaggtataaaatttttttcggcgctgcgctgaaatttttgaattttttacaaaaaaagataattataaatttttaaaatatttcaatttttgtagggaaaaaataaggtaaaaataagaacaatcgtctgatataaataagaaaaatgtatttcaatgttatttttaaaatagaatcccaaattgcgacattagatttgctcattggtcttgaacgtatccgttgtccgcccaacataaaagcgcaggtcggccttccgccagaatgggaatcggaaccattggcgaaaaatacggtacagagactgagacaaaatattgtaaaaatatggcctgatttgcaatgagaatttatataattttaatttttgctgttttcgagtaaaattttgaaatttctgtgggaatgagttgggcggaaaatttgggaaattaaattgagtataatttcctgggacattccgtcagcattttttcggaaattaaattatttatttttcaaaatttcgaaacaaaattaattgtcatttgctttaagttcctcgatatgcgggcaatgattgttcaaattgtgggcattgtctgccagtggccagaaacgacaacagaagacttggcgaagttggagagcggtaagaacttgccgaaaaatcggtgatggattaatttttattttaagaaaaaatgcgaaatacatattgaaaagctttatcttgaccttaattaagaccaaggtttcaattttagccaagtgtttgattacccaaaaataacgga

SEQ ID NO: 56378 - DNA, 114 bp, Heterodera glycines
atgatatcaagattgtttgattcggtcaaaaacttcaagagttatattgactcaaagttggctcggacggagttggcccgttccggagagagtgggggagaggaagagagagat

SEQ ID NO: 56379 - DNA, 267 bp, Heterodera glycines
  unsure (1)..(267): unsure at all n locations
cctccgtctcatacgcaagcgcttttgtgaggtataccatttaaagaaaaaagagatagacatatttcntgggatagagccttaatttaaaaattccctcaaaaataaaaggtaaattgcgcaccgccctccctatcatgctcgagagcatttgtctgtgtataaaatttatcaaaaaaagagatagccatttttctgggatagagtataaatttaaaaattccctcaaaaataaaaggtctattgcgcaccgccctccctatcatg

SEQ ID NO: 56380 - DNA, 502 bp, Heterodera glycines
gccaagccagcaacagggccgaacagacaacgaaagccaacagagaagaaggaaaaagaggaaaacggagacaaagacagaccaaagtcattttgccaaaggtcaggcaaatgcaaaattaattttgaatttcaggaaagagcggaaaattgcggaacctccgcaaagagtcccttttcggcacccaacccaaatagcgttgaatctgccatcacaacttcagccagcaattcctgcaactttaaaatatggcgtccatttgcattcggcacggcactccttcagcacgtcgttgaaaagtgtttctgttgacagcgagccaagagtgagtgaccagctgaaaatcccgagcccggaaacgctgaaccggcaaatcccacctttgctgcatggcatacgcctcccaatgccggcgggggcatcgtcttcttcgtctaatgccttccaagaaacactgcgagaggaggaggaagcggccgcggcactcgcatctttgaaatga

SEQ ID NO: 56381 - DNA, 850 bp, Heterodera glycines
atgtcgaagatgggccgaatggaatcggacacggacccaaatacggtgacaattctgaggaagcaccaagcgccccagcgtgtacttaagtcggacgcggctgtgagtaattttgttttaggattaagaaaaatgctctcgataaaggtgttgtttggaatgaatgaaaaatgaggaaaaccgacctatttcacacgcattacaatttgattttttaaaaataggttaatgcggcaaaaaagcgcggcgacgacgtggaaacgacgaagaaatatttcgcaggggtcagaaaaaagggaataacgcgagaagcatgttaattgtaagtttaggtgaatcgtcagcacaaaacggacaaaaacaccgcggttttggacgcggagacggagcaattgcaccacgaaaggtgagagaaaataggcaaaccaatcggaaataaatgtttcaaaattaagggtttcgctcaaattgggcactgtgattcagcaggcgcggcaggccaaggaatggactcagaaggcgaattttcattccctctttatttacattttttattttaggagttggcaacggttggtatttttgaattgtcccatttttccccgcctaattcctcgctttagcgtgccaatgagaaagtggaggtcattcgggagtacgaaaacggcaaagccgtgcccaaccaatcggtaattcaatttaaaatttccccttttaatcggatttgtccagcaaaaatatatcgcacctcgcttttcagatccttacgaagatggagcgttgccttggcgttaaactgcgcgggaaggaacttggccagccgcttgcgcccgcctcaacggccaaaccg

SEQ ID NO: 56382 - DNA, 1114 bp, Heterodera glycines
tagcagcttaacatttccttgcaccgcacttcggtcactctcttttctatgaaggttaaatgctgtccttttgctttttaatttgccgttttatcaaagggcccaaatgatgccaattcgtccatgcaatttgaactgaggctggtcagtggccgaacaggtcggccaatcttctcacccgacctgcccaattagcagatcgggcacatcccttccttcgatatttagtcgggcattccccttcccgcgatcaatgcccgatcagctcgggcatccccccccccgatcagatatgaacaatgatctcccgggtccttttgcctcacaattcaatcgctttcttttctcaataaatttttaagaattcccttccgttttcctcgccactcgcgccaattttctacttcaaaaaggtgcgcataatagcattgtgatcgcgcatcaaattttaaggcgaaaatcgcaactcggccattatttcgctgagggaccctttggatgggccgcaggaagtgcacctggaactgttggcatttttggattttcattcctttggcatttttggattttcattcctttggcattttttggattttcattcctttggcatttcccgtccttttgccgttttcgtccttccgtccgtcgttcagttctctttccctcgttcagtgtgcttcgtctgagtgtccgcggaatatttgccggaaaatacatggccaatttgacggttttcgtctcccaacaaaaagcgcaaccgcaccatccgccgcaattgcagcagaaaaacagcgcaaaaagacatcggaggaggagacggacacaccgtaacagagaagaaagaggcgcaagcggacaccgtaacggaatacgtaccgtaaccgaaaaaatcggcggatggtagtcaagtcacaaatcaaatcactcactgtcagcaactgcttttaaccggccatttcggtgtttgttctgccgaatacctcaatcattggaggatgctttttctctttttgttcatttgttttgtgccgtgaattgcaaatttcattttggcatttcattttcattttggcattcgcttttattctgattagataaatcgctagagaatgaa

SEQ ID NO: 56383 - DNA, 2239 bp, Heterodera glycines
tttacgaactcgcctctcttttgccccttaaaaaatgtttttttataaaaagctatttgatgcaaataatacaaatgtttgggcattgcctttctttcagtttggtgctgatcaacgcgctttacttcaagggcacatgggcggacaaattcaacgcaacattgaccaaaaaggcgcaatttcacatggatgcgaaaaacttcaaagaggtggcggacaattactaggacaattttaaaattaaaatgccaattaaaaagttatcaaagcatttgctcacgaatctggcatccatttcgaaccactgtatcagaatagaacaaaagtcaattctttaaaaaattcatttttcaaattacaaattaagcgtgaaatttgtgatgaataagaaggataacagctgattatgggactcattcactatcagtcaaaatgggtgccgaatttatgatcagtggccatgaaaacggcaatcgcttagatcaggtcccaaaaaaggactttgtctctctcactcatttttcaaaaaaaaaacaattttcaaaagtcatgaaaacatgattccatagcttttcggcgtcgctgatcacgaatccggcatccatttcgaccgattacgaaccccgaactcgaacaaaaagtcaaaactaaaatgttcgaatttcacatttttagtctaaaagccgttttaatgaccttttattgaagcccatgaaaacatttatattggcatttataattcaataaaaaatatggggaaaatttgtgggggttaaaacttcataaaatctcattttgaccataaacgaccaacgctgactttttttagctggaaatgatgcatttgatggccagcttcatttatttcgaggacactcaggtcgttcccacattttcatgcatttttcctttcacttttctgattgcttgtacagctccaactgctcggcatgccctacaaaggtgaaaaggagttcatgtttgtgctgttgcctacggaacgctttggactggccaaattgttggctcaattggacggcaaaaagctggtggaactgattaaaatgcgggacaaacacactgtgacggtaagaaaaatcacaaaaaaaaacatttattcatggcattgtctaattttggagtttggttgtgggcatgcctaaataaacgaactgtcctaacacagtgcccatgtgccatcgtttcttagatcgttgaccccaaacatcgaaagattgcgacctgtggggtgaccgaactaaaccatagcacatgggcattgattgttgacattgtattacgattattcgtttaggcaagcatacccacgaaaacttaaaagtatatatattttttcttagtcggtgaaaaaatatggggaaaaacagtttttttttgggggggggggtgtgaagaaaacggtggtggtcaactgggcgagtttatagattttttttgcgcttcttagtaattcaccaaaaaaattttttttcttgaaaaattctgttttgaaaataaaaaaaaaattctcgggggggggacgtaatgcacccgtgtccatatcgcccaattgtcctttccgggagagaacgataaatggagaaataaatgagttgtatcacagccgaaccccttcttttccaggtggatttgcccaagttcacgttggaggtcacgcacgaactgaataaaccgttgaccaacatgggcatggccaccgcgttcaccaacaacgccaattttgagggcatttccgacaagaaacctttgtacattggccaagtggtgcagaaggcgttcattgaggtgcggtgtttgtaaccaatttaagctgggatttttttgtgattttaacacttatttagccattttttagtgcttatttagtgggcaggtcgtttccccctctcccgcgcatcgtttttacccccgaaatttttttaaaattcccaaacttaaaaatttttcaaaaatccttgaaaaattttttgtaagaccattaaaaaattgttttttattttttgatgtcgggacggcggggggaaataaagtgcaccccttatttagctacgtaaaaatcagggtaatggtgagcactgatcagcgaccgcaaaactcccaaaaattatgcaaaaatgcttataattgttttttcgggcagaaaaggaatcctcttaatttataaaacgaaatttaggtaaacgaggagggcacgactgccagggcagtcaccggcata

SEQ ID NO: 56384 - DNA, 257 bp, Heterodera glycines
  unsure (1)..(257): unsure at all n locations
tatgagcgctaaaatatcagagtgccgaaaatcgcatgtgatctaagcctagaaaaaaatggtctaagtaaaaatcgtaattacgctcaaanagcttctcaaacaattttagcgcttccaattccttctacaatcgcctttatacatcccattatgaacgctaaaattatcagagtgccgaaaatcgcatgtgatctaagcctagcaaaaaatggtgtaagtaaaaatcgtaattacgatcaaaaagcttctcaaac

SEQ ID NO: 56385 - DNA, 478 bp, Heterodera glycines
atgttcgtccgatcatctgccattctgctgatcgttgctgttgcgctggtgccactttccgatgccattctcttcggcggtggtggcaacaactgttgctgctgttgctcccctccgccctgccctcctccgtgccccgtccagccctgctgctgtgccccgccatgtccgcccccgtgcccttgcccacctccgtgccctcccccgtgccctcctccgtgccctcccccgtgccctcctccgtgccctcccccgtgcccaccaccgtgcccccggccatgctgttgcggtaagttgggcgaaatcgttttaaaaatttacactgaaaaatggatttaaaaatttgggtaacatatagccattcaaattttaacattcaggaggttgcggcggtggcggctgtggtggcggcccaatcattgtgaactgtgccggcggatgcggcggtggctgtggcggattcggattcggaaaataa

SEQ ID NO: 56386 - DNA, 1166 bp, Heterodera glycines
gtgcttaatcgactcacttacactgccacactttcgcatttgcgacgatgcaattcgcctattggacgtgaagggaaattggcaaagcctcgccaattgcacaacactcagtggggaatgatttgcccagcggagacacctgaaggccaagctgtgggcctggtcaaaaacctcgctttaatggcttacatatcagtcggttcactgcctgaaccgatcctcgaattcttagaagaatggtccatggaaaacttggagggtttgtcttttgtctcttctactattttagctatttctttttgaaatttagaagtggcgccaatgtccattgcggacagcacgaaaatattcgtcaatggcgcttgggtgggcattcatcgcaatcccgaccaactgatgacaacattgctgaaattgcgtcgccaaatggacatcatcgtttccgaagtgtccatggtccgtgacattagagatcgtgaaattcgcataagtactgacgcggggcgcgtgtgtcgaccgttgttaattgtgaacgatcgcaagttggtgttgaagaagcaccacatagaacagctcaaggagagggacgtcatggacgaacagcaacagttcacttggtccgatttggtggccggcggagtggtggagcttatcgacgccatggaagagggtaaagagcaatttcaaaaaatgcaattatttacgcgaatactgaaaagtgattaagaaactattatggttgcaatgacacccgaagacctcaaaactggtgggtactgtgaaagctacacgcattgtgagattcatccggcgatgattctcggcgtctgcgcgtctatcattccttttccggaccacaaccaaagtccccgaaacacttaccaaagtgccatgggaaaacaggcgatgggtgtttacacaaccaactttcacgttcggatggacacattggcacatgtgctgtactacccgcaaaagcccctggtgaccacgcgttccatggaatatttacggtgaaacttgttttgcttttttgtgttaattatagacgttttccagtttcaatgaactccctgccggcataaatgccatcgtcgccattctttcgtatggtggctataaccaggaggactccgtgattatgaatcaggctgggattgatcgtg

SEQ ID NO: 56387 - DNA, 366 bp, Heterodera glycines
gccgaacgtaacatcatcatgcaagtgacatgcaatgcaactcagtccaccgacagaaatgtccgcgtggttgccctccagtgtttggtccgaatcatgtcactgtactaccgtcacatggagccttacatgggccgagcgctgttccaggtttgcaaaaacaaaaatatatgtcaaatgtatttaccaaaagtgtttttgacagattacgcttcaggcaatgaaggatgcaggtaaaagggctaaactaagcaggaatttgaaaaaactgtccatttttaagaggatgatgttgcactccaaggaattgagttttggtcaaatgtttgtgacgaagagttgaacttggcagcggaggttgaagag

SEQ ID NO: 56388 - DNA, 253 bp, Heterodera glycines
gtaaaaaaatgagaaaaaagagatagccattttttggtcaagaattttttttgtttgcgtttcaaatatcgtaagattgtttgatagggccagacaagagaaggcaactgttggtaccaagtttgcggtaaaaaaatgagaaaaagagatagccattttttggtcaagaattttttttgtttgcgtttcaaatatcgtaagattgtttgatagggccagacaagagaaggcaactgttggtaccaagtttgcg

SEQ ID NO: 56389 - DNA, 1256 bp, Heterodera glycines
cgtgagccgatgttactccgagttcggctcttccaaactttggttttccatttgtccattcgtccgtccacttactcttctccctttttagctcgtcggtcttcttttgggctccatttattggaacactgctgtcactcagtccaccgttatgaacatcaacggactgatgtttcaagcggttgccaatatgaatttcatgttccaattcgcagctgtccatgtacacttattttctctgttattagcatcttttctttttaggttttttgtgacgaattgcccatttttatgcgcgaacattcgtccaatttataccgcgtcgacacgtattttttggctaaaaatttggcagaggttttcattttctaccgtatttgtctcccattcaaacggtgccccccccccctcactttgtttcagttggtccaatacgtcgtttaccctgtcattttctcctccattgtctattggatggcacttcgttttgtcgcctctttcgattcttcgctgttattcactttgagctgtgtttcgataacaaatgttgccgtttctttaggtgggttgggtttgtccattaatatttcccatttcattaaattctctctctttttctgttcattttcagcttatgcttccgcttgtatttttggagccaacgatgtttcggtgtttgccattttccactcaccattttcaattcatttctcgtttagactgccgttatgccaatttttgtgatccctttgctcgcatttggtggcttttacatcagtcaggtccgtccgtcccttttcctttcttttccttccatttttccttttcaggattctctgccctcttacttttatccgctcaaatacctctcttattttggttacgcttatgaaactgcggcgatcaatcaatggacgcgggtccatcaaatttcaggtgcctttttccgcatattttcattttataccgttttatatatttttgccatttttaggctgtcagtcgccctttccgcagccgcacatgaaaagcggcggagtgatcgtttgtgacccgttgaattgttgtcgtaatggcaccgatgtgctcgaagggatgagcttcagtgagaacaatttgtggagagattacggaataatggcggcgatgataattggccagtttcaccgaatttattccgccgaagtttctctttcccttcagtgcttcgattggtcgctttctttgctctttggctgcgttcactaataaagaaa

SEQ ID NO: 56390 - DNA, 472 bp, Heterodera glycines
atgcccaccaaacaaatgcttttgtgctccattttattaacaatacatttcgcttcacaatttctcgtttttggcctcgaaaattctgctcggtccgttgcggttcggggatcaatgttttgcaatggaaatccgtacgaagggctcaccgtcagactgtacgacagggaatgtgcgaatttcgaaaatttaaaaattttttatgtaaattttatatttttaaattttttttaaattctagcgcttgaacatgatgacatgatgacagagggcacaactgatcagtcgggcaattttgagctgatcggccacgaagaggaggctgaagcgatggcggaaatggacccgcgactgatcattttccacgtaaatttggaaacgcaattaccataaacaagctgttaatccatctttaattaattaaggagtgcaatgtcccgtgcattgtgcaaatggtcattaaggtaataaa

SEQ ID NO: 56391 - DNA, 515 bp, Heterodera glycines
atggacattagcaaatggggaatccgaatgttcgttcatcggggcaatttatcctccgtctcagttttggaccttcccgagttcatcgttgcgctgcacctcgtctacagggtgtgttcactttgccgaaaccatttcacatgccaaattctcaccccctcgtttttcagtccctccaaaatgagccggtccccgatcgactgtccccggcgctggtccctccctccaaactgggcattgtccgtcgcatgtctacgcgttccgtcgacccctctccgcaccattctcatcctccgcgtgagtaccgtgtaatgccatcaatcacttccctctgtttcatcagcgctcacttggagctctcgcgcctccagcgtcgcttccctgaacatccaattcggctctcccggcagtccccccactcgcccccctcgcccggcgagtcgagtggccgtctctccaccgcaaaacgaggcaaaagcaaagcgacagtcactgttcgaccggaatgtggtcga

SEQ ID NO: 56392 - DNA, 1716 bp, Heterodera glycines
tttattgtccttgtcgttgttccgttgatggttatcttcctatgtattacggtaaagttgggaattcctgtaatttttgttcttttattccattcttttagcacttttacaacgtttcttcggtccaatttcgtcgtttgaccagcaaatcgcgttcttcccatctctcttttgtggaggatgcttactccggctccgattccattcgcatttttaaggcgatcaaacaattcagggccaaaggctaccgaatttctgacatttgcaacgaatgctttatcgttgaaatattctctaacaggtaatttctttctttttttttttgcctttccttggtaaacatttctctgcagatggctccaaattcggcttgacattgtcgccgatgtttccgtttttatttgtgtggctgttgcaatttggatggcaagtcaaggcgtcatttcgttgggggttcttgcgttggtcatcggctgcggatatacggtcttttttttggaatttaagtcggcaggctacggggacaaatcatattgtgctctgtctgaaaatgaagtaatgtccttccccatcccttttcagttcaccggttaccttggcgaagttgcacgtttttggcgtgaatcggaggtgcaaatggtgtgcgttgaacgtgtgaacgagtacatcaacaacaaatgggaggccgattggcgtgcgcccgcgagtgaacgtctcgcggaatggccctcccgcgggcaaatccaattccgcgatttgtgcctccgataccgcgaagacagtgctttggtgctgaaccgtctcaactttgaaattgcttcatctgaaagggttggcattgtgggcagaacgggtgcaggtgaccaaccggtgatcattccgggaaatgctgtatttctctatgactaggcaaatcatccatcaccatggcactgtttcgcattgttgagcccgcttctggccaaatttttatcgacggaacggacatcacaacagtcggactgcatgacctgcgctcggcgttgaccatcatcccacaggtcagacaattcaaactttttttatataataaattgattatatttcattttcaggacccggttctcttctgtggctctctccgctccaatatcgacccgttcgaccaatactctgacagcgatctttgggctgcgctggaaaaggcgcaacttaaggacacaattagcggattggaaggcactttgctctacaaattaactgaaaagggatcgaatctcaggttggcattgaaataccattttgtgcattgaatttctttgctttccagtgagggacaacgccaattggtctgtttggcccgtgcgcttctccgtcaaaggacgcgcattctcattctcgacgaagccaccgcagcgggtttttcgggggtccttaaaaaggaaatgcatttgaattgtcttcagttgacacatacaccgactcatgcattcagcagtgcattcgaacccatttcaagtcggaacactcttattgctttattgtcattagcacggctaattgcttttaagccattgtacggtgttgaccattgcgcatcgtctcgacaccattttggactacgaccgtgtgatcgtcatggacgaaggcgctgttgctgagttcgacacgccgactgcgcttttggccgacggagaatcgatgtttgcgaagatggccaagcaagccggggtggtg

SEQ ID NO: 56393 - DNA, 4436 bp, Heterodera glycines
aatttgctccattttgctgtccgttctcgttgtcttttgtctttacgcaaacgccgtatttctcaggtaaatcaattacaatcggtctacattacaataaaaatataataacttccgcgagcaggtccataagcagaaatttttttgggtggggcactcgaagagctttttttttttgttgctcttccggcccaaaaaattttgtgtctaatataatttcctgaatttttggtgccttacgaaaaacgggaattttaacccttttcaaattcattaaatatgtaaattgaggaaattaaaaaaaaatatccatttttcttaaaaaaaaaaaaaaaaaaaattaaaactgccattcaatgctttgcagagtgatcgtcacattcgttgacctcggcttccctttgtggctgtccatggccgctctttgtgtgctcttttttgtggattttactggcaaagtgatgctcgcgcgtcgcgacttcgattctttcattgctttgctcagtttgcgttccatcatttcttgtgcaattcttgacaaggtttttctcctcaattttccgttttttcacatttccactctttttaagctgttcaaattgtcctcctccgctcgtcagtctttttccaccggcgaagtcgtcaatttcttgtccacggatttggtttttctttccaaatttcatttgcgtctcattgtcagaatccattttagtttcgcatttcttacttttggctcacaattcgcagctttgtctattgccctttcatggtaattttttgaagaagtccacttgaaattgtctctctcttaacccaagattggctttgcaagtttcggactttggatggagttggggatgagttctgtgttcggtttcgccgttttggccatgactttgcccatcaacgccgttcttaccaaactgatgactcactttgaggtcgcttttatccatttaatttctgtttattccttcctttttctcgtttttttcagaataagcaaatgaaaatcaaagatgaccgtgtcaaatttgtcaccgatgtgcttggtggaatcaaagtggtcaaactgtacgcctgggaggagtccatgcaaaagcgcattttcgaactgcgccacagggaggtcaaaaatctgtggatgattttcctgctcgacgtcttcatcaacctgtccttcatgctggctccgctcattgtgcggtcctttgcataatttggcatcatttgggagggggaggggctgaggattggaaccaaattaaaatcctttttctcccatacatgcgccccggggtggtaacaaaatataaaatttgaaaattttctaatttttttttctcgaatgcatgaattgcctttcctttttgcttaggccactctcgtctctttctccgcattcaccatcatttaccaccaaacgatgcgtcccgacgtggctttcgtttcgcttctgtttttcgccatgcttcgttacgccatctaccaaattccccagaccatttcttactctgcccaagctttcgtcagtattcggcgcgtgttgaaatttctcaatgcggatgagcagcagcaaagtcacattatccaagcagcgaatggcgttgagaaaaacaaaacggcaaaacatcgaaatggcaaaattacaactgacgaacgccaaattggcacggattattcatccgaaaattcgacaaattcaggttggctaaattaaatgtttgacaattagcatttagcttaactcctcactaatttgttttgtaaactagttttttgtgtaagaattttgcgtccattcagtgattttgcgtcactgttccttcacttgggaaagtgccaaaaaggaaactccgattctccatcttcgcgacatttcgcttgagattgaagcaggcaaattggttggcattgttggcaaagtcggcagtggcaaatcatcgcttttgtccgccattctcggtcagtttgtccaacatttctttgcctttccaactgattgggaattttatgtcaaatattcctttgaatttaggcgaaatggaacgggtggaggaagagggcagcaaatgcatggtgagggcttcctcaattggatatgtgcctcaaaagccgtggatccaaaacaaaaccctgagaagaaatgtgctctttgatggtccgtttaacgaggacaaatattggcgagtattggatgcgtgtgcgttgaaagcggacttgaaactgttggcagcgggagacatgaccgaaattggagaaaaggtgaccccaaatgttaaaaagacagaacatatatatatatatatatatattttggctggaattggaccgataaagtcgaaaaattaaaccttgattcagggcattaatctttccggaggacaaaaagcccgagtggcactggcacgtgcagtttacatggacgctgatttgtacgttttggacgacaccctttcagcggtggatgctcacgtgggggctcacatttttgagcgggtgatcagtaaccaaaaaggtaaaatatccgctcaaatatttgctcaaaatttcaatttccttaggccttcttgctggcaaaactcgtcttttcgcgcttaactctttgtccttcttgaaattctgtgatttgattgtggtcatgaatggtaagccggctgacaatgactcacaatatccttctaataatttcataaaaagatggtcaaattgactcggtcggaacattggacgaattgaaacagcacacggagggaccatttgcagaacttatgaaggaacacatggagaaacactttgagggacggaagagtcgcattgacagcagcagaggtacaaccctaattatccctaattaatgggtttggaccgaaaatggacatttcagaggacgacacggaagaaacgacctctcatcgtcaacttgaccaggtgttggaacagttcgccggttcacccctcagtcactctcttctcgaaatgcgtcgtcggttggagtcatcggagagtaatggccatcaatctctgcccgcgaattcctcagaacagcaggtaaaacgaatttcaattttttggcgggggcgggggaggtccccgcattttggggagcaggacaaaacgtcgccgccgccacagttgccagccgaactgtcgccgggacaaaagttaacgcaatttttttttgttttagaaaataaaaaaatatcaagaaagttcaaggaaatgaaaaaataaatcttttttttttgaaaattcagcaaattttgttttcacaagggaacattcccaactgtaagtcggaaaacctatataaatttggtatcacttacaattagtccttaaataattaaaaaaattttaattattgaaatatttttattttttgcggatgatatgtcccggcaagtttcggcaacaagttttgtggtataacagcaatttgtgtctggtagtgccatgtgtccctaaatggactccaatttggccttattctgttcatttccaatacttttctgccagcatccaatcgcttcatccgcccatccccaaccatcggaggagcatcaacaaaacaccacaaatgacagtccccacaatttgaatgcgatgtctgcttctgacctcgtcggtcgaattacggatgaagaggaactctgcacgggaatggtccgtccgcttttccgttcactttaacaatgcatttatttgttggctgtttaatttaggtgaagcgacgcgtttacttggactacgccagggcttttagcatttcgttgaccgtcatttacctcctttgtttattcattgggtccagcactttccaagtgacgacatacgccccttgcttttaccagtacaaattgttttgcttttttaagggcctttccaacgtttggcttgccaaatggtcgaccagcaattcgacaagcccggaggaatcaattcggaatttgggcatttatggagcattcagctcggtttacggtgagtgattcgtttcatgaaaactctactcacaatcagtcgcagaaaaagaaaccgtagtaagcccgaagacttatttttttctacggtacttaactttatttaattgtaagaaacttgacgactcaaattaaaaaaaagagaatgtttcttatgggtttatgtggttgtgtggtccctctgctgtttttctatcgcgataaactttttcttttcagtgttttccgctgctctgtccagcttggtcctttcctgtacggttttttcttggtgcaaatgtttttaatgcgtttttctccactttttcagtcggtgcgtaccgcgccagcttggcctttcacgacaaacttctccactcgcttttccgttctccgatggcttttttcgaccggactcccctcggcccgattctcaaccgaattggcaatgacatcgaccgaattgacgaa

SEQ ID NO: 56394 - DNA, 357 bp, Heterodera glycines
atggattctgacaatgagacgcaaatgaaatttggaaagaaaaaccaaatccgtggacaagaaattgacgacttcgccggtggaaaaagactgacgagcggaggaggacaatttgaacagcttaaaaagagtggaaatgtgaaaaaacggaaaattgaggagaaaaaccttgtcaagaattgcacaagaaatgatggaacgcaaactgagcaaagcaatgaaagaatcgaagtcgcgacgcgcgagcatcactttgccagtaaaatccacaaaaaagagcacacaaagagcggccatggacagccacaaagggaagccgaggtcaacgaatgtgacgatcactctgcaaagcattga

SEQ ID NO: 56395 - DNA, 740 bp, Heterodera glycines
atggtcaaagaaagcacaaaggaagggagggacctgtggaagcgtaagaggggggccgaagaggagaagggcatggcacgggagcagggagacgaggcggaggaaccaggcgatgtgcaaggggccggagctgacgaggccagcccggacgcattgagcataagcaaaagtcgaacagagctaaacggggagacggaatgatgaaaagaaacgaaaattggagagaaagggaagactaaagacatacggaaaagacgagatcgatggtcgaaccaacacgttgttcgggaagggagatgggcagcacgaagaggaggagggagaagcgaaggagcgaaacgaacaagtcgagcgtggagagggcctgaaggaaaatgtgccgggacattcattcaaagcaatgcgcacccctttgaggatgatcagccggttaattgggaggggaatggcattcggacgaaagagccgcgcgtaaagaaacagacaaagcatcgagaagacggagacaacggctgggacgaagggaaagacgacattggccagacagggcgagacaatttcggacaaagtcgaatttgggaagacgggagactgaacggaggaacggaatatttggagggagacggaattcaaacgcactatgacaggagaggaacagagaaagggcggcacggaaatggggctgaaggcgagcggatttaacggatgcaaaagagtaaccatcaccaaaggacctaaaa

SEQ ID NO: 56396 - DNA, 673 bp, Heterodera glycines
atgcacaaatggtgtacggacatttcgcctactcgacatcatgacagtaggcgaaatgaccgattttgggttagtaggcgaaatgaatgtttttggcttagtaggcgaaatgtcgagtaggcgaaatgtcatgtagcctgcacaaatatgcacataaatcgcgaaatatgcacaaatatgcaaaatatgcacatggaaagtcatcctagaagcttcaaatcaagctaaaaacatgtttttcgtgcgttttcagggctcccgcagtccaggaaaaaaaatatgcatgtgcatatttttggcatccctagttatagaacaaaacataaaaacatatttctttttctctctttttggcgtactattttcatgtctctagcacatgtaaaaatcgaaattcgcaaattctactagttttggttagaagagtacaaaaccactttggacttttaaaatcaataaaaaagtgattagtttccgcattttggttgaaaacagcggcctcggacctgagttataacgtaatgaaaattttaaattcccacaacttttttcatatgagttaaattgcttagcatttgcttagaaaaagattctccttttcaaaatctttttttagataccaattttgttcagtttagttggagatgaagcgagttatggaagatcgaaataa

SEQ ID NO: 56397 - DNA, 1065 bp, Heterodera glycines
atggaagtgcgcaagaagaaactgattgagaacagcgaagtgatcgacgccgcagaacaagcaatcaacggaaacggacgactccatttgttgggtttggtgagttttataaaaaatcgttttttattccattttctccaatcaaatacaaaaatgttcagatcagtgacggcggtgctcactcgcacataggccatttgtttggtctgttggattccttcaaacaattaaaagtgccaaaagtttttgtccacttttttgccgacggccgtgacgcatcgccaacgagtggaggtaaaataaaaaattcaatttaacaaatctgcgattatatatgctcccgccatttttagccgtcttcttgcaacaactgcttgacttcttaattgccgaagactatggcgaattggcaaccattgttggtcgttattatgccatggaccgtgacaaacgatgggatcgaattaaggcactcattttcgaaaaaatatcattttttggattttcatttttcctaaaggttgcctacgaggcattggttggcggagtgggcgaacagtgcgaaccggcgaatgctgtacaattggtgaacgggcgctacgcaatccaacagactgacgaatttctgatgcccatcgtgttttcggacgaagcgcgtgtgaaaggtatgaaaaaattgctgtttttatccaggaattttaggggggggggtaaatttttcaaggaaaaaacaaaggaagaatctttggtttgaaaaaacaaacacattcatgatcaaccaccatgaaactatgtaatagtactattttcagaaatagaaaataaatgaataaaaccaaaaggatataccaatttttaggaaataaatattgctccctccacccaaaaaagcaaaacgtcgaaaaaaaaattttttgttctcggcctttttgctgtaccggctctaaagatgcttattgttagtcattcattttcaagcagaatttgcaatttcagacaatgacacattggtctttttcaattatcgtgctgatcggatgcgtcagattaccaaatgcatgggtg

SEQ ID NO: 56398 - DNA, 543 bp, Heterodera glycines
atgtttaattgcctcattaatttgctcagcaatttgattgccactcatttgtcaccaaatggcgcctatggcctcgtgtttggcattaacagttttgttgcgcttctgctccaatcagtcgtcacactgcttattgtcgatgtaaatggtgcttttgcattgtcacttgaagcacaagtggggcaaataattaattaatactataaatacattatttcaatcatttttaattaataattaaattatccataagaactagaaacatttatataatttaaattaaaataaaataaaattaataaattaattttaaagataattaaaaatgcatttctttttcacagtttaaatgttcattttaatttgatttgttttttcagttcgtcacctatagcatatgcatgttggtcagttcattcacatttccaccccttcaactgctcgtgaaatgtggcaaaaagtgattcaatggataaaggaaacttttataggataattacttagtttttattgttaattgaataataagggacccgtaataaa

SEQ ID NO: 56399 - DNA, 180 bp, Heterodera glycines; identical to SEQ ID NO: 51454

SEQ ID NO: 56400 - DNA, 205 bp, Heterodera glycines
gtcgccgctgttggccgcgactcgcgtgttgaacgtcgctttctccgacgatctctgtgagggtgcctattacgaggacagtcgcgtcaccgcgttaaaatgtgccgacgacccggaattcgtttggtcagtgggcacttccgtcagggacatgatcgtggacagcaacgcgaactccttcaacaaaagcgaaagcaccgaataa

SEQ ID NO: 56401 - DNA, 214 bp, Heterodera glycines
tccaaaagagtaaaaacccacgaaatgtccaaaatttttcaaaatttataaaaacaaaatgagtctaatttaggatttttagggttttcggggtcgctgaatacgaatataccatttatattaccccttgcctaaccttaggcccatctgaataataaaaaactcaaattcgagacttggacatttcgtggcctggacattttgtgggtcagcg

SEQ ID NO: 56402 - DNA, 858 bp, Heterodera glycines
ttcttttcttcaaaggttgtttatgtgtccgttccctccgctgaaattggcaaacgaattgctcatgaattggtccgcagtcggttggccgcttgtgtgaacattgtgccacagattacttcagtctacgaatggaagggaaaggtggaggaggacagcgagtcattgctgatcatcaaaacgggcagagaacggctggaacagctcagagaggcagtgatcaaactgcacccgtaattaatgatcaatagggttataagttgtatgattttggatatttctgcgcatatgctatgaagaaaggggctcaaaaatagcatttctacgttaaaattttttgatttggtgaaggtttttagtgcatataaaagcatattttgggggttttcgagaataactgcatatttggccatttttgcgttttgagaacatatttcgggcatttttggcgaattttcatacgaaaaatgcgaaaatacacccctaaggaccgaaaatgctccttagcccttgttttggttttttaaaagtaattcttaatttatacacaatttttggcattttttgagggctaaaagccatttttggcagttttttaaagcatattttagtgcatatttgggcatttttcgggttttagggcatatttgggggatttttagtgcatattttatgcgcatatttggcattttttagtgcatacaacttaaaccctaatgatcaagcattaaaataaagcacccatttctttgcatctttcacagttacgaggtccccgaatttgtggcatttccaattgagtacgggtcagagccgtacttgcggtggatttccgatcagatcagtgacaaagaggga

SEQ ID NO: 56403 - DNA, 798 bp, Heterodera glycines
ctaaggatgggactgaaaggaccgtcgctgatacggtggccccaaatgtgaacaaaatgttggtaccgaagcgaaaagtcactgctgacgcattgttggattctttacgggcagaagacgggtgaatgatgaagagcaattaatctcacaattagccctatacatatttagtgccaaaaagcataaacaaaatgccaaagtgtgtctccctccgccgtcggtgccatcatctttgtcctcctcatctgtcactctttcttccgcgctttgggaccatgaaaatgatgagaatgcaattgttgtcattgacaataacacctctaccactgcgcaatcgcaagatgccagcatcaacagcagcagtcatctgatcggctgcagcaacacaaccatgaacagctccacaatgttggtgccgttgtccgattcgatgttgttggatgcgtcaccgctgaacaacccattcaaaaagttgcaccgtggattatgttacaaaccctgacgtggttttcctggagtacctttttgaagaatgccggggatgtaatttccccaaaaactgttttcgcacaatttgaaatttttgcagaaagcgccactacggacacccgctgcagtctccggtgaaaaattgggaaagtcttccactactcaatcaactgctggtgacgtgggtggtcctccttcaaatcgaggcttcttggagcagtcacgtgacaatttgtcgggatttgtcgacttcttcgacacgctccaatcggcttcgtcgctgtcttcgtccacaaccgcacgaaaaaa

SEQ ID NO: 56404 - DNA, 2571 bp, Heterodera glycines
atgggcaaatggccaattttaccattggaggtattggggcgagaaaagcaacattcggcgactaacattattagcatttgctcagaaattctcccccgcgttcaaatggccaattgcttcgcaaatggaaatttcctttctcatccgcccgcttttctgatggcttatggcactcgtcttctcgttaatgcacctcattctgctgctgcatctgatgagaaattagtggagggaaacgtaaaaggaatgcgaaaagaaagcgaaagggcggcggaagggacggcgtcacttggaagggcttttgtgccggggattggttccgaagtgtccgactgtttttactcatcgatgggtgggtttcatgtgttatgatcagaatcgcatatatcactagaaacaaattcgatccatttttgctcatcgaattgatcttacagtaaacgctgctgaatgtcctacagtaattcgttgcctcctttcagtccctgctgcccatttcgatgtctctgctcgggccctttgctgttccatcgtccgctttctccccctcgccccctcctcctcctcaaaccctttcttctcttctcaccgccgacttcgtcttttgctcaacacttttccgttcatttttctgcctcatggaacactcataaaaaagagcgaatcgaacgaaattcgcttctgttgcgtttgtgtgcaatttgacgatggagaagggacaacagaaagtcaattggccgaagctgtccttgtcacacttccccaagaggggcaacaaacgacgacgccatttgggcatttctgtgaacgactggcacttcaaattgaggtgatcagcgggtgaatcagtcaatcagcggagcaaataaacgagcaaattcatttaaatcttgtattcccatgccctgccattttcagcgatttcgcctttcttccggcctcatccactgttggctgtctcagtctctcagccgtcttttttctcgctctgctgatttgcgatggattaaacttcgcccaatcccatcagatcagctcaagaacattgacaatttaatcgtttcaacaagtcgcgtccatttggcagaagtcaaacaaacattcatggatttgattgcttctgcccgacaattgaacgctccgtggctattgtcacgtgataaatcccattggaatttacacttaccaaaagttgaaacggaagataagctgaaccaaaacagtaaaaactaacaaatcaattaaaaactcaataataatatgtacatacatattcagaaatgattaaacaaattgttctgaaattaatggatgatgaggagaaaacgcgtttaaatgccaacgatcgaattgggactcaccgtcttttttggcctctctcgcctaaaatgaccataaaattcagggtcaagcaatgcttaatttcgaaatgtcatttcattttgttcagaatgacgaagaaatgaattggcatttgccaaatgaaagtcattctgaagccaatgaaaaagatgaagcaatgacgcaataccatcaaaagtgtgtgcaaatggtcgatttcccgtgggtctttcatccgtcgtctttcattccctttttggcatttcgtagtgctcaattgtccgttctttcctctctttcgcattccattcgaacgtttttgcgctgtcgctgcttaccttccgttgttggcgcaaaaggtcaaagtgccggcgaagaagcggtggtgccattggcacttttgttgaagggaccgtgcggcagtgggaagtcaactttgttggcaaaacttatgagcaaactgcgaacaactgacgaagacaatgcatttgtaccagtcgcagcggatattgtcgattgttcggatgctggtgagcgatcaaaaaaaaagaatgccaaagtccggcctttcttttgccattttttcaattcgaaatgcgaatttttggtccttctttgaattcggttgattttttcctcctttaaaagggaattcgcttcttcgttttgtcgattccgttgattctgcgatggctgaattagtcaatcggtggccttccgtccttttgctggataattttgacatttgtattgggaaattttctaacggaggcgacccttcgtcgatgcaaaacgaagaacagacgaaacgtttgatttaccaaagtggcaaagaccaacaactcaagagaattatgtgtatagttcagaaatattcggcagattatttggagaattccgacgaaggaaagtgccaattgtttgtgccatttctggcggaattaaaatgtccgaagagatttcggcatgggaaggaccgcctttgaagtgggagacgcaccgaattggtccaatcggtgggcgttaattaggattgtttattttgttttacaatacgcaaatatcaagacaaatgcacacaaaaggaagtattgaacaaattatcaatgcacggagacataatgcgaacagatctgcgaattgaatcagcgaatttcggcacaatcggtgaactgtgccgtttggtggagagattggaattgcgaattggcacaaatcgaacgcccgcgg

SEQ ID NO: 56405 - DNA, 667 bp, Heterodera glycines
gcaaacggaacgaattcggcgaaggagagttgtccattcgctttgaccaaatcgccggattggagtccgttaaaagcaaattgaccgaaattttcatttggcctgccagggtactaattgttttcttttttgttgcaattaccgttttcttacagtatccatccctttttggattgtctggcgttcgcgtgggacaccgcgcaatccttcacgggccaagcggatgtggcaaatcgatgttaataagggcattggccgggtcaatgggagccactgtgttcagtgttagggtgaattttctttttcttaagagtgcccaccaattaaattaaagggtccccaattgttgtctaaatatgttggcaaaagtgagcaaaacattcgccaactctttgccaagtgataattttgacttttttatccattaacttttcttttaaagagcaaaggcatcaaagccggcgttgatcatttttgatgaggtatttaatgtttttagagatttcattaaatttgtcagatcgatgccattgcgccgcaacgaggcagtgacaattcgcacgtgacggatcgaatggtgaaccaaatgttgacggaattggacggatttgaggggaacaccgaaggcatggacagcaaatcaagaaaaacatttgtaacatggcac

SEQ ID NO: 56406 - DNA, 996 bp, Heterodera glycines
atgagtaacagtaatgacagtgacgacctaattatttatgacgacaatgaagacattaaagacgtttcatccgattcgggtgacgaagtagcgatggaggaagtcaccaatgcaggcacttctacagctggggccttatctaacgaagaaatcagggactaccaagtagagtttcaagaaaagttcacaataatgacagaaattacaggtgctttctcagacggagttggtcgacgaactgaataagctttcatctgaaacttcagcagtgttgcgtttcaatggctcaatttgcaaggtacttcttcatcacttcaaatggaacaaagtcacactaattgagaggtagctaattttttttattgttgactcaattaatatccagattcttcgaatttcctgagacttcaaacaccgattcattcttccgcaatgcaaatcttctcgatcctacaaagcataccaaaatcgagggaaaggttgattactgcaagatttgctacgatttaagacagctgactggattgctgtgcaaccatttgttttgccgtcagtgctggtccaattacttgtcgtgcaaggtgcttaaacaaaaaattaaccactaattgtttattatagattctcggcgagggtcgaccttatgtcacttgtcctgaacttcgatgtactattgttgcggatgatgaatttgtgctcaaaaatgtcgacaataaacaagcgttgcgttcctatcacaaattggtcctcaactcttttgtggaggttgatatctttgggagcattcagctacaaattttgtttagtgtaacaccttgattaaatggtgccccgctcccgaatgtggtcgtgctgtcaaagtacctcattcagaaccgcgcaaaattctgtgcaaatgtgggtgccttttttgcttcagctgcagccaggtgggcgtaaaactttattctaattgtaattttatcattttttattctacagcaatggcacgagcca

SEQ ID NO: 56407 - DNA, 2621 bp, Heterodera glycines
atggaacaaatgcaggtcagacgttgaaaaaagcaattctaaattaaaaaaatgaatttctttaaaggtgctcggcttttcgtggattgaaacgcagtttttgcagaaggcggttgaaattcttgtcgaatgccggcgtactttgatgtacacgtaagtttcgtaaactaaataaaggtttaattcgtattttcagttacgtgttcgccttttaccttgtccaaaataacatcaccaaaatgtttgaagacaaccaaagtgacctcgagctggcgactgaacaagtgaattttaatgttagttaattgttgtgacaatgtttatgttttagttgagtgaatatttggagagagagcttccgaatgagaaagttgctgaggtcaaacaaaaggtgcgtttgttttctttactttttctacttcaattactgtttcaggtccaagacaaataccgttacgtggaacagcgtcgccaaattctgctcaaacattgtgttgagggacgcgagcgcaacgaatgggagttctgtcaggccacgattgagaacaaaacggactttagagggatgtaagaactgcggggggcgtgctatattcgatattctaattgcggagagttaaattgccgctatgtatcatttctatgaacaccttaatggatctgtcaatcaatgtttctcacaatgtcttcactgttcttttcaatgcatatgttatgatgcactaatgcttttcctatggcatgaatatattcaggagtcctctcacttttggcagtttaaactaaaaattattattccaatgtctacttttttaatgtgctttttgttttacaaaattcgtagatgggaaattactacagtcctcctaaacgagtggggcagaaccctttgtaagttgtttcttccctaaataaaatgaccgagaattatgcagcactcgttctggggcgccgccgcctaaattggtcattaggaaggacaaggatgtgccgatgcaccgagtcaatgacccggtaagagcaacaataactaacggattaggctttagtccaaatccactttcttgcccatatacgcgtgcgcccacccacctgattaaacaattggaatatgcaatatttctttagatgagtttgcagctgcatatggcgggtattaataccctatgctatatttgaatttgaattaccacagatgaacgcgttcggactgcgggactctcgaaggcggagagagagtggagagagtgagtgacaattagaacttcctccaacaaaaagttactcaaatatctattttagaaaatgggttcatgaccagagtatgcatccggatgagcctatccatgtcgacgcggtccaccggtagccatttgttctattttatatatttaaaaattattaacccaatcaaatgtatcttattagaaaaattcagccaactgaatccaatcagagtgctttatcgatggccaatggataagctttacaagcatttcttgcgaccaacttttgggaattactgggcaacgattatccgtgtctatgttcccaagttcttctggttctttatgacattcgaatttttctactacgtgtggaaatacgaatcgaaggtgcttgaaatttttattttctttaaataaatgccataaatatggtaaatgtttattataattagggttataagttatatgcactaaaaaatgccaaatatgcactaaaatatgccttaaaaactgccaaaaatggcttttagccctcaaaaaatgccaaaaattgtgtataaattaagaattgacttttaaaacaccaaaacaatggctaaggagcattttttagacaattgcaaaaatattgaaatttccaaatttataaattttattatatgctaaaacaacattacattttacatatacataaattttttttccaaaatttcttacaaaaatttaaaattttttcgatttttaagggcgtatttttaaaaaaattccaaaaagtcgatccttaggggtgtatttttcgcttttatcgcatttttcttatgaaaatttccaaaaaatgaccaaaatatgctctaaaaatgcaaaaatggtcaaatatgcacttattctcaaaaaccctcaaaatatgcttttatatgcactaaaaaccttcaccaaatcaaaaaattttaatgcagaaatgctatttttgagcccctttcttcatagcatatgcgcagaaaaaatatgcaaaagcatataatttacaaccctaattataatcattgcagagttggcaaaaacgaattggcttttccactatcaatcgaccggatcgttatgtgcttgtcaaagaccacgatgaggagacgcttaagcttggcctgacagactacagccgatctgactattttgacaaggaattctaccagcgcattaaaacggccaacatcgacttcggccccccgaagaggccgtggtgatcgctgcgatggtggcaatgcccattcagaagagagaggcggaatagaaaaatgaaattaggttatgatggcagcattgttggatttttgtttatttctgtaatgtatggttttcgataaaagtctggacagcgacttcctttgtctaaaa

SEQ ID NO: 56408 - DNA, 87 bp, Heterodera glycines
atggaaaaggcacaaatggaagaccgaactcatcgaaaaactgaaaattgcaacaaaaactgcacctgtggaattccctgtggacaa

SEQ ID NO: 56409 - DNA, 449 bp, Heterodera glycines
cgcccaacacgaaacttcccataaagatagctctatatatgttgttaccttctttaactcatcggatattcttcataaaaacgctacattcggtgattacattacgttaaatcacactgctgtcagtattataaacgacacatataaggttacttatgtgtgctcgaacaagagtataagtttgaccccagatatggacaaatttgggaaatatatagcatttatgtttaaacctattagatatgttcttgctctcatcaatctatttttactagctataataattttgattactcttcttggacaaattgaaggcgaattcaaatggtttatacttaacatatcaacattgaatattttcttttatttgtttactgagggtggaagatgtgttgttgaagatttatttccgctcttacagaattctcgaatatcttgggaagttgtca

SEQ ID NO: 56410 - DNA, 471 bp, Heterodera glycines
atgttcaccgactcaatcaacaacgacttggacgatcgccgattgcgccgtcaaattgccaattgcaacgagcgaaggcgcatgcaggttggacaaaaataaaagtgatttgtgcattttctaactttatgttttatcagtcttcattaattaatcgaatattatacccaaagaacagtcattatttaaaaacaaattgttttgtttttagagaatggtatgtcataataaagttgggttttttttcgtttttttgttagatgtccattttgaatttccattttcagtccatcaatgctggattccaagcgctccgtcaattgttgccacggaaagacggcgacaaaatgtcaaaggctgcaattttagcagccaccgccgaattcattcaatcgttgctgcgagaaaaggataaattattggaggaaaattgtgtcgtaatggcaaagaagcgacggatggacacggaag

SEQ ID NO: 56411 - DNA, 73 bp, Heterodera glycines
atgcactgcttgtgcgttgcttcgtgggatcatgtacttgtacgtgttcttacgttacttgctcagctcggct

SEQ ID NO: 56412 - DNA, 953 bp, Heterodera glycines
gtttactcatcaccgcccctgctgtggtcccaagaattggccgcattggccaaaacgtgggcactgaagctggccgaccggggcagtgtgctttatccggagctgcccggcattggcgagaacatttttttgttgaccagcaaatgcaacggcacagccgctgacgccatttcgtccccgtccgctggcatggcgacaaattgtccgccaatcggcgaccatttgaccaccggcattgagctggtggcacactgggcagccgaagcacaaaagatggactttgcgcggccacggtggaacaatggtaggaggacagcagaaaatacaataagttttgggcgggactgagttagcacggcatttcatgtacaacaccaatccgccactcaaaaggcagattgttgtggttttcggttatttccgacacctgttgattattcattaagatcactctgggaaattttatgatggaacaatgacggtcgggacaaacttttttatgggtactgaattgtccagctctttgtatccggcatagttttctaattcggcgccaaaaaaccatactctcgaaacgaggcgccgtcactttcgtaaatgaaatttccaatcattatttatttccaaaaatttttaacgaaaattaaattcccgcgtcaaattttgacacagatttcgaaagtctcgagcactatcgattattcaacaattttttgaattatcatagaaacgaagaacttcacgcaaatggtgtggcggtcggcaatggaaatgggtgtggcacggcattggaacaccgccaaaaactgtctggcaatcggtaggcatttcaaatttgaattttttttcacttgttgcacttgttttcatggccaaaaatagacatgtaattagtaaatttacttattttacagttgccttttatcgtccggccggcaactcaaatctgccag

SEQ ID NO: 56413 - DNA, 576 bp, Heterodera glycines
atgaaagaagaagacagacactggaatttgattgtgcaagattacaacaataacccacaaaatcgaatgcgtggcaggggaatggcaaggaaaaacatttacgtacagcaggaccaagcaattcgcgccattttcttggatcgtcataacagaccttttttggcctatctacgtgcaatcgcttatcgaatgccggaaccaaattgatttgattgagatatttttaggaaataatccgttctaatgacttgaaaatatttttttaaatagaaatttactgtcggattgtccacttctgtcggattgtcctcactgtcggattgtccaactgtcggattgtccactgtcggattgtccactgtcggattggccgggagccctttttaactagcgccggattatttttcaacctcctcagaaaaggggggataattagagactgggggattatgatagagggattatttttcaaaacacctcgtagactgggggataattggagactgcgggattaatagagactgggctatattagggcaattgtgtggaattatgctttagctaatttaaaataaa

SEQ ID NO: 56414 - DNA, 873 bp, Heterodera glycines
atggaagcgtctaatgcgaacgacaatgttcgtattacgattcctcgccttaatgttcaaaaggggcgaagaaacaattgctcactcgagaagcacagaaaggaaattcgccaaatttccaagtctgctgaattcaaggcggaagacttcgcactcgcggagcgagtgctcatccgcctggaccagatggatgatgctgaagaattccaacactttaaaacagtgtttgaagacgacggaattctccgtctgaaaaccagactggagatgagtgagaagccatacagcttctctcatcccattctttttgccaagcattcagctttggcaaagctgatcattttggatcggcaccaaaaaaggcatcaccttggagtggacaccactctgacagaattcctgagcgaattctggatgccaagcgcgcgtttaaatgttaaacgggctcttcgggactgtcttctctgtcgccgaatgaatgcacaacaatttgcattaccaaccatgccacccttgccgggtgagcgagtacgccgacacgcgccatttcagtcaattggaattgactttctcgggccaacgacaatttctttggccggagaaaaaataaaggcatggatcctcatcataacatgcctcgcaacgcgcgctgtctaccttgaggcaacattggacctcacatcggaatcattcatcaatgttctccgtcgattcataagtcgacggggaaaacccgacatcatttggagcgacaacgctacgaccttcaaactcgctcagaaaaccctggagcttctcagtgctccggggccggatcaggaagtacaaaacttcctgacccataaccgaatccagtggcgattcattgcccaa

SEQ ID NO: 56415 - DNA, 1194 bp, Heterodera glycines
atgccattcacacccggccacaacagtggagggacccgaaaggcaaaacatcgcaacaacccaagagggccaacaatgcaaaggaacaacccgcgcgtccaccaaacaccaattatggcaaggcaagccgcggatcaccaacgcatccgtgcggctcatgtggagtcggatcattggcgcacggattgccgatttaaagacgccacatgccacaaatgccaaggacaagggcacattgcaaaggcgtgccgacgcagctccaaccaagcgaaaaatcgcagagagcgatccgtccacaccgtcgttgtcaaatcccactgcatgggaattggaaccgcagcaggccgctggtggcgactcacgttcatcatcaatggaattaagattttgatgaacatcgacactggtgctcaggccaccattctcacactcaaaacgtggaaaaagctgggttctccaaaactcgacaaacccgacattgaaacgcggaactgtaatgaagttgcattcaacgtcgaaggaaaatttgtctgcaccgtttgccaacccaatcaagcacccaaaaagcttgtggcatacgtcagttccgaaatcaattacgatcttttcggactgccttggattgaggctttggacgtcatcccacatgaaatcatgtaccccgacatccgaccaaaagctcaaccagccccggcagaaatcaacgccatggccattcctcagccaacgcacaaaatttcggatttggaatcgctcacaaaggccctccaaactgatttttctgaagtttttggccccggattaggccattgcaccaaagcaaaggcccatttgatactcaagtccgatgctcacccaacattctgcaaagcacgcaccgtcccacacggcgccctcaatgccgtcaacgaagaattggaccggcttttgcagattggagccatcaaaccgattgagttcagccattgggcagcaccgattttggtcgtaatgaaaaagaatggaaagacccgagtttgcatcgacttttccaccggcctcaacaattcgctcaagttgaatacacaccctttgccccggcctgatgacatttacacggccatcagcggctccgtctatttctccaatctcgacctccgagacgcgtatttgcagatggaattggatgaggaatccaaacacctttgtgaataa

SEQ ID NO: 56416 - DNA, 305 bp, Heterodera glycines
taataattcaatgcgcctaggaatgagcgaagtgtgctcaagtcatgtggtggcggcatttggcgaattgcttctgatcgtccggggtaggggcgaattcctttcgcagagatgacgtggccgagaaatagcaattcgggctggaggaatttgcacttttccaattggattttaaggccaaattcctggattcgtttgaagagtttgtaaagggaacaaatgtgctcttcaagcgttttggaggcgattatgccgtcgtcgaggtaggcaaacgcgcctgggatgcctgtgacgatttggtccat

SEQ ID NO: 56417 - DNA, 1315 bp, Heterodera glycines
  unsure (1)..(1315): unsure at all n locations
atggccgactacaacatccagaaggagtcgacgcttcatctttgtctgaagcttttcgggggcgcaaggacgggcaaaacagcacactactctcggagcgtaagtcatgattatcataaaaggccaccccccccccctccacaccgccgatcaggcggtcacctccttcaccgctgataagcggtccccctccacaccgccgatcaggcggtcacctccttcaccgctgataagcggtccccctccacaccgccgatcaggcggtcacctccttcaccgctgataagcggtccccctccacaccgccgatcaggcggtcacctccttcaccgctgataagcggtccccctccacaccgccgatcaggcggtcacctccttcaccgctgataagcggtccccctccacaccgccgattagacggtcacctccttcaccgctgataagcggtcccccctccacaccgccgatcaggcggtcacctccttcaccactgataagcgttctccgctttacattgccgaaaggcggagttatcacaccgcttatccgcggttttgtattcttattattttatatttagtgctgccatgagcacgaggagcagacagaattcgataaggcagattcggccgaaaaaaatttcgaagtgttgtctgcttctttgtacgacatcaaagaatgtgccgtctgtagggaagagcgcaaatggtatataattaccttcaaccaagttggaagaaatgtgatcacaacgcgtggggcaaacgtctacctccttgatgaagacgtttgggaacatgtaaataatgagcaagaaacaattgatttttaatcttaatttagtcgggctttttgttgggagacctcctggcaacaatttatgctcgggcgctggttcataacatgttggacattgctcgagctcggcaaatgtaattaattactatttttttataagttccgtaagaataaaatttatatttagtacaatcgtgttgaacaatgcgcgccaaggtttcgagattgttgacactgggaacgcggcaacaccaccacaacaacaaagacaaagacaaccaccaccacaacaacaacaacaacaacatcatttattaccctgttttttagacaaattcgttctattgcttcttanattatcgaaataggcaatcttattttctttaaagaaccgccgcatcatcaaaatgctttctcgggcatttccgaaaacccgttgcttcaaatcgcggaagaggagcaatttccggtcgaaaatccctgatgaggagtcttttggatgtaatataaataaa

SEQ ID NO: 56418 - DNA, 656 bp, Heterodera glycines
atgactcaactgtttacttccaaccgtgacaatcatttataagataattttttgtcaatatggatctctaatttatttatgaggacatcagagataaaagttagcagcaacaatgatatccataaatatggccgaatcggaaagtataaggaatattgtcaatagacatcgtagtttgcagttattttaaaattaacgactaatctattccttttgtcttaggctacaaaataaaaaacgaaaaaacatgcaaaattattcgctgctgaacaattctggctgaatctgaaggcttcctgcttataggaacccaaaggcgcgttcaacacgaagcaagaaaattcctttatttattccaaagctgtgttataataaatttaattatattttgtatttttacaggaactcagccattgttattatgactcaactgtttacttccaaccgtgacaatcatttataagataattttttgtcaatatggatctctaatttatttatgaggacatcagagataaaagttagcagcaacaatgatatccataaatatggccgaatcggaaagtataaggaatattgtcaatagacatcgtagtttgcagttattttaaaattaacgactaatctattccttttgtcttaggctacaaaataaa

SEQ ID NO: 56419 - DNA, 354 bp, Heterodera glycines
ccgaaaacaaaaaaatcgatttttttaagtgtccggttggggtactcaaacaattatggggagcaaaatgccaacgcagaattaaagtacaggctatagggaagctattcccgaaggattcggtctccccataaatctgggcgcatcggttcggggggactgcccgaatacaaaaaaatcgatttttttcagtgtccgtttggggtactcaaacaattatggggagcaaaaatccaacgcagaattaaagtacaggctatagggaagctattcccgaaggattcggtctccccataaatctgggcgcatcggttcggggggactgcctcgaaaacaaaaaaaatcgattttttc

SEQ ID NO: 56420 - DNA, 187 bp, Heterodera glycines
aagaaattggcacgtgcggaatgagaggcggaggaaacagcgaaaggagaagcagcagaagagcaaacggaagacggcgacaaaggcattgcccaggggcgggcatccgaaatgggcgacggatggacgccgggggatggcactcgggacaaataaaaatgtgatcggaggaattgagggaaactga

SEQ ID NO: 56421 - DNA, 1402 bp, Heterodera glycines
atggccggccatctttgggctatttattccatgcatatttcccattgtcagcatttaatatccgtgacggaatccttcggacgcccacaattgttcgtactttgttcttgtccattctcaaaagtccttaagaagtcagacgctctgtcgtcaatgtttggcgtcgatttgttcttcaaacaggtgggcaaagaaggaaaggcaaatgcgaacattcgtccgaatttgaggagtatttgcaagtgaccggcagcttcaaagagcgaggggcgcgctttgcccttctgcgacttacggaagagcaacggtaaaagtggcagcggaagcaaacaatgccaacggccttttgaatgttggcacaattcgcaaaaaattattccccgcttaaggcgaatcggagtgatcgctgcgtcggctggcaatcacgcactttccctggtagtccgacttggattatgggtttagccactcagtgattttcattcttttacctccgttaggcttaccatggcagcaaattgggcatcccggtgacgtaagcatttgtgttttttgattttgcatttcccttcatttggccttccgttcgttttctcagtgtggtgatgccgaagttcgcccctctaatgaagatttcctgctgtgaatcttacaaggccaaaggtgaatcagcagaaggccactgattcctcctccgattgccccttttagtcattctccatgggcttaacattcaggaggtgtttgtttattcactcaaatgacttcccaatggccaaacaaatattaagtcaaagatattcgcttatgagttggccaaagagaaaaacctcaaatacgtcaacggattcgacaaccccgacgtaattgcaggccaaggaacaattggactggaaatactggaccaagtcggtcgactacgtcctttttgtgtagtttttaattggttggattaaggtgggcgatgtggacgcaattgttgtccccgtggggggcggtggattaatcgccggagtcgcattggccgtcaaaacgttgaaaccggaagtgctaatcattgtaaatgtgtatttattgtgaacaaatgcatttcaatcgtaacttttaggggatgtaagtcgcattagcaaatgttgccaaaagcaaatggaagtttcagtgaatccgaaatgtgtccgtccttcaaaaatgccatggaacactcggatgagccgctttatccggaagcgagcttagccgatggtcggacaaaaacgacattcattttcaaccatttgataaagcaaacattcacaccaattgcttttcaagggctcgcagtcccttcggttgggcacaatgccgtgtttatggccgatgggctaatcgacgaccttgtcactgtgtgcgaagaaagcatagc

SEQ ID NO: 56422 - DNA, 225 bp, Heterodera glycines
ttttaaaatttcgaaaattttgaaaatttttcgagctaggcctaaaaaacggttttcgggtttttgaattttaggattttttaacgatttttcccagagaaacggagaccacttccaaaacatagtttttcgagctctatcgactggtatttttttcggaaaaatttcgattttttcccggaaatagaaaaaatttttggcatgagcgggacatttgagtcccgg

SEQ ID NO: 56423 - DNA, 327 bp, Heterodera glycines
atgaatttcaacaatttgactacgccgattgatgaacaaacaatgattgaaagcctgtctttggatgaaccatcaaacgagctacgatctgttgaggttaacctttattaatattatcaaatagaaagaatattttagaaaatggacgaagaactgaacaaaaaggaggagccgttcactctcgccgaatgttgcacagcatttgatctggttgcggttatgttcgactgcaaaattccggtgccgtacgaggaggagcagaagcgttacgtatacgagcaccaggacaagccgcgtttcatctacatcaccgaagatggagactag

SEQ ID NO: 56424 - DNA, 449 bp, Heterodera glycines
atgaccgtcacatccaactccgaattccgactcatcgaatgtgtgccaatccttgaggaagttgctcgtgaatttggctgtattacgccactaccaaaccttgggcatgtttctttcgttttacaacactaactccagcatacagtagccatcgtgactatcgtgtaagcggatgtatgatgattcgcacgctgacatcgttgaatcgactctacattttcgatgctgaagactgtattgaggttaatggaaaatatgtttcatattttattgctattttaggtgaagggtttcttaaggcaagaggacggcacgagccaaaaatggtcaacgaatattatgaaaaatatgatggactaaatggatttgctgaatttattcggaattgggcctttacctttttctgtttacatgcctttgatgatgacgacacatctgatgaagactaa

SEQ ID NO: 56425 - DNA, 314 bp, Heterodera glycines
gacagaagaaaaagtttattggcgacttctcaataacatcggggaagcacatcactatcccgtccctcggaggcgtgtccatcagaatgttttcagaggaataattctgactcatactgtgaggtcactagtgatcgaacggttacgatcaataagaatgagcccgtctgcctctccgtacgcaatcaatgtaactccctcgttgggtactgcttcagtgaatcggatgttcactgcagtacagccctctttgatcagctcaaagcctggcgagtcctcctgcgcgttggtcatttggaagacatagaggcaat

SEQ ID NO: 56426 - DNA, 858 bp, Heterodera glycines
atgaccaacgcgcaggaggactcgccaggctttgagctgatcaaagagggctgtactgcagtgaacatccgattcactgaagcagtacccaacgagggagttacattgattgcgtacggagaggcagacgggctcattcttattgatcgtaaccgttcgatcactagtgacctcacagtatgagtcagaattattcctctgaaaacattctgatggacacgcctccgagggacgggatagtgatgtgcttccccgatgttattgagaagtcgccaataaactttttcttctgtcttgtgtatctgttcggtgcggcaggggcggcagccgtaggcacctatttattcctgcgagagagaagaattcgtaatggacaacagattcatcgacagacttctctttgagaatcctgcgacgaaaaggtacttcagcggcacatatcccgcagatgggttgccaaggtgttcaaaatttccgtgcagtctgattgttaacctggtacgcttaatttttgcttcatttgctcatcgtatttccattcaggaccctgcaggtatgccgggaactcattggtgtgcgatatgggcacagtctcctgctgttgcctacttctttgactcatatggagagatgcctatcagattgatcaaaaaatatttatccgataattttaaaaacatttactataataagacgcggtttcaatcggtgttgtccaatgtttgtggtcactatgtaattactttcgtttattttatgtctatcggattgggtttcgaaaatgttatgcaaattttaaatcgttcaaataaccctgatggatttgtttatcggtttgtaaccaagagcatacaataa

SEQ ID NO: 56427 - DNA, 993 bp, Heterodera glycines
  unsure (1)..(993): unsure at all n locations
taattaaatccattccttcgggggaccgtgccgggtgccgcggggtaagcagtgctggttcgtttcatcacggcaccgaaccttttggctagtcagcaatcgttgcttaacttgccagatcggacgggtgcgcatgattccactgttccaagcaccccaccaaaagcaaaacgatataaccaaaatataaggaaaaattttttaaaaaattttttctccatcttcctttttgatactaaagcatcagagtgctaaaattaagttgtaaataaaatttggtgcgctttagagcactttctgaaaaaaatatttatgaaacaaaaaaatcgattttttcaagtgtccgtttggggtactcaaacatttatggggagcaaaaatccaacgcagaattaaagtacaggctatagggaagctattcccgaggggattcggtctccncataaatctgggcgcatcggttcggggggaatgccccgaaacaaaaaaatcgattttttcaagtgtccgtttgggcgtactcaaacatttatggggagcaaaaatccaacgcagaattaaagtacaggctatagggaagctattccggaaggattcggtctccccataaatctgggcgcatcggctcggggggactgccccgaaaacaaaaaaatcgattttttcaagtgtccgtttggggtactcaaacaattatggggagcaaaaatccaacgcagaattaaagtacaggctatagggaagctattcccgaaggattcggtctccccataaatctgggcgcatcggttcggggggactgccccgaaaacaaaaaaatcgattttttcaagtgtccgtttggggtactcaaacaattatggggagcaaaaatccaacgcagaattaaagtacaggctatagggaagctattcccgaaggattcggtctccccataaatctgggcgcatcggttcggggggactgccccgaaaacaaaaaaatcgatttttt

SEQ ID NO: 56428 - DNA, 548 bp, Heterodera glycines
atgcaaaacaaccaaaaagcaatgctgcgaagaatcggagaattggagaaggaaattaagggtaattgcaaattgtaatcattaagggaaattgaagagcaaaaaaaatatttaaaaaaatcatgaaatgatttgcctgattctgatttaatgggtttcagaatttatccatttaattgttttgacgcgaaattttcatagattttgaaaaatattaattataaaattaatcaattctaattatttttcagaacaacgaaaggtttgtcaaatggaacataagcaattgatgacggtctcagaaacggtagaaaaaacattgaatttgatgctactgcgaaatttgcagtggtagtcaatcatttcaacaaatttgtgaaattttcgctattgaaaattagaaaaaaatttaaaatattaagttggaaaataaagtggacaaacattcggatttggtcactgtgctggaaatgaaaatcattgccttggagaagcagcaaaaagagctgcaaaagagcaaaaagagaggtgaagaaggaataatttga

SEQ ID NO: 56429 - DNA, 337 bp, Heterodera glycines
atgacggatgaagacgctaaacgtgcggaggaagagaaggaatggccgaagccgacgcggtgtttctgattctcagatggctttaactgactttcccctttagaaagcaaatgattctgcgcagttttctgccccatcccgggagcgggtcgagagcaatgccccagcgaatgtttgactattttaattaacatttgaaattcctttttctttcaggtacgtgtcttatcgcgagggcgaattcgtcttttgcgggtccttcacatcagacattgcatttatttgatgtatgctgtacatttccatattttattaaaaagtatataaaattatacta

SEQ ID NO: 56430 - DNA, 2695 bp, Heterodera glycines
  unsure (1)..(2695): unsure at all n locations
acatctgaacacggaattcacatggaaacggcagaaattcaaagtgatgttgccccttccgagcaaaccgcaggaaaaggaggcggaagcgacatgtaacacagtgcaacaggacagaaaatattacacggaatgtgccattgtgcgaataatgaaatccagtaagaacggaaatgtcgggaagggcaaaaaaacaaaacaaaaaaaacaacaataatcagggaaagtgatgaagcacggtgcactcgtggaagaggtcataaagcagtcgcagctgagatttgttcccgatgttcaggttcttgaaatttgtttccctaaaaattgcattcggaaatggtttagttcatcaaaaagaacatcgaatcgctgattgacaaatactacctacaacgaacagaccaaaacgacgaatacgaatacatttcttaagtgcaatattgaaagtctaacaagatatttccattatgattgtcctcccttttaacttgtccagccggagattagtccatttcctctaagccaaacaattgctaatgctcaaaatattcgatgatgaagagaaagaaaacccactatttgtttttacttttttaatttgattaaattggttaagggtagaaaattcaaatgtgtactctgtggtgctgtattattttaaaatttagtcgaattgttattagctcatttactggtcattttttctctttgccatttttagttaccaattcgtaaggaatggaaaaaagagcagagaatatgaagaagcggagaatacaaataatttggacaacaaatagatacagctacaggttgaagtttggagttaaacactatccgaggggaggtactcaattgtccggtaacataatgtccttctgattgngtaaacattcgctttctatgcctntgccttcgtattncctgcgctcccacctcttgcaaatgttatgttttatgtcgtattggctgtgtgtggtgtcttgtcttgtgtctgtctttcttcacttttccatttgttttctctctccccatcatttctctaacttttaagcgttcgttcgtttcttttctctgcgaatacttttccttttcctttgttttttttcgctttgtcaatgcgaaaccaaccaaattatgtactatttaacaaagttcgattttacatttttcttagggaaatgtcttgtctcaattttctttttcgaattcaggttaacattaatgagcttaatttatcatggattttacgggaggaaatacgccaaatttgtttgaggtgcttctgcgaaatttttgttccgagtcgtcttcaattcaagaaaaggctgtttcctcaattccttcaattgagcaaaggtaattttcatttgcttctaattcaaatttaaaagacgataagagttccgttctctacaaattacagatttgctgaggttgaaacaaatgaatttaaagcagcgttcggtgaattgtcgggtgggacgcttcgtttggttgccgatgagtaaggcaacatttggcaaaagattcttcaaattttgcttttttagtcgtccatcaacatcagcagaggccaatgatcaacagtataagccgattgaaattgtaattggtgatgacgctgtgggtttttatttgctttttctctaaaaatgaattaattatgcttttccgagtcccattggtttgacaaatccatctcccctttcaggagattgttcaacagccctcttcaagttcttctctgatcagttcccatcccgagactgtccaagtattcaaaattcgacgggaatgataggctgaccacctgacttttgcaggatgcgaaggtttacgcgaggatacgcgaacttagggaggcggggctgtggagcgcgacgcgactgccaaagtgcgaagacccgccgagacggaaattgcactgggattatttgttggaagaagtgcgatggatagcgacagattttaccaatgagcgaaaggcgaaaaaggagtgggcccgaaaggtcgtttttataccaaaaaaatcggacgaaaaggaagggaattttcagttagcagtcagagcgaaggccgaatggcaccggttgctcagttcaaccaacgaagttaagaagaaggagcaggaggagaaggaggccaaacgcatttgtggtacggtcgcgaaaaagataagggaattctggacaaatgtggacaaagtcgtcgaatttcgggcaactgtgagcaattctgagtgttcatctcttctttcaacgatggaaatgttcaggaaattgttgagtcgaggaaacgaaaagcattgggccaacaactgaattttctggtgggagcagcggacaaaatcacctcacttttgcacgagcacatggccgactcggcctctgtcagcagacggagtcactcggaaaagagtcgggcgggcgacttgtcagagggcgagggaatgctaacggacggagaggacgacgagaggaccatcgacacggaggaggcgcaccaacaaaaggcacacgtcgaaatggaagtgaacgagctgtccaaggaggccaacctggagctggacgagtttttgacctcggtaagccctaatcattttcaatttatgtataaatttaaataagattccttcgcatttctctaaattcagatgcccagtggttatttggagtctttgggctataaaata

SEQ ID NO: 56431 - DNA, 1797 bp, Heterodera glycines
atgacaaccgtgtcggaaggcgaacagagtggaagcggtgacggaggaggacgcatctttttgatcggactgacggactcgtgcgctgtttggaagtacgtggtggagctgagggacagctgggatgagaaggtgtgtatgatggtcatcaacaaacccgaaggtatgtaattaagcacttgttttcgttcccgcttttctctcaatccatttattgatgtcgttttacaaaaattgttttataggagggcaacttttggacaaatacaccgaatgttttgctttctgcgacaaggaaaaccaaattggtgtgctggactttgtcgaccacccgacaatcaaagacggttatgtgttcacgctgaaagcgggcgaaccgttgccacgtgagaaaaattttgtttgttttaacttgtactgactgagaatccatttttcataacaaattgtttaattgtaaactgccgtctgtgatttgttatttctttcagatgtcgatctgttgccgttagacggtgtcggtttgcccgagtgggcgcagcacaacgattgcattttgctgatgctagtccgtcggatggatcatggggataagcaatggaagcgccaacggatgggcatcgacacgagcactccgccgattaaaaaagttagaaaaaaagcatctaacttataaaatctaattagtacagtatccaactaaattaactaaggggggaggaaggctagctgaaaagaagagagagatatagtagatagtgtgggaaatgaataatacagaggagattcagttgcccttacttgccaagtgattggataactccgctaattttagctttcgtcttttttataattgaaattaaacgatctgagaagttattgtaatactatttaaattatttttaagcgtcgcctgtcgcccgtttcttcttccatttcaaaagtaagaagggatttaattttaacatgacgcttgtacattatttttattagaaaatacttaaatgatttactataatccttttttatccctttcccacggcctctctctttttttctttccgcctcatttttctatttgaaaagtacaaaatgcgccattttctcccatgatttccattcaaaaaatggggagtaagaatgggagaattccatccgaattgcttttcgaactcatttccaatcttccgtttgacattcgatgggccttcacccgggtttccaaggcctatgattgttttgtgtggcagaaacaaaattcatgggttagagctgagctaatccgcaagaacgcaggaaggaaaaaagtaggctaaatactaggaaaatatggccatttttggcataaaagtttttacaagtccaaggcagaaacaaaataaacaaatttttgtcaataaaaaaagataatttagaaaatcgaattggttcattgtatcaactcggttttggtctatgctcaaaacattagcgatgacgttataagggcaaatgaaggagaatgcaaggcccatattgaaagtaaatattttatgtttatcaatttttgcaattatatcttttttagatctgctttgtattcgtcgtcagttggctcgtctgtaccgcttgggcagaacgtcaccgattgacacgtcgcaggtaacaaagaaaaactgataaacttgaaatttggaatttgcttgcctgggttttccctacacatgtaaatgaatttatgttcctgatttcttttaattttctattccatgttatgttcagactgtatctgacgaagaagttaatgccgaagattga

SEQ ID NO: 56432 - DNA, 1502 bp, Heterodera glycines
ggcgtcaatccaagtgctgttggggctccgtattctccgaatggtcggccaatcgattcgtcgccgtcgacggagggcggcggacggtcgaagagccgacttcggcaaatgaccatcgcagtgacgcggcgagtgaagagaagcagcaacagtcgcgactgctcccgaagcacaagcccagcgccacagtcgccgatggtaagcgaattggcacgcttctcagttttaccaaggctattttgaacaaaatgctcctttcttttcaaaggtccgtcctccgtcgatcagaagtcagctgagcagtcaaagcggtttctctctctctctatcctccgtttgccttcgctttatttcgcaatgctttaggtccccccggcccccacagtccgcttccttatctgctgaagcctcggagcggatttgaatccgcgacgggcaccgctttgtccgatgctggcgacttggactcactgtacacgccccgctcccggacgcccaccaccagctcatacgggggccgatcagtcggaggacgatctatcaaagtaggagagggaaggagagaggatggtttgatcacggggttagcatttgctctagtcgtggcggtcgcgcggtggcgaaacgcccaactcaggttcaatttcgtccagcggtggtgggcctgtgtccggcgctcttctgacctcttccggcaaagaataccaggaaaagccgatcacttttacggtatcagagaaggcgtgtcgcaattttggagaatccctttcaaggaattcgtggagttgttccgccttttctccacccgaatgcgcaaagacttgaaggatctgttccaggactttgtaatcgcagcccattcgagtgccaactcgcacgtgccaccgaagcgtgccacaagtgccgactgcaagtcgtcgtgcagcccgcgagttcagtcgcgtctcgaatccgtaagtgacgcgaaagggtgccgaactgacaaaagggttgagttttaacaaattgaatgatcagcagatgagcagttacccgtcatgcgctgagttcgtcccggacgacgttttgaccagaaacagcgcccttcacatgtgccaactgaacgacaagcagcagaagatttacaacgcgttggcattggccagcgtttgctcttccgctccgatggacacttcgcgcaattcagtgaaaaatcggccaaatttgtttttgttttttacgttttcttttgttagtttttgacctcagcagcacttaagcagttcatctgcacacagcaggtaaaaggacacttttgcgagaaagagaaagtcaaacttaagatggaatacattgacgagcagtacgcgcagaaactaatccaagagcacgagccggacccaacttaccgggccaaacaaatcatgtccttcgagggatttgtccgctttttatgcgacccgatcaattacgcatttgtgccggaacagacgaaaccgagcgaagaacaacttcaccacccg

SEQ ID NO: 56433 - DNA, 60 bp, Heterodera glycines
atggccaatttcaatggaaacgccgacacatttttgtgcagagacatcggagaatttaag

SEQ ID NO: 56434 - DNA, 1376 bp, Heterodera glycines
aaaatggcatttgtgccgatcaaagacggcgaattcacaagcacaatttacgccatggtcagtgaatgcctttcaaatccaaatcgaaaaattattccgcgctaagatcaaagaaaacaaattcacagaatgcattcgcattttgcagtacgaattgcagcggaacccggaggtcaatttcaaaaaaaagaaaaattaaaataaaatggaaaataaaaataaacaattgaaaataaaaatgaaaaaaatattttagtcacgcgccgcactttcacttttgggctattgttaccatcatatgcaaggtcaaaatgatagggaatgatgtagcgttttttacatagtttaattttttggtcaatgaaaatgctgcgcaacagtataactttttctttttgaatttcgtttacagtattctttttgaaatggcgaatacagtacccttttaaatttttgtttacagtattcctttttcttttaaaagattccattttcactaccgttttcccttttcttacggtatccgctgtctttctgtcccttttttgccccccccccctctgaaacacttttcagattttattatggccgccgagtgttacgagaagctcagcgagttgttcccgcagcacaccgactaccgtctttgccatgcccagtccctttacaatgtttcgttcccttggccatttttcattattcgcttcgcttatttccgctgttttttcccctaatttaggcttatatgtttcccgaggccgtttcttcgcttgcattggtaaacgttgagaaattccattctaaaagcaaatgtttcatttgtaacttttcactttggcacatttatttttcattcgcttcccacagataaatgagcctaaaatggaatgcaaagtggtcaagttggacgcggccatcaaatatcgggaggaggacgtgcaaaatgcgcgcattttggtggaacagttcgacagcgacgacccggacatggaagtgcgtccctccatactgttcacattcccttttcacattttgacattttcatgctgatcactcggttataaacccatcacattttggtcatttccccgtctgatcaattctttttctgattattttttgccaattttctcctcgcttctttggcttaaggtgaatttggcatgtctcgactacaaagagggcaattttgaaggtgcgttgcgccgtttcaccgccgcaatggcacaacaaaaagtggacgaatcgccggcctcgcagaaccaactgacttatgccatcgcactttgccactaccaaatgcacaacttcccacaagcattacaaatggtggggagaaagaaaacggaaagaatcggaaatgcattttaataata

SEQ ID NO: 56435 - DNA, 450 bp, Heterodera glycines
atggcttcttcttcaaccatcaaaatgtaatttgtcactcattttccaattttaaatttaatttttaagcttttccctttttctgcttgtcctttgcattggcttggccattgaacagtcccaagcttatgtgagaaattttaaaataatttaaattttaaatttgtatttcgttaagtggggtggctacgcatatgcctatccctacggcggatggtacggcaaacggcaagccgggttcggcccatccgcaagtgttggcacttttggcaatgggcacggcggaaatgccaacggaggaggaggaggaggggcaccaccgccgaccaatttttgagtgaagtgattggacagagatggaacacagaaaaagagaattatgcttaaaccttttttgtgttgtaatggaagaactatcctgatcattatgataaacatttggccaataaa

SEQ ID NO: 56436 - DNA, 1838 bp, Heterodera glycines
gagcctgttccggctgaggatgcttacggtggagaagatgaacaaggccttgacgtggaagagatttgggagtgtcagatccgagaacagctcaaaagagatgatgaaatgcgagcttttttcgacgacttggggaccgaccgggggcccatcgacccacgtcaaacattctacggaggcagaactgggccgcttcagctgattgcagagccaaaggaggatgagaagatttctgtcttcgatatcgtcagcctctacccgtgggtcaactatgccaccgactacccgatcggaatacccgctgtcatccaccccaccgttgaggagatgatcgtcgactggactcgacctgagcatttacaataccaaggaatttatcgtgtgcgggttattcctccaaaagggctccgaattccggttcttccactaaaaatcgacgaacgcctactgttctgctgctgccatcgttgtgctgccaaatttcggaagttgaacacacgacgagtgcacaagtgcccacacacggatgagcagcgggcttttacaggaaacttcacacatattgagctggcaagagccttggaaactggctaccgagtggacagattctggagagcttggcactacgatgaatggtatgagtttgttaagaaatcttaatatttttgaaatttaggagtgatggaatattcaaggactatgtacgtttgttgatcaaattaaaggtctgaataaccttttttttttaaagtcaaataatgtccaaattgcaggtggaggccagcggttttcctgatggtgccaacactgtggaacaacggcaacagttcgcggacgagtacagaagaatctacagtgtaaacttggacctggaaaatgtgcggagaaatcctggattgcgcttcatctctaagctgatgctcaacagcctttggttggtaccaagaattttagcaaaataaataacaaatttaggggaaaattcggcatgcgaaatgaattaggcgccaacaaagtcctaacaaggccacaggaatttttcagcctcatcatggatcataaaattgtaagttaaatgtataaatgaatttcaattttgtacattgtttaggaagtgtcggctgtcatccctttgtcagacaccgccgtccgtgtcatgtacaagagcaaaaagaatttcgtcagcgaacacacgtccagcaacattgtgataagtctgtggacgaccaaccgtgctcgcctcaagctactcgattttatgacacaaatcgatcgaacagagggagccaaactgttatatacggtaaaaggtgttttaatattgccaagtacatttgccccaacttttaggacaccgacagcgttgctgtgctccataaacgtgacatcgtgcccatccagacaggagaatacttggggcaaatgagcgaggagtatcttgactacgagatcaaaacttttgtctgcggaggtaaaaaaatatttaatctttttaacttttttattctaaaatttcaggcgcaaaacaatacggctttcgaatgttgaacaaaaggacaggagaagttgaatacgtacaaaaaattcgtggcattacattcgacgtgaacaacagtaaggcgctgcagtttgatcacttcctgcaaaaggtgaaaaattacggacggaacactggtgacgacaacgatgatgctcctgccgtgttttcctacgacaaaataatgccaacacgagacagccgaatcatcacacgtgagctacgtaaaaaatacatgccaatatgtcaaaaaggaatcatcaacgagcaatacgaagtctacccatttggatatgaataa

SEQ ID NO: 56437 - DNA, 1992 bp, Heterodera glycines
atgacggttcattttatgaatgttttttacgtgggtctagtcctcagctatgtgccgttactgttgcactctgagctgataaatgtggatttgacggttgacaaccaaaactatttagacagaggcaaatatcttaccttttcaaaggatgcgacagcacaacactttggttatagttggaatacagcgtgccgaatagagaagtgtgagcgtaacagcgaatgggcagtttcacttcaaaatgtgtatactttgcacaactatcagagtgtgttttttgaaatgaaatcattggtgaaaatgtcaccattggcctgttttgaatacaatgggcatagttttaccttttttgaagacagagaatcgggtgagactgctatcttccgtggtcgtcagcagaaaatagtggaaaggcttatccaacatggacgggttgtgtttgaccacctctcgggtcgattatttctgatcgataagcatcagaggcgaattagtgaaatagagcttgaatacctggagctttggtggcttcgaacaaaccagtcttccgcccatacgattttgaagagcaactttgttgcttttcttccgcctgataaaagcgactatactctggtggacaaccatgtgtttgtgatcagagaccaacgcatctataaatttcacattgacgactatgtaaaagggaatcgtgcgctcatttttgtagccaattccagtgacgtccgctttaattatctaatttataaacctaaagaccaaaacatcaaccgcggcgtttttgctcatctacgcatgtctgacgcatggatgtcgatctcatatctgttcaatctgttcctaatcgtactgtgcacatacatacttaaacagctacggcgaaagaaccgaaagaatccacttaatgggtctggtagcaccggttattacagcaacccgttcattgacgacgcctattcgtcccaacatcaacaattgctgaatatacagtatgaaactgcgacagcgagtgatcaaaggggtggagccagtagccggagtatttaaagaatgctttttgttgtttgcattcagttggtccgcttttttcctaaattttaataaaggctattttcatttgccaaaactgacacaccatatttacctacttattgtatgcaaagggcaatccgttatttgatcgacagttacgggctaagcagtgtagacgatctgtacacctgtttgaaagacgaaattaaaagtgggcctgaaggtgggaattgtctctatcccaacccactttgtgctgtcgactgtgtacacatcgcaaacgctgaccatccgaaccaacctgtgcatatcgacgggtcgctcgaattgattgctgacgttgaactgtactcaacatgctatccgaagaagaagttcgaggggatagtgtggtaagttttctaaatattaatattttcatttacattttttaaggagcgaacctctgtatgtggagctgaaggacttgaagatttgcccgggagactcgccgctgtgtctgtcacgccattgcgaactatcgaacagcagcaacatgaacctgatagtggacgagctggatctgatcaactattggagcgacggcgaacgcgaaaacgagactacaacctggtgagagtgctgtgccgattcaacaactgtggcccataccgactgacgaagcaactacagaaacgacggactgagaaccttgcctatctgagccaattggacattgagactgtccatcttagaaaaaatattaagattattcccgatgctttgtgccccatcggtgcaaatcaggtgtttgcataccggggattcctaggaatcacggttcagcagcacctttacactcgtcatcgtgtcatgttaaagtacccaacccttccgtgtgttgttcaatttggtggtggtcaccaccgcgatattttccccattgaattgttacgtgtctccaaaactgaaaccttttaa

SEQ ID NO: 56438 - DNA, 2706 bp, Heterodera glycines
atggaagctttttacattgtacttccctcaaacacacctggtccaggaaatactgcttctaattttacggttagacttccgcacactttagagcttgactccaaatggtccgtcgcattatcagcaataatctatccatattcattcccatcgatcagtgtggacgaggatgactctatctctgtcaaactggttaatcctaactacagggaagatgccggaaattctgacgaggaatcgcaaaaatttatcaatttgtcagtgaagattccaaatgtacaattccaaagtgtacaaagtttacaaaaaacactgaatcagataatccagaatgcttacgatacaaagtttggcggctcatcatcattaaatgatggtacacccaacaaaagagtcaaacgacaaaccgaattgtcagaatcaggcgctggagttatcgaagtagagaatttcttcactcgaaatccctttgactactggcaacagattggagaactgagaaaaaagcactatcagctcagagaaagggttgaaaaaatgacaaaggagtacaattcaacagcggatgacgaacgaaaaacacttctttcgacggagctcggggtcttccaggggcgagaaacttttctgaaagaacatttgcatttgattgaagaagaggcgaagagaagggacggtgagcagcaagaagccaatgaacaaagactcattgaccgtttctttgcccgataccccgacaattatagagagcagctggacgaatggaggtcaagttacctccgagatgtgctagatctacagacaaagatgggagagtatgaaggagttaaagatttgaaaaggcttgaagagctcaattcacaaactgaacgaatgagaaattccatacacgtttttggaagaaagatggaaatattaaacaacgcagcattgcaacgtgatcagaaaaaatctcaagaggattttgaacggttaagccatgaacaaaacctaaccttcgtccaagaattctttcaagccaatcccgttaattactggcaagcaatccagaaaaattatgaagcgcttcaacttgagtacactaagaagagggaattgagggaaaagcttgaatttgaaactgacgcaacggaaagggattcgctgcagcgacaaatagagagcattcaacggctgattgactacaggcgtaaacggtttgcagctttggaatacgaggctaaaaaaagagatgcgcagacagggaaagctaactcaggcctcagtgctgtagctgaggggtcaaataggactagctccactcgaacagactccttttcaccagatgagcccgcaaacccagacgaagctatcaatagtaaaaataaccaccaaaacaccaccactactgccaccgctattttatcatccgagacgccagctgaacaaaatttagcagatcaagataatagtattgctgataaaaatgaacccggtacgccgccatcaagtggattagaacagtccggtgatgctgctacatcagtgactcaagctgaagatggtggaaatttacctcaagcagccgcgttgtcttccaataacccaaaatttgttgctaagcaatcaaccgtagcgacagagagaaggaaggagaaaataattgaaaagctgattgacgaacaagtggaccgaatggtcgatggaacacatgcacagcagaagatgttacaagaagaaggtaaagacaacgatagtgaacaccgcatttcaacatataaactcatcgaagaagtgctccacggagagcatgggcagttaatggtacaacaacgtgaatccaaaatggcagctgaatttgcttacaatgaaataactcagcgattcggcattagaatgggccctggagtaatgcacgttgatttgagcaaacagctgtcctatgtgttggggtttgatcacaaaacacgcatttacaacaatcagtcggcaaaatatccacctgatctgtctggtggtgtccgtcagctgtacgtttacgcgcctaaactggtggaggattccatcataggtgaccgcatggcaccgttgctgcgagttgtcaacgtgtcagggacaccggggttggacatgccagaggttatatataccaatgaaatttttcattctctccaaaataaacgcatttctgaaattaacattgaaattcagacagcatttggacgttacgtaaaatttggttggggaactaccgtaatcacattacattttagacaaaaactattctagaaaaaaacagttatgacgcacgttgtttttaatccggacaacgtcaattggtccgcgtttcttgagttacaacagcagcaggagggaagtggtgagctgcagtattttgtaggcagtaaatttcagcgtggtggcggcctgttacaaaatatttcgcggttcctgatgcctgtagccacaaacctgctaaagtctgcctcaaaggagggcatttcggcaggaacacgaatgcttgacgatctcgcacagggaaaggcgtttaaagagtctctaaaaactcaggctaagcaaggttttgagaatctggccgaaaaactcaatcagtgtggaaaaggtgggcggcaacggcacaaagcaatcactcatagaaaaaataacaaaactggcaaattgagagggaaacgacagatcatcgatcagctcacatttgcacattaa

SEQ ID NO: 56439 - DNA, 800 bp, Heterodera glycines
gaaaagtcttcaaaaaagagcaaaaagagttcctcgagtgatttgtgccattcgcccaaaaaggcaaagaaagagccgcaaacgccgccgtcggaacggacaaacgccagcggtaaatgaaaggaatgaatgaaagcacagaaaaaggccgaaaaaggcatttcatttgcattggacagagacaaattgcaattttttgctttgttaatttatttttcctttaaagtgtataaatttttgtttgtttttttcttttttttggggcctttttcgtgtccaaattcacccattttggcagaggatgagacgacggcaactccgatggaagtgacgacgacagcaccaataaagacggagaaggcggcggtggcgatggaggagcagggcgaggaggagactctgcgcgagcgactgttggagcgagtgaagctgaagcagctgaagagcgaggaggactgattgattgaatgaatgttgtggactgatcggaaagaaaatgggaagcggggggagggcaatggaacaaatgccatggcatgacatgaacgaacggataaacacttgaaacaccaagaagggcatggccaagctgggggccacgccccctaaaacctaaaaacaaaaacttagttgaaggaaattggtccttttttgggtaaatttgttaattgctttcgcgaatatcccccaaaaacaaagggtcttcggcttctcaaccttgtccagtgtcctgctgatgttttttcttacaaccactgaatttgtacttgttgcgttccccggatgggaaaggcaataaa

SEQ ID NO: 56440 - DNA, 180 bp, Heterodera glycines
gtcctccagtcacagtcgtcgttcccgctctcgttctcgccgacgtcgttcccgttctcgctccacccggtcgccgtcccgttcgcgtcgccgccgttcacggtcgcgcgatcgcaaacgctcgcggtcgcgtcgccgttctcgctcgcgcgacaaagaccgcaaaaaggccagcaaacg

SEQ ID NO: 56441 - DNA, 1430 bp, Heterodera glycines
atgtcctgcagttggttggtgatgtgcggcggcagttggcgttggccgggcaaagcggtgatgccgctttgcaacgctgtctcctcgtcgggaatgacatctttggggaaatggcaaattgttaggcaaaaaggacaagcagtagtgatggcaaaaaggtaagaaagctcaaagcagaccccggaatacaggccaggaaatttttcattctcgggtctgataccattatgttttttgtcaggaaaccggcaatatcggaccggcacagttaatatgtctcgaagcaactgaactatttatcggggtttttcaggaaatcgttttaacacggtctaattgtaaggcccctttgccacttaattgtgcgccctttccatcatcccctatcacttgtctgtgacggaatgcagaccaacgctcggtccaggaacaccgtgttggtcaaatgttggccaacctccacgccgcgctcgtcctcaaatttgatgtaggcaaaccgaagctgctgactgttctgcaccatggacaaatcggacggataaatctgaagggttaattcacgaaatttaaatcccattttatttaaaatgttttgtgtaaggaccaccaatttgtgttcagaaattggccgacaaaccttaaactcctcaatacggccgacgtaagaaaagagcatttgaatctgttctttggtggcaaagggcgaaatgttgctgatatgcaacacttgggtagaggtcatgtcgagcaaaattcacaacaatttgctgaaaattacctgtgataaatgaatacatatgtgcttatgttagccttaggcaaaggcaattcgattgcaatttctcattttctttcatttccttgtcaatggatggaatcaaattttaaatgagaatttgtcaagagaaggattagtcattaatacatacataatgtctcatttttaagacgtaaatttttccaggaaactgaaaagcacgagttcaattacatacatactttcggttttgtttttaattatttttttattttttagtacctaaagcatagagacagagaaagaagacaaagttagtagagaagcagagaaaaagaattaggaaaagagtgaaaggaaaaggaaaaaaataacaagagaaatagtgtgtaaccttttgctgttattctttttttatatcgctttattttagagtgccacgggaccgggaatttttgccaaaaccgggaccgggacttgccgggacctgagaagccgggaccgggacctcgattttttttcgggaccgggaccgggaccgcaagaaaaaccgggaaccgggaccaaccgggaaattttaaaaattcaaaaaaattttaaaaatttaaaaaaaaattcaaattttaatttatatcaagtgaaaataatacaaaattatttggttttttattta

SEQ ID NO: 56442 - DNA, 672 bp, Heterodera glycines
tccaaatccaaatatttcgagttggtctccggcttctacaaaagttatgcagcgatgcaaaattttcagagaactgctgccaaagtaaagctgaaatttgattgaagcattgacagcctctttctttctttttttttgaagtgccgagttgtggacgtagacgaaggccgagtgaaagtcgaaatggaagtgcaggaagagcacacgaacacttttggcactttgcacggcggactgaccgcgacattggtcaggaaaaatgaaaacaaaaattgtggtatatcaaacaggtggacattgtgacaacgactgctttgtgcgcgacacggcgcgggtcggccggtgtcagcgtggatttgactgtaaattatttggcaccagcaaaaattggttaggtaattgtataaaaaaaagttggaaaagaaattaaatgccatccaattttctaattttttctttttgaaaaattttattttacgtaaaaaagaaaaaaaaaacacaagatttattgctgggttctttttaggtgacaccattctgattgatgcatttgtgaaccggagaggccaaacaatgggtttcacaggggccgacatcttccggaagagtgacggcctaaaaatagccaccgcattgcacacgaaggcattcccaagagaagtctccgaagcc

SEQ ID NO: 56443 - DNA, 84 bp, Heterodera glycines
  unsure (1)..(84): unsure at all n locations
accntgaatttgcgatgtcaaaccgcttcacttcctcaccgggtaaccttcgcactgaaatggcagcggaaaatgcgacaaaaa

SEQ ID NO: 56444 - DNA, 130 bp, Heterodera glycines
tttcgtcaatttgctggtcgaccgttccgtcaatttcgacgccgacgcgatgcagctcaaatacgcgctcatttgtcgcttggttgaggacgcgccgtccgcgctgaacgacggacagatggaaatgctg

SEQ ID NO: 56445 - DNA, 1301 bp, Heterodera glycines
agatttttgccgaaaattgtatccatttttcgcaaaaccagactattttagccatctgggggtccatttttcaaaagtatggtaaaatggcttctggtggtgccgtaaggcgccgctggaaaaattattggaaattttacactaatacaaattgttaaatcttcgcattgttttcagttgaaacacataatgcccggcgttgtttcgatggcaaattgcggtccaaacacaaacaattcgcaattctttatttgcactgaaaaggctgaatggctcgacggaaagcatggcaagtgaaacaaatgagtagggatgagaattaaagatacgaaaaatcccaaaaaaaatcggcaaaaatgcgttgctgaaatttcagttgtttttggtcatgtggttgagggaatgaacattgtacgacaagtcgaacagcaggggacaccgtcagggaaaccgaccatgcaggtgagtggcggacttggggattgccaatttaggcaatgtttttcaggtttacatctccgaatgtggccaaataacgagctgaagaatctcatccaacatttattttttctttatttatttttgaataaaatttgttgctgctctattgagcttgtcaagttcatttatgtcctctgtcgatggattgtgggcaattgtgtagattgtggtcccgaagaaaaattaacttataatttttttttttaatttttcctgtggtgaaaaaatgcgctgattacgaaattgattttgtctataacgttccatcaagtatttaagaatattagttgtataaaaaattataagcaaagtgttgtagaactgaaaaagggctctcgaataagctactgaatgcccggagaatctctacacaattgtcagattgtgtgattcgccctgaatttccactcgtacagcaaaaattgggaaaggatggattcttttctggtgccattggttcgattgaattgcttaactccattccataagcgaccagcataaatggagtttcggccaaaaaaatggtaaaattaatcgatgggatggggttgcgcccatacgataaccaaaagggtgcaccccaaaattttgccgcaaaatttaaaaaaaaatttggaaaatttaaagagaaaaaatcgaaatataactatggtttccaattaacacatcattttatttgtgaaatcatctccgcctctttgtccatcgattcgttccttttcatttatgccgcctcttccgtcgcgacttccaccaccggcgccccccaaaaaggccctttcgtgcaatagtcgcgcagc

SEQ ID NO: 56446 - DNA, 856 bp, Heterodera glycines
gacagcgcggagggaggcggtggtcagaagagacgcgaaggtgcgcagaacggagagagagaggaagtgacgcaacgctttttaggactccttcaaaggttctgtgcccggcacccggacagtgcgaaatgccgggggaacagcggagggactgagaaagtccccggaagtgaaaacggaggtaagacggtgccaaaagcgaagcgaaagttcttttgcagaaggaggcggactgatggaacgcttttgtgctcgtcatccggagcattcaaaatgcaatggcggaacggaagaggggtgagacaggcggaaggggccggggacggaacagtggccaatggcacggcactttttcaggactgacactactcaacaaacgccgtggcattcgaccgcatcgcccaacggcgattttagcgcgtggagctcttccgccggggactacaaccgacggcccccgtcatttcataactttcggccctctttcgctatttccccaaatgcaaccgacgaacgccgcccaacgccaacagcaaacgtggacatgcatgccgcacagatggacaaaggcgagtgctgctcacttttacaaagaccgtgctgttcagatgtcaaaccggaggacccatcggtttctttcggttttttgtccgaggaagcgcgggaagcgatgctcgtcagtaattagtgatattgggggggggggattaaaaaaaactaattcggggcgggggagggaaattaattaattggtaattgttttcagaaaaattgcctcagcggtgcagtcgactgcaaagcgcagcccttcggaatgattcaaaagcggacgatggttttacaggtttcaaaataa

SEQ ID NO: 56447 - DNA, 588 bp, Heterodera glycines
atggcaggccaaaagatgccaaacataatcagcagaaaaaggacgacgaagacaaaggcaccgcaaaaggggagaagtgccgaaggggaaacagaagaggaggaagagacggaagaagaaagggaagaagaaaagggagaaaaagtgtacagcgaagggacggaggaggagagagaaacagataaaagggaaaagggaagagagacgaagagacggcggacggaggaagacacggagagagaagaagcggaggacgatcggtttgaaattgtttatctgccggcactgaaagcaccgaagcgcaaactgcagcagaaggcaaaggcaacaacaacaaaaaaggggcacaacgaagacagagaaagaggggaggacgagagagaggacgatctgcaacagctgcagacgacgagaggaaggcagcggaagcgcggcagacagtcgctgatcaaactgcaaaagggccaagtgatcggaggggcgggcactccttggccaatgtcatggcacgaggcaagggaaactcagtatcaaaagcccacaaaatattctgccactccttggggtttcttccctgtttttggccat

SEQ ID NO: 56448 - DNA, 1281 bp, Heterodera glycines
atgctttgcttggaaacaccgaagcatggaaacagtcatttgttgagaggagggatcaggtggatcagcagtaaccgatcaaacttttatttgttcattatcgaaaaaatcttctttgttagcagagggttttcgtgatgccacgggaaaccaattaacgctcttaattaccccatgccccccccctcttttaattgctaatcactccccctcactctttgatcagtgggtggaattcgatttttggtggctgatcggttcgcttctgctcgtctctgtgccgcccctcttcactctgctctatttgctctaccgttgcgtgtcctgctgctgttgcagttcaaagcgatcggagaaggcacaattcgccgaccgccgctttgacagcgtccgtcgattcgtgctgaacgcactgctcggactgctcgtcgtggccaacatgtgagcaggaacaattaaacacattgattggcgaatcgtttgaaaagcgaatttcgaatgaaaaagcgatatttttggcattgtgcccctttttgccatttcctcaattctattcaaattttagcttttgtgccgccgttttgctgatcaacactcaatacgcccagcacggactcgacgaattgcccacccgtctccattattgtgccagcgacgtgttcatctaccgggcagagactgttgaggcaattaaaaattctagcaaaaaaaggaattaaaaatgcctaaattaaagcgaatccgaaaattgctccgcgacgatttttttgtgcttaacggttcactgaacttggcattggacggggccggcgaggcggtggtggaacgactgaagaaggcgactggtgccggactgatcagcgaagtgattgacaaagcgaacagtacggacggagggggacggaagcaattaattaataattaattaattacttaattgaaaccaatggaatcgtcggtcaaaatcaaaacatttttgtcgggcaactaattacataattaattgacctatcgcagcggttttaatacacttaatttacggtaaatccatttcaaattcgcagatgttggcccaatgcgaaaacactttgatgagttaagccgagagcttccgcatattttggatgcaaggcattcgctgcaaatgcgactgctgcggttgcgacaggcgcgcgacaaactgcgcgagtgcgaacggaccgccaaagtgcgttaaataacacaacgccaaaaaaccatactattttttgatttttggcggataaatttctcatacattaa

SEQ ID NO: 56449 - DNA, 469 bp, Heterodera glycines
gtcggtgtccaatttgtgcccgacgtgacgcattacgagataatgaagttgcgtctgctgaacggtggccatgccgcaattgcttacccggccgcactgctcgacatcaaattggcgcacaacgcaatgcaaaacaaactgatcagcgcattcttgcacaaattgcaggtggccaattcaattaattcactaattaccggctaattgaataatgacacaattaggcatgttactaaaaaattttccgtttcggttgccgattaccccccccccctcccaaatcatttgacgaagaaatattaattattttattatgtgttaattattaaacgtgtgattttctgttttaaagaccgatgaaattctgcccaccgtaccgccggtgcctggcattgatttgctcgactactgtaagcacgttcagcaaacggtttggcaacccgaaaattgaggacacaatccgacgtct

SEQ ID NO: 56450 - DNA, 679 bp, Heterodera glycines
atggtcgcctctacgctcgagcaattcaattcgctggatgatcaggaattggacagacgaattctgaatgccggactgccaattggacttggggaggagcaaccagcgaaaggggagacgagtcaagaagagatggaacaactttaccagcaactgacggacgaggaaaggaaaaaattcactgaattagccgacggaatatttcacgacgaattggcaatttacatattttaaaattgattttccaaaaatgtactattaaaaaattgcgtctgcaatgccataaacatcacactcgattaatgaagaatcattacacagaattgtgtttggatgtcaaccttacgaagcaccaatcaattggatttgaaatgatttaaagccacgttttttcgcgaaaacaaaaaaatgtcttacacaacaacaaaagattctcccttaatacacttgtcaattggccattcattccttcagcttttttggcggcggagaaatgcaaagcgatccagtgacagggcgagtactggaaaaacggaccggctcaccttcacacttaaatttaaaagctgtgaattttcgtattaagaaacggcaactgccagggggacaagttgactatcacacaaaaaaaagttgcttttcgtcattcagagaaggtcgtttgctcccgaaaaataaa

SEQ ID NO: 56451 - DNA, 1766 bp, Heterodera glycines
ctccatttggctttcgttggctttcatcagtgtgtttggactgctcgctgcgcttgccatgcttttcggtgccaatgtctcccatttggtgtgccgtcctttggaggagccgctgcaacggccggactttctttcggtgtgcaatttgcgagttttaaattaattgtgttattcccgtataatcccagctgctcgaccggtttgtccatctgtacggtttggaccgtccttcgtccgtctctccccacaaatcctccccgtccgcttctgatcacttctcgcttgatcagcttttctcggctaaccgtcgcccggctgacctgatcagcgagtgtgcccagaagcacactttgtacacaatgctcgggttggacaagaagttcaagctgatcggacgtgaaggtcttcaggacgactaccaatacttggtcaatggggcaaacaaattgaaagcgtcgatcattcctttttcatggcattttttggggaggatgaatcgatggcatttccctaatttttgttttttccatcctctacaattgttgattctctgttcagcaacgttccatcatggacaacctttcctctcatcagctgatcgatgaggcactctctcgcggcattgtgccggacgacccgcggctgagcgctcgccaatggcactttttcagtggaccaatgcgcgacgcattgcaacgccttgggcaagtgcggatgccggaatggaacagcagcgacgtggagcaggtaactaccgatcagcagagatttgtttagtttgtatggtgatcattagcagggaattcttccattttgggaccgatcgattacttaaaggctggacgaaattaaattccgtaattatggagttttttcaattattgaaatcgtatggaaaattttgttctctatttcgccatttatctttctctctttgccctttcgttgttttaatcaattctctccactttgagccatttcattggccatttctgcttttaactcatcattcccatgcctctaaaaaacaatggcccagctaaaaaattggtcccaaagcgattagcactcgaacttttgtatgaaatcactcttttcatcagtccccgcaatgacttgtccagcttctgttcctcctctgctgtatttagagaatttatgtgtccacgtgtgattaagtggaatttattttggcactcagtatgtttagcgggaaatttgacaaaaaaaacataattaatttaaactatatcgttttctattccttttaggcgattgaaaaactcaagacgagctacaaagaggcgaaagaaagtccctcgtgggataacaccatcagcactgcttctctgttggcgaagctcggtgacgactcggtcttccgttttctttcagacgccgtgaacttggtaagtgttttttttaattccaatgatattaaaaaatatttggcggtcttttggagaattttatagaaaacttagtccatcatagaatttttcaaatttttttatgaaatttcctcagaatttttttggaaaaattcctttttatttttcgggagcaaacgaccttctctgaatgacgaaaagcaacttttttttgtgtgatagtcaacttgtccccctggcagttgccgtttcttaatacgaaaattcacagcttttaaatttaagtgtgaaggtgagccggtccgtttttccagtactcgccctgtcactggatcgctttgcatttctccgccgccaaaaaagctgaaggaatga

SEQ ID NO: 56452 - DNA, 513 bp, Heterodera glycines
atgcgcgagaatgctataagcaaatgcattgcgcgcaagtgagattttgtgcacattcaagcgcttttatatgtgcgtaggagcaccgtaacttcgtctttcacgtagcgcgcagcactgtaccttttcgctatataaaagcccgaaatatgacgcaaaacttcattttaatcacaagattttttttgcaaaataaaaatgaatacttttaataatgttcagcaaaacatgccggaagaatctaacaacaacaacaacaacaccagcaacaataacagcgtcaacaatactaatgctcagttatggaaacttttacgaaaaaagtatattctaactttcaatctttgtcattgctgctcacaaacattgttcaattcgacaaaaaacaacaacagcggcggtaattatgctttcgagttcgatcccttaggaggggtaaaagtgcaatttcacatgtgcagtgggtgtgtttcgcttaatatgaggctgagcgacatgaattgtgcaaataaa

SEQ ID NO: 56453 - DNA, 1572 bp, Heterodera glycines
atgctttggctgaaaaaccctgcccgtcctgtctcaggctacaatctcttgatctatcgctacaaacggctagtgttcggcgcgacgtgctccccctttatccttgccgctgttctcctccaacacttcgacaagcacgagcacccattcgcccaagcgttggccgcgaatatgtacgtcgacaatctcctcatcgagtgtgagacggaagaggaggccatcgacaagtcgtccatcgccaaacaaatcctcaaagacgccgacatgaacctccgggagttcctcagccactccccaaacgtcatgggacaaatccccgaggacgaccgactcgacaaaacgccggccaaagttctgggactgacctgggacacccccagcgactgcatcaccttcagtctcccaaaagacacagacatcactgctacacggcgttcagtcttgcgcatcatcgccagcacgttcgaccctcttggactagtcgggccatgtcttctgcccgccaaacggctcttccaacgcctgtggggagagggaaccgcttgggagacacccctccccgagaccgaggcggaaacttggaatcaaaccctgtccctatggcaaaaccaaacgattgtggtcccgcggcattccattctcggcaagcaaagccgcctgcaactccacgtgttttgcgacgcgtcggaacacacattcgccgccgccgtctacattcgaagcgagactgccgatggctctgaagcgaacctaatcttcgccaaaaaccgcctccggccacgaaccgcgaaccagcgcttcaccatccctcgactcgaactcctcgccattctcgtcggaattcgcgccatgcgcttcgccgagaaagagctccgacgtccgatcgacgagcggcacttatggtccgactcccaaattgccctctcatgggtgaagtccgacgaacccaaagcccagttcgaacaacgaaggctcgtcgagatccgacaagggccgcccaccatcttccatttcgtcagaacctaccaaaatcccgccgacgtagccacgagaggctgcacacctgcggagctccgaactcgccacatttggtggaaagggcctgagtggctcacgagtccggaaacggaatggcccgacgagttaacgttcgcaacgccagccgactccccttccgccgatctcccgtttgaagaatcggagaccaagaccctcatggccaaacaaagtccgctgccccctcccctcattgatccggctcgtttcagcactatgctgacccttctcggaacgaccattctcgtcctccaattcatcgggcgtcgtcgaccaaaatggctcagaagcggcatttcatcaatcccacggagtggccctccgacgggcgattcgttcagagcagccaggactttcctcatccgacaagaccaacgaagctcgctcgacggctacgacaaacaccccactgttttcaatgaggatggccttttgtgcctcaaacccggctcctgcacgcgaacggtccgcccactctcgcctctcccgtccttctcgaccgccactcatctctga

SEQ ID NO: 56454 - DNA, 514 bp, Heterodera glycines
gtcagagtccagtcaacccgggcgtgtctgaggtcggcgtggatctcttggacatttagccgagtcagagatgagtggcggtcgagaaggacgggagaggcgagagtgggcggaccgttcgcgtgcaggagccgggtttgaggcacaaaaggccatcctcattgaaaacagtggggtgtttgtcgtagccgtcgagcgagcttcgttggtcttgtcggatgaggaaagtcctggctgctctgaacgaatcgcccgtcggagggccactccgtgggattgatgaaatgccgcttctgagccattttggtcgacgacgcccgatgaattggaggacgagaatggtcgttccgagaagggtcagcatagtgctgaaacgagccggatcaatgaggggagggggcagcggactttgtttggccatgagggtcttggtctccgattcttcaaacgggagatcggcggaaggggagtcggctggcgttgcgaacgttaactcgtcgggccattccgtttc

SEQ ID NO: 56455 - DNA, 175 bp, Heterodera glycines
atgccaactgtacgcgaaatacttgagagtctgcaaaagccaattaaaagaccccgaattccaacaaatgaagacagcgtactgaatgctgagaggacagacgcagaacaacaaatggaagacacttcaaccaggaatgatttggacgtcgctgcaagcgatgatgaagaaaact

SEQ ID NO: 56456 - DNA, 678 bp, Heterodera glycines
  unsure (1)..(678): unsure at all n locations
gtgtcatttacaatgtgatatttgaggatggatccagcggtcgctatcatgcgaatcagctgaggctccgaaagacgactcaaattgtcgaggacccattaagcattttgaatgaggaattcaatttgccaattcaaatggcaccaatggcaaatggacatcaaaatgggcaggtcctagagaataggcctgacccgatcaatgctgaagatcaagtggaggaaccgccgatcagagaagagcagcaggacgtcattcaagctgtccaatcgccgacgccccaagcttgatagccgacgccacaacgccgctaccctgatcgccgacagcaaccacctgtgcgatactcgccccgttgagatcatttaaaaggggaggtgtttgggtggtcaaccccgagagataaaagtacacaaatgcattcattctccctttgcatgtgtctatttcttttcctctccattttccncactctctaattagtgtgtcttcctttttttatgtacgaccctattgatttattatgtccattgcatgtcctttcccctcattcattcagttgctttttatgcacttatttcacttcgcctaaatatttgttctcctccaatttatttattccgcttccgacttcgcatatttatttaaattgcttaatttatttgttctacaaataaa

SEQ ID NO: 56457 - DNA, 611 bp, Heterodera glycines
atgaaaggaatcatttcttttttgcttttatttgtaattgcaccaacaaacggagcaaagcccggcaatgaactcaatgttgttccatcagacatcattaacaacctaaaaaacgtattagaaagcgatgaacttggtaatttgctcatacaaattagttaataaattagctaattcagtgctattcggaggcaatgagtggatggcaaataccaggtaaatggtaatttcgaaatttattattttcatgaatttatgaaaagattcggaaccgctcagttcggccctcacgattcggcccccacggttcggccccagcatgcttttccactatagcttttttatttgttatccaaatccatcaatcttcgtaacattcgaaagctcttaacatgctctattagtcttaccaaaaagcggaaagtttttcaagcctggaaaaaattttattgagaaaaaagttgaaaatttcgactttttcgcaattttcatgtataacttttttgataattatctaatcgcaaagtaatagcttagaaaaagcactaaacacattaagatttcgaatgattccaacaatttggatttggttgacgaagaaaaaatttata

SEQ ID NO: 56458 - DNA, 873 bp, Heterodera glycines
atggatgaaaatttcgaaaacattagaacaacgattggagtcgcgaggaaagtgatttcaatggaggctcgattgcttgattataaaaatgtaagatttaaaaaataagactatgttcaaagaaatgtattaatattaaatattttcaacctgataatatttaaataaatttatgaaaaattcaaattttttatgtttgcgtcgggatttgcgcaaaaattgacgggaatttggcggcaacggaaaaaagcgggaaacctgtcgcgcttttttcgttttccgttatggttccaggaaatttttaatgggcttcacaaaaaatataattttgccttgaaaaatatgcaatagatgattatgtatttattgcagaaagttcaagtcccaatgaatcaacttcgtgatctgatggacttgtttaaaatcggctattccaaaaaacaatcagatgtcgatgagatcaaaaatttctcagcatcacagcattcattgtttcacccattgttgaacaaaatccggcttcaaatcactaaataagcgtagaaggaaaattttgacggtttttatcaggtaaaaaactcggattattttgcgtagaatcgagttgagaattgctaatggatggttagcgaactatcagtcagtggacaatctcatatgacaatacctcagtgaacacgcagtcagctaattttggtgctgcgattttggtgcataatgccgggcacgtaattttggaacagcctttaatacctttttcgtgcctttttccccgaaattgttaagaaatatgtaactaactcctaaatattaagtaatgctcatattttagtgcatttgaaaaaaggtcaaattccaagagttttaaataaa

SEQ ID NO: 56459 - DNA, 1402 bp, Heterodera glycines
atgctgggtttctatgacgacattagtcctcaaaataagccttcccaaaaactttgcttcaaaaagagtgagaaggcgataaataaagtcgagaattgggacggaaaaccatcacaattgaagtattctttgatcactcaggccaagtggaagaaagcagttattttttggtgtcagctgatgagaggcgatggctgagtttccattctccttattcttgcgattaattacaaaaattagccatgtttttccttaattaatgggacggatgaatcatttgttgagcacgggtaaacattcggatttgcactttttggtggtgaacggagacgcaaaaaaggcgagtctaatttaaaatttttatttttcaatttgaattaattagccttcacatcaactcattttgaagaatgctttctatgtttttgaggcaatgttcctgtttgacgccaagaaaaaacaaagcgaaaacggtaaaaaatttgttttaaaagaaaaatttaatcagctttcattctccaattagtctatcctaattaccttagttaattttcaattagcctctgctaattgccttatggtggagatccccgacgttgaaccagcagcgttcaaagttgagattcatttactcggtgatggcatttatttttgcaaactgatcagaaaatgttgtgcaatcttctcgataatgatcgtttgttgttcagtgatgaatttgaaattttgaaagcggtaaattcgatttaaataaaattcgtcttccaaatatccttgagaagcttttttcaatatgcgtcggtaaaaatttttgaaatttgtcaattaaattggacttttccgcctcgataattgaaaaatacactcaggtcaaaagtattgtatcaaaaaaaatttttttttgtaaatgatatcatgagaggtggaacctcagcagagaaatagaaaaaaagaaaacctagaaaaatagcatttaaataaataaattcacttatattaatttgttcgatattaaataaaatgcatgaacagttttaaaaaattatatcaaaaatcaaatttaatgcaaaaaaatcatgtcaatttttagctatgtggaaaataattctacaatatttgttgcactgcttggtgcatttgtgagagcttcttgagtggaaagcgatgatcagaattatgataccgatgaattggatactgatgatttggacgaaatatcttcagcaggtcaaacagagtaggggattcgcggattttaccgatgtccgtcgttttctcatcctcgggagcggggatcccggtccatacctatcccgcagaagatgtagaaaaatttatcccctaaaaagttgcaacaaaagtgagtcaatatccatatatgaaaattcgggtttcaaataaa

SEQ ID NO: 56460 - DNA, 439 bp, Heterodera glycines
atgtcctccccgatcaaattttctccgtcaaagagctccgacgccaaaaatgagaccaatgttaaagccgctgtcctcacaccgaattccctaaaactccccaatcgtaagcaccaattgaacagtgcgggaaataatggggagcagccgccgacgaaagtgcgaaaagtcgaggaccgcgaactatggaaactcgccaagggaaagtacatgttgggcttctacctctgctcaggttataaaacttttattttttattttagaaattttaaaaaattcagatgattggaacagactttacaacaacaacgcaaaagtggtgcgcactgaggatggacgcttcgccgtcaactttgaactgtgtgcagagtgcacactgaaaaacgcccgagcgacagacttattggcgccgccaaagcaaaagaaaagcgccgaatga

SEQ ID NO: 56461 - DNA, 849 bp, Heterodera glycines
atggccatcaacatgaacgacaagaagggattgctcaagcagatcctcggcgagtccgacatcaccgtaacaacgtctggcctgacgatcagcgggccgcgtctcaccaacccgcgttttctgccgtttgaggagagcggtcgctgccgttcatgcaaggctaccgaggtggaggttgatacgatggtcaccaaagagggcataaccctttggtgtacgcgaattgacaaagtgcagttcgtgccgtttgatgtggtctacgatttgccgggccactgctttttccgagtgaagaacaaggcgagagtcttcaacattccgtacggcgacctgctctcggacaacacctgtgatcaaattcaactcacgcttcacgctgatgaagaacggcgtctcaagcgaaaggcgaaagctgcgctcgacttggttgagcagggtcttatggaagatgcaatgcatgatggggccagctggaagaaagccaagactgccatcggggtgctgaacaaactcctgctcgtaggaacacatggcgacaacgaaaacaaagaaacggctgctttgacaacgtcggaaaaccagcaacaagaacagcaaccgccgacggcacctccgtcggaagaaatcgtttccatcgtgccatctgatgttggatctcaagtactgtccagcggtgaagtgaagctggaagaggagaagcaggcagatctcggtgacattgataagacacttgacgaattttttgcaagtctcaaggcgtcaaccaccagcatgtaaagatatttaaatcccaaaattttttaaagttccctcacatggtaaaaatgttgaattcacaagcattttcaa

SEQ ID NO: 56462 - DNA, 334 bp, Heterodera glycines
atgctcctctccatcttcggcctcgtcttcatcctcatcagtgagactttgctgttctcgagtattgaagcggacaagcatatagccaaattaactgcttattgtaatctcacatctgataatctaacatttgctctgccggaaccaatcaatgccaaagtcagagcacgttttgctatttgcatgatattgaaatacacagttacaggtgaaaaaaggaattaaaaatgaaaatgaaaaaaaacaaataatttttgttaatttgtttcttaaaattgacattcattactaaaattttaaaggtatttactatgtacaaggctgccagatctga

SEQ ID NO: 56463 - DNA, 287 bp, Heterodera glycines
aaatttttaaaaattttccagcaaataatggaaatttttttcgaattcccccccccccaaacgaaaatttaaaaagtttaataggcaaatttcgtaacaagtagcactcaaatttccaaaaattttttccggcggcgcctatcggcaccgccggacctacattttccactatttttacaagttttttgccttaaaacggccaaaatttggtcatttttagtgaaaaagtgcagtagttacccagcagtggaaaaaaagttattggttaaatagcaaaaaaaaaaaag

SEQ ID NO: 56464 - DNA, 570 bp, Heterodera glycines
atgtttggaatcagaaacagcaaacagcggaaattaatcgatgatcaattggaggatgacgacttcgagatggagcagttcagcccggattggcaactgatcggtaattgtaaattaagattcattttaatcaatgtctaggccctcaaattgcctttttcccaatataataccttaatttatgtaaatctggcatttttatgtaaacttagtaaattttgtctaaaaaacaaaaaaaaaatatttaaaattatttaaattttttgggtatatttgggatttacatatttgccatttttaatatttagcgatttttcttctaaccccaactttgaaaattaatagatatataaaaatggtaaaagtgataaataacaactataattttcaaaactgggtttagatgaaattagcattaaactgttggagaatggcatcggcacttttgagacattgcaacgcgcgttaccatccgttgtattggcacaaattgaacgaattgtaagcgttttcttttaattcataacttaattaataattaattattcgtttgatttgtgagctaacaga

SEQ ID NO: 56465 - DNA, 938 bp, Heterodera glycines
atggaaaatgtcctgcgctacaataacagtctgtcgtttggccatgtcattacgcagagaagcgaagaggaatacttcagaattgtcaagtgtaacaacttgatccagtatgtcctttgggactacaatcccccggacgggtctctgccgcttcttcatggacaattatttaccatcccgagtgaacaagctgaaacccgcttaggagaaattgctgagcaatttgaattaaatgtaaaagtttaaagcaattttaaatataatcttacaattaaaggctgttttgttgtgcaagctgcatgagatgcttcgcaaattacacccgatggcaacactctacgaaactgcagcagagactttcaatcaacttccgccagatgagcgagtcaacttgcgaatgctcgtagttgggacaaaccgacaaggcaaagagcgaacactcactgaagatgaagcccagcccattgatgttcaacttccgcacgacagtttgctgaagcagatccatccgggtcggctccaagttgaaacagaagcaggcagtcaccttgtggcccaggttgatttaatgtatgtaaattattttaataaataatttatagttatttatggactctggtcagaatgtcatgccgaacatgaactatgaagttgttctacttgggcgtaaaggcacgggagcgcaacatctgaaatggtggcgcagggaaattgatcctgcaacatttccgctgatttttccaaaaggacaatttggatttggtaaaattttattaaaaactttaaaaaatttattacatttaagaggatggactgccgctcaagctcaaggagggagaaaaattcgacacaaagcaaaacgccataacaaacaagaacaacgacaagccattggacgacaacgaagaccttggcgaagcggaagaatttttgggagc

SEQ ID NO: 56466 - DNA, 1082 bp, Heterodera glycines
atgggggggggggggggtcaattgctcattcccattggtgcgctgtttcagttgcggttgaactgctttcgcacattggccacactgctcgcttgtggggtaagcattggtcgttgagtcaaccaatccctcagaatgttcaatttgtcggtcgattcggagaagactttgctggtccaacagagtcgtttgcccgaacacaccgaactgatgtggattttgggttcaactacgactgtggttggtctgtcgatgctcaccagtcaaatgatcaaatgttaagacgagtttgacctcgatgtcgcaatttaaagacaaattcagagggtaaatccgttgttttgtggtcaattggtgatgagtcattcatccgccgctttttgaaggtttccccaaggcgctgcccccctcggcttgcttgcctatccgttgttacaagcggccgacgttttgacgtacagagccacccatgtgccggtgggcgaagatcaaacgcagcacatggagcttgttggtgcccacgccaaacggcagattcctttggtccctttaattcagactcgtcatttggctaacaaattcaattcgcgattccattgcaatttctttcccgtgccggaaaaagttctatttgcgaggcgattcgccatatatttcattttcaggtttcaagtgtttgcactcgtcttcgaagtttgaggaatccgacagtcaaaatgagcaaatcggacacagatgcgaagtcgcggattgaattgacggacaatgcggagacgacggccatcaaaataagaaaggcagtcacagactcaacttctaacattacgttcgacccggtgcagaggcccggggtcagcaacctcgtgagtggattggcataatgaataatcattgctgcatgccccctttttgacgtttttttttgcttaatgcaggtcacgttgttcagtttgttctctgacctgactgttgatcaggtggtcacccaaagcattggaattgacactttgggcttcaaagggaaattagccgaactgatcaagtcagttcagtccattgcatttgttgtttcattgctttga

SEQ ID NO: 56467 - DNA, 1303 bp, Heterodera glycines
cgacttggtcgagctgtacgccttgctaaagttagccctcccctgaccaattcaaaccaaacggacagcagagtttcatcatgcgttttgcaaaactgggggatgacgaagaaggtgagaataatctcttctaattttctataatgcactttatggggacattatttagttttgtgttaaaccaaatgattataaaaattaatattttcatttgttagtgtctcaacggtttcgcaaaatctttgacaaatattgtctgcgtcgcaataaaaagattctcaatgacgtgccactctgttcggaagtgattctttaccatggcctaagcaagctccaatacgacatgtacagggccattctgagcagcaatcggtgtacgtctattatcttatcattcattgcattttttagctcgaaaactgtctaacattacatttgaacataggtggacaagggggggggaaatttcgtaaatcgtacgggggtccgaggcaatttcgtaaaatttttggccaaaatcaaaaacactggtaaagacgtgaaaattttacgaaattgggaaaaaaaatcaaaattttgtgcctaaaactcaaatttttacgattttgaattgcatatcgttaatatttttacgaaattgaatttcattatctatttcgtaaatttttacgaaattatacaatttttagtgaattttgttaataaaaatgcatgaaatcggctaaaaatggcaaaattcggtcgtttttccacaaaatctgttaacaattttggcctctgaaagggggggaggggggtgggaggtattttgtaaaggcaagtttctgacccccccccccttgtccatgtatgcatttgaaaatgcttttttcaatattctatacattttcgtcatcaattaaatttttatattttcgagatatttttcaaaacgaatatgcctcaattcgggagattttaaaatgctgcctttttcaacagctttctttgccaaaaacatgcgcacagagaaacaggcgcgacagtctctgatgtcaactttggtgcaactttgtaagtgctgtgaccatccttatttgtttcgaggaatcgaaaaggaaccatttgaggagggagaacatttggtcaacgacaggtagtgaaggagtacaaaactgacgaaaggaatggccaaaattaagcggaaaggcattgattctggacagactgttggcctatttgcacaaaaagggccatcgtgtcctcatttttacgcaaatgcaacgcttcctggacattgtgtacgacatcatgagtcttcgag

SEQ ID NO: 56468 - DNA, 565 bp, Heterodera glycines
cttgttggccgttttctcgagaatgatcgtgggcctcaagcaatggctgagtttcttgctttgtttgaccggtccattcaggaaacgacgactgaccaattgagcgagtaggccaagggtcgattattgggataaactaatttagaaacttttaggccggcgagggaaaaagtgcgatgtttgttcaatttgcgcgagaacaaatggggcgttgtcgcggaagtctgttttgaaacacttggtttttatttccgattctttttatagccaaatgtcggcgatggtccgctgaccactgcttcgacttcggtgggtatcattggcccggacgatgttccgttaacggaggacgaatgcgcctttatggaagaaaacttggacaattttgtcgacaattctcccggcgaatctcgtaggatttggactgatggttttaaatccaaacgttataactaatatcaaaccacacaaaaaaaacaatgtctccattaattgaatgttttcagaatgcttgaatgcatttgacgaggacaacgttgaggacgacttcgagaagttcctacag

SEQ ID NO: 56469 - DNA, 1030 bp, Heterodera glycines
atggatctcggcaaaactgtggatgctttagctgaagatgagtcggtggaactcttaaacgaatcagcagaatttcgggtaagacaacacatttaacagacagtgaaaataactcaaatttaattttgctttcagggcgacatggactccagtttcggttccgaccttcactcggtatctttccaggagatttcctccattttgcgtgccaaaccggacatcaacgtgttctacagaactccatgttcgggtgccagtcgattttcgcgtcgttcttcttcagcccgtacacaaattggtgttatttttcagaatgaatgaatggctttctatccattgaatgtttccagaagaccacttcagtcgtactcttcccgattcgcttttgctgcgcatttttttctatcttaacaagcgcgacttggttagtgttatgctcgtctgccgccgcttcggccaaattgcgtaagacaaattcaatgcgtgtcgggggggggggggattctgttgaattttaggattacagcttattaaagaactatttggtctgtatgatcaagggtcttgccgtacccttggcttcggggtggggcgttaaagaattaagtcccctcacaaatcaggcctcccccctctggctatacccttaatatggaacagtgtcttcatcatttttatttttctttaaaatttagaaatgacaaaactctctgggaatttatgaacttggccggccggcttctcgatgaagagtccatccatgctctgttcgaccgtcagctgaaagtgctgcggttggcatcgaccgaagtcaatgccattaaacaaattagctgaaatgaatgcatctgacaaattcagataaaacccctttctctgttctcgtggtacaactcgcagcagatgaccactgcgcagttaacgcatttggacctgagccaggccaaatttggctcaagcgacacactgctgcgtctgctcattcggtgcgagtcgcttcaggtcagtgagtcatcggcgagtggacgca

SEQ ID NO: 56470 - DNA, 134 bp, Heterodera glycines
actcgtggaactgaatttgtcctgggctgaggtggatgtcgatgccatgctcgccgtctgccgacttatgccctccggcgttcgtcggctaaatctatccggcttccgacagctttcgtcactaaatgaccgca

SEQ ID NO: 56471 - DNA, 860 bp, Heterodera glycines
atgagcggcctttgcattgcggtaaatttaattaattaactcattcatataagcaatagtcccatttggatgagtgttttttttttgttattttaaaggcttttgttgtgcttttaaaaaaacaaataaacgcaaaaaaatctattaaaattttacataattttatgcaaaaattagccattttcatttctatattttctttgctttaggtggtgatcaaatatgcagacaacattttaaagacgtttgccaattccttctccatcattgtgataagcatcgcctcaatttgggtgtttgccagcatgccgaagccgttgttcattgttggcgctgcgttgatcatcaccgccgcgctgatctatgccaaattcccgtatcgggccaagcccaaggctgatcagcgatcgaacagcaactcagcaacggacagcggcagtgctgactcggacagcagcaacatgagcaattgtggcacggcaccacccaccggccgaggaggcgacagaatgccaaaggaggaggacaaagtgtcacggctgaccaaactgttcaggatgggcagatcgccaaccatggccaaactgacgccgggccaattggacgccaatggagacggaaatggcgtgcagaaattttagagagagaaatattttatcaataattattattaattaatttttatttttgtgcattttatatcaaattttgctcctctcttctctgtgtacagctttttaataagtgtgaagagcatttgacaaaaagttatcatcaatcaatgggtcattttttgttaagtgataacttcgattttgaccatttgtgcgatcgatgtgccatcattttgatggtgacaa

SEQ ID NO: 56472 - DNA, 691 bp, Heterodera glycines
atgacaaatggaccgaagcaaaagccgaggacaaacagcgcaaaagggccagttgtgtgcccaacgtggtcatcgaagcaatgggaggtgattgattttgaaaaaaatatttttgtaaaacatttcgtttgttaaggcggccaaaatgcaaaaaagtggtcaatgctaagcagggcagtgccagcaaaggaaaagtaaattttttgaaaattttgaaaaaattctttttatttttcataggaaaacgaatgcccagccaaagacgaggaaagtggacaaaaggcggacaaagcggaagaaatggtcgggaaggggggggggtaaaaaaatttttgaacaatttttctgggttgtaggcggacgatgaaacactgggcgacggcaaagacattgctgatcttgaaaatgaggagaaggaggacggagaagaggcggtagggaagggtcaaaaaaacattttcttatgaaaaaattttatgattttgtaggcggacgaacagccggtgccagagccaatgaagaaaaagaaaaaaacaaaaacggcgcaatcaaacgctcccgtcggaacttcaagaagcagcaaaaatgatgggaaaaatgatttaacaaattttcaatgatctttaacaattttgaaaaaactttttttttgctaattttcactaatttctcactttgttttttttgtaaa

SEQ ID NO: 56473 - DNA, 1166 bp, Heterodera glycines
gaccaaaaaaaaaattcatgattttcattttctggttataaaaattggttaatattcaatttttcttaatgaatatttgaaaatttttcaaaaaattagatttttcaaccaaaaaaaaaaaatactgcgaaatgccatgactcctacaaatattatttgtttttctccttttatcgcattttgttaagaaaatttttttttaattccaagacaggggaaaactcgtgcaaaaaaaggttttccgaaataaagcctgacaaaaaaaaaatgctaaaaaactatgctcctgatgattaattgtacggtacttttgtccatcggttttgtttctacaaaataggtttccgagttggctgttgttgttgttgttgttgccacatcattcgacttcgacttggcttaatcagttacataatttacccccctcatttttgtgccatttacagtaataaagtgtgttagggcgcgaagtgccatcaatttctaaattcaaaaacaatagatggtacaataggcagtaggtccagcctaaagcatatgcctaagcctaggcccatcctaaaacttaggccgaagccaggcccagcctaaagcatatgcctaagcctaggcccatcctaaaacttaggccgaagccaggcccagcctaaagcatatgcctaagcctaggcccatcctaaaacttaggccgaagccaggcccagcctaaagcatatgcctaagcctaggcccatcctaaaacttaggccgaagccaggcccagcctaaagtatatgcctaagcctaggcccatcctaaaacttaggccgaagccaggcccagcctaaagcatatgcctaagcctaggcccatcctaaaacttaggccgaagccaggcccagcctaaagcatatgcctaagcctaggcccatcctaaaacttaggccgaagccaggcccagcctaaagcatatgcctaagcctaggcccatcctaaaacttaggccgaagccaggcccagcctaaagcatatgcctaagcctaggcccatcctaaaacttaggccgaagccaggcccagcctaaagcatatgcctaagcctaggcccatcctaaaacttaggccgaagccaggcccagcctaaagcatatgcctaagcctaggcctaacctgggcaattgtacgaat

SEQ ID NO: 56474 - DNA, 298 bp, Heterodera glycines
atggactccgttggtggcggtgacttttcatcttctgctggtaatcagggcaagaaaaatgactgaaaatatctaaaacattaaattccgtgtgccgatactcactcaatcattttctgtgtccattgaatgtaacggtccatttgctggagcgtaaaatcccaaaatttgtcagccaacggcggaagaaagacagccgaagaaaagagagcatccaatttggagagaagacaattggagaaggacgaaaggcactcatttttggagtcgtcgttgtcaaagggaatctaaattggga

SEQ ID NO: 56475 - DNA, 604 bp, Heterodera glycines
gcttttaccgatgcttcttccgccgtcaatttcatttttgtcgtacgatttccaccgtcttttgccaagtccgtcgtgccatttgtgctgaccaataatttgactagcgaacaattgacattgaaaagcacttcaaatagtcgtctttttgtgttcgtccgttctccaattgtacgaaatgcgagcgaatggacaaaatgggaaaatgaggcgattggctgggattttgttgatcaaccgaatcgaattgacgtgtatatgtatcgtgaggatcaaactggggacgggtgagcgaattgattattaaattcaaattgataattgatttccaattttttagacttcttaacaaattgaccggtccaattaatcggaagaagaagaagtgaatgaagggtgatccgatcaatttgaaagatggatttgggaattgacatgctcataaaaattgtcctttttttcattggattgatcaaccttggattatgttacaccattattttatttgtcgttttctgaaatgaaaaaaaaattgttcacaaaaacaccacattaaagagttgtcgggtaatactgacttttactggtcccataaaaaaaggaa

SEQ ID NO: 56476 - DNA, 942 bp, Heterodera glycines
atgagtgagctcttgcgcatctccattgcaccaatggtggtgcgtctcaagatgtatattgagacagcccaagaaaacttgggcaaagagctggcggaccaaagtgtccgtgcagatctgatcgcagagagacaaaatctctgcaaaacaatttctcttttggagaaatacaatggaaaatgggaagccattttcctgagagtgaagggacaagctcttcaagatgaagagcaaaattacagagacttcaaaccagaaggcaaggccttcatgcattgggtcgaccaagcccgagggcttgtcgacaccattgaaggggctttaggcctctcggagctgggggatgcaattccccagccaaatcagccagcacaagttgtgcagcaggcaccagtggtgcattagcgtcatgatgtgacgcttccgccgataacattgcccaaattctcgggggaaccccgagaatggcctttgttttggaagctctttgagacttccgttgaaagtcttcaaattgaagacttcaagaagcacatttatttgctgggatgcctcccagagaagtcagttgctaggagagcaattgacttatacccaccgtcagatgaaaactacccaagggtagttgagattctgaaaaagcggtttggggatgaaaagacaatggtggagtccatccaagcggagttgctccaccttgccaaaccagctaaatccgttcagtctctgagacaattctcagagtccattgagcggatttgccatcagttgttggactatggagagaatgaacaaaataagttcatggcctccacaattaagtccaaactgccctaccaccttctcacccaagtggttgagaaggaaatgagggcaggaggagcctttaactgcacagagctccgaagagctatctcttccatcgttgaagtgaaagaagaa

SEQ ID NO: 56477 - DNA, 1046 bp, Heterodera glycines
  unsure (1)..(1046): unsure at all n locations
acactcttcaaatcatccttccacggaatgcctattcccataagagaagggccgtacttctccgctagccgggttgtcatacccgaaaatgccgagattctcaatgatcgcctttttggcgatgagaatccccacncgggacccatggtttgaggaagactgggagccagtcttaccattggttcccgatcatgttgatcgccggctacgcgatccaagattggaagaggaggaagaagagagagcgaatgacgctcatctccggcgtgaacgtcgagttcatggccggattgagcctctgagttcgtggattgagcgataccatgaacccagatggtacgagacagcacttgacatgggtcacgaaatagacccattcatgccttgcctacaagaatatgtaggcttcagccctcacgaaggagggatgctcgtcgacctctacccggtcgaattggtcaacatccgaaaccgagtcggagttgcctggagagcgcctgcagtggtggaggaaccgcatcttcctccacctgaccaagcacagctaccagatggacgtttggagaatcgtcctccaagggtggctcgtcgacttcagatgaaccgacgatgaaaagaattttggcggaggacagcaacagttgccgccaccctcgaggcccggagaatgtcgccaaaagcgacacaaatttcttggaaattttcatttattttttaatccttttcatcgatcaattttgcattcgctcgctcgttaattatgagtcatcttctctcttcctcatatttttatggatttttttccatttgtttgtgcacatttttcacgtgcctggccccgcccccattgatttgtgagggtataaaagcccggcccattctccattttcctcacttcttgcttcttgcttcttacttctcacttcttgattcacttcatcttgtgagatttctacaagcacttctgcttgatcagcattaagtcgggacagttttctgtccaagcatttgcattaaattgtaattgtgcaattgaattgaataaa

SEQ ID NO: 56478 - DNA, 631 bp, Heterodera glycines
gtaacacccagatatgttcaacggcaaaattgtgcaaaggctttggtgaagttccaaagccatttggagaccttcgatttgaaggtttaattggacaggactaaatcctgtcaaggcaattacctttctcccagtatttctgagttggtaatttttgatgtttaatggaagtctcctctctggactttccattaatttttcaaggttatgtgaacggcaattgcagttcactaaacctgatgaatggtcaggtatgcaatcagtgcatgcctgaacaccaagactgcaattgaaatcaattgcttcttgccgacttttacagttaaagtcaattgttaatggctctctggttagagccatgttgctcccgtcataaacaaaatctgattttaagacgggggcgggcggaaaagttactccgatcggagtagactgatgtgttcccatttcagtgttcttcctggatagaggaacacctgagttgacttggtttttcgcccaaggtttccaggcgaattattgcaaaaacaataaattcccaagaattgcagcccatgatttcatagactgtcttggacttttcctgagcataccaacgataaaaaaggcatgcactgccgcctaagaggca

SEQ ID NO: 56479 - DNA, 3526 bp, Heterodera glycines
atggtggtgcgtctcaagatgtatattgagacagcccaagaaaacttgggcaaagagctgacggaccaaagtgtccgtgcagacttaattgcagagagacaaaatctctgcaaaaccatttctcttcttgagaaatacaatggaaaatgggaagccattttcctgagagtgaagggacaagctcttcaagatgaagagcaaaattacagagacttcaaaccagaaggcaaggccttcatgcattgggtcgaccaagcccgagggcttgtcgacaccattgaaggggctttaggcctctcggagctgggggatgcaattccccagccaaatcagccagcacaagttgtgcagcaggcaccaatggtgcatcagcgtcatgatgtgacgcttccgccgataacattgcccaaattctcgggggaaccccgagaatggcctttgttttggaagctctttgagacttccgttgaaagtcttcaaattgaagacttcaagaagcacatttatttgctgggatgcctcccagagaagtcagttgctaggagagcaattgacttatacccaccgtcagatgaaaactacccaagggtagttgagattctgaaaaagcggtttggggatgaaaagacaatggtggagtccctccaagcggagttgctccaccttgccaaaccagctgaatccgttcagtctctgagacaattctcagagtccattgaacggatttgccatcagttattggactatggagaaaatgaacaaaacaagttcatggcctccacaattaagtccaaactgccctatcaccttctcacccaagtggtggagaaggaaatgagggcaggaggagcctttaactgcacagagctccgaagagctatctcttcaatcgttgaagtcaaagaagaagtacagagatgtactcaaattttccggggagaggaaaaaccccggaattttccccctcattcaaatgaggggagagccaaccaagggagaggaacaccgttccgcttctcccgcccgttcagagaggaacggtggaggccagtggaaggaaatgaaacggcaatgaggatgtctcctcagacgaatcattccttttcggccataatccaacaacgaacccctattccaaataggggctcaaatcgcatatgcttcctttgtgaaacaaaggggcatacaccgagttggtgcacgaaatacatcactccgggggcgcgaagaaagcgcctcgcggaccaagacaggtgtattaattgcctcattatggggcataattccctgaactgcacctcaccccgcaggtgcagtcaatgtggtgaaagacaccactttatggtgtgttatggaggagaaaaacaatggaatattcctccgcaagtgcagaggaatgatttccatgggatggggacagagtcccctcccaatcagtttatccagggtcacgagagacccgacaacagaaatgattctgtggggatgatgtctcctcaagtaaacagatcatttctgacattgacaagtccccaattttctcaaagaaaaatagggacacggacaagacaaacttgttccctttgttgtgttgtgggacatcctccaagtcgatgtccccaatattccacaccaggagcacgcagaaggcggctcgcaaaacagcgaaaatgttttaattgccttatgaaagatcataaggcacaacaatgccaatctccaaagagatgcttgaagtgtggtggaaagcaccactatatgatctgttatcatggagatgctccaattgggagcactcctcaacagataagggaaggaaggactgttcagaagaaacagtcctccaaacaaagaggagagtttcctcgttcaaaaaccctttactcaggcgtatcctctagagtagaggataaaccgtctgaaagtattgctttccactgcagctcaaccagtgggttgaaaaatgtgacaaataaatcacattcatttttttgtcgtgccatggtcatgccaaagcacgaccaccaaaaaatgatcgaaaagtcagttcttttcgatcaaccgagtcagatttcataccaatctgactctcatttcggtgagcagaagacaccgaaagtaactcccacagataagaaaatctgtggctgttgcataaaaaagaatggtgttgtgagccattcagttttttccattcgtattaatcgaatggacaataaatgggaagaaactcttcctaatcgaacagagcaatcaatcatagcattgacgctttgtttttacatcagcataagcctgatggttctctcaattttaaaagccctttctattgggcgtaaaaccattgcttggctaatgatccaactcaaagtattattactttgttttgaggatcagagcacgccttgctttcaagaaggaaggcaaagaggggcaatccctcaattttgtacagcgcgccatattttgcaaataatggcgtttactgtaattttagcatgtttgttccctcttcccgttaaggggggaacagaaacaaatgcttatccaaccaatcaatgcaatgagtgcaaacttctttgctttaacaaaggcgttaaagcaaagattccaaaggaaattaataaagttgagctcttctgtgcagagaactgttacattcatgagaatgtaaagaagctcacttatgagctaccaaaggaaatcctcctaaatgacttccaatgcgaaggtcatttttggatggattcgaaacacatgttcaagaaggacattttatgtccagcagttgatgagtgtgaactcatcgaatgctatttttgcattgaacagttagcgaatccaacctgttatccattgatttcatcaatgttagcagggggactttgcttatcattcatgagcataagctttatggctttttccatattaaaagtcctgttttcaggactttatatggtcatttggctgataattcaatttatcaggccaataattatttagctggcccaaatcggcctccgaaagataggaggccaagggcaacagcttctcaaaattggacatcacgccgtgtttacagaacaatggcgtttgttgtccttatggctaactctctccaggatttgactggagcagagaccatcgcagtcatggccaaatcggaaaaatgctttaaaaatgcgacaagcatgagatgcattgtcgaaaactcagcaacgcttacgttgctgccagttggccaaacaaacactcttcttctgaaaacagaggaaggtgttctccttggctcaattaacgttttgctgaaggctttagctttggaatgccaaagcttcactaaagagtggcaacgttcatacgcaattaatgtgttggccgctaaaaggtgccctaagatgggatcctgtgaaggaaagtattgtagcgaagttcgccacaatacttccattcctgagctaaaagatgccaacgattttccaggcaattcattttgcctggacagcacagccttttggggcaataa

SEQ ID NO: 56480 - DNA, 1230 bp, Heterodera glycines
atggcagatccattcgactcgaaatctttcggttttatgccagctattggtgagcagcagggtaagaggggaaattcacattaaaagtaagtgcttaaagccaggattttggattcgtaaaagggtaaaaagggagaattttatgtaaattcgaaaagttttgtatttctatttttttttacattgcaaaatttattaatagaaaaatttgcaaaaaatctcatgaaattttaaaaaattttcacttcggcgcctatcgtaatcatcggactcagtccgtccctctttgaaatcttcaaaatttaattaaaatccccaaattattgatgccaatttggttttacaagattttccccgttatgtacttgaaatggatttctgtacttggatcggacaatcccaaggtgctgaaaccttgattttcgaacatttttggccataactttttttaaacttaataaaattttttgaaattttaaaggctcataaagaacatttagatctatcgaatgatagcaaggattaaaaatttggtctttttagagcaaagttataagcaaaaattttcattatgatggttttttaagtaacgcccattatgatggtttttaagtaatgacatagcaccaatcccaatacactgatttaagcataagttggaaagtggttttcatttgaataaatttgcataaataggcaattctgcagatgtgttctgtttgggtcaatttgtgcggcacagtgccgccgtggtgtcgtcgtcatcaatcggtgctgctgttggtgatcatcaaaatagtggccagaaaattggacaccgcaaatttttttttattgtttgaaatatgtattttaatgaaataataaatttgcggttcatgacttataagagcacctaaaaatgggcgaaaatggcaagagaaaaaaacaaatagtgtatgcttgttaatatccaaatttaatatattttggattaaaattcatgcaaaagtcggcggtttaatttgtaatttgagtaattttagcgccagaaaaaatccatttttttgaattaatagcctgtctttttgaaaatttttcgaaaatttcagtccttatttgttggcgtgcattttattttgcaataaagccgcctaaaaaagtaaacgtacgaatctatgccagaattgcttcaattttctggccaacgggcgtataaaaatatttattcaaaaattaattttgaataaa

SEQ ID NO: 56481 - DNA, 85 bp, Heterodera glycines
cggcggtgctgcgctgagccgtgcgtcgcctgggcaccgatgcattggcggcggcgccgcgtgcgacgtgcggacgacggcactg

SEQ ID NO: 56482 - DNA, 155 bp, Heterodera glycines; identical to SEQ ID NO: 51421

SEQ ID NO: 56483 - DNA, 1634 bp, Heterodera glycines
tttttcgaaaatcaatcacttttggagttgcattacataaaagcattttccaccgatgattcagcagagcatgaagcacttaagctggctgttgatcttttcatttgggtgatgtggttcgaaaaagaaattctccagctggacaatgagcatgccaagacggcaccacggcttaccatggcatggaagcaaaaccggtggtattacgaaatgacgtacgacaaactgtttgacattgaaaaggaaaatgagcgggaagaattggcaaaaattcggcaagaaattggcattttgctgcaagagtcaaaaaattttgctgaacaaaaacggcaaatgattgatgcgaatctgaaaattgagttgcgcagcaaacggcttcaacgccttcagaagcccagcagaacggcaccgcctttcggcactttggacagggaattgtacgacattcgacgaaaagccatggcacgggacgaccaagttgagccggagtttaagaaatggcttcagcaaacacattttaatcgccttagtgattatgttagccaatgcaatgagttcaatgccaaatttgtaaaaggtgctttttttgtctgcgtaactcctaaactgtcaattgttatcttcttcgttttacagcccatgtttattcccatttttaatttttgtaaatttttaaacaatgctttaaatattttaaatgacggattttcgcgccaataattgttaatatccttggcattccattaaaaaataattaaggaacatcaaaagaaacattaaaacgagtggcggaatttgtgggcgaagaaaatgccgatgaaattaaccgaaaggcaaacgattgttttgggaaattgtcaaattttgaagaatatttagcggcggatggcacacatattcatggcatttatatgaatccaagtgaaattttggaggatattcgtaaaagtgaggaaattgataaggaaaaggaggcgaaggaggcggaggagaagccgttcgatttggatgcaacgatggcatttttgaattttgggggcacagacaaaaaggggaaaatggcaaaaaaggacgctaaagatggcacaaaaagtagtgatcggagaaaaaaaggagacaggaagaagcaattggaaggagagttaactgacgatccttacaaaacgccaacagagtcatcgataatgcctaaatcggatgaaatttgcatggaaaaatcgaaaacaaaaaaatcaaaaagcgacagtaaccaaaaggtaaagaaaaacaaagtggaaaaaccaaaacataaaaaagaaaaacctgcaagcattaagccaaaagagaatgaaaaaggcagtcgaacaccaaaaaataaaaaaattgacaaaatgccaaatgacgataatgcatccaaaacatcaaaaacgaaaaaagaaaaaactgtcattacgccaaatgataaatcagaaaaagaaattgagcaaaaaattaacgataatgtcatcactgatcagaaaaatgaaattaaagaaacaaaaaagaaagaggaaaagaaagccaaaacattaaaaaagagaaacaaaaatgatggagatgcacagaaagaatttgaaagcatcgggataattggtaataataaaattattaaataa

SEQ ID NO: 56484 - DNA, 1915 bp, Heterodera glycines
ataaaaaacgaaacttggcttattgtcatagagagagaattctttgctttgcttttccgatgcttcttcgtccgtgcccttctcttccgctcctttcaaatgcgctttctttcgttgtccatttgccttttcatcagcaaaagacaatttccacttcggtctttgccctcacagtgtttgaccctcgaattttcaccgagcccatcgtttctactgaggaggtgccatcaaatctgaattcactctgttcttcgttattatttgttttagttgaataaaccacttccgccaaatgacaagcgcaattatatgtatctgaaaccaatgttatttgaccaaactcctgttttctacaggtagaaactgaaaactaaatttgaatattctctctaattgtaagggatgaaattgtggacaaaatggtgcgcgtatttttgatggagggcaaaaaggaattgtcacgcgtaaatgttctttcggcactggaaattgtcaaacgaacgcaatacgagtaaaagtgaggaaaaggtttttggagagagagtttaattttcagaaaatggcttaatgaaaaagacgagaaaagacgtgccgaaatcattttggaccccatcgaagttgcgaaccgcgccattctcaattgtcgtcctttgatgaagttggaaaagacgatcaaaggtacaaatgactaatcgacaaacaaatgccgaaagttgaaaccaatgaatggaaatgtttctttagccggcaccctttacttagtgccaatgccaatcagcgaaaaggtcgccattttcaaagcgatgaaaacaatgcgcgacatttgccggctaaaggcgggaaagaagcgcaatgagaaaaggccgcactacccgcactttaaggcactttttcatgcattcgtttgccctttatctgaaattcctcccaaaggatgtgctcgcgtccgaattgctcgccgcgatggaaaacgaaggactgaccattcaggcgaagcaggagctgcacaaaatgtgcgagcagaacagaagttactcgagcatgaagaaattctgactgtttttctttgttttgtgatttggtctaaatttgatccgtttttattttatttatttattttttggtcgcttttccttccatttccttttaaatattaatttatttgttactttgtttctttcttttttgatggcttcccccctaaattccgctgcttcctccacgacagttgcattgcttacccaattcgagcaccaatactccgtcagtactgctggtcggttccatttcaccccttggggtgcaatttgatttctgttcagatataactgccaaaattggccaactccatcatttgggaccttccgaattcgcacagctggccaaagaagtgcgccatttgttggccgacgtggaggaactgctcgagcagatggaactgagcgcgcgcgaaattccttcgagcaggtgggaaattgtctaattattatatttatttgtttcgttagttcggaacgctcaaaatacgaaacgcgagtgaaaagttatcgcaatgacaaacgccaattggacgccgaactgagaaaggttagcgaaacgaacgaacgaatgcaccgatgaaatttaaggcaattgaaagggcgaaatcaaacgccgaacgcgacgaacttttccaatgcggcgacggatcagtgagcggtgaccaggtaagaaataaaaaaagaacaaattgcagggaagatgaatgtttgtcgccatggaaaatgtcaaaaatgtcatcctccatttccaacagatggacaaactcattacaaacaccgaacgtttggaacggacgtcgcgcaaaatcgaagacgcatatcgagtaacggtggaaacacaacaggttcagcactaacaataagtgaccttccga

SEQ ID NO: 56485 - DNA, 220 bp, Heterodera glycines
ttcacttttatgttcgtagctgtatagaatgaccattctttgatattccaatggtttgtgactaaatttagcatgttttaatcaatttaggaactaaagtgagaattttttaaattttgagttttagactttttgttgaattcgggtccggtattcgaaattggtccaatgaaggtcatattcgtgatcagcgaccctgaaaccccccataaacatgttt

SEQ ID NO: 56486 - DNA, 1037 bp, Heterodera glycines
atgtattcctcatcttccgaagaaggcgaaattcacgagcatccacagccaaatcccccagttcaagaatttcatccaaatccacaagcccatgaccccctcccgaaccttcaaccaaatgaaaaaatgttttttgttgctgaaacaacacagcaccgagttgttcttttggcggacggctttgagtacaactttaaagccgatagtcgaatggcggatggtgagattctttggcttttctggcaattttggcttagggattgagatttatcgctgtgtacaccgaaatccctactgtcctgggcgtatacatgtacgtggggctgtacatcataatgccgctggacgaccatacaaaattggaattgtaaaaaatggcaatcacaatcatccggcttctcatgaaactgttcgagtggcacaaatgactttgaggacatcggctgaagcagcaaatccgatggcaacgcgtcaaactgttgacaataccagagcaagcataccagaaggggtacgagctgcgcttgcgccatcttcttccgcaatggggcggtcctatcgtcgtgaagttgctaggcaacgggcagacgcaggtgacaatttgttggatgcgcaggatcccgacgcaattgtcattggccaaatttttcaaccaatgacaatttttgatggatatgttgagggccagagggtaattgtgtttatgtcggaatttggccgatacatggtacaacattatgggcagtacttatcgattgatggcacgtttaaagtggttatcccgatttaaaaatttggtccatgtttttcaaaaataggtggcctctactccgttttcgcagctttataacgtttcggtcattattgattttgctgcggtcccatgtgcatatgctttactcaattccaaaacggcacagcattatcgaagcgtaaaaattaattttagttattttttccatatacttttaggtgtttgcggccatcaaaaataccatcccgggttgggctgccgtctccatcatgtcagactttga

SEQ ID NO: 56487 - DNA, 7067 bp, Heterodera glycines; identical to SEQ ID NO: 4996
  unsure (1)..(7067): unsure at all n locations

SEQ ID NO: 56488 - DNA, 5060 bp, Heterodera glycines
atgtttcaacaacaaccgccacctcactcacaaatgcagcagcagcggaaggaaaattttctgtcctcagattcgcaggcccgggaaaagtaaaaaatttttaaataattttaaaaaatcaaattttcagactgtcacaatttgtctacgaatatttgtaccaattaggcgccacaaaaacggcagaaatgttcaagaatgagtttctcgcccacaacatgccgaacctgcaaattgacttgtccagctcgtccgggcccggcttcctttataattggtggaggtgctgatttatcaacccataaaattcgattatttttgaatttggtccccgggaacggaattattttcatggccatcgactttaaaacccatgaaaaattgtgttttagatgctgctttttaaataaatgtccaaaaaatggaaagggtacaaacaaaactattatgcgtctcataattattttctaccaaaaaagtaagctaaattttttaaaataaaaaacaaaacaaaaaaaacagttttgtggtatcttcgatacagaatataccgagttgaatcaaatgaagcctaattttaacttaaataattaaatttaataaattattggcaaaaatgaaaaattggacggcagattcggaaattctaaaatttgatagaaatttttatgaaaatggattttcaaaaaaatgcgtaatcaaaattagctgctgaaacagtagctttagaagaaagtcccatcaattatgtcaaaaaagtgctgcttgagaatcaatcctaggatgccaattctaatcgaaatagtgcccaaataattaattatgagacgactcatttgccgaatccgaaattttaaaaattcgtttaaattaattcccccccccccctttttcagtgtgttttgggacctgtattccgcccatccggacaagaaagacaaggtagacgccacctcggaggcaaaaacctatcacaaaatggtttctcatttcccgttttttgcccccaatttacacttttgcccccctttttttcccacgggcactcgctcatctgcagatgttcccgccaacaaattacaacggagtgcccgcaccggcgccgccaccgccccacgaggcggccatggtcaacgggggcggcatgtacgggccacccggctgtggcgggtaaatattgaatttttttattactggggcgtgtgttgcaaattttaaacggcgaatgaggaatcgaaaaatgacgaattaaaaaatcattttcgggcatttttttacagtggatgggaaaatgaaaaattgacgaaatatataaatgcatttttcttgtattcttttccgttgaaaaattgtgaaaattttttaattaaatttcatgcgaatttttctaaaaaaaatttctctggcttcaaatttgattatttttgctgaaaggtctattaacagagttcactccaaattttgaaatttcgatgccaaatcttttcgtaactcgaaaatttttaaatttaaaaaaattcattagtgtgtctgtattatttacgtaaatttgggattttaaaattgaagctttcaccaatttgcagttcccgaacccggcggcgatgggtcccggcggagggccgccgcagaatttcccggacggaatgatgccgaacgcgtactacgggccccggggaggcccccagccgggcccctcctccaaccaggcgtcacccatccccggtcagtgatgagtggtcaggaaattttaaatttttttgaattttccaattttcaggcggtggcggcccaccacgctacggacagcaggggaccaggtttgtgcaatggacacgaattgattcccgtcccccgcccctccaaaaaagaaaaatctcaatgttggccaaaaatgtcaaattttttaaattggatggtccatttagcgatgccatgtctatgggcaccgccggagaaattcgggcgaaattttcatgaattttgcacactgtccttgttttggggccacacatattccattttttaaattttactgggcctacctaaaaatgaataattttggccctcccttttttcaaggagtggtgcccccactccgtcgtcggtggtcggcggcggcggtccgccgcccaatttccccatgggtttggcaccgccccaaatgatggcactcaacgagcagcagcaactgcgcatgatgatggcggcacggcaacagcaggccaaccaagcagttcgcatgcaaatggtgggcgaaaaaagggaaaatcataaaaaattggcaaaaatgccgaaaatcaaatagtgcggaaaaattccatcccccacttgtgttagtagattttgaaaaattcagggaaatgtagaaaaacccatggggccgagaaatctcgtgaaatccctactttctttttttggaaaatgccgttaaatcaacatgaaattggaaatccctcgggagaaggaatgataaaatatagttacaatttatgctttatctgattcggatttattataaaccattggcacacggtttttttccaaaaaccaaaattctttctataaaattgcctgcaaaaatctgtctaataaaatgtaatattttgtgcaaccattttcatgtgctgcagcaacaacaacagcagcagcacaacaacggtgggcgagcagtgcgcggcggcggtgccgcccaattcaacaacgcccacccgtacatggactccccgtccggcacgccgccattccatgtataaattgggccgcattcttaactattttgccaaaattagggctcaaaatggccaaaatttttgcaaaatggacaatatttaccgtttttcacgactccaaaaatttatgaaaattacacgggcaaaaagctttttttggcccgaagaacagcaaaaaaaaaaaatgtttttggtgcccctcctgaaatttttacggcctggggcagggggaacgaactgctctatctcggaatgtttcaactctcacaagcaggcactcttttttcttgacccccttacaatttgccaggaaaatatggaagggaataaatcgctgttaaaaaatgatggggcgaagatttggggattttttttcaagtttcctgaaatgaataatttccaagaaccctctggcgcacaacggagtcggtggcggcggcggcatgatgtgcccgacaactgcttcgctgatgtcaccggcaggtccccacaatttttaatttgtatcggtggcgttttttggcaccgctgacactgtcggacggaatttttcaattttaattgctaaagtagactattaaaaaaaaatttgtccgatgtttaggcgccgccggcgtgggcccgcctcagcagcaggacgggggcggtcaacagcagcatttcatgatgggcaaccaaatgccgggcagcatgcagtcccaggtcgaaatttaaaaagttttatttaaaaagccatgaaaaattaaaaattttcaaaaaaaatttacgtttttagcaaaaaaataaatttcatttttcaaaaaaaatctcggacgaaattcataaaacaatttcaaattagatttttaaaccagttaaaaaatttcaacaacaggaaaattcaaaataaagttttacgaatttgttttgaaaaattagaaaatttattttcatttttaacaaaaaaaagaaaaatttaatttgattttaaaaaatatcgataaaattattacaaaaaaaagctagcattaaaaaagcccagagtctcgaccttttcccccttcaaaaaaaatcctgtcttgactaaaatgtacgttttttcagttcgccggccaccatgactcggcgggtggcgttggcacgcccggcggtgccggcaccgggccgtccagcgtttcggcacaaaatccgatgaacagcaacggtggcggcggaggaatgggcgactcgtcaggtgcaccctttcgtaattttaaaactaaaaaataaatggcaccgcctgggtcccaaaaaatcggcaaatttccaaaaaatttgtttttgccaatttaggcgatagtcgcgcagcgcccaacggcggcggaccggcgccgaatggtccgctccattcgctgctcaatggcacggccggcgacgggggcggcggcatggaaatgaaacagtcgccggcattcagtggcggcggcggtggtggggtcaacggaggcacgcccggaagcaatgtgggaggcggaggaagtcaaacggccgggcccagctcaggtgggagaggagagcattttggcatttttgccgttgaaaagtctaaaattgagtcctaaaatctcagggagatgggtttgcgtttattttggctcaacattccggcatttttggtgccggggacttcacattccagcacaatttctgagggcttctagccagaaatctgctattaaagctcaaccctggaaccgaatttttactttttcgaaattgattttcaattctctccagttcactcgcaaagcggcgcgccagggggcggcgcttcgctggcgggcgccgggaacggaggtggcgctgacggtggtccacaacagcaacaggtgcacacattaaaaaaagggcggtggtcaactaaaagggaggggcccgtccggccgtgtaaatcgacacgaccctttttttgcggcactttttcaaaaaaactttcagggagggcggagatccaacggtgccgttaggcgccacagggaaatttgttctgaaaatttgtatatttcataacattttcaccaaaaatactaattgtaagtttatagagattttaggccaattttttaagggaaaattagggtttttatggttaggcggtgcgatagagaggaaccgttggtgaatgttttttttgttgagattttaggattttattaagaaatttgttcaaaattacaatcacacatgcccattgctttattttttcagacgcctccagaggaaatcagcaaaattaaggcctctcttatggaaggctatgccggacaacagcagcaagaagattttccgcagcagcaccaattcccataa

SEQ ID NO: 56489 - DNA, 1004 bp, Heterodera glycines
cgaagaatggttcaattcgttggccaacccccaacagaatgacggtgccattccgtcgcttcaacaagcgaaggcggccagcgttcggcaaaagtcgtcctccttcggtgccccgattgacccgtttcaggtagcagctgaccgagacgtattcggacgagagggacgcggggaatatggaacgtgtcgaaaattgtacattatagcaaattaaattgataattgttgtaatattttagtaattaggcgggtaattagcctaagattttacacatggtcaataaaaattcttttaaatactataaaacagttttggcttttttcagttctatctaaaaatgttttaaggccccgtccatccatgcggtcggtttccttttgtgccaataatcaccagcagcaacaaatgctgccccatttcgacatcatcgagcccgaaatgttgcagttggtccacagcagcaaccgtgtcccgacgaacgactgatttggcaaggtaaatgaccatttttggagatttatgtagggataaattttgaaaaaaacaaaccagtttctattatatgagtaaactttttgagattctctttaaaaaaacccttgggggaatattggaatttttgacagatttcaccgaaaattggctattttagattaaattttaaaaattttcggggaattgagagcgatggcgcttacttttactgatctcatcttatcaaacagtttcagatgaacggcatctggcggagaaatgtcgtaacaaaaacatccgcaacggcaccaacattggtaatgatgaacactttggcgacgctgatgccggcacgtcggctgacgctgttgaacggcgaggttggtgccgttttgctgcgagtttcggcctattggctcgacttcggcacgcgcccagcaactttcaccgtgaaattcggcacctcaacttggcccagtgccgtgaagtgcacaaagtggcggtcatttatgcggccaaggaccaacaa

SEQ ID NO: 56490 - DNA, 1321 bp, Heterodera glycines
aggactgaacccaccagcatttcaatcactggggactcaatccaccaacattccaatcactgggactgcattccaatcaccaggacagaacccaccagcatttcaatcactgggactcaattctcctgcatttcaatcactggcactcaaatcaccagcatttcaatcactgggactcaattctcctgcatttcaatcactggcactcaaaccaccagcatttcaatcactggcactcaactcaccagcatttcaatcactgggactcaacccaccagcatttcaatcactgggactcaattctcctgcatttcaatcactgagactcaacccaccagcattccaatcactgggacttaacccaccagcattccaatcactgggactcaacccaccagcattccaatcactgggactcaacccaccagcatttcaatcactggcactcaacccaccaacatttcaatcactgggactcaacccaccagcattccaatcactgggactcaacccaccagcattccaatcactgggactcaacccaccagcattccaatcactgggactcaacccaacagcatttcaatcactgggactcaacccaccagcattccaatcactgggactcaacccaacagcatttcaatcactgggactcaacccaccagcattccaatcagtgggactcaattctactgcatttcaatcactgggactcaacccaacagcatttcaatcaatgggactcaaccgtacgggggcctttcggccccactcaccaaatttttgcgccaaaggtactcactcggccgcttcgcggcctcgtaactggggccttcggctccattccagtcaccaaaattaaatctcaccaattcttaaaacccaataaccggaaatgaatgataaaaccgacagcggctcgaccacttagcggcctcgtactcttcttttggcattttcttatggcataacagttcttccttgtttcttgactttttcttacgcacaacatttttcttctatacaaatttttcaaacaaattctcattcattcatttaaaatttcattaccatttacataagcaaaacaatatctttcatatcaaaaccaaatcaatttataacacacacaacaaagaaagaaaaagaaacattttaagactgttttttatacaaaatgacaaaagaaaaaaatgtaaaacaaatacatttcatttttcaaagcatttatacaacacaacacaatgttaatattataggattttcttagtgaacaaactaaggagtgtcctctttcttttgttaaatattttataca

SEQ ID NO: 56491 - DNA, 1874 bp, Heterodera glycines
  unsure (1)..(1874): unsure at all n locations
atggaagaaagagataacatgattaaggggggatgtaagactacggaagaagggatgaaacggaaagagcggatgattggagtggaaataacgggtgacgggcttgcttccccggtttgggtaccgtacagggcgtacccgcagaacaatgcggatgttattatgcaggagattaataagttggggcagagcggggacggagatgaaaataagaaaacgcttttgttgtcggagcctattatgatgaaaattacttgcgtcacactgcccagtggagacgggccgaggaatgtacataaatttgatttcggatttaaggaacaccaacggataaggtaagttttttgagaaaaaaaaaagaaaaaaaggaaaatagaaaaaaaagaaaaaattataattatttattaaggatttcgaatgtggataaattttgtttgttttacgcactggcgtcgtcgatgaattatttaattatggaccgttttgcatttaatcgatttatgaacaatattatgagacagagggacgcagctactgagcttttacgtaattgtggaattgatattaacgaatatagctatggagtggagcacttatcgagggttcagaattatttggtgggttctaaaattttggaaaaagtgataaattaatggattttcaggatgagatttaccccggaaagtaccgagtggtggcatttgaaaagtcagctgatccacggaaatcaatccgtggttttgtggaagggccctatgggacgtgaaaatgtagtgccgatatttttggagaatggtcactgggatggtctgaagaattacgtctgtttttttaatcgtgggaggaaattttgcgttgattgcgaatgtttttattcgcgggatgtttttcatacgttggagtgccgggcgagatgttattattgcaacagagtgggcggagtgccctgtggaaaggagagtggagtgaagattgaatgcccgaagtgccatcgttacttttacaactgggaatgctacaactatcatcaaggacatacttgcaaattatggaaacgttgtgtgatttgtgacaaaacttatcagttcaacccgaagaaggaccatgaatgtggagagacttattgccagctttgtagtgtgagccacgaccccaaacgtggatgttatattatgccgatcgaagaaaaagaagacaaggacgtgtacagaattgtcgtttgggtgagattaagctaaaaaatatatacaaaatatgtcttaatttttaggattcggaaacatcgcaggattcgatttacaagggggaccagaaggagcatgtgattaattatatttcggtgagagtgacgtgtacggaatgctgtgatgataaaaatagggcgaattgcaaaatatgcggggaggagaggaccaaggattggagcgaggctgagggacatgagccgacgaaggattttgtggaatggattttaacggcatttacaaattatgatacgtacatttttgcgcataacgccggacgatttgacggtaaattatcgtttaaaaatgttttttattttgaaaatttcaggacattttgtatttaattatctctgccgtaccgggaagaacccgataccgcttatcaatggactcaaaatttatgaattcaaagtgcagaattcgaggaaacattcaatgctgatatggagagactcatgcttattgatgccagtgaaactcgagtcgctgaaggcgacatttaatttgggctgtgaggacaaaccctttttcccctactactacaataaganagaaaattatggaatacgattggaacatctaccaccgatggaggactattcgccgggatctatgaacaagngataa

SEQ ID NO: 56492 - DNA, 65 bp, Heterodera glycines
atggctatctcttttttctcctggggatttgaccgcaaacttggtaccaacatttgccttctcta

SEQ ID NO: 56493 - DNA, 59 bp, Heterodera glycines; identical to SEQ ID NO: 52421

SEQ ID NO: 56494 - DNA, 59 bp, Heterodera glycines; identical to SEQ ID NO: 52422

SEQ ID NO: 56495 - DNA, 59 bp, Heterodera glycines; identical to SEQ ID NO: 52421

SEQ ID NO: 56496 - DNA, 59 bp, Heterodera glycines; identical to SEQ ID NO: 52421

SEQ ID NO: 56497 - DNA, 59 bp, Heterodera glycines; identical to SEQ ID NO: 52421

SEQ ID NO: 56498 - DNA, 1594 bp, Heterodera glycines
atgtcggacaatccgaagaaagcaaataaagaaatggagaaagcgatgtaaatacctctctaaatttgaattttccatgctaataattttgcttttccattttcagcttcatctctgccgactgttggttggaggtgttcaatttgcttccgccatctcaacttggccttggcattgctatgattagccgccgttttgactattacgtcgacgaacattttaaaacgcgcaaatggaaattgggcaaaatgaaaattcgacgcaaaattggacagaatggcgcaaatgaaatgaaaattgtcaatgccaatggaaaagagctgccaatccctcaaaatccgttaccgaacaaagtcatcggattcagaagcatttggatctagtaagaatcatttgtgatcatcacacatactctttttttcagcttcatcgaccaaaatgtgatcacttttcttggccgttttgaccgctttttcgcttcatgtacaacaatgttgtccattaccactggaaatgttcgcattttggagtttattgtgctcaacatttggccgatgttcaaggacaccatttatctgcttagcttggacatcgtcgcttttcgtcgaatgcgtcaattggcgccgtcaatgctcaacgattgtccatcccttcgttttgtcaatttctttgacggcatttccctcgaatttccgcccgatgatagtgccaatgcgtcggatggccaaacggtgaccaaatggctgttcacgcctcgtcccgacaatttgatgaatgatctcattgtcagcattcaggattcagcgatggaacagcaatggttggcaaccgtggaacacatcaaagcggtgattagattatttgattattaccaatttaattagtctttttctattttgtcttcgttttagtcattttcctctgcttcttctcctgtttctttcgacatttatatagacttttcgctgtcctcttcaatttcttccattgtgccatttgaattgaccaacgaattcaccggagaaaaattggcactgtccaaagaagatgaagaagcagattttgaagatgaagaaaaatattacagtcttttttcccttagtcgttgtccaattgggtccgatgataagaaacagcagaagttcgagaaatttgacgaattgtacgaccgttggaacctaattgacatttggatcggagacgacggattcggcgatgggtaattaatacgattaacaattttaaaaatccaaatgcttatttttgtttttcttttcagtcttctcgacggttcgcccgggccgagtgatgatcactgatcagaacagcggaaatgaattgattgattggttattgatgcgattattatatgacccaaatgttgggcaaagatatttaaatattgttgtatttgattgttgctcataaattcataaaaacgagtttggtatttttgcgaattttcttcggattttgaaccggtacaaaaggcaatttttatttttagcaaaggatcttttaagtcattttgggtgcaaatgagtttgctgggaacaggatttagctgattttaacaatactttctcccagaaca

SEQ ID NO: 56499 - DNA, 422 bp, Heterodera glycines
atggtaaaagtgaagaaaacggacacctcggatttttatattaaatatatcaattggttcctcttaacgagagaagacgaatggtaccattgttagggcgtggcaattattccgaacagagttacgggtctgtatcgtttcggcgctagcccttgtttttgaactataacttttttcatcgtcgatcaaatctaacaatcttgatatcattcgaaagctgaaaatgtttaaaagctatttataagcaattgcttagcgattagtcgcttactaaaaaagttctaactgaaaattgcaaaaaagtcaaaatttttgtgatttttttaaataacttctttacaggtcattttttttttttggtttttgtagggctaatagggcttctgaagggctttaaatgataccaagattatggttgtcaa

SEQ ID NO: 56500 - DNA, 390 bp, Heterodera glycines
atgtcggacaatccgaaagaagcggagaaagaaatggaaaaagcaatgtaaataattacctaatctaaatttgattttctaaggtcattttgcttttcccttttcagcttcatcgctgccgactgttggttggaggtgttcgatttgcttccgcctgctcagcttggtcttggaattgcgatgattagccaccgatttgactattttgttgacgaacactttaaaacgcgcaaatggaaattgagaccaattgtaattcaacgcaaaattggagagaatggcgcaaaggaaatggaaattgtcaacaatttcggtggaaaagcattgccaatccctcaaattccgttgccgaacaaagtcatcggattcagagccattcagatcttgtaa

SEQ ID NO: 56501 - DNA, 1608 bp, Heterodera glycines
  unsure (1)..(1608): unsure at all n locations
atgtcggacaatccgaaagaagcaaataaagaaatggaaaaagcaatgtaaataattttatttcaatttaatttaatgacaatcattttgcttttcctctttcagcttcatcgctgccgactgttggcttgaggtgttcgttttgcttccacgctctcagcttggtcttgaaattgctatgattagccgccgttttgactatttcatcgacgaacatttcaaaacgcgcaaatggaaattgagaccaattgtaattcaacacaaaatcggagagaatgacgcaaaggaaatgcaaattgtcaacaatttcggtggaaaagcattgccaattccgcaaattccgttgccgaacaaagtcatcggattcagagccattcagatcttgtaaaaactgaatttggaaattgttgtgcccatcacactttcggaaaactgtagtgatcaccccgctgagaaaagggttaaatgatttaccaatcgcgaggagttaattgtaaggaaagctcttgagtttccgcaagtcgagacttattttttcgtcttaactcctcgagatgaagcaattgattgggatataatttaacctttttctaagcgggccgttcactacagttcccgttacaatttcttatgattttcagcttcgtcgaccaaaatgtgatcacttttcttggccattttcaccgctttttcgccaaatgtgcaacaaatttggccattaccactggaaatgttcgcatttctgagttcgctgtgttcacaatttggccaatgttcaaggacaccatttatctgttgattttgaacatcgtcgcttttcgtcaaattcgccaattggtcccgtcattgctcaacgactgtcaatcacttcgctctttcaatttatgtgacggcatttcccttgaatttccacctgatgacagtgccaatgcgacggatggccaagcattggccaaatggctgttctcgtctcatcccgacaatttgccgaagaagctcagatgctatatgaattcaatcatggaagaacaattgtcggcaacagtggaacagatcaaagcggtgatttgtacaaattaattcattttttcctatttttaaaatttttttaggcattttcctctgcttcttctcctgtttctttcatcattttaattgacttttcgtcttcctcttcactttcttccattgtgccatttgaactgaccaacgaatttactggggagaaattggcactgtccaaagaagaagaatatgaagatttaattggcttcacccttattcgttgtccaattgtgtccgatgataagaaacagcagaagttcaaggaattggacttgcgatggaaccgaattggcattgatatcgcagatgccgaagcagcgatgggtaattaacaattttaaaatcgaaaatgcttattttggttttcgtttttctaggcttctctgcggttccccggggccgagtggtgatcactgatcagaaacagcagaagtaaattgattgattgatgcaattatgtgacccattttanatattttgtatttgagtgttgttgctcataaattcgtaaaaaatgagnttgtttgaccaatattnttgtaa

SEQ ID NO: 56502 - DNA, 659 bp, Heterodera glycines
atgtactcgtttctttacgctatggctattgtacacggagacaagtcgtacgtttcctacccccacttaacacagcgaatcaattttgggcctcccaatgcaaataattcgaattttttatttaataaagcagaacgccaaaacttgcaaaaacttgaggatgtcaaaatatgggcctacgcataatttcaagaaaatctgttcatatggaaaaatttttcagcataccaaatattttgtgcccgcctttctcgctttatttttatttgctcaaaaatttttaggcaaaaagtcccgagttattcaattggtgctgatttgattgggcatttttctcgtcaattttcttcatcctcaccaaatgttggggcttcgtattcctcgaaattcgccattgttgttcaactgttgcgtgtcaccgcctaaatcggaggttgtctgattggcataatttcaataatttcaaattttaatttccactttttttagtttgctcgtttccatgtcgcccgttcgatgaccagtgggcccagcaatttccgtcatgcatttgaccatttgatcaaaaggttttctctttttttaacgagatctcatggatttattgaccggtcatttgtctggttttttgtaagagtccgggcaggatcggtattaaa

SEQ ID NO: 56503 - DNA, 908 bp, Heterodera glycines
agcatttcaatcactgggactcaactcaacagcatttcaatcattgggactcaactcaacagcatttcaatcactgggactcaacgcaacagcatttcaatcactgggactcaacccaccagcatttcaatcactgggactcaacccaacagcatttcaatcactgggactcaacccaccagcattccaatcactgggactcaacccaccagcatttcaatcactgggactcaacccaacagcatttcaatcactgggactcaacccaccagcatttcaatcactgggactcaacccaccagcatttcaatcactgggactcaacccaccagcatttcaatcactgggactcaacccaccagcatttcaatcactgggactcaacccaccagcatttcaatcactgggactcaacccaccagcatttcaatcactgggactcaacccaccagcatttcaatcactgggactcaacccaccagcatttcaatcactgggactcaacccaccagcatttcaatcactgggactcaacccaccagcatttcaatcactgggactcaacccaccagcatttcaatcactgggactcaacccaccagcatttcaatcactgggactcaacccaccagcatttcaatcactgggactcaacccaccagcatttcaatcactgggactcaacccaccagcatttcaatcactgggactcaacccaccagcatttcaatcactgggactcaacccaccagcatttcaatcactgggactcaacccaccagcatttcaatcactgggactcaacccaccagcatttcaatcactgggactcaacccaccagcatttcagtcactgagactcaattcatttcaatcactgtcactcaacccacagcatttccatcact

SEQ ID NO: 56504 - DNA, 1357 bp, Heterodera glycines
cggtcaatgggttccattgcccgccaaaggaaacgaaaaattgggaggaaaaaaaagataaaacatcgcaggaaaaggaagacggagagaaggggaaagcgaacggacaacggaagaaagagcaaattgagccgaaagcgtgggaagaggaggaagaattcgaaaaggtgggaagaaaacggaacaaatggacagagaggggacggacaatcgaaaataaattcaaattctattttcaatttcggatgaatgccatccttccccctcccccctcttttagtgccattccctcgtcgctttctccgtctatttcacttggttcgtcctcactgtccatgcgtattttcgcgagtttctgcgccgttacggaatcgagtcgaacaaagcggccgttgagcgcactgagctgagagtaataataattttattaaatttataacgaatttattgggttagagacggaacacagaaccgataaacccaattcgtatttgaatttaagggatttgcgccactcgtcgattctttcgaagcgatttacgcccgaaattgttacatgcgtgtccggtgagtgagtgttccttttactttggtttttgcttattccggtgaatttagcgatgtttttgagcggccaattggcggtgtgccaggggcgaaagtgtctgttcattcttttattccttcaaaaaattgataaattttcccgccaatttagcaaattggtcgaccgacaaacagatgacttctgctggacgttcaagtgctttttctgctgtttatgtgcttaacttaccaatttgaagcttttttgttcagatttcccggctctcaaacggaagtgataaatgtgagcagttacaattatttgggcttcgctcaaagcgacggcccatgcgcggaaatggcggcaaaagcagtggaaaaagggggactatcgacgtgtggcagtgcgcttgaagtgggtgggttggtttgcatctgattacaatatttggatggaaatttatttcaatctcccatgtttattacctgtcccgatattttgtggggcccaaaactcacatattccttaatttcaattttgacagaaaattgggtgggagaactgatgccattttcgagtccatttttgcccttttcattcacttttgacgaattatttaagtttattttccaattcaggtcagtgctcaattcagtccgacttggagaatttggtggccaaatttcttggcgttgaggaggcaatttgcttttcaatgggattcgccaccaattcgatgaacgtggcatgtcttgtggacgaggtgggcaagacgtacccaggaatttgacagggaaatgtcacttttta

SEQ ID NO: 56505 - DNA, 448 bp, Heterodera glycines
  unsure (1)..(448): unsure at all n locations
atggcgaatgttgatttggcattggatgaaattatctcgaagtctcgccctcctcctcctcctcccgcaccacaacaaagaaactttggtggcaagcgaccatttcgaatgaatgctaccaatcgtcccgggttcggtcgacgcaattctttgggtggtggccaacgttttatgcgttccggaagtgacaatgttgtttggattaacatcgccaaccttcccgacactgtgcttactcaagaccttcaggtgcatttcccatatacctaaattacatttccattctgtctcatttaaggaacttttcgaagattacaatgtttttggaattggtgtgcattacgacgaatttggcgctcatatgggaactgctgatttatttgtggatactccgtcagcggagtcaatcattcgggattttntcaacgtggcaattgacgatgcgtga

SEQ ID NO: 56506 - DNA, 1439 bp, Heterodera glycines
atgagggaaactgacggcgtattggcaaaacgagcaaatgtacggtttttcgcctgtgtgcgagcgatggtgaacaatgcgagcggaggatgtgctgtcaaaaaggtaagtccaatttgtgatttacccatagcaagtttttgaaggcactatcaagaaaaaaattaatatttttaaatgaaatttattgagtaaacttattcaaatttataaattcccgaaatgttatttggtatcattatttcattaatttggaagtcttgttaaattatttaaaacccaatacaatgttcccccccccatttaatgtatgcatttaccgaaatctttttgaacaaaaagcgcatgggaagggcaattcaccggtgtgaattcgatgatggacaagaagattgtgccgaaacaaacgtttaccacacaccggacattcaaccttttcgaaaattgctttctctgaaaaaacaaaatgaataagccaggtcagttattagatggtggatagttttttgatgcaaaaacaaaaaaaggctcaaggattccgcaattcgggatatatatttttttgccgagacaaatatctcgcagatcgaccattttttgttccagtgacgccttttctacttctgtaatttacttaaaattttggctaattggtcaccgtaatttggtgaattgtctccttttgccgcagtcttcttcttacaattagcccttccatttacggagtccgctttttcttttaattgactttccaatgaaacgaacaacgaaagaaagcctaaaaggaaatgcatgaaagttttgtattcttcaattagcaccggatttgctgctcaacaatgtcggttcaccgtcaaaatgaagctcctctaagcttgaaaaactgtctgttttagtgagttgaatgaaaatattaccaccatcaattcccatacgataggcttggctaacggaaattgaattatccaccaatggcgatgtttggaagctaaacttacaaaagaccgttacaatacatgcggccaggaaatttgcaaacccaaaatggattttcaaaatgaaataatttcagataaacaaaactgcttaaaaaaggctctattatagttcacataacattacttagtgtcatttgaaagctcaagctctaagagttctttattagactgcaaaatttttgttgtttttcgaaaaattatcgccagaaaacttaaaaaaactttataaacatttttggagacacaaagttttttgttacagagactaatagaggactcttgtggtcatagaattaccaaaaataatttatttagatgctctaggaaatggtatggtgcattaaagttgccaaattattttatggaatgtcttttttatggtcgtataaactgtttcaatttgaaacatttggacataggtatgtacaggaaaatgggtaa

SEQ ID NO: 56507 - DNA, 2262 bp, Heterodera glycines
atgttctttacctttgccgcaaattctgcttcttcaaatgtttatcattacatttctgcagttgaacaacgctttttaacagatactggttgcattgttggagacacatcggctgaggacggtcaacttggccaacttcccagatacaagcaaccaattggtgagtttgtactagtaaaagatagacacaaagcccgaaacttaaattgccaggcaaagtgcaatagaatcgctttgttttctccatttctctatcagtcgtattcagtgcttgatcatccacaactcaattcaattgttcaaatcggcggtggagttgtttcctttttcactgatcgacaagttaattgttttgttgtttcttcactattttcattttcacttattccaccttttagccttctttttctgccgagtgtttgcattttccttcttcgtcctgcaatttgttgcctcattctgctcatttcacaaattttcgacctgtaaaagtgccattggcaaggaatattcgccgtcccatttttacttgccccgaatgccgaaggcgctttgacaactcggaccaatttcaagcacactttgagccttgttggataaatgcggtggaaagagaactccgtagacagcgtaaggaaaggtgggcattttggctttatttaatctgtttatttacccattttcctgtacatacctatgtccaaatgtttcaaattgaaacagtttatacgaccataaaaaagacattccataaaataatttggcaactttaatgcaccataccatttcctagagcatctaaataaattatttttggtaattctatgaccacaagagtcctctattagtctctgtaacaaaaaactttgtgtctccaaaaatgtttataaagtttttttaagttttctggcgataatttttcgaaaaacaacaaaaattttgcagtctaataaagaactcttagagcttgagctttcaaatgacactaagtaatgttatgtgaactataatagagccttttttaagcagttttgtttatctgaaattatttcattttgaaaatccattttgggtttgcaaatttcctggccgcatgtattgtaacggtcttttgtaagtttagcttccaaacatcgccattggtggataattcaatttccgttagccaagcctatcgtatgggaattgatggtggtaatattttcattcaactcactaaaacagacagtttttcaagcttagaggagcttcattttgacggtgaaccgacattgttgagcagcaaatccggtgctaattgaagaatacaaaactttcatgcatttccttttaggctttctttcgttgttcgtttcattggaaagtcaattaaaagaaaaagcggactccgtaaatggaagggctaattgtaagaagaagactgcggcaaaaggagacaattcaccaaattacggtgaccaattagccaaaattttaagtaaattacagaagtagaaaaggcgtcactggaacaaaaaatggtcgatctgcgagatatttgtctcggcaaaaaaatatatatcccgaattgcggaatccttgagcctttttttgtttttgcatcaaaaaactatccaccatctaataactgacctggcttattcattttgttttttcagagaaagcaattttcgaaaaggttgaatgtccggtgtgtggtaaacgtttgtttcggcacaatcttcttgtccatcatcgaattcacaccggtgaattgcccttcccatgcgctttttgttcaaaaagatttcggtaaatgcatacattaaatgggggggggaacattgtattgggttttaaataatttaacaagacttccaaattaatgaaataatgataccaaataacatttcgggaatttataaatttgaataagtttactcaataaatttcatttaaaaatattaatttttttcttgatagtgccttcaaaaacttgctatgggtaaatcacaaattggacttacctttttgacagcacatcctccgctcgcattgttcaccatcgctcgcacacaggcgaaaaaccgtacatttgctcgttttgccaatacgccgtcagtttccctcattttattttatatttgtataattttagtgcacaacaaaaagaaatttggagaggcatgtgcatattgtacacttttcaactccttcgattgcacaaaaaacgacggaaaccgaaagagagttggaagagtttacggacgaaagtgccattga

SEQ ID NO: 56508 - DNA, 1707 bp, Heterodera glycines
gctcgccttttaagtttctttgaaagcattgggtggaaggtgtacaccgttcctgagaccgcgtcatttttcctcggtcctggacgcattcgttttcccgacctgagtagtgagcaggctgctcaattccagacagatttgctcaaagcattgatacaaaatgaggatgtactgcgttttctaatgcgcaactcatttctttacatttttaggtctttttcaaccaggccgaactcagtgaagcggaaaaaattatgatcattttagaccggggtaggtaacataaattagaaattagagtaatactaccgattgtatcacaccttttttgaaaaaaaatttgttttcaaaaatcatgaaaatgtgtttccacaggattttgatgttgctgaacacgaatcttgccttcctagtactgatgctttcagtttatttccaagtgtttaaactaattatgacccaaaaattagaagatcttaactctatcttttgtgcgaatttgggtccgggttaagcaattagttgaaatggcccaatcgtgatcagcgaccctgaagacttcttgaaacaagctttgattaattttgaaaacaaaaaattgttttcaaaagtgtgtgataccaccggtagagtattacctaaattagcatcagtaatgagcattttcgctaaacaaatattgagtttaggtgcgatggatggaagtgcttatatcgacatggaatcttggtcaaatgtattgtcagcatgtggcgtggacaaccatgaaatgcgtgaaagataccaccaagtgagacattttcgctcattatttacaaataatatccatttctaacaataagatttgtcatctcgtcaccgcagcggatggtgcacaatcattttatcaacttgcgaataaccaagcccgaaccgaagcaatggaggaagccattgagattgacaaaaagaccagagaagtatttttattattttattagcatccaatgccgaaattaaggcatggattgggcatcaatgtctatcaatagttgataattcaaactgttgttcgtttgacgaaaagatctccaaacttattgctgttgtttgtgaacgtcttggcattccgatttcggatcgtttggctccaaatagcaagtaaatttttataaatttggtttccataaatctaaaattccaaggaaacggaaatggttggtcagcaagatcgttgacaacgatgccttcttgcaaattaagcaggaaaagttttcgttacaacatgattatctcaatacggcgggttcgagtcaggtaaattttacttattacagcgtgaaatttatgtcaaccattttcttttacaattttcatttctggaatcgttttgcgtttctcattatcgtttaaatttttcgcgcatttttaccagaaaacatcggaaactgtaggtccccatccctttgtgctacacctgggctacaagtttatctttgcaggttcgacttcgctcgcgtagccaaaatggaaagtacacgtacacacttacgacccgaacctttgaagacgctgatggcaagaagtaattttcgcctttaaaaaaaattctcttttgcaaatatagacttccccaaccggttgaaacacggaagcagttggacaggcgcgagtatcagagctacttgaaacttcttgacagaagccgtcaatcaattcacaagaaac

SEQ ID NO: 56509 - DNA, 707 bp, Heterodera glycines
aatttggcgcatcgctttagagcactttctgaaaaaaatatttatgaaacaaaaaaatcgattttttcaagtgtccgtttggggtactcaaacatttatggggagcaaaaatccaacgcagaattaaagtacaggctatagggaagctactcccgaaggattcggtctccccataaatctgggcgcatcggttcggggggactgccccgaaaacaaaaaaatcgattttttcaagtgtccgtttggggtactcaaacaattatggggagcaaaaatccaacgcagaattaaagtacaggctatagggaagctattcccgaaggattcggtctccccataaatctgggcgcatcggttcggggggactgccccgaaaacaaaaaaatcgattttttcaagtgtccgtttggggtactcaaacaattatggggagcaaaaatccaacgcagaattaaagtacaggctatagggaagctattcccgaaggattcggtctccccataaatctgggcgcatcggttcggggggactgccccgaaaacaaaaaaaatcgattttttcaagtgtccgtttggggtactcaaacaattatggggagcaaaaatccaacgcagaattaaagtacaggctatagggaagctattcccgaaggattcggtctccccataaatctgggcgcatcggttcggagggactgccccgaaaac

SEQ ID NO: 56510 - DNA, 1156 bp, Heterodera glycines
aaacaaaaaaatcgattttttcaagtgtccgtttggggtactcaaacatttatggggagcaaaaatccaacgcagaattaaagtacaggctatagggaagctattcccgaaggattcggtctccccataaatctgggcgcatcggttcggggggactgccccgaaaacaaaaaaatcgattttttcaagtgtccgtttggggtactcaaacatttatggggagcaaaaatccaacgcagaattaaagtacagactatagggaagctattcccgaaggattcggtctccccataaatctgggcgcatcggttcggggggactgccccgaaaacaaaaaaatcgattttttcaagtgtccgtttggggtactcaaacatttatggggagcaaaaatccaacgcagaattaaagtacagactatagggaagctattcccgaaggattcggtctccccataaatctgggcgcatcggttcagggggactgccccgaaaacccaaaaaaaaattttttggataaaaattatttaaatgaactgactagataatatttaaaataggttatttctcttcctttcagtatccctgcaaagtttggtgcgcttctgatcagtttctgaaaaaaagctaagcctaaactttttggcctgtttaaaaaggaattaaaaatttttaaaaattttattcatctccctttttgatagaaaaagcatcagagtgcctaaactaacatgtaaataaaatttgggtgcgtttcagaaccctttctgaaaaatatttaagaatttaatttgcaaaaaataaataaaaacgaaagactcagattttcgaaaaattttttgagcaagctagctcggcgctcatttcagtgtaagttagtcctttaccggggagtatccctgcaaagtttggtatgcttctgctcaattagcaaaaaatatgagtgatcaaactttcactaaaaagttaagcctaaattttttggcctgtttaaaaaggaattaaaaatttttaaaattttattcatctccctttttgatagaaaaagcatcagagagccttattaacttgtaaataaaatttggtgcgtttcagaaccctttctgaaaaaatatttatgaattaattttgcaaaaaataaataaaaacgaaagact

SEQ ID NO: 56511 - DNA, 1809 bp, Heterodera glycines
  unsure (1)..(1809): unsure at all n locations
atggctgttttccccgtttttcccattgtttggcattctttgcgctctttacaccatgggaaaatgtcgctttatcaaactgccattttttggtagagtccggaacccccaaaaaagtttctcggaatcagtctcaaaaaagttccggaaccgaaaccccgatcccaataaattaattttctattattttttcgaagagttgtcgcctttggccccatgcccttttgtgtgctttgctcataaattttcaacggcggctccgttgtgctgggcgaccgttccgcgcatcgggtgaatttacatttaaatgccaaattaattttaatttattttttctaaattattttttatgtattaatttttatatttggcaaagttttgttttttgctgcaagacaaaattatttttatagcgtcatttaattaaattaaaagtgggagtgaacatattttgtttatcaatttttaatttttcgcaaatacattataagaattaataaatttaaattaaattcaaaaaatggaagtgtaaattttaatttttatatttacattttaaatcattttctatagtttaatttaaattaaaaattcgagaaacttttttaaactttctacatataaaaaaagtatttttcattcacttaaaatgattattaattaattttcagtatttctcttaagtaaaattatatttttctctttttaaattatttttcatttaatttatattanataaattattaatttattttcagtgtttcccttcttcgttttgctctccctgcagcactttttgttgctttttcattgttctcaattgtccatttgttcacacttgagcacccgtatttgctggcggacaatcgccacttcactttttacatttggcaacgcctttttcaacggcattggcttgtcaagtgattggaattattttttcggcatttttgccatcatttttttcccaaaggtatgccctcgtgccggcctatgccatttgtgccctgttcatttggcacacaatggaaacagacactgtgactaaagtggagcaaattatttttaatttttaattttattcgctaattggctcaataatttatgaaaaggccagagaatttctcgagttgagagtcgagcccagaaacagagtgtgatatttagggatcggatttttagtgataaaaaatcccaaaataattaactaaatagtgagaaaaaaattccaaaatagtggcaaaaatagtggcgaaaaagttccaaatttaggggtgtaattttttaaatagctgttttttaatttgaaaataatttaaaattaaggaaaaagattttattcactgattgcagttacaaaatattttcttagaaaatattgaacaagaaaaaaaaatttgggggaagaatttttgtgaaatttttccaattcttaggatgtatttttgaaaatttttaggtcgattcttaggggtgtatttttgaaaattttttaggtcgattcttggggtgtatttttgaaaattttttggtcgattcttaggggtgtatttttgaaaattttttaggtcgattcttggggtgtatttttcgtttttattgcattttttgggaaattttccaaaaaatgccaaaatagtggcaaaaataatgacgaaacgccaaaatagtggcaaaaaattattttagtggctaacttccgaaatagttttttttagtggcgaatttcgtgcatttctcgtcgagttaaagccgcagaaaaaatagttaaaaaactaagaatcagatccctatttatgagtccaacaa

SEQ ID NO: 56512 - DNA, 1044 bp, Heterodera glycines
atggaatggccagcattttggcagagtttcgagagtgccgtcgaccgtgccgcccttgagcccgtcgacaaactcaactatcttcacggttgcctacgcggtaaggctgctcgtgccgtaaccgcctaccgtggaggggagaattacgcccatgccgttgccgcactcaggcgactcttcggagatccacggaaaattgccgaagcacttcagtccgaactgatcaatctccggcctgtggacgatagcgttggatcactgcaacacttcctcgagactttggagcgtgtgtgccgccaacttttgaacctcaacatgccggatgacagcccattcatgtaccaaatcatccgcagcaaattgccgtcgactgttctgtccgaactcgtcaaaatggaacgtgcggcaggcattccatggggtactcctcagctcagagctggacttgccgaagttctcggagtcagagaagaggtcgaacggtgcctgcgcgaaaccaataccgacagacaaacacgatttcggcatgaagcaaggccaagtcgaccgcagcgaccagaacggcacgaaaatgcgcgtgttttttccgttgctcagtccgttgtgaattccggtgaaaagcgagtgccttcttgcctgttttgccctggtcagcactgggccgcagaatgcaacaaagtgacggatacagagaatcgaaagcgatgccttttgcaacagaaccgatgccttaattgcctacggaaggatcatcaactgaaggagtgccgatcaaaacaagggtgccgcatatgcaaggaacggcatcattcatccatctgccctagtgcaaaagggacatcttcggctcgccaaaaacaacctaagcccttgcacaagaacaaacagactttcggaaccgagcgtaactcaaggccattggtgtcatccgcggttgccaatgatgctgactcaatccctgagccgaaaattgttaacacaatcatggcaattgtctccccatccgttcctcatctcgtcatgatcatggccctccgagctcct

SEQ ID NO: 56513 - DNA, 925 bp, Heterodera glycines
  unsure (1)..(925): unsure at all n locations
tggttcgtttcatcacggcaccgaaccttttggctcgtttaaagtcgntgcttaacttgccagatcggacgggngcccttgattccactgttccaagcaccccaccaaaagcaaaacgatataaccaaaatataaggaaaaattttttctccatcttcctttttgatactaaagcatcagagtgctaaaattaagttgtaaataaaattttggtgcactttagagcactttctgaaaaaaatatttatgaaacaaaaaaatcgattttttcaagtgtccgtttggggtactcaaacatttatggggagcaaaaatccaacgcagaattaaagtacaggctatagggaagctattcccgagggattcggtctccccataaatctgggcgcatcggttcggggggaatgccccgaaaacaaaaaatcgattttttcaagtgtccgtttggggtactcaaacaattatggggagcaaaaatccaacgcagaattaaagtacaggctatagggaagctattcccgaaggattcggtctccccataaatctgggcgcatcggttcggggggactgccccgaaaacaaaaaaatcgattttttcaagtgtccgtttggggtactcaaacaattatggggagcaaaaatccaacgcagaattaaagtacaggctatagggaagctattcccgaaggattcggtctccccataaatctgggcgcatcggttcggggggactgccccgaaaacaaaaaaatcgattttttcaagtgtccgtttggggtactcaaacaattatggggagcaaaaatccaacgcagaattaaagtacagactatagggaagctattcccgaaggattcggtctccccataaatctgggcgcatcggttcggggggactgccccgaaaacaaaaaaatcgatttttt

SEQ ID NO: 56514 - DNA, 81 bp, Heterodera glycines
atggtggggagaattaaaaatgtgtattcgaaagtctacgatgtgccaagacgtccgttcgagaaagagcggcttgaccag

SEQ ID NO: 56515 - DNA, 378 bp, Heterodera glycines
atgctggaattgaattcgaacaaaacgaagaaagtacaattagaagaatttataatgtgtagtaagttaatttgttcataccaaacatcggccgactcgttgacaaagtcctgcaactaacaaatgtctttgctggaagtcgcttgaacaatgagcaaaagcgaattgttgttgaagccatttcgatttaaatttaatttaaatttacaccctaaaagtttgaaaatgggctttaagagaaataaaataattaaaaatttagttggttttatttttgtttgcagtttgtatctccgctgtggacgaaccgttcaaaagaaaagttgattgattgtttacttatcgactggctaatgaaatggtgtgcgtaaacataaa

SEQ ID NO: 56516 - DNA, 1885 bp, Heterodera glycines
gttgtcaaccgctgaacgcgttagcaatgttgggcggggcccgactgtgccaccacacgccaccaaactgcatggacgccattcgtccgcttggtccgaaaagcagtgtgccgagttttaaggttttcttccctaaactgataaaaaaaataatatttgaatcacatttaagggccaggcaattgtgaacgcggaaatgaagaccatttcgtacgacgactacaagggcaaatggttgatcttcttcttctacccactcgactttacggtactttgcaaaatattttctcgggaatttcttgtcgtaatttatctgaacttgacaaaatttcagaaatttgactgatttatagagaaaactcaggaaatttgagagatagagaatgtttaggctcttgtttctggtttcctaaatttggtgccatacaatttttacgtgctataatcaattaaagggtcccctttttggttttagtaaaatttccactgtaagtagcgccatcaattgagccgtttttgtgcaaccccgaagttgaactttacttttagttttgctttttaagttccattcttttcaccgtcccttcagtttgtgtgccccaccgaaatcattgcgttcagtgaccgcgtcgccgagttcaagcagctcggctgtgaggtgatcgcctgctcatgtgactcgcagttctcgcatttggtccttatttgttccattttctgttgatttaatacgatccgccgtatgtttttaggcttgggtgaacacaccgcgcaatgatggcgggcttggcaagatggaaattcccgtgctcagtgacttcagcaagaaaattgcggctgactttggcgtgctggacaaggagaccggactgtcctatcggttcgtttttctcggccaaattctaatcggtaattgaaaaaagtctaaacttttcccctcatttcagcggtctttttctgattgaccccaatggcactgttcgccattgtttggtcaacgatttgccggtgggccgaagtgttgacgaggcattgcgcattctgaaggccttccaattctttgagaaacatggcgaaggtccgtcatttattttttttttaaattttggcataataaatcgaaaactgactcaaattttgcgaaacgcacttatttacaaaagttttgctttagaaatttaaatttttctgctcccctcggattacacgggcttgggtccggtgcaccccaaaacgtcgtcggccgaaacgtcgtcggaagactttttgaaccataactttgttcgctgtcaatcaaattaagaattgttggtgttgttcgatagctctatgtgtttattattaatttgcaaaatctcaaaaattttcgttaagttttaaaaaagttatggccagaaggaactcaaaacccagtaattcgaactttttttgctcagatttttttgtgcataaataaaaatttttgaaaatttgcaggctaatagcatttttcgaatgctttcgaataataccaagaatgtttaatttggttgagaaagaaaaaagttatggtcgaaaaattcgttcgacgacgtttcggctgacgacgttttgtcctactccggcttgggtccacggatttcagacggattcgctggctgtcctaagaaatcactgcttattaaagtagtacatttttcgcaaattatcaagtgcaaacaataaattggattttgattaataaagactcctctaatcactctaattaccctccttcataatcgcatcaatgcccctctaattaccccctcccctccatttttcagtttgtcccgccgattgggaggagggcggtgaaacaattgacgtcaaatcgcccaaggagtacttcaaaaagcaaaaatga

SEQ ID NO: 56517 - DNA, 1078 bp, Heterodera glycines
atgcgattaaaatatttgagcagtgtagtcagtgcatcggtaaaaagttattttaaattatttaaaattatttttatttgttttttaggatgaaatttcgtgtgccggtgctttgtgctattcaccaaatggtcggaagttggcggttggaacgccggacagacacattttgctgttcgacgacaaattccgccggcgcgacaaattcggcacaaaaccaatggaaccgaaggtgttaagctttttctttgttagcatttagtaagccgaacattttatgggcaattattgaatttttatttgttttttgtttttctcagttcggcaaaatgagttatctgatcaaatgcgcggtgttctcgcccgactccgccaaattggccgttggtcaaactgatcacatcgtttttgtctatcggctcggagacacttggcaaattaacttgaaattgttgaattttatgcaaaaatgcatattccaggaatgagaagaaagtgatctgcaacaaatttgcacagtccagcgccgtaatggcacaatgttggccaaccgagagcaaattgatcattgggtgatcaatcggggtgaattaataggttttaaatctgcaattttgcaataagtttattggacggaaaagtccgttgtgcgtccgcttcttccaacaaatgttcaactttgtatcgggcagaaacagcggttactgtattggcccaacagtaaccattttacaattaaaatataaaaaaacccttcaaatgttcagccccaatcgaaagagttttttgtcgggtcattctgatggcactatatttttgtactccttcgaaacgcgctcccatgccagggtaattaatttgaaaaaagggtaaaatttaatcattgaaaagtcaggtttgtgtccatccgtgtgccccccaggcgcttttgttgtccgccgttggcattttggcagcgggcaccgaccgacgcatcgtttcttactcagaacatggacggcaatgcaacagtttgactacaggtgcattaataattataaaagagtttaaataataattaatttaattgtttaattgc

SEQ ID NO: 56518 - DNA, 1058 bp, Heterodera glycines
atgagtttctcggcgatcgtcaacaatctctcggcgaaagtggacaatctatcgggcgtcgtcaacaatcactcggtgaaactggacaatctatcgggcgtcgtcaacaatctatcgggcgtcgttaacaatctctcggcgaaagtggagacgattgagaaaaaaatggtttgttttcggaagaaccgataaataaattcatgggttttctcaaacattatcattttggtttttagtatttttttctgctttatgagttggaatgctaaatgccaatttacacagtcaagtattaaattgtagttttccaacaaaatgttttttattacgagtacaatggttttttgttagggtatctccggtgtcgtagtttgcccaaacatcaatttacatatttgttttaaatatcgaattacattttgtcgggtgaattttttgtaaacatgcgttttttccttctaatttgatcattttttattaaaataagggagaaacgactggcaaggcgccaaacgaacaaaaagagcgaggaaatggacacaaagtttgtaaagaaaataataagaacaaaagatgcccttgaattgccaaagccagggcccgaattaagaaaggaataattgcataaacctggccaggattaaaaatggcattaccagtttgtcgggtgcttttttaaaagaggccaaatgtgaaacttttgaaatggtctaaatttaaaaatttgcataggttatgttagtttttataccatttttttcgtttaggcggtgatgggcgcttacaacgaaaacaatggcaccatcgaagtgacattacatggttacaacgtcggaaaggcgattgttgaaaggattttgaacacggaaaacgggacggtgcatttgcacggaatgcgcgaaccaatgtcactggcaaaggccgtcgaaattggcttttttgacaacctgtcgctgactgtggttgacccgaacaccacgcaaaaggctgtttttggacgaaacattggaacggaaaagaaatatttttgccaggcaagggtcattttctttttttaa

SEQ ID NO: 56519 - DNA, 499 bp, Heterodera glycines
atggtaaactctccagctccaaattttttaaatttaaaagaagtatttggcaatggaagtgataaattaaaaatggatgaactgacaaaagacgggggaaaggaaaaagaagaaaacgaagaggaaaaggaagaggaaaaggaagaggaaaaggaaaaggaagaggaaaaggaagaagagacgaaagaggaagaagagaaaacagaagaagaggtaacggaagaaggaaatggagaggaaaaggaaaaggaagaagaaacggaagaggaagaagaagaagaggaagagtgtgaaaatggacagaaaagggaaaccgacgaagaagaagacgaaattgagcggatcatcatgagctcgtcacacttgttgaaatgtgaggaagtgaacagacggacaatgagcctggtccaaagttgttcggcacatgccaatttggttggtttgcaaaatagggagggaatggagagagatttctttggttattagggtgtgaaataaa

SEQ ID NO: 56520 - DNA, 1113 bp, Heterodera glycines
atgacttgcttcgaatgcggaactccgtatgtgctgaacatggatgggagcagatcactcgcaccattcaatgtgatctgtgatggaagcaaatattgtactggcaaatattgtgtcactcgtaagtgattgggaggagaaggacgggggaagagaagggcacaaacgaaactgacttagggaagggaggggggggggggcttaaagctaaatgaatttgtttaggaaagtctcagtatcctcgctcattctgtgccacatcctgggaagatccaaaggctatccagtgccaaaaagtgaatgatccgtatgatgatcaggagtgcatctgcgaccgcaatttttgcaattacccatacgatccgatgaatcctccgcctccaacgacgactcttccgcctcctcctcctccaactacaactcttccgcctcctccgcctccaacgacgactcttccgcctcctccgcctccaacgacaactcttccgcctcctcctcctccaactacgactctttcgcctcctccccctacaacaaccaccattttggcgacaacctcggcctatgtgattacttgtcctgatggtcgccaatttggccctaatgatttggcggtttatatgggtcaaattcttaaacaggttctaaatcagaattggggattttaataatttagggttcagtttaatagagcatttgataatataattatggtccggtggatcgaaggcaccgccgggaaaattttcacaaattttggatgaaatttgcgatgaaaaatggtataactttattcaatttattttaatttatagaaaatatttcgagggttcgattccctcccaattttaccattttgctttattataacttgccaaaaacctaaatggtgaaaaattcataagttctttcaattctttttgctaaaccatgttaaataacttgcctaaatgtgggcataatcggagacactcttttaattaattgtgagtttattttcatttatttaggctattctcggcacttattccaatgcgtttggcaattcggcattggacagttacaaagacggaatcaacacgcacatttgcaattatatgtaattaaaataaa

SEQ ID NO: 56521 - DNA, 107 bp, Heterodera glycines
agaatgatcagtgtagtttcgacactgaaaggaccgtcaaattcagtcctcaaattcgagtcgctttctgcaggccgttggccgaggtgttcaagtcgaagtgcaaa

SEQ ID NO: 56522 - DNA, 380 bp, Heterodera glycines
atgcgtggatttggtgtaccagaaataatccagcaaggtaaattattaattttttaagtcatctttctttaaaataagttattttagctttgttttgttttttcaaaccatctatttccgagattttaacttaaatttaacttttttggagtaatttggtatattttaccctaaatttagaaaaaattatgtgtatatgaattttttgatagtcggtacactctgaaggaactatatgattatgttgttgtataagttttttttaatcttcatataaagaaacatttacctgattttttattatgtttctttaaaaaagtgtccttataattttggaatcaatggcaactcgaacattgggcgactcgtacaataataaa

SEQ ID NO: 56523 - DNA, 441 bp, Heterodera glycines
atgaaaaatgatcagcagaagcaagaacaactttttggaaaaatcactgaattggaaaagaaaatgaataaacaacagattaaaatggtgtgaaaaataatggggatgtgtaaattgaaaaattaattaattaaaagcaaaaaaaaaaaactattaacattaaaaaatcctaaaacaaagtaaaataaaacctcaaaaaatttttctattaacgaaaagccaataaattacctgaatgtaatctttaagaatatttaatttaaaaaaaaaataatattttaaattaatttacataaacaaatttaaagacgcttttaactttgcgaggaaattattgggatgccacagcttgtaacaatggcattgaaatcactgataaatttgacagttgctaatgaatattattatgatggtaaattgtaacaaaagtcaattaataaa

SEQ ID NO: 56524 - DNA, 757 bp, Heterodera glycines
atgatcgatggaatattgtccaagcatttgcgaaatattgaccaaaacaattcggtggccatggcacagctgcacattcgtcttggtacaattccttccctttttttttaatttttcgtcactcattttctttttaaacaatctaataattaatagaatattaaaacataatgaaatgaagtaatttaagcttttctgcgcaaagtccttggcattttggccttccaatttctggccacaattggactcggagtcgccttttacataacggacggagtcaaagtgttcatccaacaacagttcgtataaaaacactttattataatggaattgtaagagcttccaattgttacaccgaacaaatgggaaaaatacaaaaattaaacatttaaaaaaactcataggtattttgaatcggtcaaaaaatacgcattttaaacgggtttatttttacgatttttagtgttttactcttgaattaaagttttctcaaattttgattggttttccccattttttggttttgtgggtttccgaaatctctctaattggtcactcactttttcttttttcttacgctttcctcgtccttttgtcaaatgcttctccacttttaggccatggtttccgttcgcttctttcttcggctcaattgcccttcttttcgctatgtttgtctatgctcgttctgtccccctcaattattttctgctcagcggatggacaattttgcaggcggtcaccgttggaacgattg

SEQ ID NO: 56525 - DNA, 840 bp, Heterodera glycines
atgtccgctgggagggcactccgcacaagtgtcctctacaaaattggtgttgatcattttttgctacgactaaccgtattccgtgtacaagtgagcaaaaattgccaactcgaaaaccggaatttcgtttttcgggaataactctgcgggatttgcttatatccagtgcacatagaaaatgattatgtgtaattttttgagctctatccaaccgtgtttttggatttttaaaattttcagaaattttcgagctaggcctaaaaaacggttttttggttttttaattttctgattttttaacgaattttccaggaaaaacggagaccacttccaaaacatagtttttcgagctctatcgattggtgacattttcagaaaaattttggtttttttccggaaatagaaaaattttttgctctgaccgggacatttcagtcccgggcctataactcgtcgggagttgattttagccaaaaatcttgcaagagcatttttgtagagaattttaagctctatccaatgtgttttatcccatatttttaacatgagtataaaaaaagttataaaattaattgtgattttaaaactcaaaaccataggggggaccccatggttttgcatttcatgaaaaaattttttgctcctaaattagccaaaatgcatttttatggcataatttgaggtgctgaatacgtatatacgctttattttgtgtttcagactttttggaaggtggttaaaattttttgaaaaatcgtcaaaatttgagccccggaaaatcctgtgaaatttcgaaaattcataaatctcttcgtttttgatcaaatttagtggaataaa

SEQ ID NO: 56526 - DNA, 1211 bp, Heterodera glycines
atgttcccaaatgacgatggctacgaatcggaagatgatgaaattctcttgccacctccgccgattcccccgcaacttggccaccctccgccaaatgtgccggtaatttcggtctcgcttttcgttgctttttctcaatttccgagtgcttttttcaggcagttcgtgttcagccaatacatgttgggcagcagcggctgccgctgagagacttgccacaattcgaggaccatccacaaaatgtgccggtaattttggctcgcttttgttctttttttcaagatcccgaatgcaggtaattcgtgtccaaccgatgcaacaaccattgccgctgagagacctgccgcaaattttccaccctccaccaaatgtgccggtaattttgggtctttctttcgattgctttttctcaattcccgagtgcatttttcaggcaattcgtgttcaaccaatgcagcaaccggtaccaatgagagccgtgccacaattcccccaccctccgccaaatgcaccggtaatcttgagtctcgttttcggttgctttttcaaaatcccgagtgcattgtttttcaggaaatttgtgtgggaccaattcatgatgggcaacaaccactaccactaagagcgttgccacaattcgcccaacctccaccaaatgtgccggtaattttggctcgtttttttgttactttttttaattcccgaatgctttttttcaggccgttcgggtccaaccagttcaacaaccgataccactgagagacgtgccgctatttgtcaacccaccaccaaatgtgccggtaattttggctcgcttttgttactttttttttcaagatcccgaatgcattttttcaggtaattcgtgtccagatgcctcaaccgttgctgagagacatgccgcaaattcaccatccaccgcgaaatgtgacttcaatttggatcaaattgtggttgctttttctcagtctctgggtgtttcttcagggaattcatgttcgacaaattcaacgggaatacgccgtaccgcaatttgcccatccgtcaccaaacttgccgtatcatccaccagaaaacgttccggtagttgggtcttgtttttcaagcgtttctcatattttcggatgtttattcaggcaatccaaccacggcaacaaccgcgccagctgagagacgtgccactattcgaccacccgctgccaaacggacag

SEQ ID NO: 56527 - DNA, 3315 bp, Heterodera glycines
atgttccccgatgacgatgggtacgaatcggaagatgatgaaattctcttgccacctccgccgatccccccgcaacttggccaccctccgccaaatgtgccggtaatttcggtctcgcttttcgttgctttttctcaaatttaagagtgcttttttcaggctgttcgtgttcagctaatgcatgttgggcagcagcggctgccgctgagagacttgccacaattcgaggaccatccgcaaaatgtgccggtaattttgggtcgattttcgctgtgttttctcaaatttctgcgtgctttttttcaggctgttcgggtccaaccagtgcaacaaccattgccgctgagagacctgccgcaaattttccaccctccaccaaatgtgccggtaattttgggtctttctttcgattgctttttctcaattcccgagtgtatttttcaggcaattcgtagttcaaccaatgcagcaaccagtaccaatgagagccgtgccacaattcctccaccctccgccaaatgcgccggtaatcttgagtctcgttttcggttgctttttcaaaatcccgagtgcattgtttttcaggaaattggcgtgggaccaattcatgatgggcaacaaccactaccactaagagcgttgccacaattcgcccaacctccaccaaatgtaccggtaattttggctcgtttttttgttgcttttttttaattcccgaatgcttttttcaggccgttcgtgtccaaccagttcaacaaccgataccactgagagacgtgccgctatttgtcaacccaccaccaaatgtgccggtaattttggctcgcttttgttactttttttcaagatcccgaatgcattttttcaggtaattcgtgtccaaccgatgcctcaaccgttgccgctgagagacatgccgcaaattcaccatccaccgcgaaatgtgacttcaatttggatcaaattgtggttgctttttctcagtctctgggtgtttcttcaaggcattcatgttcgacaaattcaacgggaatacgccgtaccgcaatttgcccatccgccgccaaacttgccgtatcatccaccagaaaacgttccgggtagttgggtcttgtttatcgtgcgtttctcatattttcggatgtttattcaggcaatccaaccacggcaacgaccgcgccagctgagagacgtgccactattcgaccacccgtggccaaacggacaggtaatttcagaccctggcttctacctaacaccgaaacatcttttcttaagcaaatgcatgccaaccccccgagagtgctggaagtgatccgacggctgggcgagtggagaggaagaccaagggacccaagacgtccgcctcaatgaatgaatggaatttggattttgataaaatttgttgttttaattttttgaattgataagggttaaatcccgtcacctaaattgtttcaaaattattaaaattttaagaaattagatgctaaacctaacctttgacatagattatgaaaaaatgaaaagaaatgacgaaatttttggaatgttccttctttttattatctatggattttttttcatgtgcattattttggtgctagtaagatattgccgaatgaattaattggttttttctcttcattttaaaacatttcacgtccccatgccctgcccacttcccgcggaattgatcaaggaaataattgacgctctcccccctccaaaaacacatcggcttttgcgcgtaaattttgttttggcatactttgttaaatgtcggttttattccatgatgagaagattgtttcgcccagagcatatatcaataccaatggcccgaagaactggaatttatttctttttcgatgttcatactccccctatttattttccactctaccaataataacatttaaataaaattataattttttatttcttatctgattaatttcgatcaatattttttgataattaaaaaaaattgtatttttcccaaaagaattttctcgcagtagcaactcatcggcttttttttactcccttcataaaatgtctcgcttttgccctatcgcccaaatcaaggaatcgggtcggcttaacacaccaaaggggaaatttagtgagttccaaacctaccaaattaaataaagaattttgataatcgttttaggtcttttttacgctctggaaaatgctcgaaactaccaacttatggggaaaagcataacggaagataaatttcgttatttgatgaaaacggagaagaaacaaaggcaattggccatgtaattgatggaaaaggcagggataagcacggatgacaaaacttttggtacccaacaccttgaggctgtacaaaaatactgggacagggaattcccggatatgtttcgcattgtggcttttgaaatggtaaccaaattagcttgaaattaacccattttttacattttttttagaaatttggacttaggccaattttcaaaggggaaggtgttcgaagaaatgaagtgggtgtgataagagaaggaggccattgggatgggatcaaatcggcttcttggttttttggtgttcgatacttctgtgtcagctgtgaagtaacatttgatggtccagtccgccatagtctcatatgtaaggaacgctgcaaaaaatgttgtcggatggggttcgggtttccatgtacggatgtctgcgatgagattcactgcggcgaatgcaatctcaagttttacaacccggaatgttttgaagcgcacaagaaggcggcctgtattgagtacaagaaatgtgaaaaatgcggagagacacacaatactcggaacaaacacacgtgcggcgaaaagttttgcaaactttgcaaagtttgtcacccagggcggcaatgtttcatcaaaaaaatacatgtgcgaccacagaaaatgtatagaatagtggcatacgacctggagacgactgtagaggggggagaacatcggcctaatcttgttagtgcggcactttcttgcagcatttgtgcgggagaggagcgggaatgtgatatttgtgaaggccccaggaaaatcacatggtcggtagcggatggttttgacccaatgagcgagtttgttgtttgggtaatggggtttcaacgatttgaaacggttgcttttgcacattatgctgggaggttcgattcccactttgtcttgtccgagctaacgaagaaggaaatcgcaacggagttgatgatggcggacctgaagatctatcaaatcaaagcaggaagggtgtgctttcgggacttttggatgctcagtcaga

SEQ ID NO: 56528 - DNA, 790 bp, Heterodera glycines
atggacacaaaattgagcattttggccaaggaattgcccaccaaaagggaaatgttcgaaaatgccaaaattggagacatcgaattggccacatttatgctcgatttccatgccgaattaagccaggcggggcaaacaaattcatattgggcaaatgaatcggaccaaactatggtaagcataagcgcaattaggaaataaatctacgtaataattttttaaattttttacagaaggactatctgcaaaaagcggaagaattgtttcggttagcaaatgaattgataaaaccgttgaagaaaatcgcaggccaacaaatggaagaactgattaaacggttggaacccgaaattagcaaactcattagcctaattgacgaccaagaaaactcagaggaactgagtgaacaattggagaaaagagtggacaaaatcaaagaaattggatgcaaagcgatgggaattgtgctgacaattgacacgccaaaaaaagaggaaatttgcaaaacggtggaagaaattgaaaaagtgaccaaagaattggagaaaaacacgggaaaaagcgacaaagtgaaggccaaaatgagaaaactgaagaaattgttggaaaacgacaacaaacaatttgtggagcgaccgtacaaaatggaggtgagtactgtaagggcacatactgtgcaaaaagattttgttgaaaatctttcagttgttaattaaacttagggaaggcattaaataattaggaagttcaatttttaaataaatttcagcggaagaggaaaggcatttaa

SEQ ID NO: 56529 - DNA, 530 bp, Heterodera glycines
tcgagcataaatgtggccaattcgatgtctccaattttggcattttcgaacatttcccttttggtgggcaattccttggccaaaatgctcaattttgtgtccattatgcgatttttcaaaatctgcttgattcttatcaccgccccgtcttttcctttttcacggcttccaattctttttttgccatttccaaatatttcacctcacaaaatgtttcatttttctttataaattcgatgagattgcccaatgtttgctcaatttcatttttatttttcacggacatttgatcaaccaaatacgcctcaacttcaaccaccaaagtgtcaaattgccttccaaactcattaatgattgcccgcatggacgacagcaattcggcgttactaaagacgggaaaaggtcaaatttggcatcgctttccgccggcgttaggccgtggaaaattttaacgcagaaatcctacaaaataagaatgccaacattaggaaaaaagaaaaaactatgccagtttttgatttattcctttt

SEQ ID NO: 56530 - DNA, 645 bp, Heterodera glycines
atgaaacagtttttatttaccttttttaacattttaattttttcattttcatcgttcaaattttccgtttcgacaagggacgaagaatgggaaaaatgggaagaatggaaaacacaaagccaagaaataatcgaagaaattcaaaaagtgcaattggaccagaaataccttctaagaatgaatatcaaagtgagcaaattaccgggaattgttgccaaatttccgataaacgaactgaaggcaaaatgcaaccgccgcttgtgggggccagcgaagcgagcaaatgccatccattttggcaaacagttcagttaaaggggcttagtaacgtataaaactaaacgtaatactgctgctggacccatcctactttaagacaacaaaaaaggaataaatcaaaaactggcatagttttttcttttttcctaatgttggcattcttattttgtaggatttctgcgttaaaattttccacggcctaacgccggcggaaagcgatgccaaatttgaccttttcccgtctttagtaacgccgaattgctgtcgtccatgcgggcaatcattaatgagtttggaaggcaatttgacactttggtggttgaagttgaggcgtatttggttgatcaaatgtccgtgaaaaataaa

SEQ ID NO: 56531 - DNA, 1266 bp, Heterodera glycines
atgggcttctacagtttggtggaggacaaactgatgaaagaaatcaatgggttgccaacattatgccaaaattttttcaaaaattttttggaaaaaattgatttcaaacaaatgatggacgatttgatgcactatcagcagattagagcgtcacttaaacacccaaaaatgaataaaattggcgacacagtaaacatcaaagtgaccgtagtccaacaactggcctctctactatattatggactactgtatcaggtaagaacggtacttagtagttggtataaaacggaatgaaattttcttaaaatttcaatcattgtgggttcagggtgactgatcataaagttaaaatttatttcagcattctgggacccaaatgaattaagtcataaagttgggatttttcgatttgccggtttcacttgttgtattgtcaagacatcaacaaaaatatgggtttcaagccatttttaagtggatttttcatcccaaaaatatatttttaactaagaaaattttgcaaaattcgggggaatttttcgttgatttaatgaaaaaaaaaaaagttcaaaaaggaatttttcggttgaatttttactaactgttcctaaaaattttatgaaaaaccccaagaaaaatttgaatattataatacaattttaatgcaatttattggtgattttagaaagttttcgaaatatttttgtaaataaaaaaaactattatttctccaggcactgcttgacgagcttaacaagccaaaaaatttgtcaaaaagggatgccgcaaaattttggatcaaaaatttcctgattttttcactggctgccattagagcagagttcaacatggccaaatacgagatggagaatgggttggatgatgacagaattaatttgctgccaaaattttcgattggacggcattacaatgaaaaattggcaaaaaaattggcggaatggaccgacagaatgcaaaaaagacaccaaacatagtgcaaaaaaaagctttgttattttatatttttgttattttaggaatttgaaaacacaaagattgctgaaacttctgttactttaaacctttaaaaatgataaaatttgtttttatacaatttaaaatatgcaaaaaaaaaatctttttatatttttttaatttataaggcaagcaattaatatagaatttataaaaaaattcattattcagaaaatgattattattttttgcaaaaaatgcaaaaaaatttgcaatttaagttgttttaaa

SEQ ID NO: 56532 - DNA, 1049 bp, Heterodera glycines
atggtcttttcccgagacaaatctggattggcaaagcaaatgaacagcttatctgcaaaagcaagacgaaagcggaaggaatggcgccaggatcgggctcaaaaaggcggctcgacgccaaaaagtgacgaaaattgaccaaaattaattttattttaaaaacactgcattttttaggtctaaagcagaccttagccgtgccaacagcagatggagaggagacatcgacccaagccgccgaaagtggaccatcaacgtcaactttggaccttcgtaagtcaaaaaagtcactattttagaagcaaaaattaaattaaggcccgcgttcaagcacaaggccattgtcagcgactccggtcaggcaccatgtgcgtgtccgtccaaaaactaccgacaaagcaacaaatatggactttaaaactaccgacaaagcaacaaacatggactttacaactaccgacaatgcaacacacatggatttgacaacgatggacaaggcaactgacgtggacttggcatatgaggacgccgcgacacaaaccgagcagttggacaaacagctgaaggagcaggaacaaacgatcagctttctacgactgcaggtccgcaacagagacgcaatgatcgctgatctgcgccgtcaattggaacagcaggcgcagaaggaccagccaacacgtaaaattctgcagaatttttaaagccatttatcatccaaattgtttttagcttccacacggcgcaaaaagaatgctgctacattggagcagacctcgcggcgaaatctggccaagaaaatcgctgatgtgatcgatcgagatcggtcgcggtcagtgagccgatgttcgctgcaatctctgcatcgtgaagtacgtcacaaatttggacactacacaccgatgaagaaggaacaactccgacaacaacaaacaatccacgaagaagatgggctgtttttgctgtcacagctcgggactcaaaaagcgtatgagaggatgaaggcactcttgcgtcttatcggcggaaaatttgatgtttacagaccatga

SEQ ID NO: 56533 - DNA, 904 bp, Heterodera glycines
tttcgcttaagtcagacgcggttcctaacgtgggttatccaaacgcaacaccaacgccattggacaaaaaagcaaaaaaacaaaaacggcgtaatgatgggaattcggctattcatcaaacggtgaagcaaatgattgttggggaagtcgcgaagggaaatggcgtaagtaaagcgagaatttttttattatagtaaaacagcttctaattgagctaattagtcgttttctgtttctttcgttttgcacagattgccgccagcaattgctaaagaaacaatttccatattttaaaaatagcgattcgtaaataattataaataaattgatttgttgatttcaagaaagcaaatcgtcataaaggaaaacgaaaagttactttctcatctgaaagcagtgggaacgaatattatgcggacaattccgaacaaaagtcagaagttgtaagaaagggtgagttgaattttttgaaaaaataagagttcaatttaattgaagaatcgaataaacgcatgaaaatgaccattgaaacggattctgacgcgacttcgaccgctgagggtcttacaaaaaacgactaattattcacatagcaaattgtgtttaagatttgattgctacaaatggacagttttctgaagacagcatggaaaacgaggaagaaagccttgacgatgatttggaggaagaggaagaagaaataggggaagacttggaggacgaagaactcgaagaagcagacgacgatgaactgagaaatggcaatttggaggacgaagaggaagcgaactcttcttttttcacgtcagacgacgaatcgcttgaagacgaaattggagaggaatcgggagaaggtccaaccaacccaaccattttaatcggattgaattactctaatgtttag

SEQ ID NO: 56534 - DNA, 769 bp, Heterodera glycines
atggccttaaatctgacctatcttttaaccctgagcttgtactgctccaactccatgcatgaagttggagctgtacaggtttgttgagaacccagagaccaaatctaaagccatattcggactcagcgtggtcaatttatttagtttaattaaattcggaatttccaaaaccacttttaaaacattttgttatttgatggtcttgaaaaatgccgtttttggagacatttttagactcggccctccaataattcatttttgaagtaataaaatttttttcttataatttttatagtcctaactttgctctatttactcacgttttctctgcctctgtatctcttttcattttctttaaatcagccatcaaaaatacatacctcgaaaatgaccatttttacattatcaactctaactccttaaatacttttctaatgggatttatcccttgcccaataaatagcaaactcattctcaataataatgtcagatatttcggatcatgattgtggttttttaaatttatattcataaaaaaattctttaaaaaaagtgtgcggaaacttatgttacaccctaagtaaaattattataaaaactttatttactttcttaactttttatttaatttttatgtccttattattttaggtttttgaatttttctttgctgttaaaatttaaaaaaagattttaactttattgaattatcacttttttatatcattaatttattttttaaattggaaataattacttgtttttttta

SEQ ID NO: 56535 - DNA, 1835 bp, Heterodera glycines
aaaatttgaaaaaaggaaagaagaaaaagaagtgaaagtgaaaaggaaaaagaaaaaagcgaagcaaaaaaagcaaaagaaagcagcagaagaaaaagaggaaaaggaaggggaaaataccgtaataggggaggagagagaggaggggacgaatacggtagaaaaggatacggtagggaaggaaagtgatcagaaagaaggaaaagaaaacgaggaaagaaaggaggaaaaagcgggaaaggataaggaaaataccgtaataggggaggagagagaggaggggacgaatacggtagaaaaggatacggtagggaaggaaagtgatcagaaagaaggaaaagaaaacgaggaaagaaaggaggaaaaagcgggaaaggataaggaaaataccgtaataggtgaggagagagagggggggccgaatacggtagaaaacgttacggtagagaagggaagtgatcagaaagaaggaaaagaaaatgaggaaagagaggaggaaaaagtgggggcctattcagagggaattacggagattggcgagaataatttggtcgaaaataatcggaaaatgaaaatgagggaatttggcgatggcaaatttttggcagcgaaatacgacgaatatttggagataattaacaaagggcaacaacaaaatgagcagcacacagaagaaatgggaaaaagcatcgcattgctaaacattggcgttttgtctaacgaaatttcaaatcgattggaagcgaaggaatgggaggcaaatggaagccaaaggaaaagcattggggaacagtgggagaggctgaaaaggacggaatattcgcaggcagagagagagggaaaggaggaaaagcatttggaaaagatatgccaaataattggggaaattgtgggggcaatgggggaaaatagggaaaaaggtggggcaaaatgtgaccaaataattggacaattgcaccagcgaaaattgggggaggcaataaaagagggaaaagtgaaaaattgggaagaaatgggcgaaagcagcaaaaagatggcacttttgaacctttataacggcacaatggcagagaaaaaaagtgaaacaattttagagaaattcgaaagaaatttggaatttttaaaaagggcggaggcacagcgaaaactgggtgaaaattaaataaattaattaatgaatttaaatttaattattctattaattattaaccttagcgtaaattaaaacccaaaaaaatcagaccaaaaattattttatgaatacaaaaacaatgcgaatttaacaacaattgccgaagagaaggacaaatgccaatttaaagagaataattcacaattattccaaacagaaaaattccaagaattaaattcagcggaagaaaagaagagaaaattcagagaaactgaaaaagtaataaaaataaagaaaaataaaaaattttttaaacatttcaggtgaaaaaagaaataaaattaaaaaacggacaaaaaaatggaagagaaatggccgaaataaaacaaatatttgacgaatgggtaattttaataatcaaaattgaaatttattaatgctaatttcccccccccccaaaaaataaaaaataaataaacaaaaaatttcagtccgacgcggcgcactttcaatttccgagtttattctttttgagggatacgcacagcaaatttgcgacaatttgcattttgccggaagaatttgaagaaaaattaatttttggggaatcgaattgtgacgaaaaaacggagcaaagagcggacaaatgttcagacaattcgcttttttgtgctctttgcaaagtcatggaaaactaaataaa

SEQ ID NO: 56536 - DNA, 2151 bp, Heterodera glycines
atgaaagtgtcgttaaatcacttgacaaatggcaaatacttaactttgctggaaaacgaattccccgaggttttgcgcattggtaagtgccaaaaatattttagacaaggaaaagtttctttttaaagatattttgacgaagaaatcggtcgtttatcgggttcaacaaatgctgatgaaccgaagcaactccgagctgtacatcaacaactttgtgctgttcgtcacggcactgttggtcgaccaaatggcgcgtctccactcgcaatttggcgccaccgctcggcccaaagcgtcgcccgcccttcgcttgctggcggacaaagcgaatgccgcggcggaagatgccctccggcacttcggctcgacttcccaactgtgcgtaatgaacacaattttgatctttgtgtgggaagtgaacattgagaaaaaggcggaaaatgtgacgaaaaaagcggtgaagaaattggggacgagcgaatgcgaagagtggcgagtgcagagacaggcgatggccgaggcgatgggcacgcgactcggcactctgatcactgctgcgatcgccgagctgttgatgatcgacaagaccaaagtccaatcggcacttaaataccccggggcacagatacgccttttgcgattggccggcacagtgaaaaggacggaccaactgacggaacatttcgatttggcacaactctttgtgaataatggtaaaaagtcttttaacaataaactatgatcattcgcctttctcagcactcaccaacgatgatgatttctgggttcattatttgcaagcgatgtgccgagccgacaaaatcgagcgaaaaagtcacaaatttggcgccgatttggcggcgtttgtgcgatggcttcggcagaaacttacggtcgaacgccggctcaattctcactttgtgctgatcagaaattacatttctgatcagatttataatccgatttttgacgctgaagaaacgacgctaatgggcggggaggaatttttggaaaaattattttgggggacgaaaaaaatggtggaaaaattaaaagggaccgaaaaaaagagcgaaaatttattcgaacgatggaaattaattgccgaggaaaaaaaagaggcgaaaaaggcaaaaaacggcgaatttgaggcaaagaaacggtgggtgggccaaattcacgcggaggaaatgagaaaactgctgaaaaacggaaaactgagccaattgagcgaaggtaagcgaagaacaaacggaggagggaaaaacaaaaataaaaaacggaaaataaaaatgggaaaaatggaaaaacaaatgggaaattccattttgaaataatttaaccccaaaaaaaacgatgatggataagtaaaaataataattatagtcaataaagcatttccaaattaagttctgaatgtgtttggctccaaaacaattcgcgaaggattactccaattttttgatgtcaatgaaatcgacgaactttttaaagattttaaattaaaagaaaataaaaaaacgcaaattgaaaatttggaggattatttcagtgaggacgaagaaagtgaagaaatcgaagaagaatttgagcagagtgaagaagaattggatgaagaagacgaagaaggagaggacggaagagaagacgaatttgaaggggacgaagcgccaaaaaaacaaaaagaaattgtggcaccggagaatgccaaagaatgcgcaaaaagaatgagtgatcggaaggagggcgaaattttggaatgtgatcagacggaagacaatgcgttggccgatcaccgccaaaatgagtggcgttcggccgttccctccccctcctctgccaatgtttccgctttttctgttttgggtcagttcaaaattgtgtcttcgctttaatccgccgttgcgattccttctcagatttcgatttgctttctctgacggatcatttcgtcaatttgttttgccaaatggacgacgatccgtcgcgactttcgaagatcggactaatgagaaacaccgaaatgagagcgatcattttctattatcggcactgcgttgacggactgttcaactttggccagttaaagtgggaaaatggcattttcaatgaatggattggcacttacaaaaagaaatgggacaaaataaa

SEQ ID NO: 56537 - DNA, 1009 bp, Heterodera glycines
atgtcttctccaaatgacgtcgagcaaaatgaggaaaaagggccaatgaaatgccaatcatttcgatggcattccgatggggcggaggacgaatatggacgatatccattcactgaatatccgtaaattaacaaaataagcagattaattatgtgaacttatttttagaaaaaagcgccaaaaaattttaagcacagttttggaagcgatcggaaacactccgatggtaagggaaaagcaaagcgaaatttaaaaaagaaataaaaataaaatgctttttaaaggtaaaactcaacaaaatccaatcagaatttggcattgagtgcgacatttgtaattcgattaaaaacataaaataaataaatccaaatattaaattactttcaaagattgcaaatgcgagtttctgaacccgggcggctctgtgaaggacagaacggcacttcggctggtcgaaaatgccgagagagtgggccgacttcgcgcgggaatgaccgttattgtgcccttctcgggcaatgtcggcatcggagtggcgatggtttgtggcgggcattagccaaaatcccttcgggggaaaatggcacagagaaaagtgtcaaaacgaatgataggcgaaaggagcagcaaaagttttatatacgtgactatttttatgtgtgtgctatccgcggctatcgctgcgtcattgtgtcgcccggggggacggcgaattggcaaatcgaattggcgcagagagcgttgggggcgcgcgttgcgagagcggacgacgccgcgggggacgacgaggaaaagtgccgaaggaaggcacggcaaattcagcagggcattgtcaattccgttctgttggattatgtccgttttggggaccaaaagaggggagagattaattttccaacaaatatactgcagaacgaagccggcaccgcaatgtgccattttgacgggacggcggaagagattttggacgcgttggacggtgccgtcgaaatggtggtgatcggagttg

SEQ ID NO: 56538 - DNA, 836 bp, Heterodera glycines
atggtatttgaacaacgaacaaaacaaacgaattttgccgcaattaatgtcaaatttttatttattttaatttttttgatttgtttatcaaattttgtgttaagcggcaaaaaccaatggaagaagcaaaacaaattggaagaagaaacggagcaaaaaacgctgtggaacattccgccaaaacaaaaagtgatcgacgaaaggcaccgatgccccgaaaaagaggggaaaaagcgaacggaaaaagcgacggaagaaaatggtggcatttgaattaaatttaaatttaaaaaaggctttttctatttttagacgacgaaagaattgaattaatgaatatttttaaaaattttattcgcaatgagagcaaaaataagagaacggaaaagttgaaaatgcgaatcaattcactaaaattggttttggagcggacaatcggcggaattttggcatttgcgcgaaaaattggcacaaaaaatgagcaaaaaggggaatttattgaggaaattgaaaaatgggagaacaaacggagagaaattgaggaaaaagcgggccaaaagaaaatggacggcaaaatgaacaattggttaatgtggatttgcttaatgtacgaattgggcacaaaaatggtcgaaggaatggcaaaacacgcggcggcacaaaaaggcagcttaatggtggaagcatggagaaaatacgcgaaggaaaagcacatcgcggacattctcaaagtgggagggggaaatggacactaattggccaaaacaggacaaaaaattaaataatgagagttaaataggttaattaactaattgtccaactgccaaattaataaa

SEQ ID NO: 56539 - DNA, 1867 bp, Heterodera glycines
  unsure (1)..(1867): unsure at all n locations
cattgcttttcatgccatttccgccgccattggcggcacgcctttggtcaaattgcagaggctgccgagggaagacggcattgaggcggaaattcgtaatgaatggcatataatcaaattggggatgtatcagtcaattactattactaattgagcatcgcttcagtggtcaaatgtgagtttttaaatgccggtgggtcggtgaaggatcgaattgctcgtaaaatggtcgaattggccgaagcgaaggttggcaccccaattttttgggaatgtccgtcccgatgggtccgaattacctcagggcattctccgtgccggccaaagtacgatcattgagcccacctcgggcaacacgggcattggcctggcactgatggccgccattcgcggctaccgctgtatcattgtgatgccggagaaaatgagctgggagaaggagtgcgttctgcgcgcgttgggcgcccaaattgtgcggacgccgtcagagaagggatacaccgatgcggacagtcacattggggtggcattgcggctgcagcgggaaatccccggggccgtcattttggaccaggcaaaagaagcgggtggatggggaaacacgccacgggggagggtaacatccgcagaacagtaagtaatgcaaatagggatacggtatcaaccaaatagggatacggtatcaaccaacgaaaaatgatgggaaatggcacgggggagggcgaatcccttacagtaaacgaggatatataggcaacaaaagcgaaaatattagatacattaaacagagtaatttcagtacaggaatgatgggaacccactcgcccattatgagggaactgccgaagaaatcatttgggcatgcgatggcaaattggatgccgtggtggtcggcgccggcaccggcggaacaatgacgggaatagcgaagaaaatgcgacaaaaacttccgaattgcaaagcgagtcataattaaatgcattcatttgagtttggcaatgctttcgctgttatgtattcccttttagatcattgccattgatcccgagggttccattttggccaatccgacaaatcgccaaacgcacgcctacgaagttgagggcatcggatacggtagctcaaacgatgcattagcatttgtgccacgaaattttttgcacaaataagcaccaccaacaaatttataattatctgaagttatgcagcgggggattttcggggtaataattatgaatttcacaattattggcctaaatgggaggctatgcgatcaatcagttagttaattaaaggccatttttaccaagtgtccaattgtcccactgttttttgtctgattttctccctatgccttcccttttccgccaaattttgctgttttgccggttttaccattgtttaactaatcaacctaattccgttctaataattacggcaattagctttgtctgttcctttgacttttttcatgctaattgtcccttaaattggtccattctttgctcattttccctcttaaaaagactttgtgccgtacaccactgatcgcaatttggtggacgaatggatcaaaacgaatgatgcgaatgcctttcgcaccgcgcggcgactgatcagcggggagggattgctgtgcgggggttcttccggcgccaatgtttgngcggcgatggaagtggcaaaacggatgggcagagggaaacgcgtggtcacaattctgccggacggaattcgaaattacatgtgagcaaatgaagagaaataattacaattgttaattaacataattaggagcaaattcatcgacgacgaatggatgagagttaagggatttgaaggaatttgaaaaaggggacagaaaaag

SEQ ID NO: 56540 - DNA, 1190 bp, Heterodera glycines
atgaaagtatttactgttgggctggaccagaaaccgccgctggaggaggccaaggggagtccagaaaaatcaggtaaaacgagcagatagcaaggagcaagcagaacatgatttttttgtcatttcaacaagaaatttcccaattttctgaaatcacaaaatcttcgaaataaccaagaagctctatcttattcgccttcaaaattttatttatgaactcctatttaatccaaattcctaattacggtgtccattacaatacctaccgtattcatttggactccatttctccctgtctaattaattttggctttgattatctgaagtttaccatttgctcaaccattagacacgcctccgccccgctactccaccaccgaggcgcgcattccgcttccgctcgggccccaactgccgcgtccgccgttgccgccccagccgattatcatgcgcaaggcgcgcggctacaaaggcattctgttggtgctgatcgccgtctttttgatggcagcttttgcgctcactttgtccgaaatggcgtacaacagacaacgcgaggagaacttcttcaagctgcgctggtcagtcaagtaaagaaggaacgattctgagcttaagcagttttttttgtcagtcaatcggtggcaaggcgtacaaagcataaattgactaaatgattgggaaattgagagagagagagagagggacggctaaatgttttatgaaatgccaacaaactcttttggcactgtttcaatttgggcatttttcagtagaaatggcttatcatattttgtttattggtttgatattgaatcggtcttttgcttgagcggatcttcactaaattaaacctacttcgaatcttcgtttctttaggcttaagtttcctgccgctaaatttcatttgatggttttttatctcactgatcagtttatttccgttttgaaacaatattggactgatcattggattagtagggctcggatttttaagcgcaacaaagtctaaaataaggccgtaaataagggcgaaaaaatcgcgaaataagggcaaaaaagttccaaatttaggggtatacttttttaaattgctgttttttatatgaaaataatttcagattaaggcaaacaaaatattttggtcgattcttaggggtgcatttttcgtttttattgcatttttgtta

SEQ ID NO: 56541 - DNA, 555 bp, Heterodera glycines
atgggctatgaaaacgccggtccctacgactattaccatcgagcatcatcggctattggcgagaaatttgacagattgttcagcctagcaaaaaggtaaactgacttttaattgtttttttaataaaaagtttgctatctgggttactgtaactgaaatttctgtaattgacaattgcatgtaaatgacttaaatctctgctggtatgtagcgaatatgcattgaaaataaatattttcataatcctttggggaaataaaacacagaaaaagagagtgtggcataaaagttatgacaacatatcaatttataataataacctataaaattttaagcttttttattttaatttttgcagtaatgaattgccaccatcgctgcccatttcggcgtccatggaccgcgacccgtccaccaccagcacaacatcggcaccggcacaaccgtcagagcccgtggtggccatcgactccttcccgcaatttatgggactcaacggccgcagagtgcaccagccatttggaccccaacaaaactccgtggaggtgtgaaata

SEQ ID NO: 56542 - DNA, 1278 bp, Heterodera glycines
atggagcaaccgatgccacaaatgttcggcagcaacggcatgaccaacagcgggccgttctcccaggtgcgcgacgcacgactgcagtttttgcgcaacatcctgcagaagatcaaacagcacgcggaggacattgggtaaagggctgcacgagcgtacggttgacagttgggtctaccgtacccatttgctacttactatacatactgtggtgcatttgagccgaacccgtataaataatctgtttatgattataaatgatcaaaccaacggcccactgttgtattcattttggatacacacgcacaaattaccatgaaaaaataaatgatattaaagttccccttatagaatacagtattttctacaaaatgtaccatgctttgtgtctcattttgacaaattttccacaaaaaatttaccgtatctcacttcaaattagactaatagatattttctaaaatatagaattaagcacgactcttttaatttaatttgcagctttgacggcaccatgcaagtgtccatcattgaggtggagccgcaaaacggtgccgacggcgccgagacggctgcccaagagaacggcaacattaacaacaacaacaacatttggggcccgcaacaacgtggcgtcgaaatgggccagcagccccagcaacagcaacaacagtcactccccgctcagatggcatttccgatgccgcaacatttcttcccacaccctcgcccactgattgacgatttcaaggtgggcagggcatcatatagccattggcaaagatttttgccaagttcatcggaggatttttgcataatttcggaaatgcactatttcaaattttggcaaaaaatgccattttttaatttttaggttctatatactgaattttaaactactccaatgaaatgaattttttaatgaaattggtttaaaaattgaaaaatagataaggctttatattttatagtaaatatgggacagaaccataaaaatgcaaatggtccatatacaaaaaataaaaaaaatgttaatgaatttgagaattatttattttttattttttgaagaattcgcgctcttttctcgacggattcggcgagttccatccgcccagctttgtgcaacagcagcagcagcagatgaacaatcatatcacggagccggaggagcgaccgcgcatgtttggcccatgggcacagcagcagcaaatgccgaatatgccggacgagttccaacaacagcaacagcagcaacaacaacaacaacagccgaat

SEQ ID NO: 56543 - DNA, 689 bp, Heterodera glycines
atgaacctccgcttcccgcccattcagcctccacaggtgtccatcacaaattgccacgctttatcatttcaattctctaaaaattattaaaaaaatgttttaataattatttaatattaaaatttaaatataattaaatgtcataaaaggttaacaatgaatgggcccaacaacagcaacagcaacaaaatgcgttgcagcttcaacaaaacggggccgctgcgttgccgcgcccggccgcgttcgaccgttggaacggtggcccaccgccatcatcttccaacaatggttttttcgtgccaccgccgccgtcgccccaattcgcgcaacaacagcaacaggagcagacggagcagcaacaacagccgcaaccgcaacaatcagttgtccagcaacaacaacaacagccacagccgcaaccactgcagcaacaagttgtgtcgggcggggattggcattcatttttagccacaaaaactcaatcgtccaaagaattgaaacaataaattttgtccaaatttaccttgaataatcgggccgtttcaatctgtggtgccaattttaatagaaaaaacgctttgtagtaaataggcacttcagactctaaagctcctcagactgaaacgaactgactgaaatcggccagattcaaatgaccccatcgaatcttgaatactccaaatttaaaa

SEQ ID NO: 56544 - DNA, 2005 bp, Heterodera glycines
ctgacaagaccgaccccgacaacagcaaggacgatgatgataatgatgatgatgagaacagcaacgccaaccgtggcaccggcacaatgttcggcgccggtccgccatccgcccaaccgtcggacattgttaaatttcccactgtgactgttgttgaggcggcaaagaatgaacacgacgatgctgtggaggtgcatatctgattattaaatgaatgccataaaatttacgacgatttttccccgtttgccttaggcaatgatcgatgggtgccctggtgttaaacctatcgattattgttcgagagtcctggtctcgacttccttgatcgggaccgacactttttacactatcccctaaagaattttaagccgaaattccaacataaatttctggcacccgcttacatctcccctgctaattacttcgtgtacgggttccgcccccccccccccccctcccaatgtaattgcaaccggcaaacgagttcaaaaacctggacaggccaaacagcaagccgacaattgcaaaaatatggaaaaaaactattgaatacttttgcagccaattcccacctcgttgggcactgaacagccggcggcaccacccgctcagcccacgccagctgcggcaacacctcaagttcaagcagcgggtgcagctgtggctccctcccaaactgagcaccagcaggagaagaaggaggtgtggcatgtctcccatatacctttcatagataattaaatcgaaaagtaatgaactaattaacccagccactgtttcgctgaaagcgaaatttccgtgcactaatgacatggcttttcgttcggcttttctttaatcatgacgctaaaatattatgtttaaaaattgctttattgtttcatggaaaatttaaccaaattttttatttcgttcaattcgcattgaacttcgcccaatccctgaaaatatgattttctaaaaattcatcacatttcaaaaattaaacagcagtccgccgatgagttggttgaggtggacgcaccgccgcagccgattgtgccacaacagaacaatcagccggcgcaaccacagcaacaacagccgcagcagcagcaacaggaggagatgaccaagacggagcaggaacaaccgcagctgaaccagcaacagcagccatccccgcccggcatttcgccattccaacagaaatggttcccggaagtgccgtccgtgtttttccaggtattattttttgaaagggactaaaagatggcatttttttagaatattctttaaattatgtttaaataatttatctatctcattaacggatgcgttgggtgggagcaaatgaatgaaaaagagaagagggaaataaggaatggaccaccaaggaggaatgtaacggaattccgacatatttggctgaattttttttggggcacggaatttcgacttccagagagactacggtagagagagagagagagagtggaaagaaaacagacagtttaagtgtgtggcgtttaacgggagaaatagttaggcaaaacggtagagagaaaacagacagttagaggaatgccaactcttccgttaatggggtagcacccaaaaaataataacaatcaataatacaataattaattacctaacttattttatctttgtaaatctccgatccctaacacttaatttatcagttgataaatgcttgatcttaaccaaatgttagcaaaaacactccttaatttagtgctagcttagcttttttcgtgctaaaaatttgtcctaaaaatgcttttaaaaatttcagaaggacaattcaagagaagaaattgagaaaactgagaaagtgttcgagtcaatggtgcaaaatatgaagagaatgattgggaaaatgttcaaagtggacgattctgactccacagaaattgtccaggttaagatcaaacccatagaagcattttaattttattttcaaaaattctgaagaaaccttggattggccaaagataga

SEQ ID NO: 56545 - DNA, 501 bp, Heterodera glycines
aaaaaaaataattttgtctcaaagtgccaaaaattgcaaaaatttaacccaccaaaaccccttttatattttgaaaatgttaattctattgttcaaccaccaaaatcacaccacagtaaatgtgtcaccgttaaagtgatatgcatccattccttcgttgaattctgtgttttttttttaaattttcccggatgctttggcataacgtcgtcccgtgttccccgtttgaaaatggaattgattggagctgatcagaagttatcagcagcaggacagtaaatccgcacattagctgctgatcacttaagactcggctccctctcccctcccccctgcttttgctctctgatcgcaccgttgtgagcctcgaccatataaattaattagcccataacacactcactaattgacccaaccaattattattgctcgtatatatatttggttattattatatttttcattttttgtagcataaatttttctgaaattattttaaaa

SEQ ID NO: 56546 - DNA, 62 bp, Heterodera glycines
gggacccacgcgtttcggcgctcgcgtttcggcgctcccgtttcggcgccagctcgtttttc

SEQ ID NO: 56547 - DNA, 933 bp, Heterodera glycines
atgggtcgaaatggatatcgggttcgtgattctgatcagcaaaacggatcatccgtcccgcagttccgtcccgggccggttccgtaaaaagtacatatttcaataaaaattttatataaaacaaagtacaataaatacacgacttgattgaagtttttggtgtacttcgtctttctatgacctttttacggactttattctcatcttctcacaatttgttttttcttcatttgtattatgtgaatctcttttatgcaattacggtttttgttttgtgtttgaatacaattctgacatgggttcgtccacgtcgcccccgcaaaatcagtattttttcttttcttgcatttataagattctgattaacaaagcatttttaaaatggggcagaaaatgcgacgacgacttaccgtattcattgttctggtcgtactgctcgcgtcatacggtgggtgctgacatttttgcacttgaatattattattgactctcagtttagagaaaaataaattttaatttttaaataaattaaattaaattgttccttcggcaggtgtttgtgcggaaggcaatgcgactgctaatgagccgacgacagtttcatcctttgacacaacgccaacggaacaaaatttggcggaagaaacgaaaagcagcgaaagcacaacacccaaaggagaagaagccgaagtgacaacagaagtagcagtaattaggaataataataatggaccaaattgttagttaattaattaatgccgaaaaattaaaattaaggcaaaaaatgaaacggaaatcggagatgacaataaatcggcacaatcagagcacgaaaatgagcatgagaagaagccgaacaacgaaatgagcagaatcaacgggggagacgaaacgaatgaaagggaaacgaataaaacggagtcagaggaaaag

SEQ ID NO: 56548 - DNA, 2790 bp, Heterodera glycines
actttgacgggacaaattggcaacacaaagtaaagacgagaaagccaaaagtcccaatggtaaaaatgatcagcagaaagagctttttaattgttaatttagtaggcgaaagtgaaaaaaaaaaagccaagggtcgaacggagaaggggaaagaaaaagccattgttttcccaacagaaaacgcagaaaatggcacaacgccagccactccagaaaaggcatctttggcacttttccgagattaattacaatttaatttagcctaacattggcaatgccaacgaaggagaggaggagaaaatgccacagccggaacgggcacagatcactcacatgagccgagagggggacaaaatgccagagaaagaaaaagtgccaaattcaaaaatcaaaatagaaaattaaaaatcataaattaattaggcgaattccaactccgacactgctgaacaacaaccaaagcatcagcacgaactcgaaattggtcagttcagaagtccgacggcggaggcaaacgacggaagcgaaggattcgaagtgataacgcgagaagagaacggaggacaccaaacggaggagggagaagaggaacagaaggccaacgaaggcgagaaaatgccaaagtcaagtggaaatgccgaaaacacaggtcaaggagaggggactcagtcggctgcgaccaccacaacgtcggcgttggcatcgacgacaacgacaagcgaaactgaaacggcaaaacagacggagcggacgacagagcaaccacaatcgtccccaagggaagaaggcgcgggcggaggagcggccaacggacccgcggacacagaagtggacattttggcaccacggggaccacccgccgcgggtttgacagaaagacaaaaatggacaaattaaaaatatatattaattacagatgaaacagacaaagaaaaaacggaagtgccgttgttacccgcggaggagaaaccgtcgacgacggcaccgacagaacaaacgcaaacgacgccaaagacaacggaggcggaagaagaacaaacgacgccgacgccgacaacaacggcaatttcagcgggacatggcgtcgaaacggtggcggaagaaacttcggaaaatgcgcaaaaggaggcggaagaggagcaaacgcaacgaggcaattagaaacaatgaaaagcaattgaaattgaaatgggacaattgggtaaaaagggggggggggtaattaaattaagcgaagggtcattcattccgacaaaataaagacacataattaaactaataatggtaattaattaaggggatttgcccatcgacgagacgacaaaaacgaaaacagaagcagaggaggtgaatttgttaaatttaaataaataattattaatataaaatataatgattttgccaatttaaaaattcgttttccatttttcgaacgaaacgacgccaattccaacggcagccgaagaaggcgaaaagggagggaatgaagtgaccgaaaaaagcattgagcaaacgacgggacaaagggaggacgaaacggcggagaaacacggcaaaaacagcggaaaatggcaaataaaacgaccgttcgcctcccaattcagaattggaactcgcccgagccttccgcactcccttccttttgcgcctctccaaaatcgaatggcgtgccgaatttggcgatctgtcgagcggagcggcacggaagttgcaagagcaaatccgagcagatgtaaggcgattaaaccttcattttaactcccgccggaataaatccttcccatttctcagctccattccgcactctccgccgccattggtcccggctttttggactatcaaatcgaagcattgcaccaaggctcagtgattgtggaggggcaattgttgagccgagaagagataagcgatgcccaaagtgtggccatggccttggaacaggtgccattgagaagaatttgaaaataaatccgagtttatttggttacttcgcttaggcaattgtctcccgaggcggcgaattgggcggaaatgcggtggacacggaagggatcagtgtggcgggtaaccaactagcgatcatctgctgatcagcttatgattttcaaaattcacattttcaggccttcccgcccacgggccaaatggtaacggagtggcagcgaaccaaaggcagcaggaggaggaggcaagccaattcggaagcaaatgctcatttctcggctttgaaattcaggccgagagtaccggctacatcatcggtggtgccgtcgtcgtcggcgttctcatcgtcgtttttgccatttttgccattgtcgtttttggggtaagccatgggaagaacgattttgacattattccattaaaaagaaatgcttcattcgacagatgaacaataggcggaacaatggcactttgaaattgaaggaggaaatttgcatggtcgaaaatgggaaagggacgcaagcgacggggcaccgattcaccacaacggcggatggaaatggcgtcaatctgtacggactgactgaaattggcattttgagtgattaatcaatgctttagcaccggactgaggacgacaatgcccggcacggacagtgccaccaacggacaaagcatcggcggaaggctcaacggaatgaacgggcagcagcagccgatcatcctaagcggctcgcaattttccactccgtcggcgtacacttcagcgaacaacagaccctgaggggtggcgatcggatcgcccgctcggtgattgatcagcggattgtgatctttgaactctga

SEQ ID NO: 56549 - DNA, 304 bp, Heterodera glycines
agaaagagacttaataacatccaattaaaaaacaaccatcaaaaacaatgaaattcacaaaatgccatcgctttgctcttctcctctccgtgttcatcggctcaatggtcgtccaacggcacagccaatgcaatgtaagcgaagaagcaaatcatttgccaacattgattgcccaaagtggaaatgccaatatgacatttggattttgattttaaataatgccatttgtttaggcgtatttgcccgtcgcgcaaacggattggcgcgcgcagaaattcacgccacggaacgtgcaccactcgtg

SEQ ID NO: 56550 - DNA, 923 bp, Heterodera glycines
atggttttggcgcagacaatttgcatgggaaaactttgggaaggaagcgaaaaaaaacattcgcatggaattggcaatggccgtaattacgccgacattccccgagagaaatgttgccgaaaaagtgaacaattcgagtgcaaaagtcctgaaaaatgaactaaaaaaaggcaaaaaataaaaaatgcaatttaaaaagaaaataaaaattaaatcttttaattttaatacaaattaaaaaattattttttatagcattggcgaaaataagaaacaaaaaagacgaaaatgcgatcattggaccaattcgaatgaccaaattcagtgaaaaagtacaacatgattgctatttgctacattttctttattttttcattttcagtttgaaaatttcgtcgttttcaaatgctttggcacttcgtttaatgttaaaaacttttgcggatttgtcggaaaacgacttcgttacgagctgctcgaatttgtcgagaatcctttggccttttgggtcgatttttgccatgttttcccgaaagcgattgctttgtccaaatgtcagaccgatggatcgaaaatatgcgaattggcatggatcgtcggcattcaaatggcgcccaatcagaaggccaatggcacatttaagagaaaactgaacgccaagctgagcaagaaattggaagcgaaactccaaggggactttgagaagggatcctttcacaatattcagctaaaagcggaaatggcctcgggggaaactgtgcggaattggtaagaaaattcgaatttggcattttttaattgaaaaaaataataatttaggatagccaaagaagagagagaagaagatgaagaagaataatgcgattttgcacaaatattttatttgattattacaattattattaatttatttccacaataaa

SEQ ID NO: 56551 - DNA, 370 bp, Heterodera glycines
atgttcgccgcgtcgtcgccaccgcccgacggcttccgtccgctgtttgcggaggagcgacgcgacgcactcaaagagcgaccgctgcgcttttggagggattgggacgagcggaggagccgaattatgggccaagggttagggcccaaaaacgcgtgggaagagcaaattcagtggacagagcgcggaatgatgtggccatatcccatcgacaacgattacatggcgggcgaggaggaaaaggtaaggcaacggaaggggaaaaggcgactgaattcgaatttactcattacccaccagtcaggtccatagccacggcgtgggaatcccccccccccaaaaaaaataagatttccaggaaaacatgtaa

SEQ ID NO: 56552 - DNA, 1245 bp, Heterodera glycines
  unsure (1)..(1245): unsure at all n locations
ttggttctgcgctcatttccgtcccagaaactcgtcactttacgccangcacagtttcccgtgnngaacggaaaaaanggaggcaaaaaaacgcctcaaaaaaaagacaccgcccgccccttcccccntcaatggtcagctgcggcacattgcgctttctgctggctgagtgccgtcgtgagtacacttggctcgactttgtcggcggagggtacgcgcaaaaaacattttaccaattgtaaattaaattttattggatcgaaaagttacgctaattttaattgcgatttttgctgtcatttgggcaattgttaccatatatttaattgtccctaatcgaatgaggcgattactatcgaattggttcgttttgcacagaatgcaactcgagttcatggtcagcatcgacttcactgcctcaaatggcgacgttcgcttgccaaattcacgccatttcatcgaccatttgtgcctcaaccaatacgaaattgccattcgatcggtgttggaaatttgccaacattacaacgactccaagcagttcgaggcgtttggattcggcgccaaagtgccacccaatcagacgacggtcagccatttgttcccactgcaagcgaatgcccaacccgcggcacgtggcgtcgacggagtgatggacgcctatcggacgacgcttcaagtgggcgggagggcaaaaaacaaaatttttaatataccgtactgtaccgtatatttgacaccatttccccttcagagcgttttgctgtatggccccacttattttgagccgacggtgcgctacgcctctcagaaatgcgccaattttccacgcgatggatcacgatatcaggtgttgaaagttgtgcaaatttttgcacagatacagtacctattgggtcatgcaatttgttaggggtatggtaattgtaccgtattgtaagactcgtttatttacttatgtgctgttgccgttaagattctgctcttaatcacggacgggctcatttacgacatggtgaagaccaaattggccatcattgaggtgcctttctccgcccatttggatgccaatttgccacttttttttaattttaggcttcgtcactgccattgtcaatcattgtaagtgatcggcttcttgtcctggtccttttctcgacctgttctttgggattagatttcctttttcagataattggcattggtgacgaagacttttccaaaatggacgaatggacagcgacg

SEQ ID NO: 56553 - DNA, 1313 bp, Heterodera glycines
tcagcccgacattccgcacacgcgggtggagttaatgctctcggccaggtgagtaccgccggagagagtacgaaaaagtggccaaaaaattcacagggatctgaaggacaaggatttgttgtccaagtcggacccaatgtgtgtgatttattcgctggtgccgggcaaaggcggcacggggcctgagtatgtggagatcgggcgaacggaagtgatttggaacaatttgaacccgcgatggaacaccaaagtgacgctgaattacttcttcgagaccaagcagcagttgcgcttcgacgtgttcgacatcgacacggagaacacgcgcgacttgagcagccaggactttttgggtgtgttctgtgctgggaagagtggtcgagtttgggaacggacaatgcgaagaatgcgaagacagagaaaagggaatggcacgacaattttataaacatttgtcgtggaaattaactccgccgatctccgaaacaaaactcaaatcccaacgtgttgaagcagttcaatgcttttacaactccaattgcgcattggtcacccctctttttcgagtcagcatgtattggcattttgtcctaggaatcgggcgtgcatttagactgatttttcggattttggcaattgcatggcctagcagctgtgcagtaatctaagttcggaccagactgaacacgctgcttttcaggccgctgtgagtgccatttggcggacattgtggccgccgcacacggcgtattgacgcttaagctgaagtaatgaaaaagcacaaattgcggaaagagggcatgaaaaaagtaccaaattttggggatgagccaggccaagagggcaaattgatcatccgagcggacgaagtcgacgagggccaaaaagagatggtgcgcatggtgtgccatgggcagcaggtggcctccaagggcatttgctggtgcctttccgcgagggaccctttcctcgaatttcaccgcctctacgcggacggatcgtgggttttctgttcccattggtcacttcccccacatcggttgggacaggaaacagctcgtctaccggacagaggtccaaactcggacggtggaccccgaatggaagcccatcgaaatttcggtgcggcacctttgccagggggacaaaaacaggtggagttaggctgagaaaagagaggggtcgtctatttgtcacggtgtttatttgtttaagggactttttggtggaatgtttcgactacaaattggccggcgggtgagtcacttttcgattaattatttaaattccagtggaggacaaaaatggggaga

SEQ ID NO: 56554 - DNA, 824 bp, Heterodera glycines
atgtacaagcccttcgtgcgcaatggatttggtcgatggcacgcttcgctggctgtgttcgccacctcggcattctttcacgaatatttggtttgtcatccgccattattctcctcaattaacacttagttttctcatacccttttaggtgtccattccgttgaaaatgtttcgtctttgggcctgcactggaatgcttgcccaaattccgcttggcatgttcacggaccaatacttgaaggtgccgttgaatttgttaataatttgcatcccatttgaacaaatatttaaaaaaacaattacagaaattgccgattattattttgataaaaatatttttaattaaaaaaatgcctccggacaattttaacaaatttcaaaacataatacgaccatttttcatccgtttttccagggcggtcgtgccgggaatattgtcgtttggctttcgctcattctcggacaaccgatggccattctgatgtacgtgcacgactggtacttcctgcaccatcccgaactccacgcggcgcatcggcagaatctgaccattgctcatttttgaattgggtattcgaaatttattatcatgtgtcgacgtttctgagttccttctttctccccatcttctcaccggcgggttggcagaaaaaaatgtgccatcaaaccacaaaccattaattcgttaattatatgccagtggactaatttaatttttcaaatgatattacagacttttaattcctcctttattgctcattaaattatttttgctcacataatttatttgaatgggttctgaatggacggactattgcaataaa

SEQ ID NO: 56555 - DNA, 2240 bp, Heterodera glycines
atgattcgtaataaacttgaaagtctacaagaaagtcggaagaagcgttatttgtcagacatttcaaacacaactgaggaggacgtgaatttgggagtgaaattcgtcgaaccgaatgccgtgagaatttctgacagcgttgaacaaccgaatttgaacgaggctgaactttcaacaatgacctttgagcgcggaaaaatcaattttgggtgagattgtctatggttgaaaggtatgtttgaagcaccgcaaaaaatttatttccaaactattcaggatttagattcacacaccactcaggaaatcgctgaagatgcacaaatcgagtttttctcaattatcttggccgtcttctcctggaatgccaatgttcttcctttacttctctcgaacatatatcggcttgacacagcgccagatgttggatggtgttaacgcattttgagataatccactcaattttcacccaccggcaaccattgtttgttagatttatgcatttatttccaaaaattaaaatttttagctacactcgggacaataattttgactatcaactcggaacaagctatgcggctacccctagagttcggcaccggctcaccggcaccatcaactcttacatggccaaccactgtgagtccacgtgagcagcttgttcaatatttgttgagttcgctatcgacttcgacagcgccttcaggcagaattctttaatcaattaaaccgtttaaactcaataaaaagattcatttacagcatgggaggacgaaatcgttcgggcaccacattttccaattccgccggcactctcaaattgagggatatgcaggaaaattgaaggatttgaaaattttgatgattcagttgtccatgtcccgtaatgaattttattgaatgtttaataaaattattttttcaatgtgtgaagctgagggtgggtctatagagggaattcggatcacataggagccctaaacttgtacgaattttgatcagcaccctttgtaagagctttgaatatttttttgctatttaatctttatatttgggtctagggttaggcaaggggctatataaatgtcgtattggtattcagcgaccccgaaaaccctaaaatagacccattctccggctttctatgagttttttagacttttggacaattcgtgggtttttactcttttggacaattcgtggcttggacaattcgtggcttggacaaaacgtggcttggacaattcgtggcttggacactttgtgggggcgccgaaaattttaaacaaaagtttatctgaaaaaaatgtattttagggaattcatttttgagaaaatttttcaattcttagaggtgcatagatattgttagaaaactaacaaactacccactagacaaagaatacactaacaaagggaaaagtagcggcttatccgtatcttttggataggtagctggggatcgaactatccccagtcgtattcagagttcggaatacgggttttgagctgtagattaatcgatctgcagctaccatagctacagctagggatatgcggatttttaaccttggcattgtgaatatgagcatctgcacagtggagttgacccatagtgctgatcccgcgtgatcccgcaccaaaaatcaaatttgcgggtcccgccgctgcggaattggaacttcaaaattttgcgggacgtataatcccgtaatgattgcggactgggatcccgcaaaatccgggctctagttaaagatatcgtcttcacattttaaaattaaaatttatttgtttatttttgtgatgatgttatttgtctgattcgtatacatttccggacaattctaatcattaataaaaaccaaaagtaggtattttattttggtaatgtcttccggatcatcatcatgcgtcaaagatttaaagaatgggaattctttttgtcaactttgttcaatgcaatttaaaactaaggtgaaatcatttcctagagttctagcaatttatgaaataactaatccatcccagcaactttatttgtagattaagggaggggaaagacgattgactatttggcacttccttggacaaatatatttcaaatttcattcagacacttacggcacacataaatggacggaagcacagagaagtattgtcaaaattgaaggacaaagacaattcgctgaaaaaggcaaaggaaacaacaagcgaagtaaatgccatcaacagcagaaacg

SEQ ID NO: 56556 - DNA, 780 bp, Heterodera glycines
ctagacccaaatataaagattaaatagcaaaaaaatattcaaagctcttacaaagggtgctgatcaaaattcgtacaagtttagggctcctatgtgatccgaattccctctatagacccaccctcagcttcacacattgaaaaaataattttattaaacattcaataaaattcattacgggacatggacaactgaatcatcaaaattttcaaatccttcaattttcctgcatatccctcaatttgagagtgccggcggaattggaaaatgtggtgcccgaacgatttcgtcctcccatgctgtaaatgaatctttttattgagtttaaacggtttaattgattaaagaattctgcctgaaggcgctgtcgaagtcgatagcgaactcaacaaatattgaacaagctgctcacgtggactcacagtggttggccatgtaagagttgatggtgccggtgagccggtgccgaactctaggggtagccgcatagcttgttccgagttgatagtcaaaattattgtcccgagtgtagctaaaaattttaatttttggaaataaatgcataaatctaacaaacaatggttgccggtgggtgaaaattgagtggattatctcaaaatgcgttaacaccatccaacatctggcgctgtgtcaagccgatatatgttcgagagaagtaaaggaagaacattggcattccaggagaagacggccaagataattgagaaaaactcgatttgtgcatcttcagcgatttcctgagtggtgtgtgaatctaaa

SEQ ID NO: 56557 - DNA, 520 bp, Heterodera glycines
gtcacactaaactcaaataacgaacactaatgtttatcaaaaacatgacacacataattgtgtcacactaaactcaaataacaaacactaatgtttatcaaaaacatgacacacataattgtgtcacactaaactcaaataacaaacactaatgtttatcaaaaacatgacacacataattgtgtcacactaaactcaaataacaaacactaatgttttatcaaagacatgacacacataattgtgtcacactaaactcaaataacgaacactaatgtttatcaaaaacatgacacacataattgtgtcacactaaactcaaataacgaacactaatgttttatcaaagacatgacacacataattgtgtcacactaaactcaaataacgaacactaatgtttatcaaaaacatgacacacataattgtgtcacactaaactcaaataacaaacactaatgtttatcaaaaacatgacacacataattgtgtcacactaaactcaaataacaaacactaa

SEQ ID NO: 56558 - DNA, 1067 bp, Heterodera glycines
atgatcataagtaagattatccaaatctacttaatatatttgtttattatattaaacaaagatgaaataattaaaaaattgggattgatagaattatccaaatctacttaatttgttttccattcattcgctgtgtcaattgtcgattgcaatagcttttaccttttccaaatttacctgttcttctttggctttttattttgcattttcatacaaattttcattttttacaaattcttccagaaaaatgcactgacaaagaaaggtccccaagtgtccgcggagtttcggaacccaaatttggtaggttttggtaggtggctagagcacccctgggtccttaataaaagtgcttttaatttttgtggaatgagcttgagtgaagagttatgatgtgccaaagtttttaaattaattaacaaaagaaataattattagtactcctttgcattggtttctagcttagaggcagtgcgcagggcgtacctttttaggtctcaggttcgaatcctctgcatgcaaattcattttacaataaatttctccaggctaattaagaaaaaattcaaataaaaatggatggatttttatgttaaattacgcctcaaacttcgcgttttttaaaaaccattatttgcgtcaatttaaataaataatgttatttgttaacttgtgtttctatggggtgataatatttgaattggtataaaattatatttaaaaaactaaaaatccttttaataattgttttggtgtgactttttgaaatttgattgcaccaggagcaaaatccaaaacaaaccacagacacagaaccaacaacttgggattatatttctcttattatcatcaaagtgaaaaaagcgacactccacgcggcgcttggacggagtaagaaaataaatcggaccgaattgagcgggatcggttttctgacatcagcaccgcaaaagattttcagccacttcttcgacgaggcaccggaaggtgttcaacacggccaaaatcggttatgcgcacgtgaagaaagtcgagtgctaggcgaaggcgaggaactaggaaattga

SEQ ID NO: 56559 - DNA, 1820 bp, Heterodera glycines
atgaaattaccgttaccggtttgtctagtaccggtaccgccggtaaaaatttgcactggtaagaatgggggtctggtcgagaaaagagtaggaaattggtgaagaaggagaaatttttgagaaaaaattaaattttatttcatttagtcatgggattacacacatgcacatatggtgtagtggttaaactttctacctttcatacatatgcttctgaacaattctaattctaaaaaacaggtactcgcgcgataactgaataaaaattttgtatttggaaaattttgtccaaaaatttttatgttctaaaattaccggtttttaccggtaccggtaccggtaccgttttttgcagtaccggtcagtaccggtaccggtttttttgcaattaccgattaccgctcaactctaatgccagataatgttttttattaatttttaaaacaaaatttcgctttaaaattgctttatttaaaaatttatttcaaaactttctaactttttaaattattacgtttataattgaaataaaacttctttcatgctatttgcgatttttttgtgccaatattgcgcatattttacgattgtaaaaatttaattaattttatgtaaaaaaaattttcatgaatatgagtggggggtatgtatgcctcatttgttgtcattatgagttggcatttttgcgtgtgcatcgattttcaataaagacctttattagttttttaatgctaatacgcataaaaatattaaatgaattttttattatatatgtaataattgtaaaatattataaaaattgcaaacaaataatattaaatattttggctgtattcttaataatattttttactttttaaaaaacgaggtttttttttcaaaattttaaatgattttcagaagaaaattttaatgaattttttctgaaattttcgatttttttaacacttattttgaaatttaattacaaataataggatttttaattattataaatatttgtcatgatcatcgtagcatttcaacgctgcttaacatttctcagaaaaaaaactaaattaaacattctgtagactattcaatagggctccctctatctacttttatgctattagtcacaaaatttcatgaattttcgttaaattaaaataagttatagccaaaagattgtttgttatccactctaaaaaaatgcaattttacgaaatacttaaaggaacaactttttatttttaacaaactttttatgaattttcgagctagagaaccatttgaacctgaaaaataatatatgaaaaatgttgcatctaattgctaatcacaaattcattcgagaattctttttatattttcaattaaggattttaggaaatattatttattattgttccatgcttattattccattttggattattctgttcttaaatgtggccagatggggcattctttcaatgcccgaaaaaatggttggaaatggactaaacatgggccaattgattcaaaatgatcaaaatcctaatcaaatagaaaaccaaaatgggccaaatctggaccaaatagcaaatcaaaatgactcaaatctggatcaaatagatctgaatgcgccaaatccggacgaattaatagaaactggcaaacttggagaagttccgattttattgccaaggaaatatcaagaccgaacaatacaagttgaattcattgctcacaagatcatttcggatgcagaaactcgtcaaaaattctttaaaccagttgagctatgaaataattatttatttttttgaaatttatttagatgtaaaaagttaatgaaa

SEQ ID NO: 56560 - DNA, 496 bp, Heterodera glycines
atgttcactaatttcccattgcttttctccgctttttcaatttttctgctccttttgaccctgcaattccctccaaaagtgctgggaatgttttctaattacaatgttttgcctttgtatcagaagaataacggtaaataaattatctatttaatatattaatattttttaatttatttaaagcattaatagctgggatttttaggctttaacggatagtgtttgatgatagaagaatgatttagagcgactttttatcacataaaacacctaaaacgggggtatgcaccaggggtgtgccttgtccccaaaaagacgagagcgagagtttggcgagaggcgagagtccccaaaaagacgagagttggcgagaggacgagaggcgagagtttttcaattttctgtagccttattttttactccaaaaaatcacaatgatcgttcgaattttagcacctattttagcctttttcagaaatttcatagcaaaagtgca

SEQ ID NO: 56561 - DNA, 287 bp, Heterodera glycines
catttgttcgacctcagtaacagcataatatgcacaaatggcagttccatggccaacgcaagtgttatttcaatggcggcagcaatttccaaaggttctcttctctcgcagtgccaatctcagcagacgaccaaacaaagtgaacgtccaaatgatttcgatggtcattttgtaggggcaacagattgtgcgagtcggcagagaacgtacgcattgagcgactcgccggtgtcatcgccgctgaagcaaccggccgaagcggcgggcactgtgaaaataccgaagga

SEQ ID NO: 56562 - DNA, 506 bp, Heterodera glycines
atggcgattcattgtcccgcttcacccatcgctgctccttttcttctcccactgcttttgcttctttcccctttcgtcgttcagctgaatgggatttctttcgtcccatctcccctcggtttcataaatccgttcatcgaaggaaacctccgatttggccccaatggccaatttgaagcttcgccaatttctccaactccgttagtttctcaaacggtgccgggatggcttctaagcagaaatgtcagaggggtaagttagccggtgctgtgtcgaagtgacaaaagtgcgaatgagtggtgatcagaagaggcgggtcatttcagtacggaagagttgttctaatgattaattaattgtttaaatttataattgaataataagctaataataataaatatatttggctctatttcagtttacacgaccacgaaaaaagacatgaccatgtaatattttgataagtttcatacaccataactttttatagaagcacccaaattaaa

SEQ ID NO: 56563 - DNA, 1044 bp, Heterodera glycines
atggacgacctaatggacgaaggagtgaccgacgaggagggatttttccatctgagcggaaaagagagcgaaatcactccgatagagccaaaagtgaacatttatcacgtgaggagcaaaggaaaagcggacgaagaaaggaagaaaaacgcattttaagaattgcaacgacgacgaaagtcttaacccgctgaagaaagtgtgctacaaaaaaatttccatcgacgtgtgttttccgccgaattaattggcactttcccttttaatttctttggcacttttctttttaattgccttcacaattggcactttctcttcatttaattgttcagcttcccgccagttatatcactgatggacccgtggccgaaaaagtgtttccgctgggcacccttaatttggccgggtcgttcaaaggcgaaacgcgcgactgtctcaactgatctgccgaggcgattgatgtaaagagaatggcacaatgaaaggctgaaaggcatttttggccacacaattcttttttcaattttcactcagtcgaataattaatgattctgtcgttggtatttacaaaattatgcgaatttcgtcaatttcgtccgtcggcattcttttgaaaagcgaacactttcataagccattttaatccgcacgtgactttttcgtccatttgtctccccaatttgtcccttccttttccaatttcgtttattttacgaaatgtgatatttttgtgccaatctctgaactttcatcactaaacagctttcactcaaaagtctgttcagtcggccaaaggcatttaattaacagacattttaacaattcgccgaaaaagctcactttaataattcaaaaatggcatcgcttacgccgatggcatttggaaatgaattaaatgtcggtacagtcaaactgtgcaccgtttggctaaagatgagaagccaaaaaagaaaatggaaagtttccgaaaatgacgccgaacaaattaaattagtctgagaagagtttcatgaaattggcacacaaagaggggcgattaataaa

SEQ ID NO: 56564 - DNA, 351 bp, Heterodera glycines; identical to SEQ ID NO: 53910

SEQ ID NO: 56565 - DNA, 423 bp, Heterodera glycines
atggaagacaaattcaaggaagatttgctgcaatatttagtctcagctggcaaagctgaatcggcctcttttcgtttaaatgatcaaatcaacgcacattctgcagatcattcagccctaaagcagcttttcctttcgcttgaaagtgtcattgagcctttgtgagtttgtccaaaggaaatttctctgatcaattaatgggccaatcgacgatatatttaattaagcaaaacccaatcggaagtgatcggactgatcggcactgagttgggctggcggccggtgatcaaattgctacaggctttgctgatcaatggttttgccaccgctgacgtagtgctgaaagagcgcgcactgaaagtgctggccgaactcattccaatgtacacaagcagcgcaattgggcctcactggagcaaatga

SEQ ID NO: 56566 - DNA, 1174 bp, Heterodera glycines
atggccaatgatcaaccacttcaaacggttcttcaatttttgagaaatggatggccagcaaaagtcgctgattctgaaattagtccatattttccaaaacgggacaaaatttttgaagtggacaattgcctactgtatgaggaccgtgtgatcgtcccaacttcgcttcgcagtcgcatccttaaggcattgcacatcgctcacccaggcattgtgcgcatgaaagcacttgctcgacgtcacgtgtattggccgggaatggactcagcgatcgaaaaagttgtgagcacttgcgaagagtgccaactgggccagaaaaacccgaccaaagcgcctctttcgccatggccaacgacggacaaagtgtttcagcgagtccacatcgattttgctggcccctgctcagacggtcaccaatatttgattttgatcgactcattttcaaagtggccagaagtctatcgtatgaatacaatttctgcttatgccaccgtatttgttctccgatcaatcatttatcggctcggaatcccagaggaaattgtttccgacaacgggacccaatttcgatccgccgaattcgccacattctgtaaagaatttggaatcaagcacattttcataccgccatttcacccacaatcgaatggccaagtggaacgattcgttgacaccttcaagcgatcgatgaagaaaatgtccaaaggtggaaaggattggatcgaaaagatgctgttctcctacagaaccactccccacgttgccttaaatggcttttcacccgatcaattatttttcggcagaaaattgcgcacgaaattgtcgctcgttcatccgaatggagaaaaagccgaaaattttgatcaaaactcattcaaaaagggacaatcaaaatacaccgacaaaatggctcaaaattttgatcggaagcatggatcaaaagtgatcaatttttccccaaatgatcatgtcctactgatcaattaccgcaacaataagacggagtggctccagggaaaaattgttgaaaggcttcacaattcgcccacatatcgtgtttatgtgcctgttctgcgtcggcttgttcatcggcacgcgaatcagctcaggcgacgacatcttttggaagacgaagccagaaaaagaggcacctcaagtcgaacagccgccgccg

SEQ ID NO: 56567 - DNA, 1328 bp, Heterodera glycines
ttaattaatttcgtgcagtgatgaaatgcccttatgagaatggctggaggggatttgtccgttgggtgccaatggccggggtcgaaagatgagtacgaacttcaggacgcaattggagttggtgccactgcgactgtgtttaaggtgaggaggccattgctattggaaaggattggacaaaactggttaaggcattctgcaagtcgaagaacgaaatgtgcgccataaaaagcataaatttggaaaagtgtcagacttcggtggacgaattgtcgcatgaaatacaggcgatgtcgctgtgttcgcatccaaatgtcgtcaattactacacttcctttgtgtgttttgggaatgaacgcccttttgccaattgtcagacaaagtgcccataattcttggaccaattgtccgttttgttatccctgtctaccatggatagtccccttttcttattcgtaattttcttctaatgccttaaaattgaacctttttaggtcgtcggggaggaactttgggtggtgatgcgtttgttgaactgtggttcaatgttggacatattgaagagaaaaataaaggcatggtccgtcattattttccgagagaattaaccaaattctaattaggcaattggcaaagaccaggcggcctacggagtgctcgacgaagtgataattgcgacagttcttaaggaagtcctccggggcctcgagtacttccataattctggccaaatacacagggacatcaaagcgggtcagtcattagctgtttaggcctacttttccagttgcttgttaggcaacattttgttggccaacgatgggaccgtgcaaatcgctgacttcggagtgtccggttggctggcggccagtgggggagacctttcccgacaggtgggcatgccgccgtttccggacttccgatgtatgcccttaagaaagttcggcacactttcgtcggcactccctgttggatggcccccgaagtgatggagcaggtgtccggttacggtcggttgttcagtcggtggtgtgctggttgtttccaattcgtctcttagatttcaaagcggacatttggagctttggcattctgtgcattgagctcgccacaggcaccgccccttaccatcgctaccccccaatgaaagtgctgatgctgacccttcagaatgacccgccttcgcttgagacgaacgccgaccgaaaggagcagtacaaagcgtacgttccctttttgggtgggaaatggaaattccaattttaagatacgggaagagcttcagaactgtgataaaggactgtctgcaggtttggaacggagcgaca

SEQ ID NO: 56568 - DNA, 638 bp, Heterodera glycines
ctgttgccgacacttatgctcgcatttcgcatggattggagaaatttggccaattggaggctgcgagtggagagaaggaatttgggcaatttctgggaaaggtcacaacttcctttgaaaagctgaagaaagctgaggcgagggttggcaccgacgaggaattgaaggaggtggacacgttgcgttattttttgggcgaaacgcaagcggccaaagtgagttggcttaactcatcatcccccaaatgcggtctaactgttaaatccgtggtcagaacctgctctaccgaaggacgcgatgcttggcaaattacgaaacggcaaacaaaaacttggagcgctgtcgagcacgaaacagagacattctgaaggcggaaaatgaacaggccgaggcatgcaagaagttcgaaatgatcagcaaattggccaaaacagaattgacagagctgaagaaggaacgcatcgcgtcattcaagaagaatttgtccgagttggccgatttggaggttaaacagtcgaaggtaatttaccttcgagactgaaaaaatggtcaaaatcggagaaattaaggcaaagatcgtaatccttcagtctgcaatcgcagcattaaacgaaatgattggagcacaaaacaattga

SEQ ID NO: 56569 - DNA, 1512 bp, Heterodera glycines
caaatggaaatgtgggattttcagaaataatttgtgtaataaaattgaccaggacactgaggaaggcaaaaccgtggaaactcagcacccaattgttgtgaacatatccgatgctctttcggaacgtgagaaggtattgaaaaaacatgcaacaattcgggtaatggtaaagaattgtggtccctattttaactttttattttggactaaaattcagtttctgggggttttcaagggtgctgattatgaatctgaactcggatttgcccaattccggacccgaatacgaacaagaagttgaaaaccaaaatataagttataattttggcgaaaattgcgcatttttacacaataacaatagaagcattgctttacatcaaaaaaaagttgttaaatgattagaagcatttaccccaagaaaaatgtaatccttggaaaaaaaatttcaactttttgttcgggtccggggttcggaatcattgcccaattcgaaccatggctatcaaatatgcttttttagacttattgtcaggtaatagtacggagccacccccgctcccctcgttcaaataaattttttataaatttacggagccgagaaaaattcgaccaaattcgaaccccgaaccggactcgaataaaaattcaattttctacaaaattaaaaattgtgcaataaagtacacgaaataagacggaaaatacgcttctgaaagcaagacaaatatttcgtacatttaaaacttttgttgcatattttgttatattgaaattcgaattgtaatacgataaaatgcttttaggtcaaatacactgttcaaacaaagacaaatgcgcccgaatttgctagggtggaaatgtccgttgtgagagagcatgacgaatttatttggctacacaattgtctcgaagacaatgaggaatacgccggattcattgtatcatgttgacattgtctcctttcctcccgtctcataatacggtttctttttttcagattccccccgcaccgcctcgacccgattttgatgcatctcgcgagaaacttcaaaaacttggcgaaggcgaagcgacgatgacaaaggaggaatttgtgaaaatgaaacaggaattggagcagtgagtccttttttgtgttactttttaatttacttaatttgtctgtgcatttcaccagggaatatttggcaacgttcaaaaagactgtcgcgcttcatgaaaagtttttgactcggcttgctgctcaccccgtttttcaaaaggaccaaaactttcgcgtgtttttggaatatgaaaatgatgtaagaaatctttgttttcaatttactaattatttgcaactttcgtttaattttcagctctcagttcgaagtcgaaacaagaaagaaattgttggttccattttcaaaaggttcactcaaacggccgacgaagttttcctctctggccaagtgctgtctcttttttcgtttttgttttttttgtcattcgccttaaatgcagaaaaccttt

SEQ ID NO: 56570 - DNA, 1871 bp, Heterodera glycines
atgagtgccaccgtgtgctttctctccgggtggcatttgctgcagggaaacaccgccggaattatggcaaccgacggaccgcacacggaaattggcgtcggtgagcaacgaatggagtcaagtcaaatttacttgagttgaggagaaatatttcggattaatttggctaaaccgactacgtacacctttttcttgcgttttgattttgctcaaactgtcccttttagcacttctttgtctctcaactttgcttctgttcgcttatttcgtttggttgggcgtcactttcttttaccatctccgcgattatcgttcatggcaagtgcaaaattgggtcagtttgttatatgagtgcactttctgtcattttttatttcttgtttttgcccaatgcattgtttcagaattatacggtggtcgaccagctcagcatggaagagtcgatgatggtcaacgggacgagaagcgtcgacagagggcgacgccgcaagcagagacggacgaggagcacccgtcgattgtgagtgccgtgggccttcgcggcaatgccattgctcgccctctgtcactctttgatctctctgtctgtgtattggaccgcaatttccctcttttcccacatccgcgcaatttttaacaattataattattttgtccatttccaaactaaatttttgtctttttattataatttatgaatttttttagtgacccgcgaacttatgcaaatttaagataattatttgattataatgtcaccattttatgaacagttttattaattacttcgattttattcctgtgatttcatttaaaaaataaatactggttcttttcggttttgtgaccccccctgaaattttcaaataaaaagtcatttctagggtaatttggggcgctgatcacgaatatgacatttatttttcaaaattccgaatcccgaacctgaattcgaacaaaaattcgaaattcataaattacaatgaaaacatatttttggggttttcgaggtcgctgatcacgaatctgacctccattgcaaccaatttcgaaccccggacccaaattcgaacaaaagtcgaaaattcatttttttcaaaaattctcatttattgtccaaaatcgattacgatgctcgaacgggattaaattttctccaaattcaaatcggctggtcgacaacctctttgttaattgcagctgcattttgaacatcctttgtgtttgtcagtgcgaactaacgtcttttttgaatgggtgttaggggcggggaggggggacttcacagcccattccatttggccaaattcctggcattagacctattcctcaccccctaatggctattcattataagcaattccgaccacgtagcggaaacactgcaaacacatttgaaagttacttccccgagtttatgtggcgcaaccattttggcgataccgttgatgttttttataatttttggtctcatgtcactgattttggacaataaatgagaatttaaaaaaaaatgaattttcgacttttgttcgaatttgggtccggggttcgaaattggttgcaatggaggtcagattcgtgatcagcgacctcgaaaacccccaaaaacatgtttcaatgaagaaaaaaaatttgaattttttttttttccaaaatgggggggggacaaactacactattacccacttaagcttccggaagatgccggttggttcgataggcgtcctggtggagtttttctcaaaatgcttttgcacatttctctggcctgctttgctgtttttatgattccctacacttacgaaaaagtcgtgcccgaagaataccgttgcaagatcaaatacaaaaagaacgacggacaccattag

SEQ ID NO: 56571 - DNA, 693 bp, Heterodera glycines
atgacaagcccaactgatcaacaagaaccgatccagacaacagaagcggcagacgataaagccaaaagtgatcagcatcagcagaccaatgaagaacagacaaagtgcaaaaagcgtaggattgaggagaaagaaaatttggtaaaagcaataatttaattaaaaaataaataatttcgagttttcaaaaattattttgatttttttttaaagagtttcgataaatggaagggttcagaaaaatttcaaaaaaattattttaattttaatgttcacttggggagtaaactatcgtaaagcacttgaaaaaaaagttagaaaacgaaaaattttattattttttaaaattttccgcggcctggggagcgggaggcgggggaacaaacacctcgaaagttttatagaaggctttttatgaattttttcttcattttccagggtcttccaattgcacagtccactccgctggtgccggggccctctcgtgccattgctcattgtcagccaaatcagtccatcgttgttgcgcagaaccatgctctgcggcacagcccaccaccaacaatggcaccatctccaatccttggccattactttccatttgggccaaactcggcggattcatctgccgtttccatgttcccgtctccaggtaggggttggtagcagagatgggccaaattgaaaaataaa

SEQ ID NO: 56572 - DNA, 870 bp, Heterodera glycines
atgaaaaatccagaagaaattggtgaggaagaatccgctgaagaattggttaaattgtgtgaaaaatggaaaatgatggcattggcagtcgatgcatttgtggggggagatttaaatgtgaaaccacaatttgaactggtggtaaaacagcagctggacagaacccatcatcaactcctaatgagctcagcaatggaagcgatcaaaacagttaaccgggacttattcacatggggcaaagggaatggattaaaagtcgagctaatttttgatttttttttaattttatagttatttttttagattattttggtaaatgagaaggattgcgaccttgatcaattgttatggactgatacgagaaaaaatttggatgggttaagtgcaacattaaagtgttgtagaaggtttcggtgcaactcgggctcggtaattgaaaattataataaaatcttttttttaaagctaagatttattattaaattttgaaaaattttaaaacctgaaaattggtcaacaatttgcaatgctggaaaggatcacgagaaaaaagttactaatgaaccggattattctttgaaaaaagactttgtattattgcgccaattcgaccaaggaaattctctgaaacttgaaagatatattggcgttttgttaatggaatacaaaactcaaaaacaaatggtagcaacggacccatgtgaggaggccaaactgaaagtgatcaaactgatgaaagatgtacagaaatcattggacaaaaaggaaaaagatggagtgaccaaaactgacaaaggcggactgaacgaactgatcaaaatggagaaactgaagtcgaaaaccggtacacgcaatgacaaagcaaagtga

SEQ ID NO: 56573 - DNA, 806 bp, Heterodera glycines
atttacatgtccttacattccatcctattgcttagcaaaatttaaaagttttcattgatccaatcggattaaagcatttggtcaaggaaatggaaaaatttatgctagaaagaaaagccacccaaaagaaaagtgatgatgatagtgcacaaaacagactaatgatctaaaaactcttcacttcgtttcctcactctgatcaccattttgacttgtgatcagtcttttttcatctccgatcactttgctttgtcattgcgtgtaccggttttcgacttcagtttctccattttgatcagttcgttcagtccgcctttgtcagttttggtcactccatctttttcctttttgtccaatgatttctgtacatctttcatcagtttgatcactttcagtttggcctcctcacatgggtccgttgctaccatttgtttttgagttttgtattccattaacaaaacgccaatatatctttcaagtttcagagaatttccttggtcgaattggcgcaataatacaaagtcttttttcaaagaataatccggttcattagtaacttttttctcgtgatcctttccagcattgcaaattgttgaccaattttcaggttttaaaatttttcaaaatttaataataaatcttagctttaaaaaaaagattttattataattttcaattaccgagcccgagttgcaccgaaaccttctacaacactttaatgttgcacttaacccatccaaattttttctcgtatcagtccataacaattgatcaaggtcgcaatccttctcatttaccaaaataat

SEQ ID NO: 56574 - DNA, 63 bp, Heterodera glycines
gctatagggaagctattcccgaaggattcggtctccccataaatctgggcgcatcggttcagg

SEQ ID NO: 56575 - DNA, 608 bp, Heterodera glycines
atgtcgggtctgactgcgcattttgaaccgatgatccctcaacagaacggaggaaggtaagcggagtcggagagcggatgaaccatcattaaattgaatagaacgggataaattacggtgaaaagggggtcgtaataacttcccggactgaaaatgtagggactgaaactgactttcgctgccttatctttcctttcatccaatgatctcaaagccatcactgccttttcccctcaatgcttttcctctgcccccttccatttgcaatggtttgtttgttcagaccgctcaacggtctgtctcttctatctggcgttttgtccgccgcttctctgcccgactcgccgctttcgccgtcctccgtcggcggcggactatttccgcccgcctttccgtcgtcccttcttttcggcactgtgccgtctccgttcttcgctcagtcggccattgttgctgatcagcaacagcaactgatcgcccagctgatcgccgcccagcaaaagttggcctccgcgctgctcggctcaccgcccgccgcgcagcaaaacgcgacgcaaacggcgacaatggccgaagtcggcgacacaaatcagcagaaaatgttctga

SEQ ID NO: 56576 - DNA, 1657 bp, Heterodera glycines
  unsure (1)..(1657): unsure at all n locations
atgcctcnggggcagcaattctttcaattggccatgggcgaaagtcacgccgaatgggacgttgtggagctgttgcggcacagtgcccttgagggccattggctgtgtctgtacaacgtgcatttgacccccgccgtcgtcaaccgtctgatgaccgaacttggctccctctccggccaactccacgccgactttcgactttggcttaccaccgaaccggacgaccaattgccggtggtttttctgcagttgtgcctgaaggcggcatacgaaacgccgccggggcttaaaaagaatttggagagaaatttcatcggcggaaggacagagcaaaaggggacgaagcgggggacggacgaagcggcgaaagccaaggcggcatttgtgttgcattggctgcacgcggtggtgcaggaacgacgcaatttcatcccgcaggcgtggcttaagtcagaaattactcaaataggccaaaaaaacaagcatttgaatttcattcagggcctacgaattttccgaagctgaccttagaagtgccaaaatcgcgttgaattcgctgtttggcattgcgggaaaaaacaatttgaaaggcgtcgactgggaaatgttccgcggattgatgctaaacgccatctacgggggccgaattgatgtggagctggacaaccgcgtgctgctcgcctttctgctggaactgttcaattccaaaatgatcgatggggccggcgacgaattggcgcccggactgaaaatgccaatgtttggggagcaaaaagtgccagaatgtttgtccattttggcaagtgtgtcatcatttgcttcaggatttcatggattgggtctcctcgacattgcccgaaactgatcggccggaattgctgaatttgcctcggaatattatgctttcgtgggatttggcccaaagtgacgccgccatcgccaaacttcggcgactgttcgccgccctttctttgtcccagcaaaacgcctccggcgtcggcactttccctcgccgagacatcgcaaaggcattctcgaaacatttgtggggcgaagctttggcgccgctcttgtcactttggaaaaggctgaaccagcaaaagccgcaaatgctgcaaaatgcgcaggaaaggcaaaaagaaatgccaaaattggaaaaagaaaaagcaaacgcaaagggtaaaaaagagagaataaaaagtgggaaaagtgaaagaaaacatttggaggagaagccaacgcggacgaccctttggtcgaaatgcttcaattggaatttgcgtacgccttgaaattgttgcaaaacattcactcgtccctttcggccataagccgcgcaatcaaaggcaccaatttgcctgaaaagcaaaccatcgaagtggcccaatcgctgatcaatttccaggcaaaagcaatgcaaatagactttgttgatcaatccttttttttgtcagattccgtctttttgggattccctttgggccggtggtccgtcggtgccatcgaaatatttggaggaattggtgttcaaagtgcacagcacccaaacgctgctctccctggcccagtcccagcaattgctgctttccccggtcaatttgggccagctttttcgccccgtttctctgctgaatgcttttcgccaattctccgcccg

SEQ ID NO: 56577 - DNA, 1792 bp, Heterodera glycines
atgggcattttggacacttcctgggagtccatgcggcgcttcttggccaaaggtggcgtcaaggaagaaatcatcaattttgacgtccgccgcatcactccgtcgaccgccaaaaaagtgggcgctttggtcaaatcgaaggccgcttcgttcgacccggtgaacgctaaaaacgcatcgacaggtaattctacggctttttctatggaatttccactcgaaagccgaaacattcaaattttggctaacatttaagcgattgctccgctggctgcttgggtaaccgcaaatttgcagtacgctttgattttggagaaaattgcgccgctcgagcagaaaaaggagtcgctggtgaaaaatctgaacgcggcggagcagcaaatggagcgattgtccaagggactgaaatcgctggacaaaaaagtggcggagctgaaaacgaacttcgaaaattgcatgaaagaggcgaccgaaatcaaaatcgacttggacagggaacaggcgaccattgtggttgcggggaaaatggtggagagattgggcggagagtacgcgcggtggcagcagcagcagaaggagttggaggacgagctcagaacggtggagcactgctgtctgatcggtcagattttttgctgttggattcgattttgattggttgatcggttttaccattattcggctgatcactcactcattagatcatcactctaaatttatgttggctgatcggtttgacattttccgatgatcgattggtctgatcagtagtgatcactttagtctgatcattcgttgatccaatcgtcccaatttgcttcttcaggtgcggcattcgtaacttttctgggcgctgccactgaggaaatgcgtgcccaaacgatggccaattggcgcgaaatttgccaattacccgccgcttttgacctcctcaattttctcgcctccgaaactgctcagctcagatggaaatccgagggattgttggccaacaaattggcaatggaaaatggcgccattttatttgccgtcaaaaacactccgttcgttgtcgaccccagcggcacagtgtgcacttttctggccaatcacttcaaaggcaattcgacagaaattttacgagcgaatcaaccggatttaatgaccaaagttcggacggaaaatgacgctttttgcaattgtaatttaattgttgaagatcgaattgggcgtgcgctttgggaagactttgataattgacgaaatcgacgaacgaattgagccggcattggtccctctcctaaggagggactttcacacaattggcgcgcgattggccgtacaattgggcgaaaaacaggcgagcacagagcaaagaacagggacagctgacggagtttggcatttgcttttggcatttttagctgttcatttgttcggcttttttgggtttaatcgtcgattttctcaggtcgatttcaacgaccaatttcggcttttcctctgctctcgaaatgagcattgccatttggcttctcacgtcagtgccgtggtctccgagatcaatttctccatcactcgatccggcttggcctcccaatttctgtcattggccattgaattggaaaagcccgaattggaacaaagttcgacacaattaagcagccaaatggaggcgctcaagttggaaatggacaatctcgagcaagtactgctcgaacagctcgccgtttctgacggctctttgctggacaacacggcactgctcgagtcgttgaatgaaagcaaagagaaagcggacaaagtggcacga

SEQ ID NO: 56578 - DNA, 201 bp, Heterodera glycines
atgcagaaaaaggcggcgaagaagtcgaagctgctggcggagaagcaagcggaagcgaacggcgcattggcggagataacgcggagtatgagcggagcaacggaacagaaggaggacatggagaagctgaagagcaccaccgaggcggagaacgcgaacatcgagcagcagaagaagctgatcgagcagcaattggccgac

SEQ ID NO: 56579 - DNA, 2245 bp, Heterodera glycines
atgctacttgacgctgacgcaggcattggccattggcatgggcggcaatccgtacggaccggcggggacgggaaagaccgaatcggtgaaggcattggccggactgttgggcagacaggtgggaggaggcagaaaacggaatggcataagcaacgctgcccacttgaggtgctggtgttcaactgcgacgaaggcatcgatgtgagggcgatcggtcgcattttcgtgggactgatccaatgcggcgcctggggctgtttcgacgagttcaatcgcctcgggcgcggtgttctgtccgccgtctcctcccaagtgcagttgattcaggaggccgtccgtgccaaggcgtccctttgtcgcatcggcgacctttccgtccccgtcgacttcaactcggccatttttgtcacgctgaaccccgcgggcaaaggctacggcggccgacagcgattgccggacaatttgaagcagctgttccgacccgtggcaatgtccgtgccggacaaccagcaaatctccgaaactttgctattctccgaaggatttggccaagcgaaagtgttggccaaaaagttggtgactatttttgagttggccaaggaaatgctcagcgaacagcaacattacgattggggactgagggcactaaagacagtgctgaagggatgcgcagatgcaatggccaaacgacgacagaaccgtggcggaacggcggatgacgagacggaaatggtggtgcaacaactgcagctgaacacgctgtccaaactgacatttgcggacgcacggcgctttcgcgtgcttttggacggcattttcccgggaacgaaaagagaggcggtgagttcattttcaaaattgaaaagcaaaaagaaaattaaggcccaatttgccgatcttatcgaacccatcagaaaagcgtcggaacattttcaaatgcgcacgacaaatgcccaacttcagaagctgttccaactgtacgagcagttgcgccagcgcatcggcgtgatcatcgtcggtcctccgggctccggcaaatcgacgctttggcgactcctccaaaaggcactttctctgagcggagaacaaccgggggacgtgtacaggtcaacaacattttttgaaagaaggtgaaatttggatgtatttcagcatgaacccaaaagggatgccgcgcagccgacttgtgggccaaatggacttggacacgcgcgagtggacggacggcacgctgacccaggcggctcgcatggccgccaaaggcgcaacaaaccggcatggattgtctgcgacggggacgtggacccggagtgagtggggcggcggagagaagagagggggggggattatctttaattaatccaccccactcatctatacgcatatattaatatagtgtagacgaattgagtggcacatgtaaaaagaggacgtcgtttcaatgatttttctctctgatgagtaaccaatttttgcctcagatggatcgaagcattgaattcggtgttggacgacaacaaattgttgacccttccctcgggggaacgcattcaattcgggtcgaatgttaattttttgttcgaatgcgtcgatttgagccacgcgtcgccggcaacgatttcgcgcatgggaatgattttggtcagccacgaggatttggaaatgcaaacgctaattgacaggtgaaggaatgggcaattagtagtggatgggtaatcagaaacagaaagactgattactgatcggaaagtcacggcaatttgcattaaaaatgatcagacacagactgattgatcactactgatcggaaaggcattgggagcagcttctcagtaatttaatcttttgaagattcattcaccaaaatgaaaaggaattgcccgcccaattcggcgattggctaaacaaaaatttggtgccgtcgttggaatggacggtaaagcagcgaaacggagcattggcattcagtcaaattggtaaagcaaaagacaatgaatatttagaaaattaattaaaggcattttgaacaacgctttgtcactggtgcaaaatgccaagtccaaaaaccaatttctcgtcgcccttttgcgtgcttttgcccctttcgtttcgtcggacaaacgcagcgaattgtgccaaagggtcttttcgcaaaacacttgtgccattcccgacacgaaggtgccattgaatgtttactgcgatggccgaaccgactctttgctcggttattccgatgactttg

SEQ ID NO: 56580 - DNA, 1178 bp, Heterodera glycines
atgaattgccaaatatggttcggccaattgatgtgcattatgttgctgatggtgtccacggattatgttgtatcccaagacgattcatctacatcctcaagctcgtcaacgagtacgtcaacttcgaccagtactagcacgagcacatcgaccacgaccccaagcacaactttgaccagcacgtcgaccagcactgcaaccacgcccacttcgacttcgaccagtacctcgaccacaccgacttcaacttcaaccagtacgtcgcccagcacttcgaccatcccaacttctacttcgaccagtacctcgaccacgccgacttcaacttcaaccagtacgtcgaccagcactttgaccaccccaacttcaacctcgaccagtacatcgaccacaccgacttcaacttcaaccggtacatcgaccagcacttcaaccacgcccacttctacttcgaccagtacctcgaccacgccgacttcaacttcaaccagtacgtcgaccagcacttcgaccaccccaacttcaacctcgaccagtacatcgacatcaacgagttcttcgacatcaacttctacgagcacctcaactacaacacccacttcaacttcgaccagtacatcgaccacaccgacttcaacttcaaccagtacatcgaccacaccaacttcgacttcaaccagtacatcgaccagcacttcaaccagtacttcgaccacaccgacttcgaccagttcttcgacttcaacgagtacttcaacgactacaccaactacgaccagcagttcgtcaaccacaactaatccgtcgtccagcagctgtaccaacgcggctggtgacagagcgtgcaacttttacaagaataggtgcaaccgattttcggcatggcttaaacagcattgtgccaaagcatgcaacatgtgcccatcaacgaccaccagcacttcaactacaacctcgacttcaacaagcacctcatctaccacgaccaaatcgtcaggtggttcatccggtagctgcattgaccgtattggtgcccgactgtgcagccgttacagtaggatgtgcaaccgttttggcatttggatgagactgttctgtgccaacacttgcaaaatgtgttgaaaaaacaatgaaaacagatggatgtgaggaggaatttgtgaagaaaaagataaaaa

SEQ ID NO: 56581 - DNA, 1267 bp, Heterodera glycines
atgggcaatgttgagcagcagggcaagcactgcttgttgctccgccagcaacaaccgcctcgggggaaagaagcgcaagtttcttccgactcattaacatccattaatcctccgagcggcacatcatcatcaccatcatccacatcattatcaaccgccgctgatgtgccgtcccaatgcaacgcaaggcattgccaacatccggcaacgccgacaacggcacagattactgatcaggaagaggtggcagcagaagcatcgtcggcaagagctgctgatcatctgcagctggatatcgatcagaccagcatgaatgcctcctttgacagcgatcagaccggcaaggatgaatatgatcagagcactgatcagagatgggtgcttgatcaaactgtaggcagcgatcggatcagtgatcaatatttgagggctgctggtcaaaatcgaagggctgcccggaaatgggagattgatcacgatcagagcgctgatcagaactggaacagtgatcagagccaaattcctgtgcagcagatatggaagagagatcgaaatcggagcccatatagaaatgatcagagtcggagcactgcgcagaatcgagcgactgatcagaatttgagaaatgatcggaattgggcgattgatcagtctgagaatgctgatcataaatgtggtgccgatcagcgatgggtcaagattgatcagaatgggctggacaataatcggctgtcgtcttctgatcacacatttgtctccccttctccaccttccactgatcatcatcatcatcatctccatgcttccaatttttcccatcgctttttcggccactattttggccctctgctcctccatccgatcgttcgtgcactgatcactgttggctacatggcttacattggcattgcgatcgctggctgtatgaattttcgcgaggggttggagccaagccacttggtcacctctgatcattacattgcccgctactttgatgacatgaaaacattttggaagatgggcccacagcttcatattgcggtgatttggggcaaaagcatgggactctgatcactttgttgattacaattagtgttaagccatgttggtctcggttccttttggtttgcatttatccgatccccgaaatattccgcctcgaaaattccggaaattgtgaccattttgtttcgagataaccctaaacggttactttattaattagtagtcaatgataatcagagggagaaaagaccaaccgatcaaa

SEQ ID NO: 56582 - DNA, 799 bp, Heterodera glycines
agtgaactatatcgcgaaacaaaatgccccaatcctaagcagagcaatatttttgagcctgacatcaattataacctggtcattcataacaatggatcatcgacagaattaaaatggaaatgctttagaacaaaaaaatattccgattcaaaaagtatcaaaaatatttttggaataaattattttatttttaatttactaaaaaaaattaggacgccgaattaatgatggaaccgatggggcaggaccaagtgaacaaagagaattgccaaatgaaaagcgagtgccaaaaataacgcaggatttgttggcaaattttaccggtaaacaaaatgatcagaatcagcaagagaatgaggtaaaaaaataataaatattaaaatcattttaaatacatttaatattcaatttgtaaatattcagagggaccgcgccataaatgagactttggatttgctggacaattttgggagtgaagatcatcagaaagcaccagcagaatgagaaatttgtggtttttttttgattgtcagaaaaattgttgttggttcatagaagaagtaaaattaaccctttctgaacattttgccaaatttaaaaaccttttttttccataacataacttacattttcagctttataaatattttatgtgaattatccgctctatttcaagaacaagcaaaaattttttattaaatgatccatgaaagggatgaatgcactttcttcatggatataaacataataacaattcaatttatgttttttcttaaaaaaaaccaaattaaataataaa

SEQ ID NO: 56583 - DNA, 590 bp, Heterodera glycines
atgcgcacccgtccgatctggcaagttaagcaacgattgctgactagccaaaaggttcggtgccgtgatgaaacgaaccagcactgcttaccccgcggcacccggcacggtcccccgaaggaatggatttaattaaattctctccttcggggatttttttccattaggtcgtccgttagcgttcgattgctctagtcaatttttcaaaatttttgttgaaatatttgtcgtgctctgaagggcgtgggaggggggggggcgaaggcccaccacgaggccgcgaagaggccgagtgagtaccttcggtgcaggaaaattattaaattttaaaaattttttaattgctttttaaatatgccaaaaaatgtaggcttaacttttttagtgaaaattcgatcactcatattttttgctaattgagcagaagcgtaccaaactttgcagggatactccccggtaaaggactaacttacactgaaatgagcgccgagctagctggctcaaaaaaattttcgaaaatctgagtctttcgtttttatttgttttttgcataattaattcataaatatttttttcagaaaatgctctga

SEQ ID NO: 56584 - DNA, 673 bp, Heterodera glycines
aaaaatatttatgaaacaaaaaaatcgattttttcaagtgtccgtttggggtactcaaacatttatggggagcaaaaatccaacgcagaattaaagtacaggctatagggaagctattcccgaaggattcggtctccccataaatctgggcgcatcggttcggggggactgccccgaaaacaaaaaaatcgattttttcaagtgtccgtttggggtactcaaacaattatggggagcaaaaatccaacgcagaattaaagtacaggctatagggaagctattccggaaggattcggtctccccataaatctgggcgcatcggttcggggggactgccccgaaaacaaaaaaatcgattttttcaagtgtccgtttggggtactcaaacaattatggggagcaaaaatccaacgcagaattaaagtacaggctatagggaagctattcccgaaggattcggtctccccataaatctgggcgcatcggttcggggggactgccccgaaaacaaaaaaatcgattttttcaagtgtccgtttggggtactcaaacaattatggggagcaaaaatccaacgcagaattaaagtacaggctatagggaagctattcccgaaggattcggtctccccataaatctgggcgcatcggttcggggggactgccccgaaaac

SEQ ID NO: 56585 - DNA, 1173 bp, Heterodera glycines; identical to SEQ ID NO: 25821

SEQ ID NO: 56586 - DNA, 189 bp, Heterodera glycines
ttttagattcaaatttgttttcgttgtttcatttcctttcattcgcaatgcctcagtacaatctgttcgcaaaccgatcgttgctcttcactagttcgtgttcgtttttatttatgacatatttcgattttgactattttcacagaacgtttcttcgtcgtcggtcctcccggcactaagggattgaat

SEQ ID NO: 56587 - DNA, 310 bp, Heterodera glycines
atggttgtgctgctgctgatactgttgttggtgctggtggtgttgcagttgttgctgctgcctttcgctcggagttggcgacgagaaggccaacgcggcagaatttttcgtggacgacatggacgaactgcgccgactgctgccctcgcccattgcgccggcggcgatggaaagcgacgccagcgactgcgagtcgtccattacagaagtccgtttgctgctggtgctgccacggcggccgaactgttgcattttgcgacggagacggtcgaatttcttttcttgaggcattagaaatttgtaaaataaa

SEQ ID NO: 56588 - DNA, 896 bp, Heterodera glycines
atggtcaaccgaagcgattgcgttgctgttattatctgtcagagcatgcatttgtcaacgttttcaaggaggtgtgtccatagtttaggttgtcagaattggaatgtttgggagctctaaactggaaaaaagccataatttctagagcgcgggatttcgaaattgccagtaccggggtcgggacttgaaaaatggaccggggcgcgatttcgggaccgagactcccggtcccggtggtctgtcaaaaaaaacgggatcggggccgggagtcccggcaaaatcccggcgggccacggtcccgtccgggctctaataatttcttaagcgactgatttaattactttttaatttccgttttcccatcaattagaaatttatccgtgccaccacttccgccagctacgaaattcatttttttgtttataagtcaactccaatcgagccatttgaattggtgaacaaacggacaaacgaaaagctgatattgataaaagcaaaaagaaatgcaaggcttaacaaagggataatgaagcggtatccgattgggaattcggtggcggttccgtggggaaaaaacggaaatttgaacaatttgaacaatgtcagctttatgctttgcgatgccaaacgatgcaacgggtaagcaacaggaatagcaccgaattcgactcccgaaaaaactttggacgtcggaaattccgatttcggaaaaaattatgatttaaaaaatgggaaaaagtattcttcaaattgctccgaatttttaggcctttgtctctatcagcagcgaagcaacgaaaagggtgtctaattatgtgaaagtggctactcaacttttgaggaccagacatttgaggatatccccgatttttgaggacataaaccatttcaaaaaa

SEQ ID NO: 56589 - DNA, 114 bp, Heterodera glycines
gggctatcgtatgataccaagattgtgcaatttggttgcgtctgagaaaagttatgagtggatttagtcaaaaatttagcaaattttgcactttttgtccttcgaccaccacgg

SEQ ID NO: 56590 - DNA, 282 bp, Heterodera glycines
atggtacaacatttgaggacatacataatttcaaaaaaataaatggaattttattttatagcatttaaaatatagaaaatacacacaatcaaattggctatacggaatttggttgaagactttgatgcaaatgagaacccaaatggggatgaaattctcacacattccttatcgtttcaaaaccgtcttattctcaattcttttggaaactggcatgatccagataatcaatggctttatattcgctctcgttggcccttgggaaactatttttaaaataaa

SEQ ID NO: 56591 - DNA, 857 bp, Heterodera glycines
atgggaagagcaaaagaatggaaaattgacatttttgacagaaacggaggacgagaggagcacctgctggacaaaaatgggtggcggaattaaaattaaatatcataaaataggtagtagaatattctggcatatatttttcaggatttgcttattcttaatcttttttcgtattaattttttgattttaaaattgggaaatttaaaataaaattctcctccctttaaatttaaattatgcgcacatttctgagaagtcaattttgataaaaattggtattctttaaaaaaacaccacatacaatacgaaaaaatatatctgctgaagagtggagaaaagataggacaaaaaggtgagtttttaacgtgaacttttgtttttaaattttttaaatttagatttttaaattgtcgataattaaaagttaatggcacggcaggccgtccagcaaagttgcattaatattggtgctaaatcgttctttcaaaaaaaaaaaaattataatgggcaatcattaaaaaacatcaaaataaaaaaatttgctgatggccaaaaatgttcgaaaagcaaggtttttgagctcttttggtcataactttttggaatcttaaccaaatttttttgaaaattttcagactgatagagaacacttagggatatgattgataaaaatgttttatataaattatggccaaaaacagcgaaaaattacgttttctagcttttttttggcgccgtgtgccatataaacgctaacaaaaattatcaattaaaaaaaagttcacgccgcattctcaaaaaggtaaacaaaaattaattaatattctctgtggaaagaacccgattcattaggtaa

SEQ ID NO: 56592 - DNA, 1982 bp, Heterodera glycines
atggaagccaaaaaagtaaatattaaaaataaaattttttgagtaaataaaataattaaaaacataaagaatcaaataaagaatattaaaaaataaataaaatatatccttaatatttgggttttaatttaaaattcaagcaaaaattaattaatttactttaataaaacaatattatataataaattaaaatacttgaaaataatattttttatttacattaattaaatttaggttcttcgctcggccattcatttggccgatttgtccaacccgacgaagccaattgagctgtaccggcagtggaatgagcgcattttggaggagtacttgcgacagggtgatcgggaaaaacaggtgggttttttggccagggccttttagaattttcaaaaactttttaaaatttttagctaggcctggagatcagcccaatgtgcgaccgaggcaatgtcacggtcgagaaatcgcaggcaatttttgggatttttaatatatttttgattgggaaattttcaaactgattcgactcccattggctgcatcatttactttaaaatccccggaaaataatttgtaatttattaaatcgagaaaaaattgataatttttcttggaattttaattaatcttaataaaaaatatacttaatactttggtagagaattagaaaattttacgaaaaaatttctgtctgaaatttttaaatttttcaaattcatcaaatgggagagctgttttaccggagcgggggcggggttaaaaatatcctataggttagataaaaaaaaaaattgacacagatttaactcgcaccaaatatttttttttaaatcttagatcggcttcatcgacttcattgtgcatccgctgtacgagacatgggccgagctggtgaatccggacgccaacgccatcctggaccagctggaggacaaccgccaatggtacatgacccggctggaggagatggaggacgaggaggagtgcagcgaaagtggtgagtcaatggaaaattaaaattccccccccccacccacggcgcccttgaaagaaaaaaaaaaaaaaattttaccgaaaaatgtacaattttttaaattttactcaattaataaattggatctaaaattttttaaattttccccggcggcgtctaacgctagcgccggatcccaattttcctatatatttttttttttcaaaatttggtctcaaaatggccaaaatttcccgttttttctacggcgccaaaaaatttaaatcaattcactggacaaaaattttttgacccgaagaacaaaaaaaaaatatcgtcggttgcccctcccgattttttttctggttacaataagggcattggcatatgcgatttgttggcatcgaatagattttttctcttttgaattgttttcattctatttataccgatttttttttcaaaattttcatttttgtgggcttgaccaaaatgttaaaaaattaccatttaaatttaattatttttagacgacaccgatgacaagcaacgacaacaacagcagcagcagcagcaacaactgctggagaagccgttcccgaaaagcgcctcacttctgatcagcagcggacagagcacaccgcagcggagcagcgacaagccgagcgcacccggcacgccgaaaatggtgtgatcggaccagcggatcgagaacaaaaaaaaatcaatcatcggtgaccagtctcggccggtaccacccgaacagaacacatcaatcaatcatcatgccaacagtcgagttgtgccgtcacattttgacgagcagtgcacggcttcggcacccaaatcatatggcacaatgtatctgtcgagagtctcatgtcttgaatttcgaacccattctcggagatatatttgaatagacatatctttcgagactttcgatacatcctttaattgagtgtctccccgagaggtggactgacactctcgagcgccaattaaa

SEQ ID NO: 56593 - DNA, 1165 bp, Heterodera glycines
ggcgtgttctccgatttggaagtgctggcggcgatcatcgctgctgccattcatgatgtgagtgccatgcttgtaggacaaaatgactttatcatagggatcgtaaagtttattatcatccatgatttggtcattttctttttcagcgggttcaaaacctaattaaaatccgtttatggaataaaattctttttttcttattaggtcgatcatcctggcttcacaaatcaggtacaataaaaattttaaaaataaaaaatttattttaaatttaaatattttcagtatttgatcaacaccaacaatgaattggccatcatgtacaacgacggtgattgattattttcaaaaataaaatttaattaattcaaaatttaaatggctgaaaacgaaaacatttaaaaatttcattataattcaaatttaattttatcgccaatttggtctttttatctttttgttatcattatttttgttttaaatgaatttaggcactttaattgtaaaaaaaaattatttttacacttattttctttttgcattttggcactttttccatattatttcattttataacgttttttatgaccttttcttttttatattattaattttacagaatctgtgctggaacagcatcatcttgcggtggcgttcaagctgttgcaggaaagggattgcgattttatggccggggtcagcaaaaaacagcggcaaacatttcggaaaatggtaaaaattgaaattgaatatttaacttaaatattttataattttttatttattttaagttaaaataaatagaattttcgataaaaaaatattcaaaatgtctcttttttattaaataaacctaaaaatttataaacttgcgctcttgaattaaaaatgctattcatttggcttttgttagttgaattaagtttttttttacataatttttttaataattttggttttttaatgtatttttttattaaatttttttgatttttattgtattttttatttttattttttcaaaaattttcaggtcatcgaaatggtgctggccaccgacatgagcaagcacatgactttgttggccgacctcaaaacgatggtggaggcgaagaaggtgtccggcacggacacactgctggacaaataccaggacagaatattg

SEQ ID NO: 56594 - DNA, 507 bp, Heterodera glycines
atggatgataataaactttacgatccctatgataaagtcattttgtcctacaagcatggcactcacatcatgaatggcagcagcgatgatcgccgccagcacttccaaatcggagaacacgccctgaggcgaagggaggtaagaggtgatcagcacggtgctgagtcgttatataaaaaccatcaaatggaaattttcaacctaaaactgtccataacttttgtcaaagtcaacagaacagaattaaacattcttggtatcatgcgatagccctaacatttctctattagttcatctaaatttcaaaaaatttggtcaagcttaagcaaagtatggccaaaagtacacaagcaaccaggttttcacagatttttggccataactttttttaaacctaacgaaatttttttaaattttgcagactaatagagggcacatagggttatcgattaatagcaaaaaaataaaaaacaaaaataatttctaacagaaattttttaattaaaa

SEQ ID NO: 56595 - DNA, 807 bp, Heterodera glycines
tgtgcaaaggctacgtaatacccaatctgtgccatccgaatttggggtcagttacaaatttaaaaaatatatttaaaaaaaaattatttttatattttaggtgccctgtaaaaaagaggtaagccaagccttgaattaaatgtcaaacgaatctttttttatatagaaaatttgtatattatttattttacagatcgaagtttacatgcaacgaataaatgaatggggtttgaacatctttaaaattcatgaggtcattttaattttaaatatttttttcatttttaaattgttttaattttattttatatttttaaattattaaatttcgtttgccatttttagtggggattcccatttgattttttgagtctcgaggaattttcagtctcgaaaggcctaatctctgtgcttaacagtgcctaaatttctttcaattttacaaaaaataaaataaattaaaaaaaaaaaatttttcattaaatatttcaatttttagctgtccaaacagcacagtttgaccaccgtcacgtacacattgctcaggaagcggaagctaatgttcaaatttgacatcaatccgggcactttggtcaactttttgctgcatttggagcataattatcggtcggaattttgtgacggaacgccaataaattttttttaaattttagtttaaatatatttaagtaattttggtatttccaatttgccccctcttttaggaataatccatatcacaaccaaatccatggcgctgatgtggcccagtccatgggcgtgctcatctccacaccggcactcgaa

SEQ ID NO: 56596 - DNA, 470 bp, Heterodera glycines
  unsure (1)..(470): unsure at all n locations
atggtagtacactggtcaattctggttagagttgaccgggaccagccggaattcccgggtctcccaggtcacggattttctgatcccggtaaatccagtcccggttttccccaaagttttagtccgcccaacgctacttctaatgatctaatgattgatggttggcacactaatttttgcaacaaaatgccaaattgtgtgttattttcattttcaactttttctctccatgaatttccaattcagtgcaactaatcatttccatttatcaattttcaacattttctttcttttccaacttcaaaatgtccgatggatttgccaaaatgtcgcggtcggaccaactcaaaattggccgtgacagattgttgcgctgtttggccaaatgcggcggagaataccanagtgtacgccatttggacgtgcagaacaaatatttggaggaatacaacgcccaactcagncaatcg

SEQ ID NO: 56597 - DNA, 1174 bp, Heterodera glycines
atggacgttgagttgatgaatgaatttgcgatgggacggattggccacgcgatgggcggtgggggggggtgagaaaatgggaaaatgcgaagggattgtcgccccccacccctttttatccctttgtctttgcccttctctcaatggcctaaaaagcttcgagaaatttaatggaaaatattaacagaattctttcccaataaatcaattttcacaaatattcttcatccaattactcattttaatctcttttttctttttgcctattttctgatgacgtcatttaaattttttttcatgctaatttcatttttagcaaatgcgtaacggcagaaaaaggacagccaaagagacggcagcgtcgcctcacaatcagcaggggacgagcgacgaattcggcacagaacgaagcgaagggaacggcggagggattggccaaggaattggccaacttcggaacggactcagttggccagtggaggtcataaattcaaaaaattgacttttgttctccagtacttttacattattttcagtggttcggcacttttcccattcgaaaagttacgtcagaaaatgtggcaaaacgattggacgcactgctcgaatttgaggagggaagcaatgcggacggagcatcgggcgggagaacagcacggcacgggagaagggcatttttgcggatcagggaaacggggattgaagtggcaggggaaacggaggacggaatggaaaaggtgggacaaaaggatggggagaagggggaaatgaacggacgaaatcaaaattagagggggaggaaaaaaaaggggggaaaggggcaaaataagaggggggggggggggggtgaaaaaaggggagggataaaatggaaagcaattagcaaattaatcagcatcatttatttccaaatttggcataattctctccgtttccattgcttccgccccatttgtctgcctttctctcctccctttgcttctcaatttaattttgggttcccttttctttctccccccccccttttttcccaacctttggccgaatcattcgcctaatccttcccccccccacccttcacattttctttaaaaagcatataattaattatctctggaagaagagaaaagagaatatttttcaattaattttcattttcaaaaaaagacggaaa

SEQ ID NO: 56598 - DNA, 125 bp, Heterodera glycines
atgatcatggagacggaagaaggagagaaaaatgagggaatgccattcgtgacagaaatcctgaatgttgttaatgaaatgtgtggcacggaaatgccagagaaaactcaaaaagagggtttggg

SEQ ID NO: 56599 - DNA, 908 bp, Heterodera glycines
atggttcgtccaacgaaaagcacaattcaaaagcgcaatgccgcagcggcgggttgcgccgtcattgaggcacaaaaggcaaggatggccgctttaaaagcgattttggataggagcgtgccggcggagagcggtgatccggcatttttcgagatttgccagcaaatctgggcaattcttggccaattcctgggtaagttttgccttatttggatggggaaggcgggagatggaggggtgggggggggggaaaggaaaacgccaaatgcaaaaatgaatgattgtaaggatggaaaagggaaaaaaaatgggaaagaaaaattgcgagatgactatcagtggatcggtgtaatggccgagaaagccattaggggaggggcataaatgtgtgcaattaatgtgtttgtatttaaaatgattaaaaatgattttaaatatatatatttatttatttgagggaaagtttcgaaattataattaaattaaattaattgtttgggtttaaatagtacttgaattgtccacaaataattggctaaaggaaaagttgaaaaaaatggaggttactgtaggtcactttaccggtccggctttaaggggaattgtggccagtgactttcggctatttgaccaagccagaggaactcgcaacggcatgggcaagcagtctgccggcgcaagtcggcctgcacccgctgcaccattcgctgccaatgaagcgactcgtgtcatctgtcgcgcacgagggtcttcacctcctggaatgccaacagggaagacagtggccgcgtgctggcagcagcacaaagcatgatcatggcccattttttcgtgcaaaatgtgcagaattgattgagatgtccggtggactgatccagccggaattcaaagagtttgaccatttgtga

SEQ ID NO: 56600 - DNA, 707 bp, Heterodera glycines
atgaaaaatggggaccaaaataattgtaattggaatgaaagtgataaaaatgatgaggaaaatgaacaaaaatcgcaccaagaacagcgcgaacgactgagactgattttggcgggcattggcgacggaagcattgggccaatgaaaattttgtcaaaaagtaaatttaatttgtttttaatttcaatttaatttttcctaatagtcattggatgaaaaacttagttttttaagtattttttctgcagccttttttcttaccgaagtcccttttatggctaactatgaacaggttgtaagctttctaattgtggctaaattgggttattcaggtaatcttttttttgggtatttgaggttacacgtttctaattatgtttaaatttggttatttgatgacctaaatttggctattagagtgcatgtcataatattttaattatttatataattgaagtattaattgttcataattaatcacagattccaaaagtgacggttcgtctcgcaaccgacgaagacgcaaaaaaagaaatgacatgctaattgcgataatagtcgtgttggttgtcgtcattgtggctctgatttcatgctatttcggccgagcgtgtgatgggagcagttcggcaccggctggcaccagtgccaacaaatcggccagcaaaagtgccatttcaagcaaaacggaaggagcaagaaaatga

SEQ ID NO: 56601 - DNA, 375 bp, Heterodera glycines
atgtggcactttctccgaaccattgagctgcacgaaatgcctgaattcttcatggatagccatctgaaccctgattactaccaccgaaaaaaacggacgctctaccatcgctgtattttcgcaggatgtcgtgcgaaaatgtgagttgttttttgcccaattgataagcttgttatttcaacaaatgggtttagaaaaatcgctcagtcggcaggaatccgccgggtgtactacaacgtggcgcacatgcacgggggacaaattcatcattaaaaaatgtgcgaacaggggaaaaaagtgggaaagatttctagagcccagatttttttttaaaaaaggatattttctagatgcctttaaaatatttggttaaga

SEQ ID NO: 56602 - DNA, 334 bp, Heterodera glycines
atgacaaaattgaaaggatcgatggtaattattgaaaaacggtcaaaagagggtctccaaaaggagtgcaattttcatatgactgcaaaagcaatgggaaagcatccggaacaaatacatcaaggagatgagcaaaaaaaaagtgagtaaaactgcaaatgtacgcatatttaagggcaattaacaacaaaaagggcatttcaatcaaaatgttttattggcagcaaaagtaaatacaacatcaaaatgaatggcataactaaggcccagatgtttttaaacatttatcgtaaactaagaacctttaaaaagatatttctaaatgcctattaaa

SEQ ID NO: 56603 - DNA, 1017 bp, Heterodera glycines
atgtcagacaaccgaaaagaagcagagcaaaagatggcaaaagcaatgtaaatttaaaatgccagttttcaatttcaattttgttttcgcttttttcagcttcatctccggcgacggttggctggcggtgttcgatttgctcccaccttctcaacttggcctgggaattgcaatgatcagcccccgttttgacttctatgtggacgaacatttcaaaacgcgcaaatgggcactgaaatttatgcgaattcgaagcaaaattggagcaaatggcacgaaggaaatggaagttgtcaattacgatggaaaaccgttaccaatgccacaaattgaattgccgcgcaaagtctccggattcaaacgcattctcatcaagtaaaattgtggctatatgtaaaaattttcggcaaaacttttccccattcattttcagtttcatcgaccgcaatgccatcgcttttctccaccatttgcgtccacttttcgcttcatgtccaattaatttgatcatcaatgcggccagtgatcacattttggagatcactttgcatttggccactgatcgtgaaaaatatttgtggaatgtttttttcctatccaattttcaaacatttgcgacaatttgcgccataacttctcaggacgggggcgtgaagactgaaggtgggggtagaaaaatttacaattttttttcttcaattttttttaacaataaaccttttttcttgaaaaattgataagtttgaaatttaaaaaaaataaacggtgaaattttgcccggcgaaattttggggtgcacctcgaataagcttgcactaacaataaatttcaccctaactgaatttttttttaaatttcaaaacagaaatttttccagaaaaaaataaaattttctagcgtttattccttgaattaccatttttttcaaatgtttccaaaaaatttttcggaggatgggacgaagcgatacattgagggagtggaaacgagctgcccccgttaacgacctgctccgaa

SEQ ID NO: 56604 - DNA, 121 bp, Heterodera glycines
atggtaattattgaaaaacggtcaaaagagggtctccaaaaggagtgcaattttcatatgactgcaaaagcaatgggaaagcatccggaacaaatacatcaaggagatgagcaaaaaaaaa

SEQ ID NO: 56605 - DNA, 695 bp, Heterodera glycines
atggcgtgccgatgtgtccggcactttgacgatgaaaaaatgggtggacaaaatgccggagggcaccgacccgaggaaattggacgaacattcgatgggggaacagaagttctacgcgaacaaagaggtgaaaaaacaacaaccacaattattccgtatttttcccttaattattcccatgccattttggtagattttcgcccaaaattaccaatttgtcggtgattggcaattttaacagcgcattaagggcaacaaaaaatttgtttgaccgctttaaatatttggcctaaaaaattgcaaaataatttgattttttccaccccacgcaatacaaaatatggggggggggaggttcaactaaaagttttgcgaaatggtctacccatgtaaactgctaacgacctttttttaaaggcattttttgggcgcgcttttttcaaaaaaaatattaaatgagattttgggctaattttttaagaaatatatgtttctggcgggccgctggtgccgataggcgccgccggggaaaattttaagaattattaataattttgttaataaaatagccaaaattttcagaagttttcccttcgccggcgacccccctcccccacctcttttgggtgcaccccaaaatcacgccgggacaaaatcacgccgccaaaaatttaaaaaaaatttttcaaacttaa

SEQ ID NO: 56606 - DNA, 370 bp, Heterodera glycines
atgggaaatttgccccttatttccttcattttctttttttccattatcattcctgttgctaatggtgtgatcactcgatcactaacacctcgacgtggtgctgctggtggtaatgccgtcgttttattttggttttaaatgtttggttgccatgaaaaaaaatgcaaatttaagtgaaacgttgtcatagtcctttaactttcaagcaaagttcttgaaagtttttttaaaattaaatctccaacgcttttatttgaaaaatatagcgacagataccaaaaccaaggacttttatttccagttctttttggttttcaaggacttaccattcaaggacaaatgacaacaacccgcagattataataataaa

SEQ ID NO: 56607 - DNA, 1140 bp, Heterodera glycines
atgttggtgtggtggtgctgctgctgctcaccttcctcagcaagctgtttggtgccgacatggccattatccattggagaagctgttcaatgccttgccaaaagaatggtaaggcattaccaaagaaaacgaaaacaacggatggaaatcaaaatttcatttttatagtttttttgcaccttcggcttcgccccccttcggcacaaatgtgtgaaagttttccgccaaattggcaccgcgcaatttgcggcccaacgtccgctcgttgaaatagcgcacccgcgaccggcccagctgttgtcgacgcgtgcggtccaacgaaaactcgccgatacagccttaatccgaagggggtacggtagggctaggtctcaagagcgaaggtgtacggtagaattttggcatttggggaaaacggtggcaatggcggagtttcacaaatcccggccgcaaccgcccgtcctaaggccacgaagctgccgaaaattcccaacaatccacaatatttagaagcgcaaagcgcccgtctgaggccgcgaagcggccaaatgagtccacaatatttagaagcgcaaagcgcccgtctgaggccgcgaagcggccgaatgcacttgcctataacttatcaaacgcgcatgcactagcaacgaagtcctttgcgcgaagcgctcatgtcagcgcccgcccatatataccaaaagtatactgtctacaccgagcaattactgtgcaaagcatactgtctacaccgagcaattactgcgcgacacgctagtttatattaccatagagaaaaagggggactcgtcttaaaaactaatttgagtcgaacggctgtcgggaggggtctgaaagtggtggaagggtcttacaactttttgaggcgcattcaggaaaaatatgggttttccgctccggtggacggttcagcgccggcggctaatttctcacttttgcttgcgtttgatggcccgtaactttttttaaaggacagggagcggaaaattcttgctggtaggattttaagttgaagtcttttctaattttcaaaaaaaattccaggcctctacctatacttggaagggctgcagaaattggcaacttttcagtaccaactttgcccagttcagtccccgttga

SEQ ID NO: 56608 - DNA, 952 bp, Heterodera glycines
  unsure (1)..(952): unsure at all n locations
atgncctttcagtgagtttattgcagttttgtttcatcgaacatttttgtgaaaatcccaaaaatcttaacaaattgtgaaatataactcacaatatcccatccggtcttaatgatcacaaaagtattataaagattccggccaccccaattagttcctcaatgaacatttttcggtttttttttaattaataaagaaaatattttccttggtttttcttcaataatttatcggcgaattaaacatcggcgagttcggttgtctgtttgcccgtattgatgtaactgatcaatttcacgcacttcattaaggtcaatcatatccatgtttatatcttccaagtcaatcaaatcaaaattaataacattttcttgttcagtgtcttgcaattttcttttttttattcaaatgttcgttttcaaaagtttttaaccgctttttttctccggagctttgaaccggttcatccgcttttttgaacgggagctttgaacccgtttgatcatttgagggtcgtgaatcattatcatgcaatgatgatgaagaacactgatcctcggaaggaaaagattgcttaattcgtaccattataaatctaaataaagatacaaaataaaacaaaaaatttacactcaaaaaacaatatcaataaaataggacgattattatgtaagagaaatttctaatatggacaaaaaatggttcaatttcactttgtgcgtcgaatcatttttatgcgtccgatcggaattttttcgctgatcaatgattacgaatataacgatttattaatccaaatccattcaaaccaaattaaattttatatttatttttttcagcttagtttccaataataacgaagttaagtcagatttagcaacaaacggcatttattcgtgatcagcgacctgaaatcccattcgatatgttttatttgattttttaaaaatta

SEQ ID NO: 56609 - DNA, 546 bp, Heterodera glycines
atggtactccctctgactgctgccctatccaaactgctaagctgtaaacccgaaaatttagcagaatatttgaacaaccccgaggcagtgaacaaagcgaacgcttacttggccggcaaaaaactcaaaacaacctaccagggtcgtgattccaagaccaaagaggtcaagttcggcacattttcggtgaaacccgctgcggaaacctacgcctttgagggatttcttggcaagtttccaaaaattcagtttcggtctaacacatatgcgttcagaggttaaagtccaccagtatttctacataaagcaccggatccgcctactgtacccacagctgaagtgcgttgttgagtaccacaacaagggccactgcaaatactacccattgggtatacaattttgtccggaaaaaatcaataatcattttcagagttgttggccgttgaggaaggcggggagagtcaacccgtcgaaagacctgccgctgaaacggactacctggactacttgaactttcgcagtgggtggcaatcaacactctactga

SEQ ID NO: 56610 - DNA, 1276 bp, Heterodera glycines
atggacacgggcggcggcaacatcaaaaaggcggccgtccagcggacatcaccgacgcccaaattgggcttaacccaaaggcacaaatcgctggaggaaatggccaactgccgattgggcaccggcaccggcagcagtaacggcggcacaaagttgggcggcaaactgttcagggcgttggccggcaccggcaatggtggccatggggacagtctgcagcaaaagctgtcattggcaccgccggcggcggttaacgatggggccactaatactgtagctgcggctactgtaaatgatcgtaattataacaaccgctatcaccaccactatctgcagcagcaacagcatggcggcaataatgaccggaacatggtgctgtccggtgaagtgactgtacagctgaaaaaggtgatgggctgaccatccccggccgagtgatcgctgatcagaagagatcactcgagcgatgactgatccgaaattttattaattctcggtcagacagtggagaggatactgatcattagtgctactagagattattctcacctttcagtctcgggatcaagctgcccggggtcttgtgccgtgttttggggtcaaacctcaactctctcttgttttttgggctctcgggcccttgtcgagcgcgttttttccgtctagagcttcgggacccgtggaaaattttcggtctctggcagcctggtgattgctgtgtgtttgtaatggtgaaaatttggcaaaatgccataaaacggttgtccgtccgacactttcgtccgcccttaaatttttttaaattcttttcacgggcctatgacaaaacaccaaattaaaagccattcaaacaatttttgagattagggccaacaaatgccaatgtttaaaacccatttaaaacccaattttttggattaggaccagcactttttggccaacgaggaaaggcggcagcaacggcatccatcgtgctttaagtccgcctttttgggcaccaatgacaacgacgtcagctatgtttaagcagcatcaaaagcggatctaatttgaaagcggaggatgaggagatatatatttgatcagtgccgccttttctttttctaataattttatatgttccgatcagtgcggcagaacaaattggcaattttccctttccgatcactgataatgattgctaataattatgatgataaccatcgccgaagtcatccaaatattccatcacacaacaatcacatgccatatacataacatacatatataatttgaa

SEQ ID NO: 56611 - DNA, 521 bp, Heterodera glycines
atggttcgtaaggagaattataaactaacacccggttagtgaaagcttttgaacacgacaaattgactctacaaagacaacacggcaacgatacaaccggagaaaatcgaataaacaggcagaaaggcaaatcccaagcccaattgcaggtccattgctgataacaacgtccgctctggcaataaaagtgaacatattagtttcaaacttttttttaccgttcttgataaacgagtttaaaggagtggaagaaggcaacgacagtactcccgagggaactggaattaagtaattattgtaaggttcatttacggcattcgcgtcggtttgtgtcccaccacatcgttacacacggcgattcaattttgggctccttgtacaattaagttggttttttcgtcttagtggtctgtgcgttagtcaccaaaagggggtctcaggttcgagtcctccttatgttgtatgttaatttcaatttcttcttttacagaagaaggcagaattatttttttattaataaa

SEQ ID NO: 56612 - DNA, 772 bp, Heterodera glycines
atgactttgtctaatgtgccaacaataatctcccgtactgtcaaacccgtcatatcgcataatcagtctgaagccaagagaaacgtccttatcatgtacaaaaagttgcaaagaagtgtgaaagtatattggtgggatttcggtgagtgatttccttccgttatatattaaatttcaatctaagaattttgggacataccgattcctgttttccgtgaagtgttgaagaaacgtatgttcttttttctgttaattgaaggtactgaacaactgatttttaatgaatatccgatccaattcctcctgtagagaagttgcagatccacttctggaatgttcaaaaaacttaccgtaaaatcaattgaatcagtgctcttcaatgttttttttaattatacatccctaaatctgttaagagttcacaaaaaatgcccatatctctgatcttcgaatcattgacagaaaagttgaggagtgccggcatcatatgcagtcgatgaagtagcgacagtaattgcatggaaatgggactcactttccatttttaggcattattactacaatgactatcacgttcgaaacatgctttttgctgaaaacatcgaaccgaaaccgaaggtacaacagtttacgaggttaacgctaattttggtctttaggacttcctttctaaatttcttcgcgggaaagaatagtgaaatgagaagatccatattcgcctccaaggaatataacgttatgtataggtttcgttttttgcgaaaaaaataaa

SEQ ID NO: 56613 - DNA, 328 bp, Heterodera glycines
atgttcacttttattgccagagcggacgttgttatcagcaatggacctgcaattgggcttgggatttgcctttctgcctgtttattcgattttctccggttgtatcgttgccgtgttgtctttgtagagtcaatttgtcgtgttcaaaagctttcactaaccgggtgttagtttataattctccttacgaaccattttatttcttttatttagggctaatttactatttccgaatttctcacgcgttcatcgtccaatggaagaatttgcaaaagaaatacccaagaagcgaatatatgggcaggctcgtttaattttcatgcttgct

SEQ ID NO: 56614 - DNA, 257 bp, Heterodera glycines
atggttgcgtcggaaagggggcacgaaagcctcattgaactttcaagaagcttttggcgcaaattatggatttcaaatgtacacctggaccatgaggagtttctcgaggtaacaacttgggtaatattaaaatcatttatttgaatatttagagtctcagacaattgaatattcaaattccacccgatgaaattattttcaataaccgatgggggaaattgatcgaacaatggcattgtgagcttctgaatcgacag

SEQ ID NO: 56615 - DNA, 1014 bp, Heterodera glycines
atgagcattatccttactctgattgctcgagtgcgtgatgggctgattttggctacttcaattgagggggctgatgacgtaaattttaattcattataatttttcttcagaaatgaaatttagcctgagcacaacactgtcaagtacatgacacaagcgaaaatgctgttcaaaaagttgaacagtccggggacgcctcaggcgcaatcagtcgccagtggacaatatttctttcagtgagtgcatttgttgtaatgaattccatttgaaaatatctgtcatcatttgagctacattgtcaaagacactgtgtgtacgctttgtttatgcgatcagacgctcccgagaaaggctgccttttcctatttggaggaagtcgggagtgaattcctcaaccaacacggcactcaaatcgacgctacggccaggccgtaccattttctcgaatttggtattcctttccttttaatttattgggatccatttgtttcttcagactcatatatccagaatatcaaacgaaaacatttggacaggggccgtaacggtgatcctttctttctcactttttgttagttaaaattcaaaggaatttaacagcgatggcagcggttaacagtgagcttcaggatgtgacacggattatggtctcaaacatcgaagacgtcattcatcgaggggaggcgttgaacagtgagagacttgttaataagtgaagtgtgggagcggcggttagataaaaacgaatattcctattttacactctttaactttcttggatcagaatcgcttttgccctctcccaccctcttaattcaatttgtttcactatttagtcattctaattaacaaaatttagttttggagtccagggcttccgacctttcggatctgagtaaaaagtatcgagaggacgcgagacagttgaaccgacgaacggccatcttcaaactgttcgtcggacttgcagttgctttcgccttcttcatgatcttccgctttgtctatatgtaa

SEQ ID NO: 56616 - DNA, 2011 bp, Heterodera glycines
ctactctatcgccgaattcgatcagctgaatccgccgattgaggctaacttttccgatttaaagcatttggtggatggaattgagcatgagtggcacatgttgactatccaggacgtggtgtggaaccacgctgcaaagaatgccaattggttgcaggtgtttgtcacttggctcataaaatgccattgttcccaaaatttgcgtccaaggaccaccctgaatgtgcctataactgtgccaattcggcccacctaagaccggcgtatgtgctggaccgggcgttgaatcagttcagcagggaaattggggaggggaaatggacgagcgaaggaattccgacggacattcgacacgacactcacctttcggtgggggggggggcattcccgtggattaatcggaaagtgccaatgggaaggctcttcggaatgctctcgcttcaaaagtgtttccctccattcgattgcacgagttttttcaagccgacgtgaaaacaatggaaaagcaattcaaagctaaaattggattaagttggtttgataattgaacaattcaaaacttacagttgagacaaataaacggccaattaattaactttcctcagcagaaacccctgagaatggcaacacaggcggcgattccatcgaattaatcgctgacccaaactttcgtcgtttcggatgctccgttaatttgacccaggccgtgcaacttttcgcaacaaaagagtgggacttctttctttctgtttttcgctgattccgtttttccattggtcagtgctgacattggcgaaagcattggccaattcgttgctcatttgaatcggctgaatgaggacgcccgacggaccgttgagggacacattttgaaggcaatcgaagcgatcattggccacgtgcactacgaagtgggggacagacagcagcaggagtttgctccgttcacaacaaatttcagagagtggcagcaaatgggccgcgaaaagaagcagtgacactcagtgaaccgctggtcacaaagtgatcggatgcctttcccggggaacgaatggcctttcccccaaatgtttcagctatttttaccatccttccgaattcggtctcaacgcgtgggaggaggacgaaaagttcgccttcgatccttcgacttccgcccggctgatggcctgcaacggttgggtgatgaacgcggacccaatgtccaacttcgcggagtggccaagccaagtttaccttcgtcgcgagttggtctgctggggcgacagtgtgaagctgaactacggccaacagcccgccgactgtccattcctttgggaatatatgcgccgctacacggagaaatgtgcgcggattttccatgggtttcgcattgacaattgccacagtacgcccattcacgtggcggagtatttgctgcacgcggcgcgcaaagtgcgcaaggacctttatgtagtggccgaactgttcaccggcagcgaacagttggacaatttgttcgtaaatcgactcggaattacctcactgatcagaggtggtcaaaaaagcacccaaaacggatcaaaatgaaagtttagaggctcagaatgcgcatgacagtcatgaacaggtgcgttcggcgtgggttaatgggaaatggcaaagcgtgcttcttcaagggtcgctttgtttaccgctacgggggcgacccggtcggtgcctttcgctgtaaggcaacgcgccccgccccgtgggcggtggcccatgcgcttctttacgaccaaacgcacgacaacccatccccggcgcaggtgccgtctcttcgcccctaatctctctcttttccggccttttgtagaaacggacgccctatgactttgtgccgactgcggcgatgtgttcgatcagcggaagtgcgtgtgggacggtgcgtgggtacgacgaatttgtggcgcacaatatcgacgtggtcaaagagcagcgaatgtaccgcaagtggtcggagttcggggaaaaggcaaaggaatggtga

SEQ ID NO: 56617 - DNA, 1079 bp, Heterodera glycines
atgaacttccgtggtgcaacggaagcatatgccattgttcattcaatgccatttgcccgtctttcgcatcatgttgtcaaattggcaattcatttgccaaaccaacagcccattgtatatagggcattccagctggtgagcaaagctcaacaaatccagcaaggcgaactgccagaaacgcagtgttcagcctattggaaacaatggcaaaatgagtggaagaatgatccaaagtttaaggacattcttttcgaaaaagtcccagagcggttccgatgggcaaaggacaaatgggtcctgtacaaaaggcagcaaattaaaaggccacctatcggccgaattgttcctgtacccccatcggacccggaaaggttcgcgctctattcacttatgcgtcactttcctggagacccagaccatcttaagatggttaatgggttgctttgtacctcattcactgaggctgcaataatgcatggtcttcttgaagacgacaaaatttgggacaaaactctggcggaggcagctctgtcgcgctggccagatcagatgagatggctttttgtgagcatcctggtctatggccagccgagtaatgccatagaattgtggaacaagtacaaagaccaaatgtacaatccgcaaggcattattactctggcacagcataaagtagcagagcttgaagccctagccgacattgattggcggctgcacagctgctttaacttaagctgtgtgcattttagcctgccagacccgccaacttcaattgccaaaaatactgacgcggcaattgaagagtttttctttggcgatgatgatttgaatttgcctccagggcaaccaaatcctcgtccacagccaaatacccctccgccacttaacagcgaccaacagaaggtctttgatgctgttttgttggcaatacagtcgaaccctagggattcgactgtcccccgccgtttcttcatatacggcgatggaggcacaggaaagacattcctgtttggccaaattattaggcgcttgcgaaaggccccatacacctacaaagtgcttgctacggcatccactgg

SEQ ID NO: 56618 - DNA, 279 bp, Heterodera glycines
atgtttgcattttttttggcttaccaaaacttcatcgaacctggttctttctattctctttcaaatcgccccaaattttttttacagccacgaggccgcgaagcggccgagtgagtacattgggcgcaggaaaattattaaggaggagggttcattatttatttatttttgcaaaattaattcataaatttttttcagaaactgctctgaaacgcaccaaaatttatttacaagttgaataaggcactctgactcttatattatcaaaaagggagatga

SEQ ID NO: 56619 - DNA, 438 bp, Heterodera glycines
  unsure (1)..(438): unsure at all n locations
aaaatctataaaaaatttaaaaatgagaattcatgcgagattttctggaaataagcttaattgggcctagttaagctgtaaaaaaaatttggggcgatttgaaagagaatagaaagaaccaggttcgatgaagttttggtaagccaaaaaaaatccaaacatttaaaaatctataaaaaatttaaaaatgagaattcatgcgagattttctggaaataagcttaatagggcctagttaagctgtaaaaaaaatttggggcgatttgaaagagaatagaaagaaccaggttcgatgaagttttggtaagccaaaaaaaatccaaatatttaaaaatctataaaaaatttnaaaatgagaattcatgcgagattttctggaaataagcttaattgggcctagttaagctgtaaaaaaaatttggggcgatttgaaagaga

SEQ ID NO: 56620 - DNA, 366 bp, Heterodera glycines
atgttgggcagcgtccacaagtcatctcgaacgacctgtgcccatcagcggacgggggcatttggtggtgccaacgctagcccaacaggacagcaggtaggtgggtgaataggaatcacttgggtaatgatccagcatcaggttcacctacagctaccttgttacgacttttgcccggttcaagccactgcgattaaatcggttccggtctgcataccgaccgaagccggaacactaaccggccccgaatttctcgaaatggctcagtcccgggcagcgacgggcggagtgtacaaagggcagggacgtattcagagcgagttgatgactcgcccctacaaggaattcctcgttcacggacaataa

SEQ ID NO: 56621 - DNA, 353 bp, Heterodera glycines
tctgaatacgtccctgccctttgtacactccgcccgtcgctgcccgggactgagccatttcgagaaattcggggccggttagtgttccggcttcggtcggtatgcagaccggaaccgatttaatcgcagtggcttgaaccgggcaaaagtcgtaacaaggtagctgtaggtgaacctgatgctggatcattacccaagtgattcctattcacccacctacctgctgtcctgttgggctagcgttggcaccaccaaatgcccccgtccgctgatgggcacaggtcgttcgagatgacttgtggacgctgcccaacattaaggggcagctccctcacgatccatgcttttggggt

SEQ ID NO: 56622 - DNA, 141 bp, Heterodera glycines
atgacctccgaagaaatgacggtggcggtcggtcaggcgatgcttgcggtggtcgaacgcgacgcatccactggatggggcgttgtcatccacacgatctctgcggaaggagtgaccgcaacaatgattaaatcgcgcatg

SEQ ID NO: 56623 - DNA, 679 bp, Heterodera glycines
atgttaaaaacattacattttgtgatatttaactttgaaaagtaatttaacaatttttcttattgaattatgttcaattattttattaagcaatgcaaaataaccaagcatgggcagttacaccaattattatataagacttttttataaaagcatttttcagtcttttcatacattctctttataatagtgttaagcataaaaaattattattgtgattcaatatttaaattattatgctcaaatctttatgttctaaaatgatttatataaataataatttagttttcttattaaggttgtagtgtcctttagagaattaaaaccgtttcatttattttaacaagtgttatggcaagaattaattggttttttcgttcctcttttcttgactgattcttatgtttttgatttaattaactgtattaattttttctaccttcaaaaattgggtataaatttggtatcatttgatagagcaaggtcgacttctattgtggttttttaattaaaattaactgatttttgcttattttcactaaagaaaaatatcatattcattttttagtctaaaaatgattttttaaattatttagttatattatacattaattaaaatttaatttcatttttcagttatttaacaatttcgtatctttttttatcttttattttatga

SEQ ID NO: 56624 - DNA, 445 bp, Heterodera glycines
atggaggcaatgatgaagaatacagacgagagggcagcagcagcaactcagggagccatgaccacagaaaagcacacaaaacaaacagaagtccggaaaaaccaaacaacaggtaagctggcaatgaggaattttttgaaatcaaatgcgaatttattgcttaatagggtaattttcgagaattcaaaattctaataaattacctactttttgttcgagttcggggtttgatggaaaccagattctgacatccgttttgactctgagctgaaccaggattcgaaaaaactagaaatttaatttcaagcaaatttttattattattacagcttatttattgtatcaaaagattgtgattttgtttcgtgaatttgatccggttttgttgcataaatgcgattttgacttaattcgaattcgggttcagagtccggaacgagtctaa

SEQ ID NO: 56625 - DNA, 690 bp, Heterodera glycines
atggcgtgggacttcaacttcatcggaaggatcaagctcacgctcatcctcacaatcgagccgatacggacgatctccgggaagaaaacagaagggaaaggaaaagaggaacagaaagagaaacaggagaggaatagagggaaaaagaggaagagaaagtaagaggaaaaagaggaacaaaaggcgaagaggaagagaaggggaagaggaacagaaagagaaacaggaggggaatagaaggaaaaagaggaagagaaagagcaacagaagggaaaggagaagaggaccagaagaggaagagaagcaaaagacgaacagaaagagaaacaggaggggaatagaaggaaaaagaggaagagaaagaggatattcccggccattaaaaaatctaattgccctcttataaaagctttttggcgcgtagcgccctctagagacagtgtttaatagcgaagctatttcaattttttaaaaataaattaaaatcgtcactttcagtgcccgtagggcactggttattatgaataaaaatttactctaaattttcaaaaaaaaattaataattcgcattctgacttaactccgagtagttgttcggtctcattcctttttcaattacattagtttatataatttttccattaatttatatatatatatatatatatgtctttttgaatattgaaaaaa

SEQ ID NO: 56626 - DNA, 4518 bp, Heterodera glycines
atggtcaacagagagactgttgatatacgcaagagcaaaataccgattaaccatgcttgtccacaaattttaattggtatcgaccactattggcactttacgttgccaaactcacaaattcaaatacttccctccgaatttttttcaatcgatacaaaattaggaaaaatattatccggaaaaggtactattgaagacaaaatattaatcttgtgaaagaaaagcgaaaaaaggatgagacaaacgaaatccttcaaaaattctgggaattagaaaatattggaattaccgactctccacatttgacggacgaagatacagctctcatacactttgacaaaaatgtcatttttgaagaaaatagatactacatccgatggccatacaaaagagaaacaccgaatttacctacaaattttggattatgtttgggaagattaagaaatgtagtcaaacaattgattaaaaacaaacagttggaaaattataataaaatactgcaagagcaaatggacactaacgttaatgaaattgctgatttcaaatccaaaaatttaattcactatctcccacatcaccccgttataaaagagagttcaaataccacaaaaattcgaccagtttttgatgcttcggcaaaattaagaggaagcaattccctcaatgacgaaattcaccaaggaccaaaattattacctgatttgtgtggaatgattctccgattcagactcaaaaatttcgtcttaataggcgacttagaaaaagcttttctaagagttggattaaatgaaatagacagagacacaacacgctttctatgggtaaatcagtcatatttggacgaaataaaccaaaaatatcgagaaatcgaaatgagagacgtagaattaagacgtttcacacgaatacccttcggagtcaatgcttctccgtttttattaactgctgttgtgaatcttcatttatcaaaaacagatgaaatgtttgaaaagtttaaaacattacaaatagatgaggaattatgtattagtggaaaagagaaacaattcaaagagctatgcacagaacttaaagaaaatgcatacgtcgacaattttgtaatgatgtgtgacgacgaaaaggaaataaaattcaaacattactggagcaaagaaatattcaaattagcatcaatgaatttgagagaattcgtgtctaatcatgaacaaagtaacaaagagattcaaaaattagaaggatctgaaatacccaaaatgacaaaaatgttgggtataaaatggaatgtcgacacagatgaactcgaacttcaaataaaaataccgctaatgagtagagacacgacaaaaagacaaattttgacaatgatcgcaaaaaatttcgacccaatgggttggatatcaccagtaatactcaaatacaaactatttttccaaaaactatggagatcaaacaaagactgggacgataaattaaatgatgaagaaataagagagtggaacaatatttcaaatatagacgaagtttccataccacgctcaccatttacaagtcaaaatttaaaatgtgcttctttacaccttttttctgacgcttctgaattagcctacgccactgccgcatatttacacgcaaataataaaactgacttattattcgcgaaaacgaggcttaccccactcaaaggcctaacaatcccaaagcttgaactattgggactattaatagcagcaagagccgtcaaatttatcattaaagaatcaaaattgaaatttgaaacgatatgtatctggtgcgattcaaaatgtgtactcagctggttaaagtgtaaaaagaatttaccaatatttgtaaaaaacagagtggaagaaataaaacaaattgtctcagaatttcacatcactttctattacgtaaaatcaacagacaacccagctgatttggcatcaagaggtacaacaatgaatgaaatgaaatacaacgaattatggtggaagggaccaaaatggcttaaattaggaaaagaaaactggccagcccacagtttctatactcctgagcaaaatgattcactttatgatgataacataatggaaatcgaaaacactcagacaaatttagtcaaaatggactaccaaggatttattgaatggaaaaaatacaattcatgggataaagtgacaagaatttgtcaaatcttattaaaatttgtattttttacattaaaagactctcccgaattcaaaactaaattcaaaatacagaaatttcaaaacgaattgagcttaaaattcatggcacaaaaaatgctaatacgcataattcagaaagaaatggaaccaaataatgaggaagagagacaattgggaatttacagagacaatgatgaaattttgaaatgcggaggaagattaaaaaatgcacagataaaagcgacaaatccaatattcttaccaagaacacattttggtactcatttaattattatggaccatcatcgaagaaatttacacgctggtacaatgacaacattagcagaaattcgtaaaacttattggattcccaaaggaagaagaattgttgaccaaatcagaaaacaatgtttctattgcaaaagatataacgcaaaaccatatcagcaaccaaaaatgccgcaattgccaaaatcaagagttcaaataactgagccttttcaaaacgttggccttgattacatgggtccacttcaaattaaaagtttcactgaaaaatgttggataatacttttcacatgtttctccacacgtgggatacacctcgaattagtgacatcattatcagttcaacactttctcaatgcatttcgcagatttatttcaagaaaagggacaccgaagaatatttggagtgacaatgcatcacaattaaaacttgcatcaaaagtattacctgaagtcctaaaattaaaggacatacttaaagacgactcaattaaaaactatttcgaaaaggaaaacataaaatggattttttcaattgaattagccccttggcaaaacggagcaatagaacggttaaatcaaaatgtaaaatcagcaatgaaaaaagcaatcggaaggaaattgatagaatttgattcatttcaaactcttatttgtgaaatcgaagccttagtaaattcacgaccaattacattcatttatgacgaaattaattcgtaccaaattcttagaccaatcgattttatactcccacacaaaaatttatgtattcctccaattttggaagacgaaactaatgatccaacctacttaccaaaaccaacttattatgaccaaacaatagagttatggaaaaagacaacaaaaatcttggatgactattggaaaatttggacagaagaatatttgccgagtctgagagaaagatacaaaacagaaaataaaaacccaaagaattgtgtaaaatcttttccagaaccaaatgaagttgtcataattcacgatgagacaccaagagcaatgtggaaaacaggaattattaaaaatgtcataaaaggaaaagacggtatcataagaggtgctaatattgaactaccaagcaaacatgtcattaaccgtccattaaaattactatatccgttagagattaacaaaattgactgtgaagagaatgagactatcacaaacttaataaaaaccactgaacacaaacaaattggtacaaatcgaaagagaaaacaaagtgtcctatcatccccaaaattaagcaaagtatttttaaacacactcacgtttcttctattatttatgcaactcttaccatgcttatcccatttatatgaatgtccaaaaaccaatgaaaaatggagaacgaagtatacaacattttgtgttgaaaatggatttactatcaaacaaaataaattaacaatggaattttgttattgtaaaatattttgtcacaaacaacacgtcataaaaaatcacccaccctattgtggaccacaatgcaaatgtcctgattggactaattcttgtagttttgcctcatatcacagaataaaaagagaaataactgatcaggaaaacattcaaaaaattatttcattctttaaaccaaacgtttgttcattcaataaaacggaaaaatgctccctaatggataaaaatatatttagttcaataatgctttatgataatagcattcattcagtcaaaagtcttaatttacttcatacacaagccaattctcgaattgattatcgttgccttggggagggcaatctgacgattggtacacaaaaattctgtcaagaacacgaatgcactgacacacatggaacaaaattttgcttttacgagccacacgaaaaaacttatcttgtgaaatcagaccgagaaattatcccaataaaagcatggggaagcatcgaaagaattttttatttggctaatgacacattaatggatgaactcaaacgtaaaaaaagagaattcgatccgttcgaaaacgaacaaatatccgctgaatgtacaaaag

SEQ ID NO: 56627 - DNA, 472 bp, Heterodera glycines
atgctgtacaatgtttttaagccccgccgtgaggcgggacagttccaaaattttgtaccacattttactgtggaaagtccaagtaccttattggacaactacgtgtcaatgagcacagtcgcctttggccagttgtggaacggaaaaatgggaatatcagatggggtgcgctcttttctaaaaattcctcttttcgtctaaccatccctcccttttgtgcactatttcgtttcaaaattgaatcatttttttttgtcttttgaaataaattgtgaaaaatatacgaaaattattttaggttttaattatgctgtacaatgcttttaagccccgccgtgaggcgggacagttccaaaattttgtaccacattttactgtggaaagtccaagtaccttattggacaactacgtgtcaatgagcacagtcgcctttggccagttgtggaacggaaaaatgggaatatcagatggg

SEQ ID NO: 56628 - DNA, 388 bp, Heterodera glycines
gcttaaaaacattgtacagcataattaaaagctaaaataattttcgtatatttttcacaatttatttcaaaaagccaaaaaaaatgattcaattttgaaacgaaatagtgcacaaaagggagggatggttagacgaaaagaggaatttttagaaaagagcgcaccccatctgatattcccatttttccgttccacaactggccaaaggcgactgtgctcattgacacgtagttgtccaataaggtacttggactttccacagtaaaatgtggtacaaaattttggaactgtcccgcctcacggcggggcttaaaagcattgtacagcgtaattaaaagctaaaataattttcgtatatttttcacaatttatttcaaaaagccaaaaa

SEQ ID NO: 56629 - DNA, 216 bp, Heterodera glycines
  unsure (1)..(216): unsure at all n locations
tgcctaaaataacnttgtaaataaaatttggtgcgttccatagcagtttgtgaaaaaatatttatgaattaattttgctaaaaaaataaaatagtgaagctttaaaaattaataaaaaattttaaattcagaattactggagttagcatcatagcagtgcttttccttgtctttttgatgccctcgcaaaatctggttcgcttctgatcagtttat

SEQ ID NO: 56630 - DNA, 446 bp, Heterodera glycines
caaaagcaaaacaataagcaaccacaatttgagggacagaatcatttgacagcagaaaatacggcacaaaaaataaaagaggagccaattgaaattggaaacgaaatgccaataattaatgaaaaaatgaaaataaaatacgaacaagaagaagaattcaatgtaaaaacagaaccaaatattggagaaattaaagtcaaagaaggagcaaatttgaacaaaaaagatttgacaccaaaagaaagtgaaggaaacaattcatcaccaattaaaatgggattattatatcaagtcaatatcattctacaaatttttgaggataatgaaaatgcctaagagacaaaattttcttggtttttagcaggccggttttatgtcgctagaccaaagtgatcaatattttgtctaaatcttcgctaacgagtcacctaagctcttcaagctca

SEQ ID NO: 56631 - DNA, 720 bp, Heterodera glycines
atgcgcttactttgtttgattggatttagtaaaaatgagcaaaaagttattaatgtattcttaattgatttacatcaccttatattcaaatttgtagagaatgttgatcttattaatgagtaccttagcaaaggaagtgaacaaatttctttaacggaacccgaaaaccctgacaatgaaattagcgttgattttggagatgaaaaaatggacaatttttcatttaatgaaactgtagaaaacatttttgaacatttaaatgtggaaaaggataccaaaataaattgtgaaaataatagaaaaacaaaaaaaggtgaaaattaattagaaatatttttaaaattcattaaacgaaatttggaaaaaaataaaaataatttttaaattcactattaaggcaaattatctgttgaagagaagaaacaaattgttcagcaatatattaatgctaaaaaaagtttggacaaaaaattagaaagaaaagaaattaaaaatttaaatgaagcaattgcccacaaattgggagtaagcacaagacaaatcagagattggaagcacaaatatcaaattggtatatatttgttggttaatagtatggcttttgttattaggatcttctataaatagtcaaaataggcaaaatttatacaaaattggtaaaaaaatttagccaaattagtagggatgagattttaggcacaaaaaatcgcaaaataggca

SEQ ID NO: 56632 - DNA, 372 bp, Heterodera glycines
atgctcataataccgtacttttttaaatacaataataacctacacattcttcaactaacagatttttcagtcagtgtgtaattttcgcgtttgttttttaatctttattttattacggtaaattataatttttcagaatccattcgcaaatattcgcaagaaaaaaagctcaaaattattagacaatttgacgaaatgttaaaggaacataagagaaattcgagcaaaaaatacacttacaaaacagaaaatcaaatcgcaaaagaaatgggcattaaccgtgcaacaataattcgttggagaaaggaattttgcttatcaagtaagaaaaggaattatttatctttttaattttgctcccgccaaaaaaaa

SEQ ID NO: 56633 - DNA, 210 bp, Heterodera glycines
aaaaaaaatcgattttttcaagtgtccgtttgggggtactcaatcaattatggggagcaaaaatccaacgcagaattaaagtacaggctatagggaagctattccggaaggattcggtctccccataaatctgggcgcatcggctcggggggactgccccgaaaacaaaaaaatcgattttttcaagtgtccgtttggggtactcaaaca

SEQ ID NO: 56634 - DNA, 534 bp, Heterodera glycines
atggacaccatttctctgcaagtactgctcgcatttgcgatgtttgccaccactgcgttggccggactgcttccgatcaaagtgatccaaaattattaatcgtggattttaattgagagaatttttagaagaaatttattttgtatattataggactgctgataatcttgaccaattttgattaggaattaatggatttttacaaaaatttaacagaaatataaatttaaaaaaatcgaatagaataagcattaattattttaaatccaattttaatcaaaacatttgatcagaattttaattaattttcagcttcttcacgcgatcacacgtcgtcaggacgaaaatgatgagcagcggagcagaaaatcggattacattttgacgcttttgtcctgttttgcgggcggtgtgttcatgagcacttgcttcctggacattttcccacatattaagtcagtttccgcttatgaatcccgattacattgtctggatatgtcttcgagagtctcgagacaaggattaaaattttaa

SEQ ID NO: 56635 - DNA, 366 bp, Heterodera glycines
atgccggtcagccaagcaaattcttggatccctttggtattgtcactggtcttgagattaaggggtataaaaatggttgataaatatattcgagactcaatcaaaaattacagagactcgacacactgaaagcaaaaatttctcgggtcgagactctcgagcagcaaattttaaagaaatatatcggtcagagcagttcaaaatttccgctctccttaaagatacagctcacaatcagtaatttttcctcaaaaatctgccgctattttatatacagatatatggtagggacgtaaaaattgcattttttttttccccctaaatttgggacgaatggtcgccgggaaccaattaattggcaaaaaa

SEQ ID NO: 56636 - DNA, 453 bp, Heterodera glycines
atgcttttttttctgttgctcctctctctgtccctttttctgctgctcgtgccaaatgtctgctgtcataatgccgaattggtgctgctcgacccctctcagatcggcttctttctgcccaattattttgttaaaaaatttgagaaaaaacttttcgtgaaatttgccagagaatttcggcctgtttttgtcgcatttgcaatgctcgaaccgccttatttatacgtggaccaatcggaaaacattcgatcggtggaccgagcggaggttgagaaattaatgaagttcaaattggtgtcacgactgaggaaggagaagaagctgatggagacggcacagtttaatctgacgctagcacatgacatccaaggcgcactgttctcagttccggttccgtcggttgaacgatcgcgggaacaagaaacatttggcatcactaaattaccatattaa

SEQ ID NO: 56637 - DNA, 899 bp, Heterodera glycines
cgttgatctgatgcatgaacccaatttggtgctgacaaagactgaccctccgctcgctttgctcgcctccctttggttttatatgacccctcagcccccaaagccgtcaatgcacgacataatcactggtgaggaggcaatttgaaatggattcgtgcattttaataataatttccgtcaaaaggacaatgggaggcgggcgaaataaatgaagcggcgggcttttcgggcccaatttttgggccgacgagtttagtgattaacaacgaatgtgcgggagaggatgaaaaagcgccggggggcggcggcgaaaaccgacggatcaaagcattcaaatggctctgtcggcattttggagtttcggctggaaatcagacgactttgagttgcaaaagtgatttgactggtcaagattccttgtcttcaaaaacagtttttcgcagaaatgccgcggcacttcgatgagatgatgcacaatgtcagctggcagcccgactggtcctccacttggcgggaggatcggccgtgcgtttgtgcccccgccgcttacgggggttggctgcatgtgccgttttacaagtggcatttccccattatcaggtgccattccctacttccagcctggcttttacccttcccaatttgtggaagaaaatgaggccaacaaagcccagtgtaaaaagatgctctccgaacagccgcaaaacttcggcatggatccgatgaccagcggctgtctgaaccacacaaaggtggcggagggagcgaaagtgccaccggggacaacgacgctgacggaaaaagtgccaatgagtacggcgggcacaaaagtgccaaggatggcttacggaactgtcagctatttgcgaccaaatctgacgataattgccttgggatag

SEQ ID NO: 56638 - DNA, 317 bp, Heterodera glycines
atgcaaaatcgccacttggaagaagtcttgcatatttggatgaaatcatgcagcgtcttcgctgaagagtggaaggaacggacttatgaaccagttgaattgaaagaaattctggtcaatcgaagagcaatcggagaagagccatccctcggatgggaaagctggctcacggaactcacaaaacgctttggacaggcgttgacagcaattcgtgccaaggcattttggccaaatgcctattatgtcctgaaggaaaccgttgtcgtgggagacaatttggccgagcttctcgcgaagcaaattccaaacgctggatg

SEQ ID NO: 56639 - DNA, 633 bp, Heterodera glycines
atgttcaacggcgagcaacagcaacagaacgacgggaatgacaacgggcgagttgtgcgcaaaccgccgccacgccgctctcgcaatgctaacggcgacgtgccggcaagtttaaaaattgaaatttttcatttatttttaatttttcccttcctcctttttttgaaggagagcgacattgggcggaaaagggcacggcagagcagcacgagcaacaccagtggcgccaatcgaggcgcgacgagcagtcaaagtggcagcggcggtggtgatgactggtcggctttcggtggcaacaaaagcaacaacagccgccgcaacggcacttcagcgctggacttggacatgctgctgatgccgcagatggtcagcagcgacaattcggcaagtttttttgtggatttggggtcgggttttcggagtcgcttatcaaacaattgagggtttaattaacctccccccctcctctgcgctttgctcaagcggatttgtacaaaaaatttaatttttcaatttcagctcggctcaacgagtgccggcacagttctccaacaaatgccgctgggaagcaactcgacttctgctgccgttgctgtcatgccaatgccgtttttggacaacaacaacaacaat

SEQ ID NO: 56640 - DNA, 65 bp, Heterodera glycines
atggctaaaaaacgattaccattgtcggagaatcagcagccgactccgccgaagagaaaagaaat

SEQ ID NO: 56641 - DNA, 162 bp, Heterodera glycines
ggaaaaatatgcgcaggaattggacaaagttttgggaatggcacgggaaacgaatttggaaatggaggacaaattgaggaaaatgcaatggcaaacggaggagggacaaagcttagaaacagtgaaaagccgaagagattcagcggaaaagtgccaaaatga

SEQ ID NO: 56642 - DNA, 1088 bp, Heterodera glycines
atgtgtctgttaaaatgcaaaactgttgtgaaaaattgttataactcctttcagagaagagatagaaaaaaaataaaaatagggttagagagcccgtgaacagctgcatcggatgcaagtgccgccgttgctgtacgcctaacagttggtgagcaatgacggaaaattgcttaaaaaagaaaccaaacaaactcatcaattgttagctcccgttgacaaaccgaagggtacattggggcaatggatgttgggctaccgtatcagttattaaaatttttgtttttcaaaaaggatactaaaactgggataaccccattcagagactagtcaaaaaaaataataataggcttggactactatactaattagaaattttagaatgtgtctgttaaatgcaaaactgttgtgaaaaattgttataactcctttcagagaagagatagaaaaaaaataaaaatagggttagagagcccgtgaacagctgcatcggatgcaagtgccgccgttgctgtacgcctaacagttggtgagcaatgacggaaaattgcttaaaaaagaaaccaaacaaactcatcaattgttagctcccgttgacaaaccgaagggtacattggggcaatggatgttgggctaccgtatcagttattaaaatttttgtttttcaaaaaggatactaaaactgggataaccccattcagagactagtcaaaaaaaataataataggcttggactactatactaattagaaattttagaatgtgtctgttaaatgcaaaactgttgtgaaaaattgttataactcctttcagagaagagatagaaaaatcaattgttagctcccgttggagaaccgaagggtacattggggcaatggatgttgggctaccgtatcagttattaaaatttttgtttttcaaaaaggatactaaaacttcaattgataaccccattcagagactagtcaaaaaaaataataataggcttggactaccatactaattaaaaatttttgaatgtgtctgaaatatgcaaaactgttgtgaaaaatgttataactcctttcagagcagagatcagaaaaaataaa

SEQ ID NO: 56643 - DNA, 566 bp, Heterodera glycines
atggaaattggagccgcaaatgttcggcaacatttcgaattgtctctcaaaagagcggtgtggaggattttaagagagaatacaatgaaacagtttttaacaatgaagcgaagtcttgggggaactatttcatttcttttgcggtgagtggaaattaattagttaatttacattttaatattgtaatggcaaattaaggaattaatggacccaagcaaagggttgtacaacaaagacgaggacaacgtcaccttggcaattgattttacatgtgaatagcgtaaacatttcgagaaggattgaaaagggaaaggaaggaaatcagcaggatgagaagagagtcttggagggcacaaaattttcttggtgcttaaattttatatttttttatgttttgtaaagtattttggtttcataaagcaacatattccaatgatagggatggatttttatgtgctaaaatcgagaaatatatatacctaaagagttgataaaaaaggcagaaaaatttgctaaaatgcagaaaaatgccaaaatagttttcaaaaaattggaaaaacatgtca

SEQ ID NO: 56644 - DNA, 348 bp, Heterodera glycines
atgtccaaatcagtgattgatgagataaagttgatactgagcacagctgagcattcggatgtccactttttggtggacaaaatcttctaccaaatctcataaaaacaaaaaatatttctctcctcaattagttttttaaatcaagccttaaatcagcaataagttacatctttttatattcttcataaatttatttagcaaatgaacataaattttcagttttcccggagcgcctattggccctccggacgcttgctttgtaaattggtttttgacgagaattcgttctttctcagatttttaattttaattttatttttgaatttttcttttgcagctaaaattaaa

SEQ ID NO: 56645 - DNA, 408 bp, Heterodera glycines
atggcagaacaatttgtacaacatgaaactgcggaggagcaacaagtgaaagctaagaagccaaacgttgatgagcgatttctttggaaaatcacgagaggccaatttgtgcttgcgattcggctgtgctcaggttaatcaaatttttgacgaccaaattaattgacagctttcagaggactggaacaatttatttcacaacaaagacaaggcacgtcggctggaagatgggcgagtggcgattggactcgagatgtgtgaagaatgcgctaaacttaattgttgtgtcagtgatctgatcgctggccaaaaaaagaaccagaaaaagccggaatgaatttgttttttaccgattaatatttttaataatcactcccactattttgaatttattttgtttttaataaa

SEQ ID NO: 56646 - DNA, 443 bp, Heterodera glycines
aacgaaatagtgcacaaaaagggagggatggttagacgaaaagaggaatttttagaaaagaacgcaccccatctgatattcccatttttctgtttcacaactggccaacggcgactgtgctcattgacacgtagttgttcacagtagttgtccaattaaggtacttggactttccacagtaaaatgtggtgcaaattttggaactgtcccgcctcacggcggggcttaaaagcatttgtagcgcaataaaaaagtttattgttttgaatttttcacaatttatttaaaaaagccaaaaaatccggatccaattttaaaaacgaaaatagtgcacaaaaagaagccgcctcacggcggggcttaaaagcattgtacatcataattaaaagcgaaaataattttcgtatattttttcacaatttatttcaaaagacaacaaaaaa

SEQ ID NO: 56647 - DNA, 595 bp, Heterodera glycines
atgtgtacgcagacggcactttcagtcggcgccacctttttcaggtaaatttatgtcctcgcaaagtaaaagcctaatttctttcatattttttttggtttttaaggcgaattaattggattttttattacgtactgccttctcacttcaagtgtgaagcgttgaacacgtatgcctcaactgattgtcaaagatgaccgaatttttcgcctgaaacttttcgttggacttcgaggtggtgatatcgccgatgcgagaattcttcaactcttacgggcatgccactgtcaatgttaatcccgatatcatcagcgattttctcgttggtacattatctcgaatttatgaaatgtgcccgtaatgatttttcaatgtttttttttattggaaatacattgataaatatgttctagtattaaattaaacattttttgaaaaaaaatcagattagaatccatatggcacaaaatcagcttgccagactaaaacgaccccctgactaaaacgtcacctcagactaaaccgacccctcctgacataaaagaccatttggaaatggcaatggtaaagttttgtgttttttttgaaaaataaa

SEQ ID NO: 56648 - DNA, 303 bp, Heterodera glycines
atggaaagacaccgtctaattcctggacaagagttggttgaccgaaatttagctgagctcgaatttcacgactattttgcaactgatcatcatggcaatcgatttctattggtcgactctcgcactgctgaacccgaaaatccggttttcttcattttctgttcggatgctggaattcagcgactacgtacatatcggaattgggcatgcgatggaacgtttaaaagtttttatgctgctttttttgaattgtttgtttttttaagtctctccaaaggatcttcgacagctgtacacatttag

SEQ ID NO: 56649 - DNA, 848 bp, Heterodera glycines
atggacaagattattcttcatgccgatctttttttaactcttgctatagatattccaaatatgtaattaatatacttagttttattatattcttttttatttatcatagcaaatcttagaaatttttattttgtgattacattgtgtaatcgattgaattgtataaattaaaatataatcttcaatattttgatttttatattttccggaatttatttatttattattgttacacaaaaatatctcttttattaaaaagcgatctctaacaatgttaaagagacttttaaataattatgaaaaattacgaaacaaaagttaaaagaatttaaaagaagaaattcacaatttcgaaccaaaagtcaaaaattcattttcaaaaaaattcacatttcctgcaaaaatcgttttagggtggttttcagggtggaaaatacaattatggtatctattttggttctcttcgagccaggaacctgatttcgacaaaagtaggaaatcccagtttttcagatttcaaatttttgttcaaatttggtctgcacttttgttgaaaaatgaatttgtacttttttcaaatattgttcgaatctgtgtcagggttcgaatatggacaaaatagatagcagaaccggttttccgaccctaaaatccccctaaaaagcgtttttgtgcaatacatgtgaattttagtgaaaaatgaattttcgacttttggttagaaatcgggtccgcaattcgaattgggctaaaatcaatgtcagaatcggtttccccgaccctgaaaacccccaaaataagtttatccccaaaaaattgtttttttttatgaaatctaagtacagtta

SEQ ID NO: 56650 - DNA, 297 bp, Heterodera glycines
  unsure (1)..(297): unsure at all n locations
cacacccttctgccggaccaagccctcgaattggccaaggccgcttctcaagtgacgacagcgaacgcaaatcgcaatcagcgaacggcacaacaacagctgcaagcgcccactcaaaatggtggggacacttcctcctcttccacgtcttccgttgtcagtgagcgaaggacatcacaaatggcttatttcgaatttcccgaggtaaataattcatttatttanaatccagaaacaatttgagattanatgatcccctttcaggctgattttgacagtttggaagcactcgtttga

SEQ ID NO: 56651 - DNA, 786 bp, Heterodera glycines
atgccagggggagaaatgtaaaaaagaaaggcttttaagcgtcgtgctggaaaattggaaagtacaaaaaaactaattttaattttatcacttatttttgcctaaagaagctaacgtgccaattttatcgacaggaattttaagggatgccgaaaaacttcagaatggcccgaccaaaactctatacgaacatgtatgcatatgcattttaatttgtcaatggctgacgcgccatatgaagaatcgaaatgatttttggcatcatgcatgaaatggtgaaggaaatggcgtaattattaaattttttaaatattcctcatgaaatgtatttcgactaaataagtaacagcccacttgaatcactttattgtagaaagaagctcaataaaagccatttgcagatgccagggggagaaatgtaaaaaagaaaggcttttaagcgtcgtgctggaaaattggaaagtacaaaaaaactaattttaattttatcacttatttttgcctaaagaagctaacgtgccaattttactcgacaggaattttaagggatgccgaaaaacttcagaatggcccgaccaaaacacaatacgaacatgtatgcatatgcattttaatttgtcaagggctgacgcgccatatgaagaatcgaaatgatttttggcatcatgcatgaaatggtgcaggaaatggcgtaattattaaattttttaaatattcctcatgaaatgtatttcgactaaataagtaacagcccacttgaatcactttattgtagaaagaagctca

SEQ ID NO: 56652 - DNA, 485 bp, Heterodera glycines
atgaaaacgcaaaatgaggaaatgagaagcgatgaagccgagagacagacgaaggagagagagcaggtgaagaaactgttggacgaatataagcgaaaggtgaacaaagaaatggaaaagaatgtcaagaaaatggagaaggacgaaaagctaaaggaagtgctgagggaaatcgaagaagcgaaagcgaaacacccgggggagaagagaaaagcggcgaaatccatcacagagataaatgagaagcattgggacgaattgtaccagggggacattgtactgagtgtggaacaggcacagtatttgctggatactgtaacaaaaaatgagcaggaaaagtcaaatagttcaccagcgggaaacggagcggagaaaaggaaaaagcgcggaacggacgaaaatggcaaaaaagaaacatttcctattttgaaatggccacttctcaccatcccattctcattccacagcataatccgtaattgaaa

SEQ ID NO: 56653 - DNA, 1346 bp, Heterodera glycines
atgttgccgctttacagattcgtgacgactacacgcgctacaaaagaagtgatgagcgggaggaactttttgctcgctgattcagggatttacagagaagcaggacgacagacaactgaacggtaaggaaacaaaacccattatccgtttataatttaaaaatttagaattctaattttcggaaaatagtcgaatggcagttgggcacagcaaatgcgaactgtgtacgttgatggcacttttacaatcgcaccaccgcttttttatcaggtgttcgcagttcttgcgaggtacattttaatttataaacaattattttttaatgattttaggcgtgaacaatgggttttcccagttttgtacgggctacttactacaaaaacaaaggagacctatgcccgcttttttcggatggttgtgtctttctggcctaattttcgtcctgactcaatttcggttgactttgaagcaggaatcatcggtgctgtaaaagaagtgttttcggattgtgaactgtcaggatgcttttttcatcttgtccgtaatttcaaaaagcgtcttgctactgaacaccttgttgaggtttttccttcaacgctgtgtcacttttaatttccattccaatttagcgctacaattctgacccggtctttcaaatgtatgccaaaatgattacatcattggcttttttaccaattgaacatttgacgcttggaatcatggcacttgaaagagaacttcctctcgaacttcagccagtttttgactggtaaaaattcaattttgaaagttgcttaaatgttaaatacaggttcatcaacaattacactggccgaccgcgttttgacggaactcgaaaccctgcactgtttgatccggtgatctggagtgttcatctgcgaaccatccaaaaacgagacaggacgaataattacgcagaagccgcacaccgatcacttcaacgcgcatttggctgtgaccatccgtcaatttggacatttatcgacagactccgaaagtgtcagaaaattatcgacgccgattttgcaaaattttcgataggtaattcaaaaataaatcaaaatttttaaagctgactttataggcgaacaaccttcaaagaagcggaagcagtacagagacgccgatcgccgaattcttactcttgttgaacgatacgcccaagaaatgggagtccaaaatccgttagtgcccattcattacgatccccaatactttgcaaatcccggcccaaattttaattatgtgattgaatttcttcagggaatatcccacaattatgagatgaacccatgatttgttatttatgttttacaattaataaa

SEQ ID NO: 56654 - DNA, 1216 bp, Heterodera glycines; identical to SEQ ID NO: 25882

SEQ ID NO: 56655 - DNA, 808 bp, Heterodera glycines
cgccaattggaaatcctgcttgttggattgtgtacaacagaagtcgaattgacatgggaggagggtgtccatcattgttttctggatcaaggggaatctcgaacaattcaacaaacgttggaactttaagtggtacaactttgtttctgaaaaacgaaagcattgacatgatcagaagtgaaattgatcattattgtgactacttgcttgttttacgaacggcttgaaaatcaattctcgtcgactttatcatggatgatttggtgaaattaatcagaaagtgtaattaggcattaaaaatttagttaaaagcaattaccgattaccgtcctgccaaactttgttcggtttacttcaaactttgtttaccagaccaggatcattttcttcatcgactaaatgatcagcagattcgccatgaacatgaacaccgtcatcgccatcatcatcagcatcgtgagcagcatcattgtaaacagtgttgtgccaaagagaaacaaaattttcaaaactttactgcgccgcgatcaaggatcagcattttggtcgaaaatgatggagctgtcatgcctgcgggttcgcttgctgtgatggatgaaatgagttatgatacattggttagccaatttcttggcaccgatgatcatgaaggtgtgattttccactttttggaaatcttttataattataggaatggaaaaaacaatgaaatttctcgcaagatatgaattgattgctaacatgcttctctgtcctgaatgccaggagaaacaagcatcattggtcaaatataaacagtttcctgaag

SEQ ID NO: 56656 - DNA, 746 bp, Heterodera glycines
atgatcagaatcaccgagaatgatcaggatttattgattttgatatcagaaagagtgagcgggcttttttcccggatggtttcgtatttttttaaattttttcagagcgagcctctgttggttttagttgaaatgtccacattattcgggattaattgcaattctcatatcaatttcatgatcattatttgatcagccttttgtttacccgcaatcgccgatcacttttcgtctcccttttccgcgactgcctaatcggttgttgataatgtttttgttgatgtgcagcacataaccacgggttggtggtgctgataaatggtcctacaataagggtttattagggatttaaataatttcgaagtgctggcattatgtcacaagggataaaaaaaatgttccgttgttcacacacaaaaagaaaacaaacaaaaattctaccagtttaaagtataaaagaaaattcttatagttttattgtaacaaattatccatgaaattttggctcaattacactttatgaagccaatagaacctggaattttgaaaaaaaacggaatcggatttggaattggaattaggccaggaaaggattagcgggattgaaatcccggttttgtagaattttaagctcgaccccatggtttaaatcccattttccccccggattccccgatgggcggcggcacttgcagccggaatcgggatcccgggaaaaccaggcgggatctttgaagaagttttga

SEQ ID NO: 56657 - DNA, 68 bp, Heterodera glycines
attcagcgatgcgggatcagtacatgcgcacgggtgagggctttctgctggtcttcgcgctgaacgag

SEQ ID NO: 56658 - DNA, 607 bp, Heterodera glycines
atgatttcaaacaaattttcaaaaccaaaatcagctaaaaaaggtccgatagcgttcattgagctccttcaagcacacgtcacgctgatcaacaatttccgcctccgcgtcattacggcctcgcccgtgggccgatttgacgtgcattatggcagccgagctgctcaacgattcaaaggcacgtttttgaaattaatgaaactaagttttatggggtttttgaggtcgctgatctacaggatgcataaaattcgaaaaattgtatggatggtatcctatggttagtcccaaaaaaagtcttaaaatggatcgtgggttcaatttcaactgaacagggacaattgcgctcatcagaaagttaatcgacgacaaactcaaccaagaacccgtccaattcgttggaaggttggtaaaagtaaacaacaaatgtgtagatttaagataacgatccattatcccaaatcaaaatgtatcggtcaattcgaactctttttgtgcatattttccatcgcatgtaacaaacaattttaaaaaatatatgtaaaaaaatcattaaatgcagattttagtttcaacataattatttaataaccttttctgaaataaa

SEQ ID NO: 56659 - DNA, 879 bp, Heterodera glycines
atgcaacacaattgcccgctgtgtactgtgagtgccgttttggaaaagaaggcgaagaaaagtcaaatgcgaatttttatgaaaaatatttcaagggccgaatacaaggtgtgatttgattgatatctacaattgatcaaatccccctttcaattgggtacattaattagtcagataatacatcaattagttttggtgggataaagtttttgtaggcatttgggggcaaaacgacatttagggatttatgacttgggacccaacaattggacatcccgaaacttggagactccgatccgacatagggactccaacatctcggcatttgggggcaaaacgagatttggaaactcggcatttgggggcaaaacgagatttggaaactcggcatttgggggcaaaacgagatttaggaactcggcatttgggggccaaatgaaatttgggaggatttgtaacgtggggatccgacatttgtaatgggtgaagctgataagattgctcataatgtgggatgcagaggaattgatgataagaaacaataatttttttatgccaaacactagagatgcgccgtgaatcacggtcacggttaccgtgaatttcacgggttttttcactcacggtcacggtcacgattcacggtaccaattcacgtttattccgtgaaaaatttacactggataaaattgaaatttacgaattacatattgtttcataaagaaatttggtccttttttgggaaatttttgctaagaaacagagcaaaattttcaaaaatttccccggcggcgcctatcggcaccgccggcccaatctctattcctgaaactttttgaacaaaatcaacatttctttaaaaaactcgctcgaaataaa

SEQ ID NO: 56660 - DNA, 87 bp, Heterodera glycines
atgtctcggaaaatgatcaaaatacgtacaatttcttggggttttcttaggctcccggacaatccgtcagtggacaataatccgtca

SEQ ID NO: 56661 - DNA, 319 bp, Heterodera glycines
  unsure (1)..(319): unsure at all n locations
atgaatttcttcaccgtccttcttttcctcgccaactctgtgctttcaacgtaagactaagtgaaaaatcaaaaattaaaataaaattaataaaaaattctgtacatacttttaccgtatgaaaaaaaaaacattttcaattttttgtaaaattttagtggcgctttcagttgcggagagtttttggaaacaaattcgatgaagttcaaacagacgttggaccctgacaacatccgtcaccctagtgtgaatcttggaaattattgcggtgctccagacatgaccatgtgnttatgcataggatgcagctcaccgnatg

SEQ ID NO: 56662 - DNA, 673 bp, Heterodera glycines
atgttcacctgtctcgcgaccacgttcaactcgaaaaagattggaacgtttgaggtcgaattcctttacagcatagttaggtaccgtattttctctaattatatgcccgtctccattaatctcctcgtctccaattatctccccctttctacggaggttgaaaagataatcactccgtcttaatctactcgtctgcaatcatctccccctttctgaggaggtttaaaaataatatacccgggcatataattagaaaaaatacggtaatttattttttttcatcagtacgaaaaaacttttagattttggtctacacctacatcagctgcacagctgtagctacagccttagctttctacaatattgatgaagtggcttgttactgtaccgttccttataccgtatggaccggattatactttctgctcgcgagttatttccgccatacacagattcacaacatagaggaataatctttttgcacacggaaattgaatgacaaaaacaggatcttgtatttgaaaaaaaaagaattttttttttaagtttaacaattaaaagagacgattttatttatttatttatttttaaatgaatcggattcaagccgatctttcagtaaaaaaatatacgaaaaattatttttgaaacaaaataattttttatcaataaa

SEQ ID NO: 56663 - DNA, 1369 bp, Heterodera glycines
atgtctttcttctggaatacaaccaacgcaattgtttcctcacttttgccagtcttaccggcttttgtcatgtcatccagccatcgacgcgatcttgaggcctttagcagtaaggtgagattactgtatacgaaacgcccgttttggtacggactttttgtcgcggaggcccgccctttcatggacagtaaaaaaaatcgccaaaaaatcattgacttaattaacaaaatgccaatgcattccaaaacaaaaacaaaatgtcttaactgtgatcaatagagatctaaattttagataagaaaaaccacgaaatagatatttagtataaaaaaatatacaaatttttattaaatatgtacaaaaatccctaattattggggaagtgcatctcttaagtggatggacccgcgcatcttcacagccattgatctaattcttgctgttccattcggttatgccgcccatcttgtctataaaaacggaggaggttaaagcaattaacgccctttttgatagtttttgtctaacatcataagatgtgccgacttttgcgccgtagaaacgattggccgacatttgcggcgctgacacatgcggcgcagacatttgcggcgcccagtcaaagcgacacttgcggccccgacatttgcggcgtgacacttgcggcgccgacacttgcggcgacgacacttgcggagccgacagatgcggcgcccagtcaaaaggacttttgcggcgccgacacttgcggcgcccagtcacaatgacatttgcggcgcagaattaaatgaccccaaaaattatttgaacaatttttttgatttaaaaacatttgtttaatcactcttttagtcctattcttcaaagcttttcatccctaggcggtactgcaatttgattaattattagagcccggcgggaccgggactccagcgggattttacgggattaccgttcgggactcccgtcccggaaaattttgaactcccgaacccgctcccgacaatttttttaccgggctctattaattatatcataatctttttgttttacttattgtcaaaatcgataactaatctacggatcgcttcatcatttcgcagatattttttaagcgaggcccttcagtaatcccacgagttgagtcaatcccataaggcctcaggcagttttgttggtgctcttcctctttttaaggcgataatgaaccttataaaaatatttttattacagtatccaatttatactctgaaaatgctgggtggggcgaagtgaatcgttttctgaatatgttacaacggcaaacgactcaacctttatctttgtgggtaggatgcaattgttaaattagtcattattaaaaaataaa

SEQ ID NO: 56664 - DNA, 860 bp, Heterodera glycines
atgtttgataaaatcgactggctcggccgcttcgtggcctcgcatcctttttttgctttttctccaatcgtcgggacacaacccaccagatttcaatcactagtactcaaatctcctgcatttcaatcactgggactcaacccaccagcatttcaatcactgggattcaaatctccggcatttcaatcactgggactcaacccaccagcacttcaatcaccggggctcaattctcttgcatttgaatcactgggactcaattctcctgcatttcaatcactgggattcaaatctccggcatttcaatcactgggactcaacccaccagcacttcaatcaccggggctcaattctcttgcatttgaatcactgggactcaaccctccagcatttcaatcactggaactcaatccaccagcattccagtcactgggactcaaatctccggcattccaatcactgggacctaacctcacctggtacttcggcatcgcaatcaccgggactcaattctgtgacattccaatcactggaactcaattcttaggctttccaatcactgggactcaacccaccaactttcaatgacattccaatcactgaaactcaacccaccagcattccaatctctgggactcaacccaccaacatttcaatcgccaacacttaaccctccagggactcaaccctccaacattccaatcaacgggacacaatccaccaacattccaatcactgggactcaacccaccaacattccaatcaacgggacacaatccaccaacattacaatcactggaactcaatccaccagcatttcaatcactgggactcaacccaccagcattcaatcactgtga

SEQ ID NO: 56665 - DNA, 619 bp, Heterodera glycines
atggaaacacttaaaaattttaaacttgatgctttattcaaagttttggctctaccagacaaagaattcgaagaatggctcagagaacttaagcttctacacaccactcgtttttgtgactgtggcaacgaaatgagctacaaatggattaaggaccggaatcaaccgctttggatatgcaattcaaagaagaaccacgacggaaaacgtccaactattggcttttacactggcactttttttgaaggagcccatttgtcgcctaaattttcaagtttttttaaaaggccaaatttacatgaatcaattttatattaaggtttttcaattttcttactactgggcccacaaatttggaaatgatcaaattatgtttcaggatcctgtcactggtcagcatacaaactcaattgaatcgacgtggcagaagttcaagcagcaacacaaagcgagatttggcagtcacagatcacttttttccacatacatttctgattttttgtggcgtaagcaatttggaggaccggacattttttataatttgtggacccaaatcgcggaattgtacccaataagcacgtaaatctccttttatttgttatttaaagcaattgcgaca

SEQ ID NO: 56666 - DNA, 428 bp, Heterodera glycines
atgagtgagtggctcagaaagctcaaacgtcgcagttggctgctgcggcagcactctgttctttttccacattcattctagcacaattaaatcgcgcccggagaagcaaaggaagcgaagggcggggggagagatttgggtcaacgcccctcgggggatttcgaagggacgggaccgaactgcgaccattggagacaagccaaaaggataaagcaggacagagaaggagaaaaagtggacaatgggaacagcagcagattaactttaaaattaaattcatataggtaaaattgtattattaacagaaacagattgttatgagcaaaaatggacagttaaatgtgccattggaggattatgaagaaagctgaaggaaaagagtcggcagataaggatggacgaggacgaagaggacgggcaggaataaa

SEQ ID NO: 56667 - DNA, 368 bp, Heterodera glycines
atgctgatttccaagtacaatcttggaaatagtacaattaagatcttccaagcatagaagcacaaaaaaaattagcttcttggggtccaaaatcatcattttgaaaattttattacaatcaaaaaatccaaaaatgtttttttttgcggcgcgcttttcccaaaaaaaaaccttttggggtaagggtccggcggtgccggtaggcggtttaaaatcttatgcaatgagtgaacaggttttcatcaaaaatgacaaattttttagcttttgatccaattttttatgaaaaaatgtttcggggaactcggcggtgccgagaggcaccgccggcagaaaatttcgaaattttgactatttcacaacactaa

SEQ ID NO: 56668 - DNA, 2228 bp, Heterodera glycines
atgagcggaaaaaagatttatgttcaactcgctcaacaatttttctggccaaacatgtacgcagactgcgttaaaatggttcaaaaatgccggatttgtgcgcattcgcggaagccacgagcaaatgaaccgccaatgaaaatcgtccaaacgtcggaaccacttgaattagtgtgcattgatgtgctttcgattgggcttgcctattcgtcgaacaaatatatcttggttgcagttgaccactttactaaatatttggttgctgtcccaattcctaacaaaagtgcggacacaatcgccagcgaattcgtcaagaattttattttgatttttggaactccgaaaaagttacacagcgacaggggaaaagagtttgtaaacgaaactctgaacgaaattgtgaaaattttgaaagttgagagatcgctgacatccggatatgatccacaggcgaatggaatcacggaacgtgcaaatcagaccattttggcaatgttaaaacggtcgacggcatcgaactggacatgggacgaaagactcccatttgtcatttttgcgtacaatattactccatccgagacaactaaattctcgccttaccatttgatgtttggaaaaatcccaaattttccaactgagatatttttgccagttaacccgaactatacagttgatgtagacacttacattcaactttttcgcgaaaatattgcgcagctaatcaaattagcacaggaaaactcgaaaattgctcgcataaagatgaaaaatcactatgaaaaacaaccaaaagtgacagcagacaaattcaaaatcggcgagagagtaatggtcatatttccgggcgtaaatacccgcgcagcccaccgaaaacttctttggaatcagttcggtccatataaaattttggatctctctgattcgtcagcaaaattggttccagtcgataaaccgaattttgaacctataagtgttccaatcgagcggctagtgaaagttccggaaggtgtaccggatattagtactctccctcggggtaaaaatcccttcaaaaaccaattgaacgcattgctgagtgtagtttgtttggtgtatcgtgaaatggatattgagacgtgtgaagaaaatggacaatttacacaaacaaaaagtgttaaatttggaaatggaaccataaaaatggacgaatttcaaaaaacggaaaatatgggccagctttttattgggcaattgaggacaattgcaaattcagctgacggcgaggtgagagcgaaggacaacgctgaccatcctttggtctgggagatgcaatgtggcggactcggcacggaacatcgaaattgtgtccaattaacggctgccgacctcgacccagtgcttgagagggccggcctaggccttaaagtgattggaagacaagaaaagatggaaaatgttgagggaaaagttggttttaaggtgatcggcacgccaatgaaggctctcctcagtaatttcttgctgaaatcgggcgcagtttcatcagtcgccggcggccaaaagttgacgcagcttgtgatcagtgcacccgttggcttcgagctgatcgcatacagtggcggacgcgaagaccttgtgaagaatggctttttcccgacggaaaatgacattgagagtgcctttacggcatgggtcgaacgatgtgcggtcacacgagagaagctgatgaagacgggctacgcgccaattgaagtgccactgccgaacgttgtcgccgaattgcccgaatcggagaagatgggatggcacgaaatgctgaaaagggccaacttcgttctcgaaaaagtgcgtgccacaatcatccaccggaaacagctgttggtcgagacggcgactgtgatcatcggcgattcctcagctaaacaactggtcaaactttggcccaaatcgcaatttatcggtgccgaaaatggaacaatcaccgaagtgatcagggcgtttgacggcgccattctctcctccaaagtgaaagttgccattgtgatggttgggcgggactcgataagaggagatgagacgattgaaaacgtgatggagcgagtggggagacttgagcagctgctgaagcggttcagtcatgtgccggttttttggctgccaccaccattcatcaagcagaagatggtcgaacatgaagaattggtggtcaaaatgaaggaacatttcggagcgatgcaaggaaatgttaa

SEQ ID NO: 56669 - DNA, 4250 bp, Heterodera glycines
atgaatgtgcagcaacgccaaaacgccgattatcaaccgcggctaacgcatcaacaaaattatgcgcaatttgaagaacgcgcttaccgtcaacaaaacccgggaaatttgttcgtgagaaaccaacccgcgcgttacgaaaatgcgaacccaaattttgggtatggaacttcgggaaatgttatggtgaatcagcaaggaggggcacaacccccgatcagcaatttggagtacgtgctcattctcgatcgacttcccgaactaaaagggaatgaaggcgctgacaaagtgcgctatttcttcaaaaaatttgtgtcagcaacggaggggtggcccgacaacaagcggatttcatcgcttgaatccaaaatctcgggaagagccgagcgcgcattcaatgccgcattggccaatcagccttatcggtttgatgcaatccgacgagctgtacaagcacaattggaggaaaccgattgtagagaaatgggggcttttgacgaacttatgaatggtctgaagcggaaaccgaacgagaaactcgacgaactcgccgatcgggttcagaatgtcgttctgcgtgcctacccaggcctaacgcaaaacctggtcgatgaatatgcaacaaagcatttgattcgtgctttatcaaatccggatttgtctttgtcccttgaaatggcacgccgaccggggatgtgcttcgatgagtttgtcgcattggctgcccgtgcggagtcaattcaaaaggcaacaaaaaatgtgccaaacgaacggcgaaatattgaggaaagaacccgtcctatgcagcaaaacttttcaagatttgcgcaacaattccaaccccaacaaaagcaaaatttttcacaaagttttcaaccgcgtgaaaacactgtttgttacaattgtaatgaaccagggcacttttctcgcgaatgtcgacgaccaaagcaatactttgatggaagggctaaccaaagccatgcagtgccggccgctggggccaatagttttcagatgcggccaaatggtcctgaaaagcgagcacttccacagacttcgacaaaagagtctgatcaacgtcggtcacaaaactttttgaagcaaaattgcattgtcgtgcaagaagaagcaccaccggaagctttttgccgtggtgttcagctttcatcagaaatcgctgaatttttcgccaacgagttcaaagaaaggaaagacggaaacaatcagcgagaaatgagttccgacagagttggaaaaattttggtcatcaaaatcgaaacatttggtgcaaaaacggaagcgatgatcgatggtggagcgcaaatttcgttggttggcgcctcatttctgtatatgctgatcagagaaaaaggattggatttgcaaaaaacaaattttgcacgcacaaatgacagaattgccgacgtcaatgggaaggaactccgatgttttggcacactcacattgccaattctccgtaaaggctgtgaacaagtggccatacatttttacgtaaccagtgcaccgttcggattcgacatgcttttcggaacgaattcattgtcagcactcgggttctcgctttacgatgaacccaataatgaaatgatccatttcgaaaaagcgacaaaaagcgaagacaccgtccgcatgattttcaacatgaaattccaaccaaggactagcaaattcgtcgaaatggaggtcgatgaacaatggaatggccaggacgtgctaatatgtccagtgcctgctgaaaaagcagtcagaattgatcagtccattggaaaagtcgaaaatgggaaaattgtctgccaaatatcaaatttgagttcaaatgtggagcaaatcgatgggaacacagtgatcggaagagttgaagaggtagaattgtcttatgattctggcaattcgtttttgccgacaaaggactttctaattggagaaggtgaaaacgatatccaatttggagatgaaatgtctctgaaagttggacacattccaaatgaagcgaaagccaaactaatggccttgttgaatgattttacccaaatttttgccttttccgatgaggaattgagccaaacggacttggtgagccatcaaattgccacgggaaattcggcaccgatacgttcaaggatacgacccgtcccctatgcctacagggaaaaagttgcggaaatgatccaaaactatctggggcgtggcatcatccgaccttcttcgtctccgtgggcttcaccgattgtgattgtgccaaaaaaggatggcacgctccgtttttgtgtggactacaggggactgaattcagtcactgtaaaggatgcatatcctttgccgaatattgacaacatattattggcactgggaggcaagaaaattttttcgaccctcgactttatttccggttattggcaaattaaaatgtcaccggaatcgatcgacaaaacggcttttgccacagaatttgggcttcatgaattcgtcgttttgccgtttggactttgcaacgccgttgcaacttttcaacgatttatgtcacagcttttcgaaggattaatcaacgattttgtcttcatctatattgatgatatcttaattgcctccgagtcgtgggaaaagcatcaagagcacttaaaaatagtgttcgaacgaattcgggaagcaggactaaaattaaaaatcagcaagtgccatttttcggcaaacgaactaccgtttcttgggcacattctcactactgaaggaataaaaatggatgtaaacaaagtacgtccaattatggaattgccaattccaacatcaaaaaaggcacttcaatcactgcttggatttttggcatactaccgaaaatttatttttggttttggagccattgccgcgcctttgtacggactgttgaagaaagatgcggaatttgctttcggcaaattggaaaaagaggcaataaaggccttaaagcaaaaaatttttgacgacgtaattttgcactttccaaacttcgaagcggccaaaaatgaaccaagacgtcagttcataatgatgactgatgccagtaaaattggaatcgcggcaattctttgtcaaccggacgaaaacgcaaatgttaggccaatttacttcgcctcgagaaagtgtaactcttacgagagcaaatattgtccaacggaattagaagcgcttgctgttcgcttcggagccaaaaaattttcacagtttatcaccatgccaccaacaagagtctttaccgaccatcgggcacttgtccacatgttcaaaagtaaaactgagaccggaaacagccgtgtcgataaatggctgatgcagctgaattcgagattcatactgaaggttgaatatcagcctgggaagaagaatgtgatcgccgatctcttgtcacgctcaccagcgctaaaatgtcccgatccaccggctgaaatcgaaatttcaagaatcgcgcacataaaaatgtgccaaattcaaacggaattggacgaggtcaaaaatcgacaggaatggattgaaaagaccaaagaaagcgaattggacttcatctacgactttttgaacaaaagaattgtgccacaggacccaaaaaataagcaaaagcttatttcgcttcttccaactttcacaattttggatgaactcctctacaagtgcgaaaacgacggaaaagtacgcctctttgtgccattcatctttcgcgacgcattgatcagagagcgccattcaggaagttgcgcgggacacatgagcggaaaaaagatttatgttcaactcgctcaacaatttttctggccaaacatgtacgcagactgcgttaaaatggttcaaaaatgccggatttgtgcgcattcgcggaagccgcgagcaaatgaaccgccaatgaaaatcgtccaaacgtcggaaccgcttgaattggtgtgcattgatgtgctttcgattgggcctgcctattcgtcgaacaaatatatcttggttgcagttgaccacttttctaaatatttggttgctgtcccaattcctaacaaaagcgcggacacaatcgccagcgaattcgtcaagaattttattttgattcttggaactccgaaaaagttacacagcgacaggggaaaagagtttgtaaacgaaactctgaacgaaattgtgaaaattttgaaagtcgagagatcactgacacccggatatgatccacaggcgaatggaatcacggaacgtgcaaatcagaccattttggcaat

SEQ ID NO: 56670 - DNA, 1800 bp, Heterodera glycines
atgccagttgacgatttatcgccaaattctcttcttgctgacgaatacgtgccgccgcaacatttggggtcgaggtaagatgagggttgaactcccaattatctaccagatccaaatgggcgattcgctggtccaaatttatccccaaattttgttgctggatgtttcgaccattttctcgacccaaattttgttcttgggagttttcgtgaaacaccgaattaccatggctgtccaggagagcactttcatccaattcgcctcgattttgcgcgtccattccgtttcgtggtctcggaatttccaaaagtcgctgatgaattgcttcgggtcctaaaacagacgaaactgatgaaactcgactttggcgatgttggttttcgcgcaatggagcattttcaactacgaagtgctgttgctgaactcgctgttctccttgcgtatctcctatgccttcatttcgcacttgtatgccaaggtttagcgccctttgtcgcgttaacggcgggcttcgcattaccggcaccattggtgtgtgagaatttgttttctcgttttatggttcaaagctttttgacttagttgtctgcttttccttcactttcgtagggatttgtttccccgtttttgcaaattttcaattcacacgatttcggcgagtggtgataagatgaaaaggatttgtttcctttttaacaaattcggcgatttctcttccactgtctttacgggatttgtttccctcttaaacaaattcggagattctttcttccacgtttgactttagggatttgtttccccgttttacattcaagcactcgtaggatttgtttcccgttttttttttgttgctccttttcgcgctttacaaatttcgaaattgccgttgatctcacctcttttagcaggagcgccacgtcgtacaaagtggagcacgtagtagagcacacacacaattaggaacggggaattgtatcccaaaatccaaacacaatccaaacaaaaatccttttacaatcaaaagtccaaacagcgaagaaaattcacaaacatttaaaattaaccaaaaacgagcgaatatccaatctgaatgcaagtgaccaggaaaaaaaaagtcggcagcggaaaacaatcgataatgaaaaggcgggagattcaaaattgagaacgaaaggacaaaaataaatgagagggaaatacaattaattaattaagtcaaaaattgggaataaaagaaattaacaatcttatcacattctacaccgcgtctgaaaccttcaaatctgtaagtaaaatattttccaaaaagtgctaatttttccgtttctgttgaatccattatcaaatgctttttttatcagagcattaataaatttcgatttatcatttatataactaaaatatttttaatgattaaaataatattaatttatttatagattctgcacgcgaattaacaccatttttttcaataaaccaccttttcattatccattttctattaagatcacatgaacttcactatttccttaatttttatcgcgtaaatcttataaaagatttaaataatattaattttttaagattctacaccgcgtctgaaaccttcaaatctgtaagtaaatattttccaaaaagtgctaatttttccgtttctgttgaatccattatcaaatgctttttttatcagagcattaataaatttcgatttatcatttatataactaaaatatttttaatgattaaaataatattaatttatttatagattctgcacgcgaattaacaccatttttttca

SEQ ID NO: 56671 - DNA, 390 bp, Heterodera glycines
atggcagaggaccaggaggaattggacatgacgagcacaaacccaatgccaaccacaacgatgacaaagacaacgacgatagagatggaagaggtggaggatgaagagggagggggagaggcacaggaagaggaagaggaggtgaaagagcagggcgagcgagagggcgacggggaggaagggacggaaaacatcacgcctgggacggagacagagagagagacagagacggatggagagagggagagagaggacggcgagggaaaaggggacacgggcggagcagcagccgaacaatccgcagaatgggccgaggtgaataaaggcgaatttgccgggagtgggaagggaacgtattggggaaatgaaagatgggcgaaattgggttga

SEQ ID NO: 56672 - DNA, 405 bp, Heterodera glycines
atgcctggaagaccgggaacagccgggaagccgggatcccctggcctatctccaaaccaaacgtgtcccatgcaagtgaagcgggacccgcccccgtgccggccgtgtcccaagggaccgcccggcatcaaagggtggcccggttttccgggtgacgttggcccagtcggtgcgccgggcgaaaagggccgagacggagacgacggagcaccgggtgggcatttcaactaatgaaaaaatttattttgctcttcttcaggtgaatcaggaccccaaggcccgccgggattccgaggagcccccggggcacccggagacaaaggcgaaactccgaaaggtggggaaattaattggagagggaatggggcgattctaaacaattcaaagtcaaatgggcagctttaa

SEQ ID NO: 56673 - DNA, 1820 bp, Heterodera glycines; identical to SEQ ID NO: 25901

SEQ ID NO: 56674 - DNA, 523 bp, Heterodera glycines
  unsure (1)..(523): unsure at all n locations
gctttgtgcacggaatcggttctggtcgcaatgcgtgagtgctttccacacatgtacatcagttcggaaaagttggaattggacccagcaaaaattcgcatcaaaaaagcgcatttctccgatgctttgcattccgtgaagccatccgccaagcgtggtatactgttgttgttattctatttaggggttcactaggtctctctccacatcgacaattttttaaattttttgggagtttcccattaaaaaagtaactgaaatttttttttatagttttctctaacattttgaaattgtaaagatctgttaaaaattcaaaagaaatttgttttttcaacttttttaatttaaaaaaacaaaccttttttaaaaaaaagtttttaaaatttttgtttttttgtaaaacgaatatatttgattctttaagtagttttttgtaattaaaaaattctgttttttttaacttttactanaaaatctaattgtaaaaaattaaaaaaaaattttcaattatttcaataaa

SEQ ID NO: 56675 - DNA, 1144 bp, Heterodera glycines
atgtcaaattttaccacatttattatcaaacaatcaaaatggaatttatttgatcacataaagtacgacacagttatttgtttagcatttttccttgcataaaatgattccttttttggtcaacaatcgctgcgattgcagtgcttctggacgatgaaaaacggtgaggtcaatcagtggggcatcgttctgaagagaagaaaaaatgacaatggtaaaggtgcgaactttttacacatttatttataaatcactgataaaaataataacactgaaattttcgcatggaaaataaatcccattattagtaaaatttataatttgccaaatggacgcgacttcgtctcggagtgtgtccagcagttccttcaatccgctgtcccctcctcccactaattttgcgcatcgactcgcgtcatccctcgcccttcctttcagtcccattctgttcaatgccaaggctcgcctgaacaatgctttgctgttgttcgcttctcgcttcaacgctccacaggcgtccatgtacgctttttcaggtcttaataattaatctaaaagttaaactagcgtttatattccatttaaaaaagatacggtacacataggtttgtttagactatgtgggagaatttctatagcgaaagcgtttttaagtttaatcatttttggttacaaatggcagaaaataatgttattgtttaatttttgttattttaaggacatttaaagtcaggcatgtgaagagtacccccaaaaaagtttaatcaacaattgtcaatccttcccccccccccctaaaacctcccacctgtgcaaattgaggtaagcttgagcccgatttgaccatagaacagaactgctggggtcaatctcaatggcacgcgtataaagtaaaacggctttattgaaaagttttcgtcgaaaacattcgtttgcctcctctttaagacggcaagcgtcaatttgtcgctgattatcagtggacattaatctttatgcagggaaattaatggaggctattgtttcgctttatgtaatattggatagtcaaatccatttacatgacaaaaaaaaccaactcgaaaatatttattgaattaaaccattgtcagaaatcaaaaataatgtgaaagatcagacccga

SEQ ID NO: 56676 - DNA, 89 bp, Heterodera glycines
atggtttccgttggacttgcaaatgctcagcgacttgttgcgattgtgactggcggtgcttcggggcttggctgtgcgactgttcgtcg

SEQ ID NO: 56677 - DNA, 910 bp, Heterodera glycines
gttcccttcaaggaatttcctacttcaactttcccaatgtatcattaccaatatcgcatcatagtaattggtgattcgactgtcggaaaaagcagcttacttcgttatttcactgaaggcaaaaatgctgaaataagtgatccgacagtacggattcaaagatttttttttgcattgaattacttttttaggttggagttgatttttacgctcgaatgattgagatcaaaccaaattatcgcatcaaattgcaactatggtgatatctttttcttttctttatttttggtattttacagggacacagccgggcaggaaaagtttcgttcgataacaaggtaatataaagttaaacgaaaacggtactaaaactggaaacaccaataaggtcgtattatcgaaattccgtcggagttattgtcgtctacgatatcacgaacagacgcacttttgagcatgttgttgattggatgactgaagcagaggcaaatttaggagggcctgaccctgcgcaattggcaagtgtaacatccttagtggccagtgaaatctgctattattcttaggtttttttactggtcggacacaaagcagacttagaggagcagcgcgaggttctctacgaggagggcgaatactttgcaaagcacagacgaattaaattcattgaaacatcggctctgacgggagaaaatgttaatgtaatagacaaatcaaaaacaacaaacaaaacgccagtatttaggaggcatttttgattgtatcgcgggagatcaacgccagattcgaaactggtgcactgcgcatatgcgacggttgggatggaatcaaaagtggactgttgcggacgcaatccatcactctatcagacattcaagagacaacgaaagaaaattctcagtgttattgc

SEQ ID NO: 56678 - DNA, 1614 bp, Heterodera glycines
atggaatatgtgcagtcatcagcagcagaaacagatgagagtaaactgtttttaaatttaaatgaatcagagaattgcgagctcaacgaaatttatgaaacggaaagtgaaacggaaagaaaggaaatcgaagcggcggagcaagtgataaacgcacttttatattacaaaaaatacgcattgagcaaactgaggaagcaggcgaatgccattctgtgagcaattaattggacattagcgaaaatggaggaaattttgcaggaaattatcggaggaagaccggaaaatgctaatcgtgccgagtttggaccactttcgaagggttcgcgaatgtgttgcagaaaaccaaaggcgagtcacaaaaataaaatcttatttttttattagagtaaaattagttaaacgaaaagaaactattttagacgctttttaggctttttaatatgatggccgaatgtggcgcccatatgctcggcgggacaatccaacaggcttttgaaattacccaactccgaccggcctcagagcattacatgacgaaggtgaaaagcgtactcaagcaaattttgcgcgattggagtgccgaaggtgagtgattttgatttggctaattttgttttattccacaaaatattcgttggaaaggcgccgatgaaagggcgtcatgttaccagaaggtcaaggaggagatggtgaagcagttcccggacccaaattcgcgacatgccgtcaaaattctagtcaccggtgcggggttggcccgattggcctgggaattgctcggcttgggcttttccgtgacgggcaatgagttctccatcttcatgttgcttgcttccaacttcatcctcaacacttgccgcaaggtgtcctcgtcgtgtcgtccttctctttttgaccttttccttcagtgccatgagtttaccatttacccgtgggcgcttgacttctccaacgcgtggagttggcaagaccaactgaggcccgtctcttttccggatgtcaatccctcaactgtctccaattctcaggtcccatcggctggtgttgttgtttaatctttcgccctttgatattgtttcagcgtctcaataccttttcaatgtgtgccggcgattttctccaggcttattccgatgagcaaaatcactttgattcggtcatttccgttttctttctcgacactgccgcaaatcccctccaatacatccgacttatccataaaattctcaagtgatttatattttttattttgttcctttcttcacctttttcttgcttaggcccggcggagtttggcagaatttcggtccgctgacttatcaccacgaagactctgacgacatttgttccattgaacttccgtttgaccaaattgtgcgtttggttgagaattgtggctttcgaattgaccaacttctcgcgaaggaccaacttccgttgtcaaggcaagggaaggcatttctccaaaaaattattttatttgacttgtttttaggtatacttggaacccgaactcaatgcttcagtacagctatcactgtggttattttcgctgtacgaaaatggttgaagattaaattctgtgatagcaattttattttatttgtctaa

SEQ ID NO: 56679 - DNA, 2323 bp, Heterodera glycines
atggcactgaaggaaaaggtcaaaaagagaaggacgacacgacgaggacaccttgcggcaagtgttgaggatgaagttggaagcaagcaacatgaagatggagaactcattgcccgtcacggaaaagcccaagccgagcaattcccaggccaatcgggccaaccccgcaccggtgactagaattttgacggcatgtcgcgaatttgggtccgggaactgcttcaccatctcctccttgaccttctggtaacatgacgccctttcatcggcgcctttccaacgaatattttgtggaataaaacaaaattagccaaatcaaaatcactcaccttcggcactccaatcgcgcaaaatttgcttgagtacgcttttcaccttcgtcatgtaatgctctgaggccggtcggagttgggtaatttcaaaagcctgttggattgtcccgccgagcatatgggcgccacattcggccatcatattaaaaagcctaaaaagcgtctaaaatagtttcttttcgtttaactaattttactctaataaaaaaataagattttatttttgtgactcgcctttggttttctgcaacacattcgcgaacccttcgaaagtggtccaaactcggcacgattagcattttccggtcttcctccgataatttcctgcaaaatttcctccattttcgctaatgtccaattaattgctcacagaatggcattcgcctgcttcctcagtttgctcaatgcgtattttttgtaatataaaagtgcgtttatcacttgctccgccgcttcgatttcctttctttccgtttcactttccgtttcataaatttcgttgagctcgcaattctctgattcatttaaatttaaaaacagtttactctcatctgtttctgctgctgatgactgcacatattccattgttatttttccgatgaaaatctgttaatttataaatacacttacaaaattaccacacaaatctatatacagccgaaaagtttgccaattacatatgtttaagttggattgaaagataattaaaaaagtttcaattaactaacttaaaatttttaataaagttgttcaattttattattttattttcttttggttactttatggcagcagtgatcaaccaaaacccttctgttactatgaccagcagtttgggtgaaaatgcaagaatgggtaaccattttgtaccattccttttctgttgatcactgatcagattgttgttactttttacccacagaattggcccagaaaatcgaaggtcagctcacgggacgcatcgccggcattcatttgttggagcgggaggacggactgctcgttgtaaatgaggacagaacgctaagagtgctgctcagacgcgagtcgggaatgttttggccttcaattatccatgacttgccgcacatccccacaaaactcagctgcagtgaacagaaaaacacgtgaagaaattttttataatttatttttaacaaactcattaaaggatttttgtcggttttgcaaatggacagatccacgaatattcaattgaaaacgatttcaacaggtatatttagcgcttacaaaaaataaattattgtcccatagcatttcattcaaacggcaatggaattcgcacaccaagtgggacgcttaattgttaaatggaataattatttgttcagttccatcagtggactcggcttttcagaacgattagaacaaatggtcagttgctcaaaggacaaaacggtggtttggcattgcacgtcgaccactcgcaaaatcggtgtcaattaattatttataattttttactggagtttttcagcaagttactgtacgggttcgccttgtaccacacttcaattcgatggcgatgcttccttcgtttttgtgggcgattattccggaaatatttcagtgcttcggctggtggttgggacgcaacagcaaccgcaattaatcagcaaattatctgctcataccggtgctaatttgtttgcttttaaatttattgtgaaaattgccaacttatttcattttcccatttgttaaaagtgaattgacttggcttttatcttattgttatttcaggggcaatcactgatctttgctgggatttgagccatcagcttcttttttcggcaagcactgattcgctggtcattgtttgggacatcggaggcaaacgcggcaactgttatgagctcaagttgtgtcttttgtcttcgctctccatttttatggttaagtggtcacaatgccaagttgactcgtcttgcgttgggtgccgactcgcgtcgcttattctccgccgatga

SEQ ID NO: 56680 - DNA, 1003 bp, Heterodera glycines
aaatttaaatcaaataaatactttctttttttctaaattttagggaaaaacaaaacctttttcgaataccttctcaaccccacgcgttactcgtcgcctttgaacacttcggccgacctttcaaatggtataacttttgtcattttgtgttgggtttccctattttttctccattttggcacttttcagattcgcgtttgccaatcgacccgcaacattcgctgttcccttttgaaaattacgaattggagaacactcagtgggaggacgacatcatttgggacagtgcgaatatgccggcaattccaagtgattttttaatattttttttctatgagaacttcaacaaaaaaaattgaaagttttctaaaatttttttgaaattttttgtctggaagataggggtgggggtgagaaaatgatagtaaaaacgagctgaatcccatatgtattgcctgccatagaaccgcgggtgttgaccttggactacgaggacgacccgagggcattcggaatgccggaggacgcggcacaagtggaggaagttctgcagcaacaacagcagcaagtcggtgctcgcgcactcggaaaggtttttctgccattttgaattattttaatcaaaaatcattttgcttttgctgtttttctccaggaacagggcgtcatgaagaagtccaagctgatcctggcccaagtgctgaagcggcagcgacaggaagtggaggagcaaatcgaaacgcaaattgcgcaaatagcggacaaagacccgttcaatttgtccaacgacgaatattacgcgccgaagagtagcggagcaaataccaagacgcaacggtcgttggccaatttgaccatccaacattcactgcccgcccaaaatttgcacccggcactgttcccactgctacagcacaatgtcgtggcacagctgcgccatttccatcgcccaccgctcagccgacggacggcgcagggaatgaccgggcgaacggtgccaatc

SEQ ID NO: 56681 - DNA, 690 bp, Heterodera glycines
atggcaaatgaatataaacaaaaaggaaaaaaatattcaaccaaagaatggcgacaaaattatgccgaaatttgcaagaaaattggagttagccattacgtaattatgaaatggaagaaacaatttggaatgagtaaatttataacggagaaagaaaaaatggaaaaaatgaaaatttattggcaaataaaaaaagaaaatccaaaaatgagtgaacgggcaattgcaaaaatgatgaaaattgatagaacgaacatttcaaaatggaagaaactgtttggataaaagaatcattgaagattgaaaggatgattataagaaaaattggataaatttgccgaaaaaattatcagaaaaactatgacaatttctagttttttttcaaattttttgtatttgtattaaaaaattattttaaataccctaagttttgaaatttttcttagtgaaaataagtgaaaacagtcaattcaaggattgggagggtatcattaaaactgaacaatgttggaactgggctcccagtatgcgtaaatttttgattttagaggccctgtaaaactccttggggttttgctagggtgaaaaaatggaataattgtaaaatggaagagaaaatttggcatttgtattagccggaaacgattaacagagcaagaaaaaatagagaaaatgaaaatttattggcaa

SEQ ID NO: 56682 - DNA, 372 bp, Heterodera glycines
atgacaacagcaaaacatcaacggacaccggacgacgaggaggagaagaatttgaggcgtaaggcaaaggtggcgcttgacttagtggaagctggtctagcggcagacgcaatgatgcaggatgggacgcgctggaagaaagccaaaaacgcgatcaatgtgctggccaatttgcttttggcggaatcattaacagatgtctcgccaacttttgatcaacaacaacaacaacagctattgtcaaaagaggaggagagggagggatgcataaacagcagcagtgctgcagcaacaactgaatctgctcccgatggtgatgtaatggaagatttcgtcaatagcattcaagcggtgacaagcaatatgcaatag

SEQ ID NO: 56683 - DNA, 1158 bp, Heterodera glycines
atgcagtggattaaatttaactgcacgctttgtccgatcggtctgcattgtttttatccgcgcaagtacgcaaagcctgtgctttgtgcgcatcccagcgtccgtaacatcacggactttttgagcaccggtcagcttgacgaagctgcaacgacaacaacaacaacaaccgcacttccgacaactgcggaggtgtcggcggcggcggcagaatgcgcacctccgcccgcgcatttgaccgcgtggatcgcggtgtgcacagcgctggtggcgcttttggtgattgcggaggtctgttattaattttggtcatttatccgctaaacccctattcctcaattaagcttgtgcgcgccggattcaaagtgcgcaaatttttgaaagaccgcgccttcaaaaaggggatgctgcgccgacatcgccagcgtgagtttctcgctattacattttagcaaattgtaattaacaatttgtacaggaatgagcgccgctagtcgcaaccgccagccggcaagcgcgccgactccgctgattttgccggctatattggccggcgtttctctgcgcccgacgggcgtcaatttgacggcggaccgggtgggcaattttaattaaattaaaatctttatatattttaatttctcactcattaaaattacaatttaaatttaaaggcagcggggcagagccgcgcggatggtgcaattgaggagggcgaagagcccgtgtacgatgaggtgccgcttgacagcgacatcgtggtcgagatgcgcgatgaagataatggggaggaggaggaggaagaagattacagcgatttttagtgattcggcaagcgatcactcaccatttaatcaatcgatcgatttttcactttaaaataaaatttaaaaaatgtttgaaaataggataactaaaataggaatttataaaaagctaaaaataggtacaacgaaggcatcagataaaattttaaatgaggatttagaagcatttgaaaaatgtgggtgggcgctcgcgctatataaataagtgcacgtgtcccaatcggcccatttaatcttttcaaacatttgaccgtcagtttttttgtcagcatcatgtcggataaaaaagcattgttcaagcgagttatcgcagaggtggacctcactataa

SEQ ID NO: 56684 - DNA, 697 bp, Heterodera glycines
atgaagaattcactgctccacctgtacattttgggcatttggttgctcagtgcgctgatggcgtcgcccaatttgtgggtgtaccggcaaattctgtacgatttgatcagcggacaacaggtgggagagagagagagaagccgattgttaaatatttgaatttgctaccatttctcaattgtttggcattttgttttgtcaacataacgcccgagatttctttatttaaaataaaattcaaaatttcacgattttttcgttttttcttaacttgagattagagatcggtattttgataaaatacggttaagggtaagggttacgggcttgacaccaatacgggttacgggctagaaatccttaacccgtaaaaacccgtatcggccgaaaaaaatacgggttacgggcccgtaaaaacccgtatacgggtccggcccgtacccgaactctacttgagatattaagagtttattattgaaaatttttttaataaaaatgattttttttttttttttgtttataccactaaaaatgttttctttaaaaaagagatatgtatcaaaaataaaagccaaacttaacatttcttgatataattcgattttttttagttattttaacttcacgaaaaaagggataaatatttattttcattggcatttgaaaaatttaatatgttttaaattgattaaataaa

SEQ ID NO: 56685 - DNA, 356 bp, Heterodera glycines
atgccgcgttatttatttgcattttacggtggacgagcagtagccgaaccaaagggcacagagcgaagctcaactcggaaaaacgcactgctgcaacccgcagaggcccacaacgatgttgaggacgaagaacggagtccaaccgatgaaaaaggaagagaacacgacgatgagcacctcaaaggggccgactcattgccagcctaattaccccctaatactcaccctcgtcgccttttgttccgatgccaattccgccgtccgttttgccctcccccggcggactctgcgccggcggcgctgccgcgcgttcgccgtttgcgaatcgccgctgatacttccggttgattttcgca

SEQ ID NO: 56686 - DNA, 920 bp, Heterodera glycines
atgccgcttccgctggtcaaagtgccgacaaagcgcacgctcaaagtagggatgggattttccgaggcaatattataggggaagtgtggacgaaaatggcaattattaaatatttttttatccaacagaaacgaccaatttgttaatttttgttaaaacgaaatttgttaaaaattttattgttatttctctaatctttcattcttttaaggtaccccaacattacccggaggcattccccgcaattcccaagctcaaattgacgttgtccggaaatcgacgtcggcacgtggcaaaaaaaattcggtgagtaaatcagggttttaaacaggggtcttgactgaaaattttcaagatcagcattttggcttaaaaatcagcatttcaaaattttattacaaaaatcaacaaaaatgttttttttgcggcgcacttctaaaaaatatatttttttttgtggaatttggagggggaggtgccgatagagactatacataccgtatttgctctaattatcccacatgggggattatttttcaacctcctcgtagactgggggattaagatagagggattattcttcaaacccctcctagactgggggataattggagattgggggattaatggagattgggggataattagagcaaatacggtatatggcaatttttgaggattttcaaaaaatcagcgaattttgaaaaatttttgcttggattttggtagaaattttacataaaaatgacgatttttgaggttttttaaaatctttacaggtgaacgcggagggcgaggcggacaaagcgattgtggccaaaaacaaggccggtccaggacaatcaagtgacccgtcagacatgatcatgctgccttcaacatcggatgcaccaagaaggtctcgtcggatcgcggcaaat

SEQ ID NO: 56687 - DNA, 1548 bp, Heterodera glycines
tccgaggacaacacgttggtagaatggcacaatgaaatagacgcgcaaaggtcccgctcgttgtccgcccgacgtgacaaaaggccggaggccccaccaaaacctctggtgggtcaattataatttttggtttttaatgtgcgaaatatgtaacaacatttcatacctttttgaaattttaattacaaataaaacaagtttgatcatcaaaaattctgattttaaaactttctttgaaccaacaaattaagtgatcttgctatccctaattattttctaatttcactgcataatttcattatttaaaaaaagttattttgagcaattaaaaaactatcagcaccatattagatttccagaaaccttcatgatttttctctccctaaaattgggtttatggcgtttgttcattttttgtgattatttttgcgtcacaaaaattgagctgatcgatttgggtccactttctcgatgaaatacagtaacttttggaccatatgttagtaaagaaatgtcatgaagacaagcggtcttttttgtacttatttgttagaaagttttagatataagcttttttcaaaaacgttccaaaacattttaagaataatttgatgatcaagtcatgcattttgcccaacgatttttcgatcaatgtaaaaatcgtgacttaaccaaattaattccaggaatggagatgcacaaaatgtagtcacgagcctttttatacgcctcgtggactttctacgcacatgcgaatacacaagtagattagcagtaatcacttttaattgattataaatttttaattttacataaaaaataataattaatttcgaatagtggtgcaacacattcccccgtccgtcgtccatcgattcgcaccaccattgactttacggcggcatcacctgaaccagaagaggtgggtcatgatgccgtataaaaatatattgtcttgactcaaattaatccgaaaaaattgaaatttttttgattttttaattatttttttttaggtttttgaaagtttgatcacttttttctgatcagtttgttggtgagggccaaaaaaaggtcgagaatttatgatagaatacctccacaaaataaaagtggtttaaaagtgatttgaatatttactgtcagaaatgtttccttgttagaaataaattgattaaatgtttgctcaaaaaagttttgcaaataagtccaaaaaataaaattttaattttatcaatttttaaaaaggctcaatcatttagcgatatgcccccccccccctccctccttgggatagttgcggtcttatcttggagtcaaaatttaagaattagagtcttttttatgctttacaacaaaaaaaaaatgcaatttttagtaaaaaaacaaaaaaatattttacactttttcagcccaaagcagccgagccgcccaccgaagtgcctcaagaacgatgggtggacccattgccagaaaagttgcaatttcagcagcaggagaacaaatttgccgagctcaaatgcaaatactcgcgcgccaatgccaaag

SEQ ID NO: 56688 - DNA, 1268 bp, Heterodera glycines
atgcgatttttaggtaagaaaaatcccagaataggtacttaaataggtaaaaaaaaatctcaaaataggtattaaataggtacaaaaattccaaaataggtaccaaaataggtaaataaaattttttattaacgatttttagtggaaaaaagcaaacaaaaggggaaaattttggttctatttctttgtaaacgaataatttaaatatttttaatatgttcttagaaaatattgacattttaaattaaaaattttgttacataaaaaaacaaataaatttttgggaaaaattttccaattcttaggggtgtattttttgattttattgcatttttgttaaggaattttctgaaaatccttaaataggtataataggtagaaaaactccaaaataggtaaaaataggtattataaaagtcatcgtagacacccaaaaccaagtggaaaatgcttttttcgtgcttatctgtgcgtattaaatgcgcaaaattttaggtatttaactaaaaatcgcatccctaaattaatgcacaactaaattttattctcctttcctttcctttcttttcctttcctttccttccctattagtgaatcgattaggaataaaatttatattaaaatttattttttagcttttatttgttctgcaatatttgcttccttcaatggacaacaaaacacttactgtgggtataataattaaattttaatttaattgctttttttaatttatttaaatttttttaaaatttttttcttcatgctagcctgaccaacaacgggcaaagtggagaaaagaatatgcacacagaagtacgggccaccttttctgggaggtaactttttttaaagaattaataaattttatgaggatttaacaaattacttgatgaatttttttagggagcaaaacaccgaaaacgtaaccaaataacttaattttgggtcggggtcggtttagtacgggccgttttagtacgagcgcaactttttggctataacttttttctttgccaatcaaatccaacatttttagtatcgttcgatagctctaagtgtgctctattagcctgcaaaatttcgaaaaatctcgttaaggttcaaataagttatggccagaagaattaaaaaaaccagattatccaacttttttggctcgaactttttttaaacttaacaaaatttttcgaaattttgcaggctaatagagcatccgaagggctctcgaatgatatcaagaaagttggatttggataataaataaa

SEQ ID NO: 56689 - DNA, 270 bp, Heterodera glycines
atggacatggatgaggaagcggtggcagcggttgctgatgaggaggaggatctaacactgttgccagcactgacactaccagcagcagtgcgtgggaggagcacacatcgcccgttccagcgccgatggcatttggtgtcgtcgcggcggacgccgtcgcaagcgatgaacgccgtttgatcaacgcggccagccgctcgtcaagtgacagtggtgagcatttgatgggcgatgggggtaacgcagatgacgagttggaggagctcggcc

SEQ ID NO: 56690 - DNA, 861 bp, Heterodera glycines
atggtggcgcccgcggaaacttcggcaaccgaagcgtcggaagcggccaaagcggcgctggaagtggcatggaaagaagacgaacaacaactgctgcagcgacggcacgctgacgacagtgcattgttgctgccagcaactggcggcggcggcgccgcaacaccaccactggtcggcttcggcacaggtatgccgtcatcagacgctgtggcgagtgcatatcaaacggcaacgacgactgaagtcgtggtgccaaagtcgtcgttggcggcggcaagaagtagtagggcaccgttgacgcagtttggtgggagacacaacaacaacagcaataacaacaacagaggctggccaacggcgtggaaccacagcggcgccgatggtggtggtgccgttggtggtggtggtggtggtcgtgggcgctatcaccattatcatccgcaacagaaacggttgtggaagaacaacaatagttggcaacggaataatcaacatcgcaacagcaacgaccagttcaatcagcagcagtcgcaaagttttggtggtggtggccaaaaccgtccatggttcaacaacaaccacaaccagcagcacggccagcaacacaaccggcatcagacgctgtcgttctcgtcaagtggtgcaacgccaacaacaagttactgtagcggcaacatgaacaacaccaccagcggctacggtagcggttttggcggcgtcaacagcagcagatacagaggagggcgacaacagcagcaacatgaacatccgctgcaacaatcacaaattgactacacccagcaacagcataaccaacgagccacatccagcagcacaacaacaaccatggacacaaaaatg

SEQ ID NO: 56691 - DNA, 666 bp, Heterodera glycines
atggctaataaatttttgcttgttccacaagaaatttaccgagggctaacctcagcgtcagatacgggagtcattaatttggatgcggtaaggtatgacctggaccgtgccaggcgtgaacggactaatccaacaacaaaaaatgtccggtacaatcaacagcttaggcgttatctgcaaatgagaagggagcttgccgatagacctacaaaagttgagttaaccaagggcttgagtgttttgctcaagcgagatgggggtgttgatgatgacgacggcgaagtcgtcaacactcagccacggcctcccgctccaccaccacctccaccaccacctcatcacccatctcaacaacaccaccgtcgccctcccagccttcccgatcagcaatcttcctcatctgacgatagtcatccgcctcatcctcctcgtccaccacgtcctcagagaacaaagaaaaaccatcaatcttctctgaaacatgatcgtttgaaccaatggcagcaaaggcgtcgtgacttacaacaacaacaacaaccggtagtacgtgatctcctcgctgaagcagcagctgctccgttacctgaaagtgacgatgacgatgaacaaatgttggaaggcgggtatctgctgccaacaccgtcacaaaattatggagacatacca

SEQ ID NO: 56692 - DNA, 555 bp, Heterodera glycines
atggagaagatttgcttagttggttgtgctggtgagcatcactcattttgcgtttcacttcaatttcaacttaactcatacatattatatatttaacgcaaaaaaggaatactttttagcattaattaaataatgtatatttttttaaagttgacatttttctttaaacaatttttacaaattatgaaaagttattttccttatcatttcttaattgtaagaatgacttgcaaatctaaaaaagtgaatttttataaatttattaaatcacataaatatttttgacgttgaactcaaaaaaatatctaaaattcagcgatcatcggtttattaccatttaaaagttacgaaaatcgttataaaagaaaagaaaaattataaactaaatttctactttaagttcttaaattttttgtttaactgccagataccgcttatctgaaagaaataatttttattcatcctttccgtagaaatttttccatgtgaaaaatatgtaacagcaatataaagcttttcattagtatcgctcgttggttaatgtatggaaataaa

SEQ ID NO: 56693 - DNA, 894 bp, Heterodera glycines
atgcgattagacgagcagatccctccggcgattatgagcttctgcagagagtcggtagtggtaagtgcacgttgtgataataaataaatacttcaatttttggttatttcgaatcacttacactttggctaaatttgattggttttacattatcaggttcctatggggaagtgttcaaagcccgtgatgtccggtaataaaggtcaattttataaaacattttcagtttcttacaattagctcgggagaatttgctgccataaaaatcgtcaaattggagacgggcgacaacttcgcagacattcagcaagaaattctcgtgctcaaagaatgcgtacatccaaacatcatttcgtattatggcagctatttgaagcgcgacagactttggattgtgatggaatattgcagtggcggctctctgcaggacatttacgaaagtcagcaatcaaaaactgactgtcaacacaccgtccccttccctttaagtgatcggacctttggcagaactgcaaatcgctttcatttgccgagagacattgcacggccttaaggtacggactcaactgcttgtcagtcgtccattataacatggtacaaattcagtatttgcaccaaagagggaagatccatcgcgacgttaaaggggcgaacatccttttgacgcacaatggcgacgtcaaattggcagactttggaatcgcggcacaaattactgcaacgattgggaaacggaagtcgttcatcggttcaccctattggatggcgccggaggttgcaaacgtcgaacgcagcggtggctacggctcggagtgcgacgtttgggctgtgggaattacggcgattgaactcgccgagctgaagccgccttattactatctcagtccgctccaa

SEQ ID NO: 56694 - DNA, 755 bp, Heterodera glycines
atggcgaaaaaagaagaaaaccaccaaaaacaaccaaatcattggggaggggagaaaagggcccgaaatggacgaacatttgcgagtaattgaccattgtgcggcaattgcggagcgagaagaataccaggcaggcagcaattgccgtaaattcggcatttttaattgcatttccatagagaggccattttggccatgtgcagcgacgacggcgacaacggcgcggggcccgccccgcacttccgcgtccgcgcgaaatggacgacaaaagtgcactgaagacattgacgcgaatgctgaaaaagcggaagaacaaagcactgtcctctgctgaccattggacaaatatcggcgtaaatccgttaattaattacgatcccgactttcccagccccgccgaagaatgacgtgcaatcctgatcattttctgatgtagcataaattctatgtttaattagtttatttttagttgattcgttggggacgacgcacaattcgcggcattcgaagacccgcaagtaattgtaattaatattagtgatttgcaattgctcctcgaatgatatgccccataaaaacgaaaattttatcttcagaaatcatactttcggacattcctacgaaaaacctaaatattcttattgtaacattttcagtacatggaaaaatattaagccttaaaaaaacaccgacaaaaagcaaaaaatggaaaagtcagcagaaaaaaagggagtaaaaacatacgacgacgaaga

SEQ ID NO: 56695 - DNA, 49 bp, Heterodera glycines
ggaagctattcccgaaggattcggtctccccataaatctgtgcgcatcg

SEQ ID NO: 56696 - DNA, 1208 bp, Heterodera glycines
  unsure (1)..(1208): unsure at all n locations
atgcgtcgtgtgatgcaaaaccgggaaattgacccggtgttggagcatcatgttgggagtgacgaggaacaaacggacggagaggggcaggccgaacaaagtcagtccccatcaaaccgcctttttatctttgcgaatcaattgttagacgaagatttcgttgcaccaaatggtgaagttcaaaacgacgaagtgattgatgattttgacgatccgatggacgaattggttgcggaagagataattaactgtgcgttaaagcattttattcgggataattttgttatcagtaccgcaagatgaggtttgggacgacgaatttgagcagagtgagcatcagaatttgggtgaccttctcgaggtggaggatttggagaattcgatcggccgcatgcagaatttatatgctggttttgatgtaaaaaaacagtggaagcgtctctagattgattatgcaattttacagcatttaaacaccgttcaaaggaaacgggcaaaatccctcgccacaaaggtcattcattctttatttaattatgcatttaataattcaattggtcgttcgtagaacaatttttacgatgacacatttttcgcggaaggtaactaaacgcggatgatttgcctcctcgtccaatctcccaaatggactacgacgaaatcatcgccttccatcttcgcaagtcacgttggcaatgccttcctttaatttgactttttattttaaggtattggactgcctctgagcaagcaacttccacgttncagtgagcaccttcagaagtgggagatgaggatgacggaggtgctggaacaggaacatttgcaccgtgacttttgcactggcgcatatggagacgaactgctggagcgctttgggggggaaattggttctgaattggatttcactaaggtggattggaaaggattcattgtcagtgaaaggacaatgagaagacagttttcagatgttatcggaactgcccaatgattacgaccgaagtcgctttttgcttgtggctttgatattggccaatatgggcaacgtgcacattctcacggaagcgaatgatagcgagaaccaactcgtccgtttacaattactaactcttaagaggagagaattttctttctaatgaattctgtaacctgatttttttgatattaactgaggtaaacttatgtctttctttctttcgacgaataaa

SEQ ID NO: 56697 - DNA, 1026 bp, Heterodera glycines
atgttggatgcttttggcctcatggacgacgtcagaaagaaagtggccatgacattgaatgtgaataatgtcaaaaaggaagagtctgttgttgatgaaacactgagcagactcagggcgaagttccctaatgtcttttcgacaaatttgggccactgtaaaaaggcaaaagcgcgcctttccttaatggctgacgcaaagccagtgtattgcaggccacgtccggttccttacaacaccaagttggttgttgaagctgaattggaccgtcttttggctgcaaatgtcatccgtcctgttgaccacactcggtgggcagcaccaatcgtggttgtcaaaaaggcagctggttcggcacgtgtatgtgctgatttttcaacgggtcttaacaatgttttgctgtcgaatcagcacccgttgccagtgcctgaggacatttttgcgacactaaacggaggacatgttttctctcagatcgatttccgtgatgcgtatcatcaaatcgaattggaagaaggatcaaaagagttgtgtacgatcgcaacgcaccgtggtaattttgagtaccagcggttgccattcggagtgaagtccgctcctggcatttttcaatccattatggattcgatgttggcagattgtccatttgccattgcttatttagatgatgtcattattgtgagccggactcggaaggaacattggactcatttggcagaagttttcaaaagaattgacaattttggcttttggatcaagccagagaagtgttccttcggcaaggaacgaatcaaattcctcggattcatcattgataaggatggccgaaggcccgactcaaccaaaattgaggcaatccgaaggatgcccattccaaccaatgtgtccactctccgatcatttttgggaatggttaaccactaccaacaattcgtaaagaatttgcggttcattcgccacgttggacgaccttttgaagcaggacacggtctggaattggtccagcgaatgtcagaaagcctttga

SEQ ID NO: 56698 - DNA, 656 bp, Heterodera glycines; identical to SEQ ID NO: 53175

SEQ ID NO: 56699 - DNA, 195 bp, Heterodera glycines
aatcgaacgctaacggacgacctaatggaaaaaaatccccgaaggagagaatttaattaaatccattccttcgggggaccgtgccgggtgccgcggggtaagcagtgctggttcgtttcatcacggcaccgaaccttttggctagtcagcaatcgttgcttaacttgccagatcggacgggtgcgcatgactttc

SEQ ID NO: 56700 - DNA, 560 bp, Heterodera glycines
atggtcatcacacgcagtccgattttgacacggcaacgagcgttgaatttggagattgccgttgacagaaatggacatcagattaatgtcggtggaaatcagcagaactcgctgcaacgccaaaatcacagtgctggagaaagttttccccaaaatcagcaaattgaaaactcgccaatctcacccactgaactcgcgggctttaatggggaaaatggtgatgacagttctcttgttttagaaccaaatatgaccgaagaggaattgcgcagacgcttgttggtggtcagcattgaacgtagccagccgccagccaacggaaatgccggaaatggagaaaacgccgaaggtttgcgaaacgcaatcagggaaaatgatggacgaccgaattttggagtaaatggtcaaacatttgcccaccaaaggaggccgcatgacactttcttatcaaatttgatgaataatggaataggaaactttcctcaaaatttggtccatgtaccgcgcacttctaccccaactcgaaatgttgaatttgaacagcaaataggaccattccc

SEQ ID NO: 56701 - DNA, 1272 bp, Heterodera glycines
atgtctgctctttcctataggacagaaattgatcggctgtcacttgcggttaacggtgcaaaaaattccgattagcatagcataagaagggtgacagaacttatacaaccccccccataaaaaaaatgaagattaatttatttaatattatttataagttctcctttattcgtacacaatcctaaaataagagattttaaattcaatttactacattaataattacatcaaaaataaataatttgttaagtgcatcatatacccctaataattgaaaatttttttcacaaaaactgtcccaaaagttatttatttatctttgagaaaaatttttgtgtccttattcgaaaaatcttcaaaaatttggaaaaattgaaattttcttggagtaattcatttaatttattgttgaaattattaattatttttttaattcattaatattttaaaaattaattttgttcattttttcttgtattaatgagtattctcgcaagatattcacatgcacagagtcatcaaatagtaacatgttttcttaattttttatagtattatttgttcagattctcacataaaagcaaattttcagaaattcgtgttttcgacctattgttcgaatttgggttcggggatcggaatatgcccaaataatttatgatcagcgaccttgaaaacccccggtgcataaaattgaaatcattgtatggaaattggtgataattaaaaaaaaaatttcaagaaaatcaacacattgaacttatatttgaaggaggcctattcataattttctcgcatatggtccaatgaaaaccaaaatgatcaagatttgatcaatcattacgtgcacttcaatatggaattgacatgaaaggcttcgaaaaaggaattaataatgaatatctatcaattcttattctataaagcacataaatttattttaatcagagcgcaaatgtctattttcgctgtacgacgcaaatgtcgcggcgcaaatgtcgtttttgttaggcggcgcaagtgtcgcggcgcaaatggcacggcgcaaatgtccgcggcgcaagagtcttttttgctgagcggcgcaagtgtcgcggcgcaaatggcgcggcgcaaatgtctgcggcgcaaaagtcggctaaccgaagccaatagtgactaatcatatggaataagacaacgaaaaatttttatatagtttttattgattatggatatttattaagataatttaaattgattatatatattttcacatatttagacaaaata

SEQ ID NO: 56702 - DNA, 63 bp, Heterodera glycines
atgcttgtcctggtgggttgcctgcacttggcccatgcattggagggcgctgtgccgcaccag

SEQ ID NO: 56703 - DNA, 126 bp, Heterodera glycines
gcccgacttcgtcccgcgtgacattccgccccgaatatgtccctccgccaccgtttggtccgctgaacgcgttcgacgcgattacaccgaacatttgcattatttgcgcgttcggttgcgccaaat

SEQ ID NO: 56704 - DNA, 1428 bp, Heterodera glycines
ccaatcttttgaacatgtccctctccacggaccatctccgttttgcgcagtattcatccgtctctcaaaagagtccatcttcgatcgaacttcttcaacgtgccctggaggcttttgcggtagccaatcagtccaaatttgccaacagttcggcccattcggcaccgtccattgtcggcagccctttgatccctccgcctcttgcgcacagccaatcgcaacaattggccactaatggcgcaacagcagcagcaaccacaatgagcagtgtggagcaacagctggtcagaaaagggagggcattcattcagtaatcacagggggcaaatggcacattaggccagaagcagccaattagtgatgatttcgccttgagcatcgtcctccctgccccccgagggggctgctcagtaaatttgacaccggaaaaattggtttttaaaaattccatgaaatattttccgaatgaaaattataataatcagtcattcgtcggtgccaatcgaaccacgcgaagaaatttctgtttcggtgaccattccggagttgctctcctccctcaattcggcttttgccaaatgacttttgaagttcaattgccggggcggggaatgcttccgatttggccattcatctgcattttttagctgtctctgctcaacttttcccagctgagcagcaaaaatggcaacactttgtgctcctttgctcctcacaatttgctttcttccgatggcttttgcctttcctccgcgacgataacggcgacaacgacaacggcaccaacaatagtttctgaagcgacgcagcaaaataatgccatcgtcgacaaagtcaacgaacaaacggacgaagcattggcaaactccgcctccgcagctgctgacccatcggtgccgattgatctttcctccaaccaacagcagtcgcttctcctctcatccgcccccaatttggcaccgccctccgtccctcgggggcgcaaaagttgcgacattcgccgttcggcttcctccgtttcgtacaaaggaaacgcggatgtgcatgaacatttccaagtctgtggctgcttttggctgtttgcccccaatggactctaatttcagaggacattcagtggaaaatggccgcgtcgacagccatcgctgcgggcgcatttgcaggcgagcggaagggcatcggttgggaagaaggaagcggcactttgcattggagaaaatgaggcggagggaagcggaacagtgcggacggaagagccaatggaagaggaggaggaggagggcgaaagcgccgcacggaacggcgcggaacggacgaacgccgggggaaaaacgggggaaaagggacggcccaagagccggcagcaggtgaagagcgtgtacacagcagtgatccgcaagttgttcaccagcaacgaagtgaaccaag

SEQ ID NO: 56705 - DNA, 553 bp, Heterodera glycines
atggcgtcggatggccaagctttggccaaatggctgttcactgcccatccggacaatgtgccaaaggttttcgaatgctcgtggggcaggaataataaggacgacggggattggccgttcaaaattgctgacttcaaagcggtaaacttatcattaattaatgatgtcactcaacgaaatttcgtcactttctttaatcgtgcgaggatttttaagggcgaaaaagtccaaaataagggcgaaaataaggacgaaaagctttcaaatttaggggtatacttttttaaattgttctttttattatgaaaataatttcagattaaggcaggcaattttattcactgattgcagttacaaataagaaattttataattttcatgagtaaaagacaacacgactatcggccaaaaaattctggtgattgaattttaaagaaaatttttcatttcttaagggtcttttcctgaaaatgttttgttcgattcttaagggtatatttttcgaaattttttgggtcgcttcttacgtttttattgcatttttgttaataaa

SEQ ID NO: 56706 - DNA, 705 bp, Heterodera glycines
atgtgtcaaagcgaagaaagaaactcaattggactgaagagcgaggaaatgtttccttccattgagaaggcacccgaagttgaacagaaactgaaggagcaggaggaaatcagcagacgggcgaagttggaagagcggaaacagcaggaggaaagggagagggaagagaagacgaaacggtgcttcgacgaacatattttgttaccaacaaaactattcagggaaaacgcttacaaagcgccgcggcgtacgatagatggagagagttcgcgaaagcaaatggacaaggagcgtaaacaattgcaggacacggagttgggccaattccgtttaatttttcaaaaacaaaaagttaaggccaacagaatcggacacgacttcaaattggagagacatgcaacgggccgtaccgaaagaagaaaaggataagtaagccatttgactctattcagaataaaacaataaattttaggccgcttaggggagttagcgccgctcatcaaacgaatgccaccaagtaagtaccgatttcaagtgtctgatagtaaataatctgcaacaaatttcaggtctaatgaaggggattcaaattggagaaccaaaccgactggaatgtaattgaaaattcgcgaatcattaaaagaagatccattatttaagcactagcacagcggattcccagaacagttggcgaaccatgtcaaa

SEQ ID NO: 56707 - DNA, 612 bp, Heterodera glycines
atgaccgatttggatgcgtttttcgcgaagaaggctagcaaaggaaaaaagaaaggagtgatcaaattggaggaaataagtgtgcaattggagcggagagcgatggtattttttaaaccctttatttcgaaattatcgcaaaataagagaaggtataaaataaacgatttcgaatatatcttcgaggctttttatcggttttcgttttcgccaacaaaacggaacatttttgaattcacctcgaagagagttcttaactctgaatcgtgattgcatttttcgttttaaaaattataaattttaatattcatttaggtcgaatatgcttgatgtttaatttttaattgttccaggaacaaagagatgagactcgatgataatgaaaataaatcgtcagttgaggacattagcaaaagccgacccgcgaacgagcacaacgaagactctgaacggttggcatttgacgacaagccgaacgtacctgtggtgataaaagagatggccgactcgtacgtcgaacgcgaagaagaggagaaaagagcgagcgccgaaccggcgaggacttggaaaacgaacagcgaagttggttttggaataagcaattttaaataa

SEQ ID NO: 56708 - DNA, 415 bp, Heterodera glycines
atggggttggagacaaaccaaggtattaccaaaaggtgaggcgctccttcaacatcaattaattttctttcaaagtaaattccttcataaacaaatttttgtttcttgtaaattttgaagcttctccaaattttcaattcgggttgacaatcaaaatgcgtgtcaccaaaacatcgaaacggggcgaaatcagtgccaatttgaagccgagttgaggacgacgaaagaatggcaaaatatccatccaaatgtcgttgcaaatccatttaaaacatggcacttaatggtaggtaatatatagtgccaatggtaccccccccctttttttttgaaaaaatttttctctcgaaataatgatttttagggggttcgcagggccggagactccgattctggcatccattttgaagcataa

SEQ ID NO: 56709 - DNA, 219 bp, Heterodera glycines
  unsure (1)..(219): unsure at all n locations
atggacccatcaaatgaatgtggcaattcagctaatttagtaacgcctcgtttcttattcaattgttcgaattatgtttacatattaaggtctgttgcttttgcaacaaatccacgtctggtgctcaccattgtcgaaaatgctccaggccttgtcacgccattccaccatgctcactctcaagcgatggtgaagaaggatacggatcgaaggtcntct

SEQ ID NO: 56710 - DNA, 107 bp, Heterodera glycines
ataggtttttaataaattccatgtcgacgatttcttccgatcagttggacaaattggaaaatgtatttgaaatccgaaaacatttgaatgcttctgaacaaggacgt

SEQ ID NO: 56711 - DNA, 623 bp, Heterodera glycines
atgtctgccaatgctgaattacagttcgtccgaatcaaaacaaaagcagggtcaacggaggctgaagtgacaattggaaatggacaacccctttcgattctggaggcgattgaacttctgcaaaaaaatttcaccgcatttgaaggcatctcgattaggtaaaaattggacagaaatgaattatgaaaatgaaaatattaagccatttcgatggtgatgtcctcactttgctccatcaccttcattcaaaacttgattgtcaccatgtaaatttggcaatagaaacttataacaccgatttttctgaacaaatattggacaccattttgccgttaatccaaggagttctaaaatctatcaaaatggatgccaaacatattgagaatttgacacaattggccccatcactgctatgtgaatgtcccctgcttcattcaatcgccacgaataaattttcgttggaatttacggccaaagacggtgccccgattgaaggacaagcattggcaaaatggctacacatagcgaacccggaaggactgcccaaaatgatcgacttttgctacaacgctaacggcctttggaccatcaacaagagtgaagaaatgaaagacgtgggttaa

SEQ ID NO: 56712 - DNA, 521 bp, Heterodera glycines
atgtggggcgtggcaaatcgatggatggataatgaagcaggttagtgccatgccgtcgatgaatgaatggccatgcaatgccaaaattgggcggggaaaggcgaatttgtggccaaattaaaatgtggggctgtggcaaaatcgatggatgataatgtgatcgctacagtgaggcagattagtgccatgtcgtggatgaatgaatggccacaatgccaaaattgggcgggaaaggcgaatttgtggccaaatccaacaattgagaggccaaatcgatggatggataatgtgactggcctccaaagtgaatttgtcatccccaattagaaattttgcaattgtacgttttttttctaataatcacagttaatctaggtatttctaaaattcgctgaattttgaaaaattaaatatcattattattattaatcaattttaaaattattcgcctcgggggattcaaattcaatgcatggccttttcaaaccgcagaaccaattcaatgataaaaacatttttta

SEQ ID NO: 56713 - DNA, 194 bp, Heterodera glycines
gaagaagcgggacaaagcagcgacaacgaggcatcttctgaaaatgagtgacggacacaagaacaacgacaacaacaacaacagtgatcgccagaagaaatgaattaattaattaagaaatgatcgatcattatgtacattttaagtgatcaaatgtattttatgaggaacaattgcaaatacatatgtataga

SEQ ID NO: 56714 - DNA, 137 bp, Heterodera glycines
aaggggtatataaaaggagtggaaggaccatttgattggtacattgtatcaaaaatgcaaaaaccgataatcgtaaatataattgctctcgctaatctcggtaccggaattaaactaaactctctgacgatcaccga

SEQ ID NO: 56715 - DNA, 426 bp, Heterodera glycines
atggacaaaactctcgccgatattttggaaaaactcacccaggcaataaagcaacaaaatgcgccctccacaacacaaacagcacagaacatcacattacctgacattcagacattttctccaaacagtgctgaagaattcgaggagtggctggaacgtttccaatttgctttggattgtgctgcctcaaatttggacgatgaacagaaggtcaaattgttgatgaccaaattgtctccgacggcgttcagcgagtacaagcgcttttgtctaccggacgaaatcacgaaattcaattttgcggacacaaaatcccgactgctaaaattattctcgcatccgccatcattggcaatcgaccgatacgaatgtcttaaggcatgcagagagggaggcgaagaatttggcgcgtttgtgaaccgttaa

SEQ ID NO: 56716 - DNA, 1476 bp, Heterodera glycines
atgaagaaaagtgtcgggatttcaaacattgctgaaaacaatccttacattatacttgtagttatgttgacagactcaacattcgaaactctaattaagaggtaaaatatcataatgaaataaattaaaaataattttaaatatatatttttttgtaatattttgtattttaccactcccaaattcccaagtccgcttctgctggtgctgacaatgcttggtctacgaagtcgaaggggcttcatatcgctcattgaaggagatttttgaagaaaagtgacatcatttttggatgtcattattaagtaatttaattttaagtttataaaacttcgatttatgtgctaaaatcaaaatatgaactgttctaaaaacttaaaaaaactgttaaaataattaaaaaaccgaaaatatgcgctataaacggaaaaaaaccataaggtgttgaaattaaaataaagtgtcaataggttgttgtttttcaaaaaactgtttttttgttgctttatttcccctgttttaatttaaaagaatttattaaaattcccttttaaattcttttttttcaattttaaatctatcaaaataaatcaaaatcgattgctaaatgcagagatttgtgtataggaaaaaccaaaaagaaagcacaaatgttcattatttgctaaataaaagaatttgttttgatctgacgtctgtttgtacatgaagcagctgtcaagtgaaccaaacaaagattttgcgaattttgttaaaaaatagaaagcacaaaaagatttaatcatatttttatttttgtgtgtaatttatttaagcatttcggttttattttattttgatttttccatttttatttatttaataatatatgtataaaaaaaagcgcgttaaaattgctataattaatcttccgaccaataaaaaaaaagttataaacagaattcacgaaaaccggaatatttcaaatatcacattaattttgacatttttcagtaaaatattttaaataattgatcaactaaacgatgatgtgcgatcaatgaagaacaaatggtttttattttttatgaagtccaattagttacggcacaaacaccaaaaaatcatagcaccgaacaacagaacagattaacaaggccattcgtgagtggaccgatattagggaggcattaatagcacaacccgtggctggtcgattcctaaaaagtagggctggtcgggaccgggaattttgacaaaaaccgggaccgggacttgccgggaccagaaaagtcgggatcgggaccgggaccaagtttttcgaccaggaccgggaccgcgagaaaagccgggaccgggaccaccgggaattttcccaatagaaaattttttgaaaaaattttgaaaatagcattataagatggaaaaaacagttttgagaagaaacttcgtcgaaaaaagaatgatccaggctatttaacgcgataaagaaataaa

SEQ ID NO: 56717 - DNA, 208 bp, Heterodera glycines
acgggcgatatcaaaattaagtttcaccattgtttcacatttcgcaccatcagcaaaacgtgacgctctgtttttaaagccgctatttgtataatcatcctggtcgacatcgtcgacataatagcaagatgcttcacagagaccctttttgacatcttctgaaaatcccaattcagtcatcatatattccctaaacgcatagtcaaat

SEQ ID NO: 56718 - DNA, 434 bp, Heterodera glycines
atgaaactatgcctattattcactttaattatttttttgatcgtcttaattaatattaattatgttgaatcagtggataaaaaattgcaacagaaaacatttgatgaaatatttggagaaaaatgggaagaaaaagaagaaaaacaacgaaatgagaagaaaaaaagagaaattattggaaaattctacaaaataagagaaaattaagcaaaaaggaagaaaatattcagccaaagaatggagtaaaattaactcaaaaatagcaaaaaaattggggacaaatcgacaatatattcaaaaatggattaaagaatttggtcttcaaaaatacaaatcaaaaactgatgaagaaaaactcacaattgtacaaaaagatgtaaaagaataacggatgatgaaaaaatgggaaaaatgcaaatttattggaaaataaa

SEQ ID NO: 56719 - DNA, 2482 bp, Heterodera glycines
atgactgaattgggattttcagaagatgtcaaaaagggtctctgtgaagcatcttgctattatgtcgacgatgtcgaccaggatgattatacaaatagcggctttaaaaacagagcgtcacgttttgctgatggtgcgaaatgtgaaacaatggtgaaacttaattttgatatcgcccgttgagatgatcgttctggggaaatttgattcgattttgtctattaatgctaatcgggtgctcagtagcgacggaagcatatgatgaattctcatgagattgaaatatttctatccaaacatctgacaacccgaaaatattttatcggggtttttgcttccgacaagatgcctaaatttaaggacaggcattttccgtactgctttgtggcgaatactgaccgggcgggcacgataggtgaacactgggtcgcctgttttgtaaattcgccgacagaaattgaatattttgattcattggacgattatcccaatgaatatttaagttcataccttaacttattcgaccgaatcctctttaacgatcgcattgtccaacatcaattctcagatgcttgtggtttttaatattgactatacgattcgagatgggctaaggaaagaacataaagttaaatcgaaaaatgcgaaaaagtaaatttcttccttttcattcttccgttctttctttttctaattgatttttcgaattaaaaatgctacttcgactaattttcaatgtttttccaatttctttgtcactcattttcggattttctttttttatttgccaatacattttcatttttattattttttcttccttcgttattattttcttgctaatgccaaattgcttcttccattttctaattgtgtcataaccaactccaattttcttacaaatttctttatgattttgttgccattctttggttgaatattttcttttttgcttatattcatttatcatttcaatgaatttttgtacaatttctaacttttcttcatcagtttttgatttatagcatttctttttttggagaccaaattctttaatccatttttgaatatatgttttatttgtccccaatttcttcgctatttttgaattaattttactccattcttttcttgaaaatgttcttcctttttgctttattttctcttttattttataaaattttccaattatttctctttttttgagttcatttcgttcttcttcttctttttcttgccatttttctccaaatatttcgccaaatgacttttgttgcaattttttcttttctgctccaattttgacaattaaaaataatataattaataatagtagcggaaataatttcatttttatcgtctcgaaatgattttattttatttttcttcaattaaatggcaattcattttttgaggcatttaaatgattttttttctgattaaaaaactgaataaatcattattttacttaataaaataaggaaatcctgtttaatttcaaagaaataataataataattttatcttaatgacaaaataattgccaattggtaaattaatgattaaataaaattttattactttctactggagctcattcgaaaataataaacatattttcaataaaaataaaataaattcacaatgtaaagagattttagaaaaattaaagagattttatgaaatttcattatttcagaaaattggtgtaaaacgtaaaacggccaaaaatgaaattttagcgccgaaaaatgttgaaaaagaatggaaacaaaattatgtcgaaatttgtaagaaaattggagtcggccgagacataattaagaatggaagaaacaatttggaattcgctgtaaaagaataacggaggaacaaaaaatagaaaaaatgaaaatttattggctccgttattctttttttttaattggttttgttaatttggatatttctttttaattttactttttttcgtctttttatggctttttagtgccttttttgctgttttaaaactttttttagtcgactttttggcgatttttcgtggcttaaatcaccagccctattttttttttgcaaagagatttagcccaggatgtggttttgtagatcccctttttatcataacaaaaaaattgaaatcaatcaatcgtttttggcattctgtcgaacaaaataatgccgttatgtttttctttttttggcattttatccaacaaaataatgccgcttgttgtggtaatagcattgtctgttcaatcgctcgtccatccgttttgagccgtatttgttccaatgtttgtattcgtcatcaaatgggtcaaacacactgaaaaaacgcttcggtggcagctcatgcctggtcattaagaaattaattaattatttatttaaatttttatttttaattattatttcaatggtttttagccaaggcttcaatttgaatttaatatttgtaaaaaaaagaattgtaaataaa

SEQ ID NO: 56720 - DNA, 586 bp, Heterodera glycines
atgaaattattcccgctattttttaaatttattttattaatcatcaaatttgaccaatttgaagcagaaaataaaaagttggaacaaaagtcatttgatgaaatatttggagaaaaatgggaagaaaaagaagaaaaacaacgaaatgaactcaaaaaaagagaaataattggaaaattttataaaataaaagaaaaaataaagcaaaaaggaagaaaatattcagcaaaagaatgggataaaattcaaagaaaaatagcgaagaaattggggacaaatcgtttatatatttatgaatggattaaagaatttggttttcaaaaacaaataaagaaaagctataaatcaaaaactgatgaagaaaaacttgaaaatgtcgaaaaattcattgaaatgaaaaatgaatttaaacgaaaaagaaaacattcacgaaaagaatgggaccaaaattatgcggaaatttgtaagaaaattggagttaacagagaaacacttagaaaatggaagaaacaatttggcataagcaataaaagaataacggagaaagaaaaaatggaaaaaatgaaaatttattggagaataaaaa

SEQ ID NO: 56721 - DNA, 574 bp, Heterodera glycines
atgctccgtaaacccaaaaaaacttgtaaaaaatgtgagcgttgccaagaagtgcggttaatggcagaaattaaaaaagagaatgtaaaggcaggaaaatgccggggagagcatctcccaggcatgatcatagaagcccacaaaactaagcccacacaattcaaagaattgtatacggatggggatggtgtgcttgaaaaaatattggaaggtattccgagcccctacagccggaatatttttaaaaaatattgaaaggtccagcagttgtgcattgcgatgaatgtgccaatgactttgcttattataaagatttgtggaattgttcggggagtatggactgtggatggggtccgggcatctcatggattggagaagattgtttagtattgcattttataaattcttttccattgtgtacatttattcctaaaacgaaaagattacaaaatttgtttgtccattaactgcaaacggtgctctaatttcagtgaggttctaaatatatttttaaacaggaaacattactgacaacttgccctcggattcgacattgagtgcgttgtgaaaaaaa

SEQ ID NO: 56722 - DNA, 397 bp, Heterodera glycines
atgacactatcatccaatcatagggattcaaaacaacagcattcaagtctctgggactcaataacgaccaacattccaatcagcgggactcaacccaccaacatttcaatcactgggactcaatccaccaacattccaatcaacgggactcaatccaccagcattcaatcactgggactcaacccaccaacattccaatcgcctggactcaacccaccagtatttcaatacctgggactcaacccaccagcattccaatcactgggactcaacccaccaacatttcaatcactgggactcaatccaccaacattccaatcaacgggactcaatccaccagcattcaatcactgggactcaacccaccaaaaggcaatcgccgggactcaacccacca

SEQ ID NO: 56723 - DNA, 972 bp, Heterodera glycines
atgtttaaaattaaaacaggaagtctgtaaatttttaaacaaagtcagaaatccaatttgaattttgtagaaatctagttaaatcttaattttttcaaatattctaaaattcaaaaaattttgtatgcaattgaactaatatatacaataaaattttaaataagtattaaatttaaacttctagaagctgtaaatttcaatttgaattatgtaatactaaatcacaggtaattaaaagatatttggtaattaaatgaaaattatttaaatattgtgtgctaatttaaaaataaataaatattatatattaaaataaaataattgttgggcgaagctattataagaatacgatagtgaaataatgtaaatttaaatttattgaaatttattttttagctcaccggccattacgccttattagaagatccacatgtgtttccaagacaagagctggtaaaaaaatatatatattacagtttggtaatttgtattattaatttttagggtgagccagacactaccgtatcctactacagttacgcaccatggagtgaaaattcaaatttgaaagttcgcatcaaattgcttgatggaaagtccacccaatttagcttttatttgctgcatgacataccggaaccaaccaaaaacagtaagcctttgggtacggtagggatagtgagagttttgtaaccaaaatttcagtgggcgctaccgtaatgcaaatggatgtgaccgtaaccagtgataatgtggcgacaatgaaattcactgactttttcgtatgaatttaaaatccaacaaattttgaaatacaattccataatgacaatttttttgaggatttttagaagttaattttgcaaatttttaatggagtaattgatccggtgccaggaaaattttggaattaatttatttttcccacaaaaattctaaaaaaatctgaaatttttaagaggccacaataaa

SEQ ID NO: 56724 - DNA, 451 bp, Heterodera glycines
atgagttatattttaattgaaaacgaaaaacaaaaacttttggcttttcgaatttttgttctagttcggtgcctaaatggatatcagacgcgggttctccaaccctaaaaacctctaaaccaactttaactcgaaaaaggagttataccctaaaacctgacttggcgcctgcattccatcgtcagaaataataacatttagccttctgctattttttaaaaatcattatttactcatgcaatttcaggttattatcaaaagcaacttaatgaatagacgaataattgctcagcaaaaaaggcgacagcaagaacgcaaatttgacgaaagtcttgaaagggcgcggatgagaaggggaagaaaatcgacccgcgcaaggacctgtgtccacgaagccactcatggatggatattatggaaaacaaaagattgtagcgacacattcgaaatg

SEQ ID NO: 56725 - DNA, 408 bp, Heterodera glycines
atggaaaacagtcgtcggtatatgacacgacaggagttgcgtcgtctgttagacaatggagttgcagtcgaaattgaggacaacgagataaacgtcgcacatcagcaaggattgcgcacaaattggacggattacgcggcggaaaacttcgaagcgtcgccgaattttcaaccagccgccgtttttatggaaaatcatcggcgcgaaatagcttttagctcacttcgggtcccaattcgaacttcgagtcccaataatcagaaccgggaccccgttgcaccaccggctcagaattttgttctccaaaacatgctccctcgccgtttagacaacgacactctttcatttggcggcgaggagggtggagtggaccaacacacgagaacgaactgcttggactttccgtga

SEQ ID NO: 56726 - DNA, 988 bp, Heterodera glycines
caatacaacaaaaccgggaccccattgggtacacaaaacggacgcgtcgctacccatcggacagacagccgcgccagaagcatcagcagcaacagtccaaacagagtccgatgacggacagcagtgacggggccaacccatgcgagtccgcaatgttgtcgacgacttcggcatcgatgccgtcctcgtctttctccggccccagcagctcagcttacctgattccggccggcggctcatcctctgccggtgccattacccctgcctatttttgtggtgcccgaccgtctgcctataccccggagtatgccggaggtgtcggcttgtcctctacgggtgcctataccccggattatgccggaggtggtgccggctcgtcctctgccggtgcttttacgccggcttatattggcggtgctcctgcccatgcatccgctgcctattccgctggtgcttcggcttcttccaccaaacctttgtcgatccaaattccggccttgaagctcggccctttggctgggccaaacggtgccaacttcgccggtggctatcccaactataacaacaacaccagcaacaacatgcaagctcagcagcaacaccatttatggcaacagcaacaacaccaagcgcaacagcaaaaacattttaccggcgccaatggcacaaattcgtcgcattttggcatgaggccaaatgctcaaagcattagtggcggcacttccgccggcttcatgtccagcaacaatgttggtggcacttcctctttctctacttcttcgtcgtccttccccactcccatttatggcaacacaaatgctccacaaaatgatggtggttgtgccggtggtacaacaacaaaaaagcagcaacaacaacaaccaccacaaaatcaaacaccaccaaacaatgtgccggctgaacagatggaagaggacacactgttgagacgaatgattggcattgagcagattctgatcaggatcag

SEQ ID NO: 56727 - DNA, 855 bp, Heterodera glycines
atggttatgtgcacaccttctgacatcagtgggaaaggactcttctacacaatttcgtttaaccgatcaatgataatgcacattctattgatcattattaacaatacaattgttctggttttaaaattcaaaaaaggtaaagtaaaataaatatttgaatatttcttaattaatttattgtcttaattaaatttacggtttgttcatatgttcagaaaatcagcatttctcgaaaagcattttccgctcattgctcttcctcgtctttttggaaacaattggatggctcccgtcaatttattttgcccaatttttaaaaaccgcaaaattttcaccaattacgaccacttatatcagtgctgggttcacaaccatttcaacatgcattacgtcatcggcaaatggaccgacactttattattttaggtaaaaaactttcaaattttaaagttaattaaattgcattggaaaattagtattaaataaaaaaatttaatttaattagaaaaaactaataataattaaaaattaaatttaattgaaattaataataactaaaaagtaaatttaattgtgaaattagtaataattattcgttgattattagaaattcaaaataaatttaaaattttacttttttaagtcttttatatcgcgaggaaattaatgggtttttggaaagcattggaatcaaaaagtccatcagcacgcaacaccaacaacacataaatacaatgccattaaatgttgtgacaagacataacaattggactcaccattagaagagagtcgggtcgtttcggcgccagcccaagtttttggactactttattcattgttaatctaatccaaaca

SEQ ID NO: 56728 - DNA, 660 bp, Heterodera glycines
aaacaaaaaaatcgattttttcaagtgtccgtttggggtactaaaacaattatggggagcaaaaatccaacgcagaattaaagtacaggctatagggaagctattcccgaaggattcggtctccccataaatctgggcgcatcggttcggggggactgccccgaaaacaaaaaaatcgattttttcaagtgtccgtttggggtactcaaacaattatggggagcaaaaatccaacgcagaattaaagtacaggctatagggaagctattcccgaaggattcggtctccccataaatctgggcgcatcggttcggggggactgccccgaaaacaaaaaaatcgattttttcaagtgtccgtttggggtactcaaacaattatggggagcaaaaatccaacgcagaattaaagtacagactatagggaagctattcccgaaggattcggtctccccataaatctgggcgcatcggttcggggggactgccccgaaaacaaaaaaatcgattttttcaagtgtccgtttggggtactcaaacaattatggggagcaaaaatccaacgcagaattaaagtacagactatagggaagctattccggaaggattcggtctccccataaatctgggcgcatcggttcggggggactgccccgaaaaa

SEQ ID NO: 56729 - DNA, 501 bp, Heterodera glycines
aaattttctggaaataagcttaatagggcctagttaagctgtaaaaaaaaatttggagcgatttgaatgagaatagaaagagccaggttcgatgaagttttggtaagccaaaaaaaaatccaaacatttaaaaatctataaaaaatttaaaaatgagaattcatgcgagattttctggaaataagcttaatagggcctagttaagctgtaaaaaaaatttggggcgatttgaatgagaatagaaagagccaggttcgatgaagttttggtaagccaaaaaaaaatccaaacatttaaaaatctataaaaaatttaaaaatgagaattcatgcgagattttctggaaataagcttaatagggcctagttaagctgtaaaaaaaattggggcgatttgaatgagaatagaaagagccaggttcgatgaagttttggtaagccaaaaaaaatccaaacatttaaaaatctataaaaaatttaaaaatgagaattcatgcgagat

SEQ ID NO: 56730 - DNA, 265 bp, Heterodera glycines
gaaaatggcccttttccgttttaatgagactaaaacaaatcgtggaagaagtttgatttcatgtcacaactttgattactgctttgaacgagatgcgcgaatcgcggagggctttgagtattggagatgcccaaggcgtcctccatattgcccaggaagagcaacagtccaaagtgcttggcaaattgatcccgacggcaaccgcttcaaaatggggcgagtgacagcaccccataatcatccacctatttttggccaacacaat

SEQ ID NO: 56731 - DNA, 1680 bp, Heterodera glycines
atggcaaaaccggaacactttttaagaactttcaagcatattgcatcgactccaccggaaatagtggcgaaggcgaaatacgtcagtcgtacggcgtgtgcaaacgaagcgaaggcgtgcatggacctgctgaaacaggcgcagacgtaccttcaacgagcacaggtggaggagaaagcaaattgaaacattacattatgatgataaagcctttgatattcaggaaaaggacgaagaggagcgacgacagagagaacagcaggaggaacagagacgaaggcttttggcacgacaggcggaggaggagagacgaaggcaggaggagctgaagatgaggttggagaagctgaaccaacagcgacagaaatttgtggacgagacgaaagacattctccgactgccgcaagtaaatgaggggaaacgaattattaatcccgggaaatttgcaccattttcaaccatttcaacgcattgttttcttttaataatgttcattttgcacacaaagattcgagaggaaaagaaagcacgcgtctcgacgagcagaaagaagcgcgagggcggcgaggcggaggatttcgtcaacgacagttcggacttgggcgagtacgaagatgaggagctgaggaacgccgctcggaagatgaaggtgaatgaatggtgctttaattaaggagagacggaaaataatgaaccacaattcaatcacttttttaaagactaagaaacgccccgagcaagaaatgagtggagggtcggaagaagacgacgcgacagtggagaggaggcagaagaagataaaggcggtggagaagcggaaaagggaccgcaacttggacgagcaagtgccggcacgattacggggaaaaagtgagttcgaacaagcagaaagccttcgtttacattttatttcttttcagtcaagagcaaggcctatctgtcgtcctcgtcgtcgtcgccttcccccgctcagtcgggcgcagagaaaagtggagacgaggaagagaaagaaagagacgacgaagaaatggaagtgagggcagagaaaggaggtgaggaggaagaaagagaagacgaagaaatggaagagagggcagagaaaggaggtgaggaggaagaggaagaagaagagaacgaaagagaggagagggaagaagaggagcgtgaaaagatgctagaagaaggggaagagagagaagaaaagggagagaatgagcacggagaagaggaggaagaggagcacgaacggagagatgaagaaggggaagaaaatgtgcatggagaagaggaggaagaggaacaccaaccgagggatgaagaagatggggaagagagcggaggaggaggagagggagacgaaggagaagagatggaagaggaagaagagaaggatgaagagggaagcgaaagaagagaagcgatgggcgaaggagaagaacaagatggagaagaagaggaggaggaggaagagtgattttaatttttcaggtcatcattatttatttgtgcatcccaatttttagaatttttataaattcgatttttacatttttaagtcatgtcaaacacggagcgtaagacgactaacttatttgttaggtcaattaattaccagtgaatgtgaattagtttaaacaaaaaaagtaatttggaattagaacaatgaatgcgactgaataa

SEQ ID NO: 56732 - DNA, 769 bp, Heterodera glycines
atggacatggacaaaatactcagtgatatgcgacaacacatatcgaatttgcaagacaaacttcacgtggcaaattctgccgttagcaaaggacaaattgtcaatgagaaaatcacactaatgaaggaggtacattttcatttttgacaacccttcaattagctccaaattgccctgttcatccatactaatcattcccagactaattaagttaatcattttataattattttcagtatcaagacaaaatcgcatcattgaactcgtgctggagagccaggaatagaacgcaattagtgcacaatttgcaacaggaaagtcgccaaatcattgcactcgaagaggaaaatcggcagcttcgatttgcactcaaagaaatggaggacggattgcatctgatcatgaacgactatcggaaaatgttttcgggttttatgagaggggaagaattggccgaagtggccaatgcccagcacaaaaaggtcaattttataaatatgtcaaaaatacaaaattttcacatgggaaatcttttctcatttatccaacatttagtaaatttgtactataacataagcgcgaaacaattctcacaacgtttgtgagccttttccgctaatagtcatttttcagcgttcgttcatttaaattttttaatttcttaaaggtatttcttgctggggtgagttacgagcaatactttggaattgcacgtgccgctgagaaatttatggcgatatcagaaaacaaagttgcagaagacgatcag

SEQ ID NO: 56733 - DNA, 396 bp, Heterodera glycines
atggtgcttctaaaatccctccttttcttcctcccattttatttgttttctttttccttggtttcttgccctcctccgccagctaaaagacagaagacggaatttcaacatgagaataaagcgaatgataacgaaaatcgggtggaagaagaagaaccggacaaagtaatcaatttatttgtatttgtttgatggattatgttaaattttagaatctatacgactttcactactcaaaatatctggaattggccgtcccaaatcccttgaaagtcagccgaaatttcagcaacgtttgagggaaatgaatgaaacacgacataaaagttcgtttttcgagggtttttttctcctttggaccattacaaaatttttatattccagcagggaaaatag

SEQ ID NO: 56734 - DNA, 115 bp, Heterodera glycines
atgccttcatttaatactaagaatgtaggtattgacgaagtaagaaaaagttcgcccgaagcatctgacactggtcctcgactagacttccgtatctttgcaatttttggtttgg

SEQ ID NO: 56735 - DNA, 377 bp, Heterodera glycines
atgaaaatggaatacgagtaagagaatttggaaatttgaatgcattttcagaattttaaaaagtgttaatatttaaattctccatttttcagttctgccatcttcggattcgccatcaaagagcaagaagaattggacaaaacaattcagtataagaaaggcacttatgcttgggaaagtgatggctcggtttggattaacggagaaggaaagggaacaaatgacgaatattactacggtgttggtgataccgtaggaattggtgttcatttaatcactggacagctctttttcacgtggaacgggcaatgtttgggttggcaaacaaataatatttaattaaaatatcggtaatatgttgctcaaaaatcatcata

SEQ ID NO: 56736 - DNA, 1605 bp, Heterodera glycines
atgcgtgaacaacgggatgtcattttttatttttttcggcaccatccagcacgcatattccatcagttcgggcttcattgtctcctcattattcaatgctgtctccggcgcgctggtcaatttgatcattatttagtaagttcatcattaatgaaaattagataattatctcttttaaatattatcaaatatgtttttcaaaattgtttaaattaaaaaaaataatgtttatataaaaaaatattcagattaattcttaaatattaaataaattaaacttaaatttataatatagtaaactataataataaagatgtccctagaaaacagtgaactttttaactaaataatgattcaaatcttttgttgaaaaaatagaaattggaatgttggactaattatttcttaacgaatttttctttgaaaaagcccttcaaagtgcgagtttttcgaaatggttaaatcaattaaagtcttttttttagaaacagctttttcaaatccgacagttcttagaaatgattaaaccaattaagtacagtcttaaaagcggccaacccaacccaattcagtacaacattcctagaaacgatggacatttcttagaaaatgggtcatccatttaattagttcctgaaatacaatgccaatttgagtccttaaaaactatcattttttatcgtgaaaatttctcaatttaagccatcatccagtgctgaagaaaaaggccaagaaatggttgttgcgcattgttcagctgccaaaaccccgtgtggacgatcaaatgcttgcaacaaagcgcttgagtcaaccgcgaaacatttatggccaacatttgttgaaccgatcggagcgcgaaaatcatttcaaaatgttgcaaaaccagtggatgcaaaccagcattgatgtggccacaaattttactagtgatcagtaattattgtcgttcattggtgtggtgttttttttggttttgtttatttttacgtcagagatgtaatgatcaaaaaactttcaaaataataatttcgaggcttcaaaaattttcggaaactcagaatttccgctacatacctgatgtacagtaagaatttcattttacaaaaaacaaattttcatttgtatgtatttttgtgtacatatgattttttgcttttcgtttcaaatatttaaatttttctatggctaagattgtatcaaaaatatttttaaaaaatttcctttttaaaattaaattttcaattgaacaatttgtctaacaaattagttattcgaagagtatattttagtatttactctgaattatgaatttaaaaagcttgatttatatttgaagaaaaaaatagaatattaaaatattttcgatgaatcactcaaatttgattttatttctctttattttatgtgacaaaagaatttctctcattttcaatttcttgttgagtgaatgtgaattttgtaagtggttgtctattattgtgttcttgtgagacacatttctccgttattgtcaccaagttgaagtatatacaaacataaattcattttcccatatttaaatctttacttttcactattatgcacaattttttaatgcaacaaaaa

SEQ ID NO: 56737 - DNA, 306 bp, Heterodera glycines
atgattaaaaacgaggattggcactttgccaatttaagtgatgtaaaaatgatagaatggaatttgttgaaattggcattttataaaaatgatcaaggcaagaaatggaaagaaattgaagaaaaattgacagaatggaagaaggaatttttgaattcatttcaaaatgaaaggaacaattcgaaatttcaaaaaatgttacaacaattagaagaaaaattggagaaatttgaaaaagcagtgacggagaaaaagaaaagtgtctggacaaaaattgttgaaaaactttccgaaattttcgattaa

SEQ ID NO: 56738 - DNA, 395 bp, Heterodera glycines
aattacgaattagcaattttatattcgaaaattttgcagttgataattgttgctataaccaacataaataaatatcagaaacgttacgattgtgatattaaattttgcaattgccttaatgaatatcctaattgctttcaaacaaaagtctgttctccaactcatatcttaaatattttattttttagaatatattatgctggtcagttcatatttttggagaacgttttaaagaaggataaaaataattattttattttaccgtcactagatatgcatatgtattttaaattttttattgttatgtaaacttctaatatatatatatatatatatatatatatatatatatatatttatatacataatcatatgagttggcggttttaagaaac

SEQ ID NO: 56739 - DNA, 282 bp, Heterodera glycines
atgagttggagaacagacttttgtttgaaagcaattaggatattcattaaggcaattgcaaaatttaatatcacaatcgtaacgtttctgatatttatttatgttggttatagcaacaattatcaactgcaaaattttcgaatataaaattgctaattcgtaattggtacaaccaaataaaaattaagtaaataattgtaaattaatttaataaagatttttagtctgtcactgctagactaataatatttccggctgacacttacttgcacaacaaataaa

SEQ ID NO: 56740 - DNA, 699 bp, Heterodera glycines
atgttttccacagtttccattgcaacactttttttgataaatgcttacagtttctattcaatcacggcagaagaagcgaatattggcaacattccggcaagcaatgacaaaatgccaaaggatttggcgagtgatgacaaaatgccaaaggatttggcgagtgatgacaaaatgccaagatcaggtaaagtgcaaagcgaaaggggaatggaaacgaatttgacaattggaaacaaaaagccaagcaatgacaaaataccaagatcagctcaaataccaagcgaaatgggaatggaaacgaattcgacaattaaaaacaaaacgccaagcaatgacaaaatgccaaaggatttggcgagggatggcaaagcgctgcaaagcaaagtcaaaacgaaaaagaatttgacaattggaaacaaaaagccaagcaatgacaaaatgcaaaaggatttggcgagggatggaaaaacgtcaaggtcagataaaatgtcaaacaaagacataacgcaaagcggaaataaaacggaaacgaatttgccgaatgaaaataatttgccaaataatgacaaaatgctaaatgacgatacagaattacttgacgaattcaaaggtatttttggtagaatttttttttaagtttaaatttttagcattactgaagagtgacacatataagaccaaaggagccaagtaaattta

SEQ ID NO: 56741 - DNA, 1214 bp, Heterodera glycines; identical to SEQ ID NO: 25987

SEQ ID NO: 56742 - DNA, 116 bp, Heterodera glycines
atgaatgaaaaaacctatggtttaattcagttgcaaatcgttcaggatttttgggtaagtaaaacttaaaattttaaggattaatatttaaaaaaaataaattttaggactcttaa

SEQ ID NO: 56743 - DNA, 259 bp, Heterodera glycines
atgagtactgcggacaccgtttgcatgaaatatttaggattaaccaatcgtatagtgagttcgacctacaacatgagcccatttcctgtataataaccacgtataatacaccatgtggaacaggtaaaaaaatataattaaaaataaatttggcataatattttaggatttaacccgttagatttttgtgaaattaaagaattagggagaattagcgtcaaaaattcggacaattattgtaagggaaatggaaaataaa

SEQ ID NO: 56744 - DNA, 360 bp, Heterodera glycines
atgcgtgacgacgccacgtactttggacggccgtctgcaagtgcacggacggaagggctttccgcatgtcgtttactcaaaaatatttcgctggccggacctccacaaaaatgagctgaagcataaaagcttttgcgtttgtgcgtttgacctcaaagtggaacaggtctgacaacgagctggaggagtttattaatggatcaatttgaaacaatgaaaataactaatttattcacggttttcttaattaaggtctgtgtgaacccgtatcattatcagcgagttgtttcggttgaaggaattgagttggagtcgaacaatggaaggttggtcaagaaattgctgctacatatttcaatc

SEQ ID NO: 56745 - DNA, 1874 bp, Heterodera glycines
atgggcccaccgcacccgccaagcactcaggaagaggaccaatcatttcaacccccaggctttgaagaatttccagaggcgccatcagtggacagcgatgcggaaaagtcaccagcaacaaatgaaaatggggtggcatcgctgccaatgccaccggcaccgttaagcagcggtaaaacaccgacaaagcaaacaaacaaattggacttatcaccgcccattgcacccccaggttttgcaagtaaaccggatacggtacaaacaaatgggacgatgacagcagcaaaccgaatgacagttttaacgaacacgacagcacaaactacagcactgacacaaacaaattatccaacaaccaaaccaccgattcaaacgaatccacaaacaatttcagcaaatactcaaacaaattacccaaaaacacaaacatcggttcaaaccatttacccaacaacgcaaaaaacggtccaaacaatttacccaacaacgcaaacaccgatccaaacaatttacccaacaacgcaaaaaccggttcaaacaatttacccaacaacgcaaacatcggttcaaaccatttacccaacaacgcaaacaccgatccaaacaatttacccaacaacgcaaaaaccggtccaaacaatttacccaacaacgcaaacatcggttcaaacaaatcctccaacaatttcattgtttgtgccaacaaataatacagttgaagcattacctgcatcccttccaacggcatcccaatcacaaatattaacgcaagacataaatggaacaacatttagtagaattccaaaaccattagaaacgcgcaagtccccggaacaattaaggaaggaagtgcaaaaggaattgccaaaagatacaaaagtgccattagaattaacgccagaattcaaacagcaaaaagcagaggtgcagcaaatgttttagtatttctgctattacaaatctaccaatttttaaaaaggagcgaagaaaagatgccgaagctgcacagcttgagaatgattggaagggaaaaattgccgagttggaccgcgctcgtcaggcacttggtgaggagacacgcgccgctgcacagggccaaagcaatgacgcactgttccaaggccttcaggcagattatcaacggaagtaacgcacagcagatttaacagataaaaataatatatccatttccatccatttacaaattaagattagccgaaatgacggaggcaaaacaacgtaaagaacaagcacaacgcgacgcagccgaacaagcgcgaaagatggaaatgctgcaggcaataattattagcactttaaaaattattatcataataatattttaataaataataatttaaaaatatcaaaacaaagcaaattcttttgtgtttgtacaacagaaagaatggaagaaaaagatggacgaacttgacgctgagagacgccgccaggaagaagaagcacaagcaaacgcattggcacagtcgcaagcggaggcattgcgccaaaaagaggccgaattggaaatggctaagcgcagaattgcagatgaacaaaggcacataatttatttaaactattacattcagaaaattatggatgatttatgagaataaaattttccgctgctttacgctgtcaaatgatatttaaaaattatttaagacgggcagcttttggacaacaaaatcaggcacaaattgacgcgtggaagcgcaaattggcagaaatggaggcggaaaagcttcgaattgaggcgggagctcgccaagcggaattccaacggcaacagaaagcacaacaggaggcatggaagaagaagatggccgagatggaggaggagaagcaaatgcgagaagaagcggaaaagg

SEQ ID NO: 56746 - DNA, 580 bp, Heterodera glycines
taattaaatccattccttcgggggaccgtgccgggtgccgcggggtaagcagtgctggttcgtttcatcacggcaccgaaccttttggctagtcagcaatcgttgcttaacttgccagatcggacgggtgcgcatgattccactgttccaagcaccccaccaaaagcaaaacgatataaccaaaatataaggaaaaattttttaaaacattttttctccatcttcctttttgatactaaagcatcagagtgctaaaattaagttgtaaataaaatttggtgcgctttagagcactttctgaaaaaaatatttatgaaacaaaaaaatcgattttttcaagtgtccgtttggggtactcaaacaattatggggagcaaaaatccaacgcagaattaaagtacaggctatagggaagctattcccgaaggattcggtctccccataaatctgggcgcatcggttcggggggactgccccgaaaacaaaaaaatcgattttttcaagtgtccgtttggggtactcaaacaattatggggagcaaaaagccaacgcagaattaaagtacaggctatagggaagc

SEQ ID NO: 56747 - DNA, 192 bp, Heterodera glycines
atgggcaatcattcttctatcattgatttgccttgttgttgtgattgcatttgttgtttggtaaaatatactttaaaaaatttaccaaaattttattagatgaaatttatatattcagagaatagaatgaaatttgaaaaatcaatccctaacttaggaattttatgccttattttcgatgagtttcatgca

SEQ ID NO: 56748 - DNA, 2187 bp, Heterodera glycines
atgtacgacaccacaaccttttcacgtcaggaggcggactcacggcaggcgttcatttcgcaaaaggccaaggaaatgtgccacgattggtacgatgaggacggggcacagtaagtgccattttttgggttaaaaaaaattattggcattctgttcaggtggaatttcatccgcgacgtggagaccaacgcgtcgtgcccgtgcatggagcaccaggccaagttcgacttgggccgcttcatgccgcacccgcgctgctcgcagaccttccgcgacatcgcctgcacgtcgaccatcggtgccaaaaactgctacatgagcgtatgtttttgcattttgtcatcgctgatcagcacagcctctttttcattctttgtcagtctgatcagagatcgtgaagctaaaaaccatttctggtttttttattttatcagctgacatcactcaactttttctgcccgatcaatcaatacttttaaaaaattattttttccaattgattatccaaatgtttttctgatcagcacttgatcttagtttttttttaatcagtatgataaattttcttatctttcccccacattgatatgttctctttttttgctacgttttctgtctgatcagtcccttctttttttcccatttatattgttttgtcctaatcacccctttttctatcacctttttcagagtgatcggctgatcattgattatttattgttttccggtttcctgttttctgataaatccttttttgttcacaggcctccaacatttacggctcctattctggccagcattttgattacggtcacggctacgcctacggcgagtttggccgtgaattccgcgacgaaggcgtgcctcccggtggtgccgaaggcggcggcgctgggccattcggttacggcggttattatggacgggagaggaaccagggaaagtgggtgaagtactattagggacctaatgggcccataaatggccaatgaaaattcattgatcaaacattccaaaacatttttcatttgtccagccgttttcccacgcattatggccaagtgtgctgttatgacgaaaagggctttctgatgcagaccacttaccaggtcaatttagactcaccttcaattaattagcagaatttaatataaaagcgtaattttaaagcaaagaaaaggtgatcagagagatgggattgatctttgaaagagctcggcattcggaattgttccagaaaatgaacaaaaacatgaaaaaatattttattttaacttttgataaatttattgttttaaaataattgtaaaaaaaattttaattatcctatttttggaaaaaaagccttcgggcctttatgatcaaatgatcatgttttttaatttttttagccggttatcaaagtgattgaagaaacgccgtacaacccgggctatccgttgcgtgcctacgaattcggcacttccccttacatgggacagttcgaagttcccggactgtccgcgtttcaccacgactacatgccatactttctgtgctgcaaatttgccaagtttcgctgtcaactgttctactggcggcggccaagcagcggatgccaacagtaccaaccgccggccattggtaagcacagaaggcaaaacggtagtacatgggcaacatttaatggcatttggggggggggggggggaaatttgtgccaatttgaaatgaaattaatgcaccaatataagaaaagtgtatttgcctatttgaaatgtaagccaaaacaatagaaaatcaagcgccacggattgcactgaaatattatttgattttatatttgtaaacagtgagatatgaaagtttgtcaaggcctggatccaggcttagacttcacgaaattagttttaatttttttaaatctgttaattgtttaggaacatctaaattatctaactgacaattatattttccttaattatttaataattaacattttttaataacttgaaataaaattaaaattttatccaagaaattcagattttttatgcctaataagcctaatctgtacctgaattttgattgatttctatgtttgatctgaattaaaaaatagaaaaacccattttgtcgaaaatggctgggaacgggcccaacagatccaggaaaaacccaggcctgggccgccctgaatttaataaa

SEQ ID NO: 56749 - DNA, 604 bp, Heterodera glycines
atgttattgtttctggttgctttgacgttaatttgtattgttgcttcacgatttgaagttgattatgatcaactaaccgcagaacaaaaggagcgtctcaagctgtctttaaacaaaattaatgttggttatgaccaactcactgcagagcaaaaagagaacctgatgcggtctttcaagatgattgaagagtggaacaaaacaccgggaattacttatactgtgctttttaaatattttttatgtcatgtaattagccttattcagcttgggatcaaccaattttcattgatgagcgatgcgaagattcaatctttcgttagaaggacaagggacgatattggcctcccgaaaattccgcatcgctgcggtggagactgttaccagatcaagccaaaaccgttgaaagaagaaaacgaattggcacttgtgggaaaaggtagttcaatatcaataacacttaataaaataataactgtcgtttttctttacagtggacgcggtgactttccgtcaaattgatgagagaaaaggcgagccggagagacaggcaaaatgctctccaatttcacggtttttgtcattttatggcttaatctgctga

SEQ ID NO: 56750 - DNA, 270 bp, Heterodera glycines
atgagcggcaccaattcctcagtcggcggcgctggcgcggcaaagcttcgcccgtccgtcgagttcctccacaccggcagctcagtaccgctgtggtcgcgcaatccgttggccaatttgttccgacgctcaaagcgcaaagaggaaaagcatcgacggattggcaccactgagcaggaggaggagggcgaggacggcgccaagcagcacaatgggaaggacggggccagcagcagcaacacgaaaagggttgacaaggcacggaaacgg

SEQ ID NO: 56751 - DNA, 250 bp, Heterodera glycines
cagcagctggtgttcccccgtctctctatgtgcgtcttcctcagcccgacgaccctttctatttttgcgccctcgccgttggcctcgccgcagttccgcccattacttttggcatttccgggccgcctcttcacgtttttgtgcaggccgacggcgtaactgatgcaccgaaggtggagttggaagacaaacagttgtgggaggaatttcacaaatttggcaacgaaatgatcatcacgacgagcggaag

SEQ ID NO: 56752 - DNA, 422 bp, Heterodera glycines
  unsure (1)..(422): unsure at all n locations
atggacaaccaaaagcgattgtgtttncgtgcttatgttggtctaccaaatctcgaatggctcaacaatttncgagaggtggtcactgatcagccatattttcattaaatgactaattgattgatttaattgccctaaatttacgctttatttttgtttagacatttcgccatgccaccactttttcttctgtcagttacactgttcaatttactctgtcagcgtcacaaattgtgccatttgaattggtgaacgaacggaccaaagaaatgctgacattggagaaactgtcaaattatggtggtggtgaatggctgttgaagcgatgcccaattattggcgagaagaaagatgaaaattcagatgccattttgaacaatatccaatttattttttggggcggcagtaattgtatttggtga

SEQ ID NO: 56753 - DNA, 174 bp, Heterodera glycines
acgcgcgttgtgcagcaacttttttatttgaccacttcaattgacgatgctattgaagaaaatagacataaaattggtgaccaaatgtacgcatttgtcactaatttgtcgaacatttgtgaacaattgggcactgtcggaatggacaatgtaaaaatggacgaatacttaaat

SEQ ID NO: 56754 - DNA, 466 bp, Heterodera glycines
atgaacttctttaatctactgaccgtctttctgagcttggtcattaattgctcagctcctccgatacggtaatttcttaaatgaaagtaagttattttttttgtaaattttacaaattttcagccctttgtcatccgtcgctggcatttggaaaaagtgcaatggcaaaaatggcacaattttggtggaaaatggctgcaccaagtaaaataattgaaaaatttattatttaaacatttttaggcttcttctctgctaccaaagtgaaatggccaaaaacaaaaaaattagcaaacgttttggggtgggcaaaggaaacattggcaaactgaaatttgtggaatgtgccgaagaaattgccgaagaccaatggcacggtctgatcattacgaagcaccaagacggagtgatcagctacgaatcgaggcaaattgagagagaaaaatattttagaatatggatttaa

SEQ ID NO: 56755 - DNA, 4648 bp, Heterodera glycines
atgcaaaatcaacctcccaaacgccccacaaacttttcaattgattccattctttactcgaacaaaaagccacgccacggcttcctaatcaatcaattgttgggcgtaattcaagagggtgctggtgtttcaacaacaacaacaaacaaaactgcaaatgactacgtcaaaaaattgggctcaagtgttgaacacgttccgcgttttcaatacatcaaagtgaagaatcagttcaacattgaagatgtgcccgccaaccctgaaggactattggccggaatttttcaatactgcattgaccaatccatgcaggacagcagagagcgcgaaattgagcctacacatcttggttgtctgattagtagtccgttgttgacgagcggcgacattccaatacccattcgccaaatcaccgacaacaccgtgaacaccattctcaatcaattcaacaaagttgcacagagtaagcaacagcaaaatgttacgctttggggtgaaccgttcaaagtgatcatcacagtggttgaccgctccagccttccgatcaaaagaaacctcaaaggtggtgcacgtcggaacttggcacctgtccatcatcgtatccacgatcaatgtttgattaaggtgtgtgctccaatcaataagaaaaatcataatctatcggttaaagattcgaaatcccgatgaaaggaactattgccttttttacgctttgcaagcgacaatggtttacaaaacaaaagggtgggcccgttggaagttttacgactacctgcacagtaggcgtggacagcacggctgtatgcagtatgaaacaaccgaattaatgcggcagattggcgccccgcttggccgtgatgcatattcggcggatacttttgtaccgcgagtggttgaccactggaacaacacacagcagcaacaccattttgctgtgtttatttttggctcaacaggacagtacaaacctctgttcaaatacatcagcgctaacaacaattatgacactccaattttgctttatttcaacaacgggcactttgatggcgttcaaaaacaaggaggattgtttgggaagccctattgtttgcaatgtgaacgtccctatagcaaaccgtccgagcatctaaaatcgtgcaaagcacgctgcgcattttgctctcgcatcggaccatcatttccttgttcaccttcagctggctttttcaatgaatgtgcgggatgtaacaaaaaattccggaacaacgagtgctaccagcatcatttggcctccaattattgtgccaattcaaaacaatgcaaagactgtggtgtgatgtggaatgttcgggacagtaaccgcaacggacgtaaagtatacataatagaattcggtaaaatctaattatttcttattgattatagggacacaaatgctacgaaagttactgtcagctctgcatgtcctatcataacccggaccggggctgcttcatccagccgctgcagccaaaggagcatgacccctaccgtattgtggcgttcgacttggagaccatgcagcatcagccggtgagcgcacagcagcctgagagaagagaacaccagccaaacttcattgctgcgcgaattgcatgtcctgattgtattgataacggaaattggaagcgagcaacagccgggtgcagaatttgtgggccgtatcgcacagttaccttttgtcaacgtcgttttgttgacaccgctgtggacaagcaagtgattgatgagaacccactggcagcgtttgtcgactggctcgtctttcaactgcccaagaagcatgacacctttgcctattcccattttggcggtcgtttcgacatggtgttagtgttccgcgaaatcttccggattgggttcaaccctgagatgctgagacgggtaatcgtatcagtgacaattattaacataattgatgacgaatattcaggggaataaaatgtatgagatgaaaatccgcaaacaaaagaaaaggaacccaaacattactttccgggacagcttcaatttgatgccgtgctcactcgcggcgctcgtcccctcttatggtctcgatgtggaagagaagccatttttcccgcatttggcaaaccgcccggacaattacgggaggcagatctaccccacaccagacgattacttggccgaagggatgatgccggagaaaagacgacagtttgatgcatggtatgaacagcatcaggcagaaccattcttgttggacgaggctttggccaggtattaaataatttaactttcaaaatacaaatttttgttttgtttatacagttattgtacaaatgatgtggagatattgatggcagcactcgtcgccttccgtaaggaattttttgaaatttcgcggcgtaacgaatatgttgatggaatcgatgagcgcgaaaatcacgacggcatagacgtgttgcgggagtgcatgaccattgccggggcatgcatgcgacccttccgcaccaatcacctgcccacagaacatcttgctattgtgccggaacgtgggtacgacaacactcaaaatcagagccttcttgcacttcgcttctttcattggtacgccgaggagcacggggtccaagttcaaactgcacattcgcctggaggagagaaacgaattggaccttactcattggacgggtggattgaaacggaacggcgtgcaattgaagtcaatggtaataccatacatttatgtgtaaaagttccaattatttatttaaggttgcacatggcatggctgtaagaaatgctacccacgcgacaatatgcttctgcctaacggaaagacagccggcgaagtgagggaacgagatgccaaacggctagactatctgagaagccaattagggcgtgttgatgtgtactgggagtgcgaaattgagagaatgttggagaggagcagagagatgagacagagttttgctgaatatgttgatgacgggccattggttattcgtgacgcgtttatgggcggaaggacgggaccattgaaattgttgcacaaagcgcgcgagggtgaaaagatatcctattttgacttcacgtcactctaccctcatataaagttatatttattttgtataacaaaatgagtttattattattttagctttgtcacgagctacccaattgggcagccaaatgtgcacgtattcaacgagcaggtcgactggcacagttctaacgacaacccttacccactggctctgctgaaagtctgggttattccgcctcgacaaattgatgttccggttttgcctgtgaaagttgacaatcgcctatgctttccattgtgcatcaagtgcgccaaagaatggccaacaggaggtgttgactttgactaccactgcgaccacagtgaccaacaacgaggctgggtcagcacgtgcacatcaattgagttgaacgccgcgttggatgagggatatcgcgtcaccaaactgttccgcgtgttggagtatgagcgcagcgatgatcaactgttcagaccgtacattgctgaatttatggcacaaaaaattcaagcgagcggcttcgacaaaaacatcaaagggcagtccgacaaagaggagcaatttgttcgggaatgcgcagaaatgtttggcatatgcattgaccctaccaaaatgatcgtgaacaaaggcaaacgctcccttgcaaaattgtgtctgaataatttatgtatggttcaccttttttccgtttattctgaatcaaatttatttcagggggtagattttctctacggaactttggtctctcccaaaccctcatcaccgacgaccctgccactttggccgaatatttagacaacaaatcaatcgatgtgacatcaatcgatgaactggatactgaacacattctcatcagctacctgcacaagaaggactgggtggaagagcacgagtgctccaatattggtgagataactttataaataattaaaacttttatgatttagttatatcgctttggactacttctgccgcgcgtcttgttctgctcaaggccatgcagaaggttgtcaggtcaccgggatgtgcactattgtatacaggtaaagatggggacttccaattttgtgtgaaattctttgtttgtccacagacactgacagccttatcctggttcaccccgatgaacagtgtccgctcaaaactggtccccatcttggacagttcactgacgagtatccggagcacaacatcattgaattttgtagtggaggagccaaacaagtaaacatttttgattgacaaaaattaaattaattattaccataatatagtatggactatgcctacaacgcaaggaagcgggagcagatactgtaaaggaatatgtgctgaaggtgcggggaatgacgctcaactacgatgtcatcaacaaccaagggctcagatatgacacattcaaggaggaggtagtacgctacgcaaccaccggagactttgaaccgatcactgtcacctacccaaacttccttcgaccaaacattagggaaggaggacgggttatttccatgccaatgcaaaaatgttaccgtccatttgtaggcaaaggaattgtaggagctgaatttaaagtgatgaattttggacatactttgtaa

SEQ ID NO: 56756 - DNA, 66 bp, Heterodera glycines; identical to SEQ ID NO: 53774

SEQ ID NO: 56757 - DNA, 2054 bp, Heterodera glycines
atgcgcggcttcgaattggacggcggtgcttttttcatgtgcacggaaatttcgccacgatgctacacaattcaacaggtgaaaattgcagcaacgaaaaatggtttaatgagcggaaccgaaggattaaagaaacgcgtaattattaattggttgggacgcatcagaaaaaatgaacacgaggaaaagagaaaataatttaaaaataaatagaagatttttaaaattttgaaaaattgaaacaaaagacagactcatacgatgtatgggaatcggccactttggcgcaggccattttggcgcaagactctatatcattttgatttcacagcaaaattaaataatattggtatgattttaagtggcttgatagtgcctattaacctgcaaagtttcaaaaaatttagctgagaaacaaaaaagttatggccaaaaaacctcaaaaattgcattttcctggccattttggcgcagcgcgccatatcttttttaaaacctaatataattttttgaaattttgcaggctaataaagaacatttagacctattgattaatattagggcccggatttttatgtttttacatattttttttgcggcttagttatggcgagagaagcccaaaaatagcattatctccgaacaatttttgatttagagcgacttataaaaacataaaaacacatattttggcgttttgtcacataaaatatgttagcacatattttggagtttggcacatattttgcacatattttggcatttttgagaaaaattgcaataaaaatacaagaaaattgaaaaatacaccccctaaaaatcgacttttttcctaattattaacataattttcaaattaaaaaattttttcttcgattgtagaaactaatgaaatctcgaattcattaattcgtcattggatttcgaagttctctgctggaactttcaatttatagaaatgatttatcaaaaaaagacaattttaccccaaacacttcgaaatgtatttgatttgcgttgtatgggctaaaaatgataaagaatgagatttttgggaatttttatgcaaaaacacacttattttttcaatttttaacacatattttagcacatattttggcatttttgggggtttttagcacatatttcagcattttttagcacatattttattacatatttcaggatttttagcacataaaaatccgggccctaattaatatcaacattattttatttggtcgaattaaaaaaagttatgaatctttaaacttgtctgcgccaaaatgaccccgaccctacgatgtattgtaggtacatacatggacagggaaggacaagattggcttttgtgaaatacccccccccccccccccctctcatcagagcattttgcgaattggggaacttttgttgtctttgcaaattttaaaaattattttttaattttattttttttgaatgctgtctatgcctttaatgtgccaattcgcacttttaaaagtataattaaatccaatgagatgaaccaattagacaacacttgcataaatttacagcagtgaatgccttgccatttgttcccttttcagctcagtgacgtcgacgacgccctgaagggatttgccatgagaaggccctctcaaacggtcaatgcttcttcgaatgccatttaatggtttttgtttcagtcggcttccgcttctccgcccgcttttccttccgcgctgcgtccctttcccttcgccggtctttccacctgcgcttccaactcgcctttgccaatgcttccctggtggtttaccgctgaatgtcgccaagaacttatgggcgtgccgccgccaccgcccgatgaacgcgtgccgacgcccgacacgcgtccgccgtcgagcgtcggcgagcagccgatgagcccggaacaattgcgacaacgcatccgacgacagttggaatattacttcagcaggtccgcttcggagattgcgaaatcagtggtcgttttgaagggaaaacctggtcaacgaccgttatctgagatgccaaatggacgctga

SEQ ID NO: 56758 - DNA, 306 bp, Heterodera glycines
agttgactcacgaaagagccgatgagacgcagagttcatccgctggcaatggcactgagttcgggcggagtgtgccgtcctcctccgatttggtccttttggtgcgcgccccctccccttctcttcggcaacttccgtttctttcaccggtcaaaaactggggaggttttctttctccaaaacaaactgttgaaactgtgagtgcgataagtgaattctctgccgatttattcaaaacgccgtcgcccgcgcggttgggaaaacggccgattatttgtgcaaatgtgggccaactgctgaccccag

SEQ ID NO: 56759 - DNA, 897 bp, Heterodera glycines
  unsure (1)..(897): unsure at all n locations
atgaagggatattgctcgacagagatggaaatgtttttttttcgggagaatccaccaaatagaactttaggcgtgatgaaccaaaacgtggtggtggcggatcccaatttggagaattcggagcagctggactcgatggaaatgagacggcgccttttgaacccgaacaatgacagcgcacttggacagttgcgacaaaatgaacgtgccagccttgacgaaaacgaagaagaggaggcaaaccaaggttttatgcgaaaccgaacggattggacacaaaatttgggagagagggcaggcccaacccaacaaatttttcgaaattttgtctttggacattcccaaaatgaagatgacttcttcgatcatccaaacattagaagaacttcgactccggtcaatgaaaaccgctgtgttggggttggcccgcaaaaccttaatgaaatagggttgttagccgaacaaattgggagggtcatcgttggtcagctaaatagtgctcatcaaaatccgaacacaaacccggcactaaatttgacgcaacatggtgttgaaatccaccagcaaatacaccattcggctgtttttgcgcgtcgagccaataacataccggttcgaatgccgggtcagcaaaatccagcagcgattcaacaaaattttggtcgccctcaatctcaacaaattcaaccaccaaatttccaaccccgtcagccatatgcttggccaatgaacgaacagtgcgttcaagtgcaacaacccacaatgccgcagatgaactatcagccgcccccgacccttacacacatcaaaatcagcctaattttggcatgggaaaatttgattttgggattgtattgnagcggatccctgacctctcaggcaccgaaggatcggatg

SEQ ID NO: 56760 - DNA, 487 bp, Heterodera glycines
atgactttgaaaatagttagttctcttgagaatttgatcagattgactccggatgtccattcgattcttgtcctcgatggggacggagttccggttgtcagtgcaggcgaagaggtgcacagttcaactttggtataatgatttatttcggtgttaatttagatacgaaatcggtcccagtattcaatttcttacaattcgcttgtcgagcaggccaaaaagttgggcatgggagaacagaaattttgggtgtttcgctacgaaatgaaccaggtgagtgtcaatatttcaaatgttttaaatattttcgatgcaggtggttatgctcaggagggatgcatttgccgtattcattatggcttctgcaaatgccaatatgggaattctctgcactatgtcagcgcaacttggaccaattttggaggaatgtaaagtcatcgtaaacgaagtcataaatggacagatggccgggcaaagtccgagataa

SEQ ID NO: 56761 - DNA, 140 bp, Heterodera glycines
aaaaattttaaacttgatgctttattcaaagttttggctctaccagacgaagaattcgaagaatggctcagagaacttaagcttctacacaccactcgtttttgtgactgtggcaacgaaatgcgctacaaatggattaa

SEQ ID NO: 56762 - DNA, 504 bp, Heterodera glycines
cagccaagctgtcctcctggtcctcctggcccgcctgggccccccggaacacccggcgagcccggcggcgccgggcagccgggaagcccaggacagcccggacaacaagcaccgccatgccctccgcccgtgtcgacgtgtcagaaatgcccagctgggccgtccggtcagccaggaagccaaggaccgcctgggccacccggaaacgatggacagcccgggcagcctggaacagggcggcggacaaggcccgcctggcccaccgggtcctcagggacagcctggccaacccggacaaccaggaggacctggccagcccggtcaacccggacaaccaggaatcaaaaggcgagagaatcgaactcagccaataaaaattattgaaatgttttttgtcagcacgacaattcccggcccacctggacctcccggaaacccaggagcaccgggccagcccggcagccccggacagcccgaaaacccccggaggacaaggaccgcccg

SEQ ID NO: 56763 - DNA, 1097 bp, Heterodera glycines
tgccactttgacgcgtgttgcacaagcgcagcgccagcaacatttgagcggaaatcccaccggctcattgacggcctccgatcgcctgatgaaggagctgaaggaaatttaccgatgccaaaactacaaaaacggtcactgtttttgcatttgtactttatataatgtaaatttgccattttaaggcgttttcaccgtcgaactccaaaacgacaacctatacgagtgggacgtgaagctcaaaaaggtcgggaacactttaaaacttggatcaaacgaataagggaaaataatccaacgattatgataatgtccagagatggttccgtgtccatctcactcaatttgtttaggtggacaacgacagtctgcttgctgctgacatgcgacagttggccaaaccgccgcacaaccaagaccacctgctcttccacttcacttttgccaattcattcccgtgcgtttttggctcgtgaattatttttgaacggattcctttcaataatgcgtttttacgtttcaatttaagctttgagcctccatttgtccgtcttgtttcgccggtagttgcaaacggtgcgttaataggagcttcttgctgtcttttgtttttgagttctcctgagatattgaaatgctattttctaaagatttatttcccataattagcgatcctccatgacaagggggagaagtaaactgcacacggaatgcaatgtcgattcgattattttgtttcactgatttatttttccttttaggatttgtgcttagcggtggcgcactttgcatggaactgctgaccaaacagggctggaccagcgcgtacagcgtagagtcgctgatcactcaactcggcgcgacactcgtcaaaggcaatgcacgcatttcgtttgagcgcaacgcgcacatcaactacagcttggccagggcgcagcagtcgtttcggtcgctcgtgcaaatccacaacaaatcgggttggttgcctagtctgtctttgagtgtatcatttgcaacgggtcttatcttacgctattcccatcatttgcccccttccgattcgttaaggttggtatacgcctccaaagaacgaaggc

SEQ ID NO: 56764 - DNA, 1363 bp, Heterodera glycines
  unsure (1)..(1363): unsure at all n locations
atggtccgaacggaagacagatcagtcggtcgtccgtccgatcagtcgtccgttcgatccgccgccccttcgaacagtctcgaacgaaagacagatcagtcggtcatccgtccgatcggtcggtctgattcccaacgctcttagctcttttagttcccagtttggtttctgatcgcggtgaccatcatctggatcctgctctgcgcttatttgtttcttctctgagaggatacgtgagattacggttcggcttccgtttcctttgcgattttgcccttttcccaggtctttccctctatttcgtgctagtctccttcctcaccattggattcggttcgtcccttcccttccctccctttgtctaatccctttccccccagggatgtgatcccctccaagcccgatacatcattctcgtcggattatgattctgatcggattgcccctcgtttccactgttctaaccacctaaaaaagcaaatttccgcgtttggaaaaaaaagaaaaacaaaaacgaaaaaggattaccaaaaacattttaaaagggggggggggggggggggggggggaaaaaaaaaaaaaaaaaaaaaaaaaaaaataaaaaaataaatatttttttttttttttttttttttttaaaaaaaaaaaaaaaaaaaaaaaaaaaaaatattttttttttttttttgtggagaacaaaacaataataaaaaaaaaaaaaaaaaaaaaaaaaataattttttttttggggaggatttccccaaaaaaaaaaaaatttttttttagaaaaaaaattttttttttttttttttttttttttttttttagaaaaaaattttttttttccaaaaaaaaaatttttttaaaaaaaaattttttttccccccaataaaatttttttaaaaaaggggaaaattaaaaatttgttaaaaaagaaaaatggttttttaaaaaaaattttttaaaaaaaatttttttttttttttggggggttttttttaaaaagggtttttcccccgggaacccatttttttgtcccgggcccagtttaaagctttttgggcaaaaaggtgttccccaattgggggggttttttcaaattttttttttaaacaaaattttggaaaaaaaaaaattcaagggacattgtttgggtcggtaaaatttccagggcctcgggtttttttttttaaaatttttttgtttttcagggggccatgtttggattttggcaaaagtgcattngattttcactaaggcctttgccattgtggaccaattcattcgcgctcaaatggcattgccacgcggcgctggcgtgtcctttgttcgccttgaccgggacgactttcacccgctgtaccag

SEQ ID NO: 56765 - DNA, 574 bp, Heterodera glycines
atgaaaatgttactaacatttttattattatgcgcattaattttcgaaaattcaattgatcaaattgaagctggcaaaataagccaagaaaaaagttttgctgaaatatttggccaaagatgggacgacggagcagaagaagaaaacatctgtcaaaatgatcaaataattcatggagaaacagttgatcagaaccaatatgatcaacaatttgatcatttggaagtgaaagaagaggagagtgaagaaatgtccacagattgtgatgaattgggccaattgccaatgccaacaaataatggacaaagttgtgataaattttcaaatgaaactaataaaaataaaagagaaactgtggaaaaatttcataaaattaaggagaaagttaagcaaatgggaaagaaatattcaacaaaagaatgggtgaaaattgaaagaaaaattgcaaaaaaattgggcgtcagtcaagagaaaatttacaaatggaaaaaacaattgggattgaatatcataaacagattaaggatgaacaaaaacgtaaaatattaaaacaattctcgggaggaatgcaaaa

SEQ ID NO: 56766 - DNA, 139 bp, Heterodera glycines
atggcagcacaatcgtcttttcctcaaagaacattgaatcaaatggagggccgatcaatttcgtcgtcagatgatgaggatgaggatctgatgaaaatgtgtggaattggagatgaacatggtcatggacgagagtttt

SEQ ID NO: 56767 - DNA, 816 bp, Heterodera glycines
cggtgtatgaatccagaagaaatatttacgaaattggagcccatcggacgaggttcattcggcgaggtgtacaagggcatcaacaaccaaactgccgaagttggatatttttttgtttcttagaatttaatgttttcctccattttggaacacataattggagagtgaaccgaatgtgttcaaaatttaatttgttcattacgtaaaattatttaggttgttgccataaaagtgttggacctggaagaagcggaagacgagctagaggacattcagcaggagataaaagtgctctcccaatgtgacagtcctttcgtgactcgctatcacggctcctatttgacggttggtccgtcacacttaaaaaattaattaagacgcagtagttcaggggtcaaagctttggattatcatggaatatttgggcggtggctctgcgttggatttgacgaaaagtggtcgcctggaggagaagcatatcgcggtgataatacgcgaaatcctgcgggggttggattatttacactcagagcgcaaaattcatcgcgatattaagggtaacatttcccccatttgccttacaattaaattttgttttcaaaataattttaatgaaaagcaaatttgtgttattgaatttgttaagctgcaaatgttcttttgtccaccaacggagacgtgaaggtagctggtaggtccccgaaacaacgaaattccttccattgaatccaattattcagactttggcgttgccggccaactcactgagacagtgcgcaaacgaatgacttttgttggcactccgttttggatggc

SEQ ID NO: 56768 - DNA, 1215 bp, Heterodera glycines
agagtttgtggaactctgcttgaacatggatccagagaatgtttgtatttacaaattttaattgtttttaattgagtcaaaatttgcaacaaaaaaatgttaagcgcccttcggcacgcgaattacttcggcacaaattcattctgacggcaaagaaaaatgaactccttcgcgacgttattgagcggagtaccgaatttcggattcggcaacagcaacaacagaatttgagcgctgattcggacgtggactccgacgttggaaatgtgctattctgttttcaaatttaaaacaaattcagggcaatgatggcactacttgttgggaatacccaactctaaaaaacacagacattttggaccatcgacaattgtcggacatcgaacgggcagtgctcgatgcagcagacaatgttgcgacaattaaggtaatcagcattaattatgggttttggacttttattttggttgccataggtttcttcttcttccgctcatcagttgcacaacaacgcatcaataattaacattgacactgtccgtttcacttcgcactcaaaagagaatgacaccgaaaatagcaatggaagtgatttcactgtgaataatgggggcacatttgtgaggcgaaaggacccagtagaacggaaagtccaaccgaatgtgaacccgtcttcaaaccgtaattttcgtgttttaatgcttctttactttacgtttttcgtcagcttcgtcctcttttacttcccatgaccattacccaccggtcgttagtgacggtgatgaaactgccgacgatggcaccggaactattcgaatcatttctccctcaaaagcggtccctccaataccacctcatcattttcatcgacaacaacaacaacaacttcagcacaaccaggtcaacaatgtgccatctacttttgttgccgatgtttcggttggcattgctccgccaccgcctccaatccgtggcgttcgctgtagctcactagagaacacactgcttcctgcactggatgagttgactcgaactcggcacggtgccgcccatttggacacaattgctgtcgcactgaaacgcgctgaacaggcaagccccgggctgtgcgatcacttagtcaccgaattgatcaccaccatggcacatccccaatgcacgaacgcggagctgcgcaaggctatcgaccgattgaccacgcgaagaaacgactga

SEQ ID NO: 56769 - DNA, 1217 bp, Heterodera glycines
ctggacgacattgaccgtctgaatgttgtacacatcaccggtacaaaaggaaaaggtgttttttttgtttaaaaaatcaattaaaatccaaatttattttctttttacaggttcaaccgccgcttttctggaatccattttgcgttcccttggctacaaaactggcttttacaggtgtgggtgggtggcaggcacccaattacaaaatctaagacatgaaaattttttattttaaggaaattttggtcaattttaaatttaattttttacagttctccccatttggtccatgtccgtgaacgcattcgcatcaatggacgaccaatttcaaagcaaattttcacccagcaattttttcacatttacaacacactttttgagcacaaaaaagaggtggcaaattaataatggtgctgctgttaaaaaaaggatttggtacttttgggccccatctttatttaaattaagcaacgttaacaaaaagcgcgctgaatagtcaaaaacagcgcttcatctatttgggagtcataaaaacaacaatttgggccaaaatataatcaaatggatccgcatggcgcgcgctctttgtttgacgttttttaatttaaataaatgtggggcccccaagcggaaaagtaccaatgatttttgcaaaattagcggagttttccatttttatgtgcatttaaaaataaacaaaatttgaccatttttttatgccgctggaaactgagaaattctcgaggctccaagatcgaccagtttttgttccggaatttaaacttatttctcgagactgcggactttcaggtcgagaataaatctcgaaattcattttggtgttggcctttggggacagtccctcaagaaaaaaataataattcaaccccaatactcaaaaaatgaattttttttttggaaaaaatagcaatttttgtcccaaaaatttttaagaaactaaaaaattttttttaattttttgaaggtcaaactaatgccagcctatttcaaatttttgacactgctcgcctttcgcattttttgcgacgagcgcgtggacgttgcaattgtggaggtgggaattggcggtatgacaaaaatatttaaatttaaaaaattattaatatttatttggtttcaggtgagtacgactgcaccaacgtaattcgacgtccaattgtgtgtgccatcaacactttggacttggaccacacaaa

SEQ ID NO: 56770 - DNA, 738 bp, Heterodera glycines
atgccgaagaacgacctgggctttaacgaccagacaattcgttcgcgttttgtgcgcaaggtgttcttcatcgtgggcattatggtaagtgaataattgggcgactacgatagtcattgttttttttaatttaaaaccaaattgatgaacaatgatagaatttataattttttaaaatgatgcttttcaaaattttgtccgacttttagaattcagaataccgggagaagcgaggcgagcaacatctctagtccactaacttgcccgcccctacccgcctaaaataataatttttctaatttatcgcctaaaaaaaaactagttttggtacagaaaaggtctaatatttttttattgtttgttttttctgggattggttgttcagttcctttccaattccctccccattttttcagttgtccgttgtcactctgatgagcgcttttccgtttatgtgtcagccaatgatggagtttgttcaacagcatccagtatatgcgattgtggcatagtgagttttgaaaattcattcatttctcccaaatgttcgttttccaccgccacacttttcttgccaaaacaacgcgcttctttctttttcagtctcatctttatcgtcgtttatatcgtgttgatgtgctgcggccatggaatccgtcgatcgttccccattaacatcattttgcttgccattttggtacgtcgtcattttaatcgttggctttcagcataaataaa

SEQ ID NO: 56771 - DNA, 669 bp, Heterodera glycines
ccaattgaagggctggacgaagccaaattcattcaattttatcggcgccgcgacgaaatttcaatcgtcaaggactgcctgatgttcggcgaccggacagtcatccccaaatcactgcagaagcaaattctcaagatgcttcatcaaggacatccgggagtcaagcgaatgaaatctttggcccgaatgcatgtctactggccaatgatggacgcagaaatcgaaacgttcgtccaaaaatgcacgtcatgcgcagctgtcgccaaaaatccaatcaagacgacactgcagtcatggccaaaatctgatggcccatggaagcgcattcacatcgattacgccggaccattccatggaaaaatgtatttaatcgtcgtcgattcattttcaaaatatccggagatttttgaaatgaattcgacaaatgcattggccacaatttccaaaatgcgctcactgatcgcgcacttcggcatcccggaaacaattgtttctgacaacggcactcaattccaaagccaccaattccaaaatttcgttaaatcgaacggaattgaacacatttttacagcgccgtacatgccacaatcaaatggtcaagccgatgccaaacaattctcgcggccgatttcatgccaaccaaatccgcgcacgtcaaattccggatga

SEQ ID NO: 56772 - DNA, 396 bp, Heterodera glycines
atgatacatttgattgtacataataaaagaaacccaggacaaattgacgaaagtgatcattttgctgggaagatacaatcaaaggacataataaaagaagaccaggacaaagtgacgaaagtgatcattttgctgggaagatacaattcaaaggacataataaaagaagaccaggacaaagtgacgaaagtgatcattttgctgggaagatacaattcaaaggatataataaaagaagaccaggacaaagtgacgaaagtgatcattttgctgggaagatacaattccaaggacataataaaagaaaaccaggacaaagtgacgaaagtgatcattttgctgggaagatacaattcaaaggacataataaaagaagaccaggacaaagtgacgaaa

SEQ ID NO: 56773 - DNA, 829 bp, Heterodera glycines
atgtgtttgactggcgacccgatcaacgcgagcaaagcactcgaaagcggacttgtcgcggaggtgagcaaaaattctacaactagagagattaaattaattaatttttgcatctgcaggtgtttccgcctgatcagttggtgtcggaggcgatcaaattgaggcgaaaaaattgcagcaaattcaccactgatggtcggaatggcgaaacaggcggtgaaccgttcatacgaaacgacgctccaagaaggtgaggaggaggggcacagagactcatacctgtgcctgtgcaagggggggggggggtcagccaagaggtcttacgatcgactttggccctcccatgggagggtcagagcccatttccattacgatcgaccatttcttgcctgctgaagacctctttttttttgttgctcttcgggtcaaaaaaatttcatcggattgcatttccctttaagtatccaccccttaaataatcagtcctttcgctcgtgtatatgaaatttgctctttttaggccttttgttcgagcgacgacttttccacgcttcttttgcaacggcaaatattaattcatttttcaacattttttaaagccattttcagaatgaccgcaaagaaggcatggaggcatttcaggagaagcgcaaacccaactggcaaaactcatagggacagggaaaggaaagatacaaaatgagaagcggcggtcgctgttggcaaaaggactctctctgtgtgcctttcctcatagaatgtgccgtacaataattgttctttccttaaaaatcctttcaaattgtaatttctaatttatttatatcaa

SEQ ID NO: 56774 - DNA, 903 bp, Heterodera glycines
atgggtttacggacttcggattataaagcctataagtccgtactccattctttcgcagcccgtaactcttaccctttaccgtacaattttcgaatagattacggttttttaaattatttattggttgaaaaagtaaacgatttgatttattgcattttgccaaaaagtaagcaatcaattaatttaaaatgaaaccgttgttttaaatgtccccttttttttcattttcaagcgcaaatacttttccattagcgccgagtatttaaatccattttttgaatctattaattaatggggatcttgccttatgcattgatttagttttgtgtcgttccctcccccctcactgaggctgtaatttaaattactaactttagacaaactcaatcacaaacaaaattctcggcggcaataaaaaggctgacaacacttatcaccaccaacagcaaaacaaatcgtcgtcagcagcaccgtttggcggcggtctcttgggcaaaatctcttcgacaatcgcttccgctgtcaattcgacgaatcaacaggcgaatgggggaacaaattaaaaaaagaaaagaataataaatgcccaattagtaagagaaaaaagggttattaaataattttaattgataaaatgtgtcagtttcagcattatccttcaactcagccccaacaaatgtcttccggcggttacaacaatcaatcgaattatccgggaggcgcccatccgcaacagtacggcaccggaaacactggcaacgctggtggatttatgtttagggtaaaatcaataattaaatatttgatctttcatatcttttttataaatattgtataatttatggatcaattaaatgtttatttttaatagtcgaattattattgtttttggttgtcaaatga

SEQ ID NO: 56775 - DNA, 76 bp, Heterodera glycines
gggacccacgcgtttcggcgctcgcgtttcggcgctcgcgtttcggcgctcccgtttcggcgccagctcgtttttc

SEQ ID NO: 56776 - DNA, 426 bp, Heterodera glycines
atggaggagaaaaaggagcagcaactgaagaagaggaaaaagaaaattgcagctgaacaccagcagaaacaacaacatcagcagaagcaagaacattggaaggaggagagacggaagagaaagagagtaaaatggaggagaaaaaggagcagcaactgaagaagaggaaaaagaaaattgcagctgaacaccagcagaaacaacaacatcagcagaagcaagaacattggaaggaggagagacggaagagaaagagaggaaaatggaggagaaaaaggagcagcaacggaacaagtattgctaatggatgtcggaaatcccccgccaaaatcccgaaaaataattgtcacatttttgaaaggaaaattcattcattcgatagatagcaaaccattttatatatccgatttatttatatatatttga

SEQ ID NO: 56777 - DNA, 1000 bp, Heterodera glycines
aaaagaggcaccgatttatatttgtggatttcatcatcacactctacgaatggccagccgatttgggatgtttttgttcgtgaaatttggcccattttttcgacaaacattcgctgtttgggctttaccggtggtgatcatttggaccatttgcgtcgtcgcacttcgccaacaattctcaccgatctcaaccaattgaattcaatctgttcctgtgatttgtcgcccgctgcgtttggtgatgattttgatgggccaaattcaataatttctgctggccaagcattgtccaaatggttgcactctccgagaaaagatggacaacccaagcgattgcgttgcgaagactttaaaggacaaacggacttcgattgggccaacaatttcaaggaggtgtggccataatctcgacaaatgattgatttttgtttttccaatcaaattgtttagcattttcttcgtgccaatgccatttcttccgtcagttaccaaattcgtttttatgttcatgtgccgtcaatgccaatggtgccattcgaattggtgaacgaatggacaaaggaaaagctgacattggccaaagcaaagaaaaatgaatggggcatcggttggataatgaaacgatgcaaaattggagaggccgtattcgttcagcagcagaagaaagatgaaaagtggatcaacaattgtaacaatgtgttattttggcttgatagtgacactaattgcattgggtgagctaaaaaaaggcatttaattttgttaagtaaattaaaatttcgcttaatttaggccattgtctccgccaccgaaagaagaagacgaagcaggacaaagcagcgaaaaaggggcgtcgtctgctgacaatgagtgacggacaaaagaacaaatacagtgatcagccgcagaagaaatgaattaattaagaatgatcgatcgatcgatcataattcatccgtgatcaaatgcattttatgaagaaaaacctctcaattgctaa

SEQ ID NO: 56778 - DNA, 435 bp, Heterodera glycines
atggcccttaagaaatgggccgcaaatgtccgaggcgcaaatgtcgggccgcaaaagacggaccgcaattgtcgtttttggctggtggccgcaaatgtcgtgacacgaaatcaacaacagcaaaaaggaaacagcgaagggggaggagaaggaagagaaaatgggggaaaagagagaaaaagggaggagaaaaaggagcagaaactgaagaagaggaaaaagaaaattgcagctgaacaccatcagaaacaacaacatcagcagaagcaagaacattggaaggaggagagacggaagagaaagagagaaaaagggaggagaaaaaggagcagcaacggaacaagtaatgctaatggatgtcggaaatcccccgccaaaatcccgaaaaataattgtcacatttttgaaaggaaaattcattcattcgatagatag

SEQ ID NO: 56779 - DNA, 193 bp, Heterodera glycines
ttggatgagcttcggatttgcagtcaaacagcagaacaaattggatggaacaattcgaagccgaaagggcacttatgcaattgacagtgatggaaagatttggattaatgggaaagaaacaggaataaatgtcgaatattcctacggtgcaggcgataccgtaggaattggcgtcaattctataattgcctaa

SEQ ID NO: 56780 - DNA, 922 bp, Heterodera glycines
atgaaaagctctcacaattacaaaatgatcagaagaaaattttggaaaaaatcagtgttttggagaaacagcaaaaagagcagtcaaaaggtgagggaaagaaaattaaaacgaaaataaaatttatcaatttaaatgcttatttacatttattaaaaattaattcgattttaagcaacttcaaaaattcaaaatgatcagaagaaaattgtggaaacaatcagtgcattagagcaagaaccaaagcagaggaaggtaaattaaggggtaaaaaaatatatttaaataataaaacaattttattttaaaatggattattttaaggcattttcaaatttccgacaaaattattgggatgccaattttcgtcatgagaacctccaaatcattggcaacaaaagtctcattgtccattataagagaaatttttctggtatttttataaataatttactttactaatttctcctcaaaaggttactgttcttctgcctttgcaaaacatccgattttgctggacaaaaattcgtctgacaatttttactacgaaatttcaattggaaatttgaaatggtaagagagagatttttttattttttgaatataaaatttttcagaaatattcaaattttaattattatttctttattattattattaatttttcagttggatgagcttcggatttgcagtcaaacagcagaacaaattggatggaacaattcgaagccgaaagggcacttatgcaattgacagtgatggaaagatttggattaatgggaaagaaacaggaataaatgtcgaatattcctacggtgcaggcgataccgtaggaattggcgtcaattctgttattcggcagatcactttcaccaaaaatggaaaacaattgggttggcaaataaaaatattaaatttttaa

SEQ ID NO: 56781 - DNA, 471 bp, Heterodera glycines
atgcatttgaaattgtgcctattattcttttcaatattatttttgatcatccgaactgatcagatcggatctgaaaataaaaaattggaacaaaaatcatttgatgaaatatttggagaaaaatgggaagaaaaaagaaacgaagaacagaaaagaagagaaataattggaaaattcaataagataaaagagaaaattaagcaaaaaggaagaaaatattcagcaaaagaatggagtaaaattaatggaaaaatagcaaaaaaattgggcacaaatcgcaattatatttatgaatggatcaaagaattgggattaaatcaaaagaatttttacaaatcaaaaactgacgaagaaaaactcaaaattgtagaaaaattcattgaaatgtcaaatgaatttaaggaaaaaggaagaacatattcgataaaagaatggaacaaaaattatgccgaaatttgtaagaaaatcggg

SEQ ID NO: 56782 - DNA, 275 bp, Heterodera glycines
atgtcctcctccaatttgatggtggccgcttcgccctacacgcgttccgcttcctccgttatccattcgcatggcgcacggttcggctcggatcagccgcaaacccaacaactgcagcaacactgcatttaccacgctgacggcagcatgtacaacaactccaccttggttgagccgggcggtgtgcacggcctgcatccgttgtccacggcgacttcctcctcaacactggtggtgaacattaacaacaataatggcactgggaatgctgccgt

SEQ ID NO: 56783 - DNA, 915 bp, Heterodera glycines
atgtcaccggcagttcgcctggacttagcttctgaaatctcgacgatgcaaagattgagacaccaaaatctcgtacaactcttcggtgtcattttttccgagcatattatgatggtcatcgaactttgcgaagatggctcacttctggacagacttcggagtcaaaccaagccgcgacttttggtcacgactctgctgaattacgcccagcaaatcgccagcggaatgagttttttggagtcccgcaaatgccttcaccgggacttggccgctcgcaatgtgctcctaacccacgaagaacaagttgctcttctgtcgattcgaactacactcaaatacacccccccccctctctttaggttgtcaaaataggcgactttggactgacaagaattctcaaggacaacgaacgcctttacattatgagcgagccgaaaaaaattcctttttcttggtaagtgaacaaatttaagtggattgtttggaatagtacagcaaatgatccaccccaaaacaccctcaccataaacgctgtctaaaggcactgcccgaatttttggatttattagtagattttgcactaataaaatctttaggtctcccccagaaagtctgagatttcgtgaattttcgcataagtcgggtgggtttctttgtttgcttcttatttgttattttttctctttgctttcagatgtttgggcatttggcgtcactctttgggacttttcacttttggcgaagagccgtgggccgggcatcgtgcagctgaggttcgattacacaaaaactcattcgacattaccataattctcgtttcacatcttttccttttttaggttctccaatttctcgaaagtgaccttcggttgcgcatgcccgacttttgttcgcgagaaatttacgatattatga

SEQ ID NO: 56784 - DNA, 668 bp, Heterodera glycines
atggcgattgtgccgtctctgctgatgctcgaccagaaacagtacggccttcccctccccggtcagcaaaacgagcgtaagaattcattcaaactgaaaaggggacggacccctcttctcctcactttcagtcgcaaaccctttgcaaatgccgaatgaattaactgaccaccaacgaaaagattgtggtcagaaattggctgcagaagcaactttggcaattggcagcagagggaattcggcaaatgaactcaattcacatcgccattcgaccgccatcgaatggctttccgatggacaaagccaacaaatgggaacaaagcaaagtcaaaaaaggatggagcacaaatgcgcctcattgccacaaaatgaaattgtcgctgtttcaaaatcaagtgggaacttaaattaatgcatctttttaatggattttaagaatacgacagcgcaatttccattcctcggcccaatcgcttttcgaactttcagtaaagtcaaaaattttttttgtcatccattatttttatttagtttaacacctccgtccatttctgtcggaaattttccggttggcattggcgaaaaaagtcctcaaacgatttcactatttttggagcccaaaattaccacggttgcatagatgccttctgtcatttcgacttcaacca

SEQ ID NO: 56785 - DNA, 532 bp, Heterodera glycines
atgatcaagaaggaaacagaaagaaatggactatttaaaaggaaaaaatgtttaaaaaataaaggagatgtccttatggttttaaaaaagggctcgattatatgcatggtaagcaaaatttaagaggagaggaggtggaaaagtcaatgaaatatattcaatatctgcttataaagcgcgtttcgctagctcagctgacgccgttatatgtgcagtggtggaatgatggagaaaaagcgcgccaattattatatagacatcaaatttttaataataaatattaatgttattattattatgactatgtaaaaatgctgttttgtggatgatacaatttcgcaatgtcgccgcttttattatataaatatctcagtacatgcacattatgacagctaatgattgtctaaataaaaccgggatatttgaacagccaagatcgggatttggaaatgatcaccagcaggaatcaaatcccgatttgccagggtttgagatctcggattttttcaaaaaatgttttgatcatgcatga

SEQ ID NO: 56786 - DNA, 654 bp, Heterodera glycines
atgccgaaatcccgcttgccaatgagcccttcctggcggagcagcagggagacaaaaaatgggcggccaaccgtgaaccgttggtggagacaatgcgcgtccacgaggtgggcacggcggaccaaaccgtggtgaccattcactttgatgacaaaactccaaatgtcgggctggaccacgacttggacgatgcgcaggtggacattatttttataacaaatgctttaattttaaaataaaatgtcaacttttaaaaatcttattttttaaagtataaaaccaaattaaattgaaaaaacaaaaaaacatttttattttaatagatcaatttaaaaacaagtgaattcaaaattaataaaaaaataaacattgtcaataaatgatactaatattttacatttgcatcatcgaaatgcattttttaccattttagttttattaaatttaaattaaggttttccgaaccccgttggaccaaccgtgtgccgaaaatttagtggttcgaatcgaatttgcgcgagatactgtcataaaggtgaaattcaaacttaattttaacgctaatttaattaattaaacaggtcacagacgcagaacgcaaagctggccaatttgagctgctttatgacagcgcaagagaccaagtcattataa

SEQ ID NO: 56787 - DNA, 2574 bp, Heterodera glycines
atgttgctgatcagtgtccatgtcgagcagggcgtactccgtgttgatttcccgaaccgaagcagccctgtggaggtaattttttaataatttttaaattggcaaaaaaatcttggcaaaatgttcattttttttgtaggtaaatctgaaggaagtggaagagcgaaacattgtcctacgagcaaagtaagttgtttttggccacagcaacagaaaggtggcaaattttaaaatcggaaaacgtaagcctccataaaagtgaggcagtaattttgcctcgggggcttggtcaaatggaaggatatccttacaatagaatagcttaagtgattgttttctattagatgcaaaatttaaaaaaaaataattctattttttttgaatttttttttcttcattttatttcgaaaaaatttttcgtttattttcaaaaaagttttgcagaaaaatccaccgtctcgacccaaagactgtcgagaatcggtaccaagaaacggcaaaaccccggaaattgacccctcaagggtcacaatttgagtcttaagacatggcttgccaaaaaaaccagctggagataaagaaaaccaaagaaatttcctcgagagttcgctctcgagccgagtcccgagggaatttgcaattatttttttttttggttgatcaaatgccatgccatccatggtttttggtggcatttattcctatctaaaatggactgactttcgggccctcgctaaaggaattcaacggaatgccgagattctgctgaatccataaaaatacacaaaagtcacccgaatccgccctttaaatttctcgggtgaaattcgggactgaatttttgccgggactgaaaatgccggcactcattcggctgcatcgtttcctttcgtcttttcacacctcctctcccaactgcatgttgtctcacacaaacaaacacacaggtcttggcccgcttcccagttgagaatggtcggcttgggcccaggaaattggaacccgtcaattcggcgccgcccaaaaaatgccagggaccaaccatattggcacaccttttttcaaaaaatacaaaaaatgccattttttgactcccaaaaccggtttttagactgttttctgacctccaaacggatgggttggactgtggggatgaagtggccacggctttggacgagtttttgttggagggcaaagcggcggcgacgacgacagaggacggtagtggtggtggtacggtagggagaaagctgcgcctgatttactacggtggcgactggctgtacacggaacgcgacccgaagccggacaagagctggtggtcgaacaacccggtgccggatgtgcaggacaaggtgtggcacaacaaaattcataccaggggatgtgccaggttagccgaaatccggttttgttgtctccactcgaaatccaatccgaattttcttcggtcgttcacagacccgaaatttgtctctacccgaaacccgaaaacgcgaagtccgacttttttttctcgagactcggaaatacctaattgtacactgctgggtacagtaaatccttagctccgtggaaattcttcaaaaaaaaaaaatgccgatcgtccttggcaattttccgtaatttaggcaattcaaaaaactgaactaattaatcattcattacccctcctactagccctatttactgttcaaactgattttggcccgaaataaacaacaatttttgtgtatgtatttttgtggcatttggtcgaattttggaaaattgtttggcaaaatttgttaaattggtccaattattttctcttaaaattcttgtagtataaaagtcaaattctatgtgaaatcattttgatagcgagccccggacccgaattcgaacaaagaaatcgaattccaaattttcgaaattagcctttttggttaaaaatcgatttaatacacggaaactaactgaaagccccatcaagcctattttgaatcaatagtgcctaaatgcgaacattttggttttccactttttgttcgaattcgggtctgggattcggaattggtcgaaatggataccggattcgtggtcagtgacctcgaaaatgcagggaacttgtttttatgacattaaaatttgcactgacgcattttccgggagccccgaattttccccctgtttttgttttgcatttgcacttttcagattgcttatatggacttgaccgggtatatggcattttcatccgcctctgtcgacgacctcaatgcccatttggcctcacaggcaaaaaataaaataaaatattttaaaattaaatttaaattttcaaaatttagcaaatttcggtggatgcgcgacattttcggccaaatttggtggtcggaggattgccaccatttgacgaagaccggtggctttatgtgcgcgcgggtgaagctgaatttgtgtgctataagccatgcactcggtgaatggcaaattttaacatttaaaagaatttattaaaattatgttcgattattaattaattatctaatttataatttaaaaaaaaattatttataagaaaggaataaa

SEQ ID NO: 56788 - DNA, 317 bp, Heterodera glycines
atggaaaatttcttccgttttgtccaattggcaaacacttttggcttccaatttgatttggaccaaaaattgttgcgatggaattcgtcgacagtgccaacaatggtgcctgaagaagaagaagcggaaatggatgccaaaacggcacaatgccaacaacaccaacagcagcagcaaccgatggaaatggaaactgatgagccgactctgatcacttggactgatcagcaacagcaggagcagcagaagagacaacagcagaggcgaaaaggtgggcagacaaattaaaaaaaacgccaaaatgagtgccaatttaa

SEQ ID NO: 56789 - DNA, 331 bp, Heterodera glycines
atagaaataattaagggctcggggtgtccgggggcttcttacaccggacacacggttgaaaatattgtttcgacctttaaattcggacatgaaattgaactgaacgagtttcgaaaaaatcgtcgtgccttttatgaacccgaaatattttgcggtttaaatttcaagcggggtaaaagcatgacagcgttaattttctggacttgtaaagtcgtaattacgggaacaaaaaacaattctgaaattgatgaaatgtatcattatattcttccctatctgaaaatggctcaaaagaagttagggagacgataaaaaatttttcatttattgg

SEQ ID NO: 56790 - DNA, 62 bp, Heterodera glycines
atgccgggaaacaaaccgtgccgtgtggatgaaaaacacatatccaaaccactaaaacacat

SEQ ID NO: 56791 - DNA, 430 bp, Heterodera glycines
atggcagcggaacagcagatggaattggacttctcaactgacggcaacaacagcgagccatcactggccggtgattttgatttaaaaaatttaaaaaagttcaaaatgggacagaagaaaggcacgcgtcagacaatcattagccatcaagtgtggtgaaatccatagatttgctcataaattatcataaataagtttttaatttttaagaattaaaacggtctaaaaatatggccattttttgaaaaatcctctattagaacggccccatttcaaagcgaaaattgaaaattttagctttatttagtatttttttagcagcaattaaggcattttgacggtattttgcgatttttaagcacttaattggcaacaaaataaattattattctaaataaattctgttgcagctcgtattgtcggaagttga

SEQ ID NO: 56792 - DNA, 1114 bp, Heterodera glycines
  unsure (1)..(1114): unsure at all n locations
attcattttcattatgaaattatttcattttcagtaaatattnaggaaaaaattaacttagattgtcctccacaacttgtgccggtgcctggcgaaggcgctacaccctacagatattgctctccgtcggcaccaattaacgatggcattcaggtccgagacatattatatttataatagtattttttaatgtttaaattgtatttttaataaaataatcacatataataatacatatttgaaaaagggatgcggtataaacagacattgccaatactcaacaacactcgaacgctacatttgttgcggacttgagagcgatgtccgactaccaagtagccgggggggtttatcggtggggggcaattcggtttccgcttttaggaaaccataacttttttctttgatgacttacaagactaaaaaaagttatgacatgcggcgccaaaaagccaagtaaaatcaattttttgagcttttttggccataacttttttgtaaagcgacccaattttttttactaataaacagaaaattaagaaaaaaatgggaaatgaatgattctctttaaaattctacttaaaattttttaaatttaacagaaatctctagtgaaaggacatcttttttttctgaaacaagttgtcaccagaaattttaattttgtttttaaaaatatgctgtattcttggaaagcttaatattttcaaattacctgtaaattgtttggtacaaatgttgattatgcttggcaatgcaaatgtccgtgcctgcggcgcaaataatgcgcgaaaaattaaaaaaagctgtctcattaagtattttaaattgaatgcatagtgaattttcagatgtatgtccgcctcaaccagcaaatcttgttcccgttgaattggccggtaactaccgtacctgtaatccatacgccaggtccggcaccccacaggtcagtgattcctttcttcttatttattttcttcacattattttaacgcgtttttaaatcaagaatttttgaatttttaaggcctgcccagagaattctgcatgtctgtacacaggccaagacaatggctttatatgttgccgagtgcagctgcaaagttcgcccttt

SEQ ID NO: 56793 - DNA, 945 bp, Heterodera glycines
atgtgtgagttgcgttcggccttcttcaaaccattgaatttggaaaccattgaagaggaagcggacgttctttcgcaaaattcacgcgtcaatttgaggaacggaggcaacagacgcagcggtgtctattcgaggccactcagccaaacgaatacaattacgacgtgagtaaacacacaaaaacagcaactaatgaattgatcaattgtcgtgttttccttcaaatttcctggtatcactttaatttttcatttgatttccctccaataaatgactgttttgattagcctttttcattcgtttagttatgacactcagcacgacttgttggacgtcaaaagtttgacgtatcagaacatgaacaccggaaacagagtcagcggatcgttgcgtttctcaacgcttcgaagtgccctcggcattggcataggcgtggacaaagggtcaacaattaccacgaacaaatcgtacgcctttccatcacggaaaataagaaaatggaaccgataattttaattgagcatatcataaaacagttgattgtaactttttgaacaaaggaggagaagttcggacaaatgggaaagcaattactattacaacgattacgacccgacagacccaatggacatttatctgacgaacaatccaccaaaggcaccgaaacgaacgaacgaaaagtatgaattgcagcgtaaatgggaggggaggactactctagcctaaaagtccaaaaaatagtctttgattattgtcccaggtcataattagttgcactacctatttcatttttaccaacaaaaattgaaaaatacttacattagcatattataaaatgtttactctttcaaatggtttggttttccgctttcctgcgtcaaacgttattattttgaatttaaattttgaaaaaattaaatttggcgttttgttttaaggaataaa

SEQ ID NO: 56794 - DNA, 826 bp, Heterodera glycines
atttcgttcaaacggaaagacaaaggcggactgaatttgaccactttggtggggggggacacacacagccgtcaatttattggcatttccaattcaaaggtgccccaatcggagttggacacggacactgtgaaaaccattctcagcgaatatcgcattcacaacgcggacattacgctgaaatacgacgcgaccacggaggatttgatcgatgtgattgaggggaatcggtaaaagaagagattcgtcattgtgcatttttaatggatggatttgctcacagaatttacattccctgcatttacgtgctgaacaaaatcgaccaaattagcgtcgaagagttggacattctttacactgtgccgcattgtgtgccaatctcggcacatcacaaatggaactttgacgatttgttggaaaagatttgggcctatttgaatctgatcagagtgtgagcgagggacccccttctgactttttgatttatcagttaataatttaagttatacaaagccaaagggccaattgccggattataacgcaccgatcattttaaacgcagaaaaaaactttctcgacgatttatgtaacgtttaatttatttaaatacatattattaaatgaatttgctaattaaggtatgaaaattcacaaaagtctgtcaaaggacttcaaatggtaaatttttttttgattttgtgaaaaatcggaaggaattgttcgcttaagtgccctcgtctggggaagcagcgtaaaacacaatccgcaaagtgtgggcaaaacccatttgctgaacgacgaagacgttgtccaagtgatcaaaaag

SEQ ID NO: 56795 - DNA, 1619 bp, Heterodera glycines
atgaaacgcccaatggactcaacagcaactccgccttcttccaaaaccacacgtatttccgcggacgctttggctggacaaatcgactcactttctgctgcagtcaacgcactgcttgttcaggacgacatttcacaggccgtcaaacttcagtttggcgttctgcttactaccctccacacgtgccaacacgtcatcgatggtctgaacaacaacgcaaacaacaacagtgccgaggaacaggaacgccgccgttccttggtcataatcggtcttccggagaacccttcagcccgtccttcggagcgtgttcgagaggatcaaaaggttgtctcggggattttggacgaattgggtgttgaggcggtgccaacgacgacctaccgaatgggccgtcctgatgttcaccgtgcctcgccacgcttggtcaaagtggtgctgccggcctccgtccatcagcacattgcactcggcggttggaaaaaggagcgcactcgcctccgttctctgccaaactggggccgtttgctgattcgcccgtctctcagccgtgaacaactccaggcggaatacgaacaaagacaggccaaacgcaacggaatgaccaaccatccgccacgtgccaacaatgctagcgccatttcaaaccaactgcacgaacttggacaaaaaatgcagcaaaattttcgatgatttcaaggtttccggggtttgtgtgtaacgaaacccaatttcaaaaaaatttacaaaaattttcaacacacacaaatcccaatctttctttttttgttgattcatttgatcatttttcaattcgatctcatacaccatcatttactttttctaggacaaaagccacttctgttatttcaaaatataatcctgaacttcacagatctccaacaatttcagacaataaccaaaatttcaatagatcaattccagaacaaaaatttataggaattttatcaaatgttcgatcaattatgaacaaaattgaccccctcataaccacacttaatattgaaaaatataattttatagtattagtcgaaacatggttaacacctcaaaattttgatattttacatgcagcaattcctgaaaactatcaaatcttttcagcccttcgtgaaaacaaacgaggtggcggagtttcaatcttaatagaaaaaaaattttccgtttattcagcctttgcggaatcagtttttggatgcgaaattgttacattgaggcttaaaaatctcaaaaatttttccattatcggtgtctaccggccccctagcacttccctttctaactccaaaaaattctttaactatattgaagaaaaaattaaaggacaaacactaatattgggagattttaatctaaatagtaaaagcgttaaatggcacaataatacaccagccccttttaacaaaattggacattactttgtcgaattctttattaaaaatgaattatctttgcactgccaaacaccaacaagaggtacagagatgttagacttatgcctgacaaatgattaccgattatcacttgaaaccgaaactagggatagcttgataaattctgaccatgaatcgatctatctcaacctatctatctctcta

SEQ ID NO: 56796 - DNA, 2339 bp, Heterodera glycines; identical to SEQ ID NO: 5073

SEQ ID NO: 56797 - DNA, 708 bp, Heterodera glycines
atgcagtaaaaaaaagaagttttgagttcaactttctcttccactactccgacgagtacttcgaccaccaccaataaattgtcctctacgcctcccgcggaaatcaaaaataaattgcaatgtttggcatggaatatttgcaatttgttagtttatttctaatttgaaagttaaaatttatcattttcaaggagcacgaaattgaagcagtcaaaggtttcgcgacggtttttaattggtcaaaactgcgaggaaatggccaaagactggggacagattgaagaagatgaaaaaatcggagatgaatacgaccaaagtgccgacgacaatggccaagtgtttttgacggattttttcgttgggcgaattaatgcaaagatttaattgattttctaacaaaaattcaatttgatttagtttaattgaaagtagagtgccacgggaccgggaccgggccgggaattcccggtcatccgaggtcccggttcccggtcccgggttttgaaaagctcaggtcccggtcccggtagggcaaccgggaaaaacaagcactggtaagaatgggggtctgacaaaggaggggtcggcaagtgaccgtgggatttccaaatgaaatttggtgggtggattcgcaccaggttcgaatccgctatatgcaattttttttttaaatttttatttttgctttttattttggtacatatgata

SEQ ID NO: 56798 - DNA, 57 bp, Heterodera glycines
tgccctaccgggaccgggacctgagcttttcaaaacccgggaccgggaaccgggacc

SEQ ID NO: 56799 - DNA, 1060 bp, Heterodera glycines
gagtgtgatgtcagagaggaattgaagaaaaataaggagatgaaaaagttctttgaaagtgtgccggacaagggaccgatcaatccgagggatgcttatgctgggggaagaacgatgccattttgtttgtacgcaaaggctaccgaagaaattgagatatcaatgttcgacatcattagtttgtacccctttgttaattatggtaaaaatctgcttaatttttgttagtttcctttcgcttcagacaccccataccccgttggagtccctaaaattgtagtgagcaggaattttaatgtgaattggacagcacccgacgacgtaccctatgatggacttttgaaagtaaaagtgatcccaccgaaaaatcttttgtaccccctcctccccgtgcacatcgatgaaatgctcctcttccctaattgttggtcttgtgcgagaagggccaagaatgaatttgtgatgacaaaagatgtgaaaaaatgtaaccatcgtcccacgcagagagcatttttggggacattcacatcaattgagttgcggaaggctttagagctaggatatagaattgtgggattctatcgagcgtatcattttgaacagtttgacagtcaactgttcaaaggatatgtgcggatgtttttgaagataaaggtggaagcgtcggggtggccggcggaggtgaaaagtgaagatgaaaaaagagcattcatcgaaatgtacaaggcaaagtatgacatcggtttggattatgataagatttggtttaatcccggactaagaatgattgcaaaattggtgagaaattataaaaaatctttaaaaaatgttcgaatttaagggattaaacagtttgtggggaaaattttcgatgcgcaacaccctttcaagtacggaaattgtgggcagcatggaacgttggatggaattagggagagacaatacaattgagtttgggcgcccagtaaaaataagcgaagagatatcaagagtcgtgtaccggaaaaaggaggagttcatcagggagcataaagtgtcgaatattgttttgtcattgtga

SEQ ID NO: 56800 - DNA, 752 bp, Heterodera glycines
atgcgaaaggcaacgccgacggcggcggcgctcgccgacgacgaggacgaggagagcattgagtcgcgcgtcgccaaagtcgtcgctgtgcccccggcagtgcctgcggtggccgtggccgccccgctgtccctctcccgtctttgctgttgttggctttggcatcggcgtttgccatttgtcgccgttcccatgggcatttcctttgcatgtgccatcataatgttgtccatcagctgcagttgttgccgcggcggtgacacttcgccacaccaatcgaacgaatcgcagacgcgcacggacactttctgccggggggggggggaatttaagagttaatcattgcatttcgaactcatagaatagactcgaaatttttaaaattaattggaggtaaatgaaatttgcactggtgacaaaacgtgcaaaaaaatgagaaaattaaaaataaataaagaccgaaaaatataaaacctatgagaaaaaatgagattttgcagcacaaaaagacatttaaataagggtggattccattcccggccccgccatttccccacgaaatttaaatttctaagttttataaaaaaaaatttatgaaaatttcaaaataatttttttgaaaaaaacgtgttgttagaattcattaaattttggaaagatcgccagaaaatttcgcattattttttctttaaattttcttataaaaaaattcgaagattttttataattttagaacggaagagatatggaag

SEQ ID NO: 56801 - DNA, 88 bp, Heterodera glycines
atggccggacgatctgatcgaaattgtgcacgagccaatgggccatacattggacagaatgcgacgcttcagcacttccctctccaac

SEQ ID NO: 56802 - DNA, 304 bp, Heterodera glycines; identical to SEQ ID NO: 51570

SEQ ID NO: 56803 - DNA, 857 bp, Heterodera glycines
atgacaaaattcattcaaaaaggtaaaaaaatatattttttaaattcaaaaatttgtccaaaaaaaaaaattttaaagacgatttttgagaaaaattttttcgattcgtagggggtgtatttttcgtttttattgcatttttgttaacaaattttcggcaaaacgacaaaataggcaaaaatagactctttcaaaaattttttaggctttaaaaataaagcctagaaaataggcactaataactcgaaaagtagctaaacaacagcccaaaaaaacatgtttttcgtgcgtttcaggccacggggagctcaggaaaaaataggctaaaacctaaaaattgcatccctattaataataattagagaccgacttttgaggcatatgaaaagcaactttttaatattaaaaaatttttgataaaataaggaattttctgaaattttctttgggtggcggcttgaatatacggcatggaattcatatcaaattttaaaattacccgtcgaaaaatcgcactttccgtcctttggacacacaaaaaatttctgcagtgaaattgtacgccgaaaaaactgtttacaagctaaaagatagatttaacatcttcttttataaaataatattttaaatatttcagcaataaaaatttcatattatctttttataatttaagcgcttttttttgatttattttcaattttattaccttcacaactgagcacattgtaatatttaaaggtgcaaactccgccacaaacggtacatattctgttttttgttgcttttattgtgttcaacaacattttcttcttgaaacatcgttggaatttaatggaatagaaatattaatagagaaa

SEQ ID NO: 56804 - DNA, 281 bp, Heterodera glycines
atgagtcccaaagatggcactgagttgccaaagctcactcgaaacaaacagaagagccgattaaatgctcacaaaggaagttccccaggtccccatggggatttccgaatgaaacgtggtgggtggataaagcacccatgggttcttaagaaaaatgtttttattttctgccaaataagcacgagtgccattatgacatgccagagttttttaatgaacaacaaattaataattttatttgcacctttacagtgtacaatggtgtagctgcagtgcgctag

SEQ ID NO: 56805 - DNA, 808 bp, Heterodera glycines
atggctcctcgtaagcagaatgagcagtttttggacgaaatccagagtaaattttaaaataaaacacaaatataagcattttatagaagcgaaccacgtggaagaagcacaaaacaaccaaagaaaacataaaatgggtaaaatttttcacaaattttacaaaaattttggattttttctcatttttccatgtttcagatagtgatgatgacgtcaagttggttgactcgcagtcatctcacgcagaggaacgtcctgcgctcaagaagaggggccgaaagtctcgctgggaaaaactgctggaggacgtgaacaacgcaaagaagtccaaccccgcagaggttgaagtcacagatgtcgacgaacgcaaagcagccaacgtcttcgactacccaacaattttctggaagctcgcacgcccaaaggtaatgtttgctctggtggcagccctacaatgttcttcttctgttgcagtatggggtgttcacctttatgtgcaacgaatgccgtaacgaaaacttcaagcgaggcgacaagcgcttcatcctcaacactggcagtggccaagagaagctggagtttacccaaacattctgccaagactgtgccaagttgaactttgactgcaccgacctgatcatgaaacaccaaaaaaaggatgatggaccacagaagaacggaggactgaacacctttttcaagacggaaaagtgatctttgaccattcattcattgatttttcgttaaaatgagtaactctttctttgtaattttgcccagcaatacgccgggatttgtcggcaataaa

SEQ ID NO: 56806 - DNA, 1086 bp, Heterodera glycines
atgcccccactgacaacagccttatccaagctgctgaactgtaaagctgagaatttggccgagtacctgaataacccagaagctgttaacaaggcgagtgcatacctgcgaggaaagaagctcaagacaacctactcgaacaagggcggcactacaaaggaggtcgagtttggcaacttctcgctaaagtctgcttcggagacgtacgccttcgagggattccttggcaagtgtcctttctgcaaacattcccacattttggaaagttcagaggtcaaagttcaccagtacttctacataaagcaccggatccgcctgctgtacccccagctgaagtgcatcgttgagtaccacagcaaaggtcattgcaagtattatccgttgggtaagctttaggctgcgatgaatgcccataatctcgcacggtttcagagttgttggccatagaggacagtgcagagataacaggcgaaaagccaacagacaccaactacttggactacctcggcttccgaagtgtttggcagccaacccccgtttattgacccgcacagagatgaagcgttcgagaccgtcgcaggagttccccgagattgattttaacgtgaacacgatgggtgtcacggtgtacagccctcgccatctgaagacccctcggtttgtgccatgggatcagccgggtcggtgtacacgctgcaagagtgggaacgtggagctggactacatcatccagccagagggagtgaccatcttctcttcacggctcaaggatgacggagagaactttctgccatttgatgagatcggtaagggtttggactattgcgaaaaagtaatcagcagcttaagtggactttggcgacaatgccaagtttcgcgtccggtcacggaacaaaatgttcaccctgccactgagacacccggaagtttaccaagctgcacaagtcgcagcggaagcgaatgaactgctggcagaagttccaccaatggctgataacaatgatgatgatgataatgttgacccaaagtgataactcagtgtgttgataagccattttgttatcattcgtgatggattacccgtga

SEQ ID NO: 56807 - DNA, 835 bp, Heterodera glycines
atgttgagcatccgtaatttgtccagccaaatgtttcctcgcgagcaagggtttctgatggacgcgtacaagcaggcgtgtgccgatccgtacgggtatctgttggtgacactacacgcaaacacagacaacatattacgactgaggacaaacattttcccagacgacgaagataagattgtctttgtacccaaaaatggttaagaagcaaatagtcggacagcgggtgttggacaactacgagtatctgaagtcccttgggaggacgacatctcacaagaagaggcgtcatttgttgagcagtgcaggttgtgaagagctgttgactatggtggagatttgcctaaaccttctgaacgggtccttctgtttgacacggaaacagaagcaaaagttgttgccttttgctaacaccattcgacggttggcacgcgtgagaagtgtgagcagagtgcgagaaagccgatcttacaacaacagcaaccacagcaggagggaggttcactctttgtccctttgttggcacccatactgttagaggcagcacgttatctgctgcgcaaagatggccaataagctcattcttctgccttttgagcattaccgaggattagttgcatcgagagagggtgtcggccttgcgaaaggagacgacgatgtggcagggcagacaaatttgggattcgtcaaacgacagctggagaccgtgaagaggaaacggacagcgaatgtcagcgaacgaaatgtactgtacaaccagcagctgaggagatatttgaagctgagaaaggaggcaaacgacaggccttccaactcagcaacggtgctcaactga

SEQ ID NO: 56808 - DNA, 1012 bp, Heterodera glycines
atgaacgaaaagaaggaccacctcttgcccatcattatgtctgatccgcagagattcggcgctacggaccgtgggaaaatattaaatccaaagacggggcgggagttcatcgactcggacctggcctggtcaattgaacgcctagtggaccctcgcccggagaatgccccttcaccaagcggaaccaaagagttgatgaggaaactcgcacagaatccgctcgccagtagcctacttaatcgactattcgttgggtctggacaagtcaaacaaacgggaggatttgttccctctaaatggacgaaaaaataaacaaaatatacaccgacccggccaatcccggtgggtttgcgggtgcgagtgcactctatgcagcggtcaagaagaagcacccaaaactgaataggaccgactttgatgactttttgcagcgtaacaccacctacacgctgtttaagccaaagagggagaagtttcagcgccttcgcacagtccccggagggttcatgaccagtgagtttgtccacgttattttcacgtgatcggctcagacgttcaggcggacttggcagacttccaagccctttcgcgaaagaacagcggctatcggtacctgctgttggcggtggatgtgttgtcgcggcgtatgttcggctcacccgtaaagagtaagaggccggcggacgttaaaagggcatttgaggaggtgtttggtcaaatgccaaagcttccggaaacactgtacacggaccgtgggctggagtttgtggccaagcccatgcaggagttcttcgccgagaatggcattaagaagtatgagaccagctcaaagaagaaggctgccgtcgcagagagagccattcgtacgctgaagacccggctgtacaaatatttctctgccaaaaatacctctgcgtgggtggatgtgttgcccaaaagcaacttgttgctggcgtctcctcaccaattggagcgagcggctcgcgcttcatctcctcgtcaatcaggctga

SEQ ID NO: 56809 - DNA, 1035 bp, Heterodera glycines
atggcgaatgtgccaggtcaagtgcgggaatacttgtccacggataagccccttgacgaccgcccactggacatcgatgagatcgagtccgaagtggctgcgttgaaccggcgcacagactcgggcatgcccccgcacagtctccggcttaaagtcggatgcgtcgtcgtccttcttatcaataaaagtgataaggaaggactgatcaatggcacacgcatagttctggaagaacttggcgatgatcgcctcattggtcgtgttatcaatagcaatgctattggcggccaagtgagattctttcttgaaagaacacgaaatgtctatgaagacaaatcgcctggcggcataaaatatgagcgtttgcagttcccaataaagcctgcattcgctatgaccattcaaaaaggtcagggccaaacaatccgcactgtcggcattgatctggaaagggaagtattttcccacggtcaattgtatacggccttctctcgggcaacagacggaaacaatgtccgtgttcatgctcccaaccgggaaattgatgcccaaggccgagccaaagtgctgaatattgtagctactaatatgctcaagttacaataaatggcttagtccagagcagttgggcacatggtttttggagagatgccaatcccattcccatctgcactatgttgggtgcgaaaatggtgagaagcttggatccgggacatggaccggtcagccctctttagggcctacaggtgaattgccatttagcgctcaacccaataacgtgccaacgcctggactaagggagggaggagggccatgacgtgcaacgttagggcacttccggtttccattgcattatgcgatgtgtcaactccaattattggaggaaaccaagtgcatgtcggctgacgcaaagaccctaacagactaaaacgcgcctaggtagcgaagctcaagaagcgcgcagcgctttcccaagcgccaccctcgcatgcacacacccgctagtttaataagttatatagtatttttttaata

SEQ ID NO: 56810 - DNA, 114 bp, Heterodera glycines
atgcgaaaagcgaaatgcgaaacgccaaaaaatgcgaataatgcgaaaggcgaaatgcgaaaagcgaaacctcggcccatccctgatgtgcacccgggaagcgaagaagaggcg

SEQ ID NO: 56811 - DNA, 920 bp, Heterodera glycines
agtctttcgtttttatttattttttgcaaaattaattcttaaatattttttcagaaagggttctgaaacgcaccagattttatttacatgttagtttaggcactctgatgctttttctatcaaaaagggagatgaataaaatttttaaaaatttttaattcctttttaaacaggccaaaaagtttaggcttaactttttttttcagaaacttatcagaagcgcaccaaactttgcagggatactgaaaggaagagaaataacctattttaaatattatctagtcagttcatttaaataatttttatccaaaaaatttttttttgggttttcggggcagtccccctgaaccgatgcgcccagatttatggggagaccgaatccttcgggaatagcttccctatagtctgtactttaattctgcgttggagttttgctccccataattgtttgagtaccccaaacggacacttgaaaaaatcgatttttttgttttcggggcagtccccccgaaccgatgcgcccagatttatggggagaccgaatccttccggaatagcttccctatagcctgtactttaattctgcgttggatttttgctccccataattgtttgagtaccccaaacggacacttgaaaaaatcgatttatttttgttttcggggcagtccccccgaaccgatgcgcccagatttatggggagaccgaatccttcgggaatagcttccctatagcctgtactttaattctgcgttggatttttgctccccataattgtttgagtaccccaaacggacacttgaaaaaatcgatttttttgtttcataaatatttttttcagaaagggttctgaaacgcaccaaattttatttacatgttagtttaggcactctgatgctttttctatcaaaaagggagat

SEQ ID NO: 56812 - DNA, 400 bp, Heterodera glycines
atggctaattggattaggtttgtggtaaagccctggacccctgcccctgtaacccattactacttgaagtctcgttttctaggtgttttgggtcacaagatgttatttttataagtattttaattcgtttttaatgattacaataaatatgataattaaattaaagcaatacgatcagcctggattatttatagtattaccttttcgttaagttgtatatttgcattttttcattttttaaaatatttttttttgtgcattccttaatattttttcagaagcacaaaactaactttcgaaatcaagtccgtttgttcatcacttgagttctacgacgagaataaattatattttacttaattgtcatggataaaaaagataaagcaattttgctaataaa

SEQ ID NO: 56813 - DNA, 1036 bp, Heterodera glycines
atgtcggttatttggaggacagttcggcgaatggccaaaatttggtcagtttttaatgggaaatatgaccgttaaatttcaaatgtagggggtgtaaattgatttgaaaaatttcgtttcgaataaaattaattgcccagtgcaccaatttcattaaaaaatcaatattttgtgaaactttttgaattttttagatgtaatttttgacaatttttgaacaaattttttaatttttacataaactcaatttagggatatacttttgaaaaaatttatgtcatttctttgggtatttttcgttcttcttccatttataacctaaaggctttttttcattgtttcaaaccaaggagcgttctaggaaaaaaccatataaaatcctagccctaattcgtgacaattaacggattaaaattttaagtattggaacagcgttgatgcaattcacacaattgtcgtcgccattctgttaccgtcgctatatttgctttttgttgtcatgttttctctgaagctcactcaaatcaataaattgccaatggcggagtcaaaacatcgaaaatcggtcattaataaattattaaattaattacattaattagttactgaatttcaacatttttgtttttaggtgttcctccaagtgtttattctgtcatttgtgctcaccatcttctccattaattacactcttctcaattttgttcccgtccccgacctaatgatctccgtaaatatgtacctttgggtgcttttggatggtaaattcaatataaaaataattttaattaattttttttaaattttacaatttttggcgttcctccgtttgtttacctcgcgttgaaccgttcaattcgtggggaatgcgttcgcttctttcgacctcatgtcaatgcgccacaaacgcttaaaactcagctgataacacgacggcatcaaatgccaaaaacactccgcaattttggttaataattttgtcgatgctgacaaacaacggacaaaaacaacgacagttgaaaatgtaaagcattta

SEQ ID NO: 56814 - DNA, 721 bp, Heterodera glycines
atgattgatcaaatcttgatcattttggctttcattgggaccatatgcgataacaagccttcgtattgcctgatcattaagcggcggattttaagcgaaaaaaataggtaaataaataagggcataaaaatttcgaaataatgcgaaaaatggtaaaataggagcgaaaatttgaaaatcagtgcgttttttcaatgaaattaaattaaaatcgatgaaaataacttattgagaaaattaattacaaaggaattgaatttcattcttttttcgaagcaaaaaaataattggggtttctacagaaaattcttttttttcagttttttgttagtttgtattattaatcattttttcatatctttgatgaacctattcaatgttaagattttaatggttaaaaaattgaatgtcaatctttgtgactagtaattttttcgaattttcaattagttatttttgtcgatggcttatagttttagtaaaaattattgataatagtggaatttttatgaatactataatatttttgacagcgaggcgcaaaagtccatttttgctgggcggcgcaaatgtcgcggcgcaaatggagcggcgcaaatatccgcggcgcaactgtctgcggcgcaaatggcgcggcgcaagtgtcgactttgctgagcggcgcaaatggtgcggcgcaaatgtctcatcacgatttttaaaacgatgaaagtaatagaaa

SEQ ID NO: 56815 - DNA, 725 bp, Heterodera glycines
atgctaaacatatccgcttacttctattgcagttctctctgtttccaactattcatccacagaataatgatcaatttgccaagtgttcagttgaaaagttattgatctagaaatatcgcatacaggccgtatactagtcatacattcctttagtacatcaatggatactaaaagacgctgccttcccttaataatgccttagttcctttgagacatcaaataattccctcctaaacgataccagcgctgtcattaaaattttcaatgtcattacattttttctcattaattgcctctgtaaatacaaattttccagttgagaagatagttgtggtagaatttgtacctagacccttcattatatttgaaagatttatgtggttgtttttagtggatggggatattaaataaattgaggagaaaagttttactatttattgtcagtaacaccataaattgaatttaattttaggtataatttacttaattttaatcaatactattgtatttattatttttattatattttaatacaactttaatttaattttaatttaattttttaatttagttttatttatttttatttttatttaacatttattttcttttaattttaatcttatttttattttactttttatttgaattaatttgaattttattttactttatttattattcagttaatttaaaggagttgttcagaacctctatccaataaa

SEQ ID NO: 56816 - DNA, 512 bp, Heterodera glycines
atgcgatgtgccagtcctacccgtcaaagtgaatggtaggctctgattctctttatttatgaagtgcaccaaaaacaatcaaaaaggcaggatagacgtaaatacatatgcaaacataatgacaaacaatgagatggctgagcaatctgcatttcaatcgaaattaatgttactacggttgaagaaggttacccatttaccaattgatactgacataaaaggaaatggtgagaaggaagctgaatttgtaagagagtgcaaagagaaattagagatcttaacccaacaaagatagctgtgaaccaagaagagtaggattgttaaactatgcttgaacaatttgtgcgacatatttctttacgaaattacagcctttaacagactttacttcattaatgatgtacttgattttggagaatatttcggataatagttcaatagacgtaatggccatcgaggatttggacatggagcacattttgatcacctacgaaaataaaaaaagtgggtaa

SEQ ID NO: 56817 - DNA, 373 bp, Heterodera glycines
atggatatccgatcgcaagaagtagagttgagcggtaccggtaccggtactggccggtaaaatgtatgcagctataaatttacaacgaatacaaaatatattctacagataatataaaatgataagtatatagtaattttttattcgacaaaaatcaagcattcatgcttttttatattttgcaggtaaatgtatgcagctataaatttacaacgaatacaaaatatattctacagagaatataaaatgataagtatatattaattttttattcgacaaaaatcaagcattcatgtttttttatattttgcaggtaaatgtatgcagctataaatttacaacgaatacaaaatatattctacagagaatataa

SEQ ID NO: 56818 - DNA, 296 bp, Heterodera glycines
atgtatgcagctataaatttacaacgaatacaaaatatattctacaaagaatataattttttattcgacaaaaatcaagcattcatgcttttttatattttgcaggtaaatgtatgcagctataaatttacaacgaatacaaaatatattctacagagaatataaatgttaagtatatattaattttttattcgacaaaaatcaagcattcatgcttttttatattttgcaggtaaatttatgcagctataaatttacaacgaatacaaaatatattctacagagaaaatataaat

SEQ ID NO: 56819 - DNA, 262 bp, Heterodera glycines
atggaaattgacgagcagcaccagtcgaacagtgcgggccatgttgttgcgtcgggggaatgcgtacagcaaagtgagcagcagcaggaaatgcccgatttgtcagcaatgaccgaagaggaacagttggaggtaggtaattaattcagtgataattagggtcgcgacttttagtgacgaaaaagtgccaaaaaagtggcaaaaagtccgaaatagtgacgaataatgacataattttcagccaaaaattgagcaaaaataa

SEQ ID NO: 56820 - DNA, 633 bp, Heterodera glycines
atggaaaacgctgaagtgtcacaatgtttttcaaaattcgacaataaattcctatttataattggtcatgataatcaatatcgaaaattcaaaaaaacaaatgaaagaacggatacgatttatctctattgcatgaactgtgagaactataataagcagaattctgctgggttggtttcagttatttcgtgattcttctatataattagattatagagttattggaagtgctattattagagagggccaattagatagaactcatcaaatcatgcaccatcttcagtgcaaaggtgtgccactagagcaacttactgctgaacaaattgataggaatcaaagaagagaattaattcaatgttcagcagattctaaatctatttggcgagaagtgatttgaatatttcataaaaactaatccaattggtacgataaatttaggggtctgacagggctagagagcatgatacagctgaggatatcgaaattgatgatcccactggaatttcatttaattatccaaattggcaaagcgtaagacgtgcctacaaccgacgaaaaatgaacaaataggggattgttctgatccatttaatgtgccagaaaaattttagctaactaaacgcggagcaa

SEQ ID NO: 56821 - DNA, 108 bp, Heterodera glycines
aaaattccctcaaaaataaaaggtctattgcgcaccgccctccctatcatgctcgagagcatttgtatgtgtataaaatttatcaaaaaaagagatagccatttttct

SEQ ID NO: 56822 - DNA, 288 bp, Heterodera glycines
attttctaagaaaaaataggagttttgggggcgcggcggtgccgataggcgccgccggggaaaaaaatggaaattttgatcatttataaacaggttttcactgaaaattagccaatttataggtaaaattttgaaaaattttatgggaatttaatccaattcttaggggtgtaaaagtcgcttttcgcgccaaaaagcgaaatgcgaaaagcgaaatgcgaaacgccaaaaaatgcgaataatgcgaaaggcgaaatgcgaaaagcgaaacctcggcccatccctgct

SEQ ID NO: 56823 - DNA, 748 bp, Heterodera glycines
atggaagaaggaattggaaattggtaagagatcaatggcatattcgattttttattatttattgtctcattttaaggtataaaaaagaaattttcaacgcaacaacaaattgaaaaagtaaaagaatttgaaaaagtgaaagaagaatttgcaaaaaatttcagtttggaaccaaattggaaaattaaagaaaaaatagcggaaaaaattggtgctagaatgaacacaatttctgcttggaaaagaaaattggactctatagctagtaacattttattacaaccaatttaagtagttatgttgaaattttaatcgaatttaatataataatgacaattaattttgattcaatttaagagaaaaggaaaatttactcggatgctgagaaaatggaatatgcgaaaagaagtgaggagatgagaaaaagaaatccaatgataaattggaaagaaattgctgaaactttgggaattccatgtgccaacttaagacgatggacgagaaattggacaccaaattgattcattagacttttaaaattctaaattctatagcaattttaagaaaaagtatcgtaaaaaagaattttttatcctattacatttagtcaactttattatgcagagaaaaacctagtgtagaatctctttgtttctttgtaatttctctcagtttggcgaactatctctttgtttttagcggataaatcgatttattataacttgttttttaccgttttggaaataaa

SEQ ID NO: 56824 - DNA, 118 bp, Heterodera glycines
taaacacatagagctatcgaacaacaccaaaaattcttaatttgattgacagcgaacaaagttatggttcaaaaagtcttccgacgacgtttcggccgacgacgttttggggtgcacc

SEQ ID NO: 56825 - DNA, 983 bp, Heterodera glycines
atgggcgctaaagtgcatttatgcgtgtcatttgtgatgtgagtgtaagtaattgtaaacaacagtttttgtgttatgttgtgcagcaattttggcgtgttggtgcagcgcaaccgccgctgagactgatgagacgacaaatttattttttattttatttattggggtggggccgccgggcaaaatggcccaaaaaaggaaacatagggcgcggcgcaacaaccaaaacgacgatttggaaaaccatgagattaattggtcgaaaaaaaattgcctaatgtaggtcccaaagataacatggatttaattgcctaataaattaattttttattatattaagtggaaaattttttaaacaaatcaacagattatggcagattgaggaagagctattaaaaattttaatgtattttggttgaaataagaaaatttttttgttcaatttttaaaaatagggaaaataaggattttcaaaattttgagctcggaaaccaggatttacagtgattatttgacttatctccagtaggattcgagatcagagatttaacacacagctcaatcccaatcccagggctttaattcgcgtgaagacaattggacatgggttttggattaattctgtctcgaattttctaatttgggttcgggaattttttttttttgttttcttttccattgcttagcctcagaaacattcctcttccctgttcggtattcaagaatcaggtgcctaatgttccccctcccgcaaaaatttccggttttcctacatttccatgtaattgacggaaagcctaaaaaaacaaaaacataataattctgataggaaagagtaaaattacaggccgaaaatgctgaactgtgcacagttctctctcccatcatttggtcttaaatatgcacatggcctgagcaacacattaactccgaagaaaaaaaaagtgaaataaatgggcgaacaattaaatttcggcaataaa

SEQ ID NO: 56826 - DNA, 356 bp, Heterodera glycines
atgacggaatttggattggattcaaatgaatttcctggttatttttcggacggtttgcccttttctgttttcgaaggactgtccttaacactcgataaaatgttcttatacgccttatcggtcggtccgtcggagggaatgatcagaatttgggattgggttaaaatgaatttcttgtttttctcgggccgtaaaaaaatttctataattttgcgacgagactgtgagtttctatgaaattctcttcgaaatttcgaggtcgccttatcgatattgtaaattcgaatactgatcacttgtcgtgactcgtgagtatctcgatttagatatattatctctgtgaaccgatttattaa

SEQ ID NO: 56827 - DNA, 1093 bp, Heterodera glycines
atgaaaaatttggctcgccagtacgtttactggcaacaaatcgatgaacaaattgaagaagttgttcgttcctgtcaaatatgtgcttcggaggcaaaagcaccagtcaagacgacccttcattcatggccaaaatccgatggcccatggaagcgtgttcacatggactatgcgggaccattctttggaaagatgttcctcgtcattgtagacgcattttccaagtggcccgaaatcttcgagatgaattccaccggttcagccgccacgattggtaaattgcgctatctttgcgctcggcatggactgcccgaaaccttggtcaccgataacggcacccagttttcgtcgaaggaattcaaggaattcacccgactcaacggcataaaccatttgttttcggcaccttattgtccgatgtccaacggacaagccgaacggttcgttgacacatttaaacggacgtgtcgcaaattgaagaaggagggaatcaccgaaatgttggacacatttctggccacgtaccgtgtcacgccgactgagtctttgcctgaatgcaaaagcccagcggagttgttccttcaaaggaaactccgatcgacattggacctattgaaaccaaaaaaccgtccaatcgtcatccgcgacgaagcaatggaacgaaagttcaatcggcgccatggcgcgaggccgagatcgttcgatttagacgataaggtctacgctcggcatcgaatgtcgcaaaattggcgacccgggcatatcaccctgaaaaaaggtgtgatgtacgacgtcacttttcaggacggatcagttggacgatttcacgcgaaccaacttctggttcgacattcagacgtgaatgaggaagaccctctggacgtcttgaatgacgctttcgggcttccattggcaccagccaatcaaaatcttggtgatgttgtggcacagccagctggagaagtgattgagaatgcgccaccatctccgcgccccgatgcgccacaacagccaaacgaagtcattgaagaaggcgccgttcaaccgaatgttcagaacgaacgacccaagcgaaaccgtcgtccgcctgatc

SEQ ID NO: 56828 - DNA, 1060 bp, Heterodera glycines
atgaaaattgcgatttcatttatccttgcggcaattgaagtgccaatgttcacggattataaaaacactaagagcattcaattgataaaaagtgggtattttttacagaaattttaattaggtaaaatgcgattttttgccaaaaaagtttgcaaaaatggaatttcatatggctttttcataaatgcgcaaaaaaaaaaacgaaatttcgcaattgtttcatacatattttttatgtttgttttcaaaaaaaaaacaaaaaaaaattgcttttctggcgttttgtattatttttaaataattgttctcgcgtcaggatcagtcagctgggtaacaaactcagcctaggacaattcagccgaggacaaactcagttgatgcgacaattcggctgatgaacaactcagctttacaagaatttacaaaacgcaactcgtacaatggcttaggctggccaagcaaggcatacgcttaagcctaagctttaggcgaggcataggcttaggcttgcttgggcctaggcttaggctttattttgtaattttttattgtatggctgagttgtccatcagccgaattgtctcatcagctgaatagcccagaagacgttcttgcattttattaaaaaaatttcttttttttaagaagaaaaaacaattctcaaagaaatgaagaagaagctaacagaaattttttatgctttgttcaaaaagttcaacatcgatgcgtacaatatgaaaattttggccaatacatttgaacaaaatgtgccaaaaacattgtccaacattggcacaatgttacgggagcaggacaaaattgatgatgaaaagcaatatgtgcgcatttattggcgaaaatgcatcattactgctcgtaaccaattggaatcgttgaaggacggcattttgtcccaaattttcaattatttggatgagtataaaacggtggaaaacattgagcaaattggtgaaacattgaagataattcgcgaaactttgctggctgacgactgagtgaagaaattttggaatttatgaaaaaatgtggatttttttta

SEQ ID NO: 56829 - DNA, 303 bp, Heterodera glycines
ggtgaatcggatgggccaaaatttgttcatccactgcaaacatgaccagcgcgagggcatgctgggcacaacatcgcgtgaggttcagcgcaactataaattgccggatgatgtggacccgaaaagcatccgctccaacatcacacgtgccggcattttgcgcataacggcacaaaagaagcgttgaattggcgcaaatttggacaaaaatgccaaaattgatcaaaaaatggagtaataacatttggaagaacataataaatccaatatattaatcattttatgacataaacacatgtaaaa

SEQ ID NO: 56830 - DNA, 399 bp, Heterodera glycines
atggagtggcggttggccaggcgcggcttcaccgttctgccgatgtacaaatggcaacggagtggaccatattcgttgataacggcactgaatctgctcgaccgacaccatgtaaagttttcgattctaactttatttatccaccactgttttccggatcctaaaaaattgctgaattctttgcgcgaattggccatcgagcacaattgtcccattttactttctgtcgtgctccctattcgacaattcgtcgaattcgacgataaaattgtctccgctggaagaaaacttccgggtgaattttaattttccatgtgttcgcatcacaatttttacatgctttaaaattttaatttagcttcagacattccaacgaaaggaacgaccttcgaagcccaa

SEQ ID NO: 56831 - DNA, 203 bp, Heterodera glycines
aaatgaacggcagcaaatgttgaaaggggtggcaaacggaaaacagcgactcgtccaacttccgttggaatgctgcagtgaatcggtggtccccgttgttaaattggtcgatattcctctcatttcatttcaaaatgattaacaacaaagcctataaaatgccaaaatgcaattcagattgtctatatgtgaaaataaatttg

SEQ ID NO: 56832 - DNA, 1124 bp, Heterodera glycines
  unsure (1)..(1124): unsure at all n locations
gcatggggacagaaaatttgagcagagaatcagccaaattctggaaagtctgcagcaggaggccgaaagtctgatccgactccaacaggggaggcaaggacgaggagaagacggggaagaggcagtgagaacaagcggagaaatggggagatggacggagagtgctttgtggacaaaatgagtggcaaatgggatagtagccaacaataaattcttttgctgtgtaaaaggtgttcgttttcaaaatctgcctcattttatttgcctactgtatgtatttaccccttctttctgttgttacggtgtgttttgttgtgtaatttgttttttcttattcgtataaatttttacgttttggtttttgcataattcaaccgatgaaagaaattgcagcgccatgggaccacgtcaaaaccgacaaagcccatcactttggacgtggaagaccagcagaaaattgccaaggttgggctggagatgaaactgttgacggccgaagtggaagcggaggcggagaaatgggacgaatacgcggagaatgacattgtgaagagagcgaaggtcggcggagagtcctccaattttagaaaaggctataccgtttttgaagcgtttgacttttctttcattttttgataggcaatgtccgcaatgagttacaacatgtatttgttcacgaagggagacggccctctgaagacgacccacgacttattcacccaagcggagtttttcgcggaacaggccaacaaaatgcacaaaactgtgatggaattcgcttttgaagtgggacaatgcttatgcatttccctccctaccaattacactttcttcccccctcgctggttaaggtccccggaagtgcagaaaagaacgaactgttgcaaattctggacaaaatcccttttcactgtcagcagcttcaagtgttggtcaaaagtccgacagtcggcaaaagtgccacttttagtaaagtagagaagaaaactcggcaccttctatctcccanaataaaatgaatgtgattcaggtggacgcggtgatctccgagatcaaaggcttaatgaacgaaattgcaaagcttgtcaccgcatgtttcgtctgtgccacaaaagtcggaaata

SEQ ID NO: 56833 - DNA, 983 bp, Heterodera glycines
  unsure (1)..(983): unsure at all n locations
atgcctccaccacgtcctaagaagagagagccacagccaaaggtcgaccctcggccatccacatcaaagaaggccgatataaaacctaaaagggagccaaagtttgagccggatccgcgaccatccacatcacggcaagccgggtacaaccccgctccacctgctcccaaaaaagagccaaagcatgagtggaaacagacaaagcgactccattctcctcctcgcaccgcaccccatcggattccgaaaagagagccagaaattgaagaaacaccacaagagcaacctccgtgcggacctattggaagaacgggttaggcaggacccaattttgtattcattgaccgctccaccaaagagaccatcacagagtacaaccaccaggacgggatcgaaaatcaaaaaagagtttcgcccgaaaaaatggaattaataaatgccactcttgacaaactgtacaacgagccatcctcccccgcgtgtttttccggcgttactgcagtgtggaaagaggagagaaaaaagataaaacaatcaagtaaaaaagaagtgcggaactatttggaaagtcatcgtagctacacgttaatgcgcccccgacgcgtgcacttccggagagcaaaaactgatgcagcaggattcatgacagatgtgcaagtggatttggccgattttcgagcgctttctcgtcaaaatcgaggccatcggtatctgctcgttgcggttgacgtcttgtcaaaacgcttgtttgttgttccgttgaaaaataagagggccgaggagatgctggaggcattcaaggaacttgttaagcaaatgccaatggttccacatcgcattctctccgacaaagggactgaattcaaaaagcaattactcaaaaaatttttcgatgagcaggaaattcagaaacatgagccagtccactcatccgtgaaggcatcagtagctgaaagagccattcngaatgtannagcacgact

SEQ ID NO: 56834 - DNA, 2668 bp, Heterodera glycines
atgtccaaagcggggattgctgggctaaaattgatgctgagcacgggagagtacgcggatgtgcactttttggtgggggatggagaagaaaaagaggcgatttttgaaaataaaaaataaaataattccatttttcaaattaaaaatctttttaagcttgtgccagctcataaacttgttttgatgcatgcttccgacgtattcgaggcaatgttccgttttgacgctaacaaagaacaagccgaaaacggtaaaaaaagattaataatttttgttaattttcaattagttgtgctcattacacgattaatttgcaattagctaattacccttctgctgtggaggtgcccgacgttgaagcagcagcctttaaagtgatgttgagcttcatttacacggatgatttgagcgaagtgaacggagagaatgcaatggcagtgctttatgccggtaaatttattttttggaaattaatttattaattaatgaattccctaattagccaaaaagtacaacatttctggccttgtcggcccatcattgcaaattcccatctccgaattacacaatgttttctttgcctatgcctatgcttgccttttcgaattggaggtgggaaggacagatttaaattcttattttgtaatatgtgtgcttagtttttgagggacttcaggctttttttgtatcattttggataatttattactttttaaaggatttttccggccaatgtttacgttacatttgccaaaatgcggctaaattgttcgaatcagatgactttttgcagattgatcaaaaaatgttgagtgggcttatcgaaagtgatcttttgttgttcagcgatgaatttcaaatttggaaagctgtaatttcgattttaaaattgaatttaaatttttttttttcatttttggcactccgttgggccgatgaaaaatgtggtcagaatggcattgaatgttcctcggaaaatcgtcgttctgtactcggtccggcactgttcaaaattcgttttccaaatattcatgaggaggagttttcaaaaggcgtcggtaaaattttttggatcgggagattaaattagcagtattaattggttttttttattagcttttatctttaatgctttaaaatgtatgctacgggggtaccgccacggaaaatttaacaaattttgaaatttttacagttccatttggtgtgctaacaatggaagaagtgtacggcatttaccaatacaattctcatccatatttgtatcttcgtgtacccgacgagctgttgtacgccttgaaattcccaagccatggacgaatttttgattggaacacagccaagggcaaccgaagggggacacttgcgttggaaattggaaaattgtcggaatttgccggggaaaaagtggggagtcgccgaataagtgatgcagtgcatataaatggagtttcatggcaaattgaagcacaaatcagacagaacagtgaaggcaaagcaaaatatttgggcttttacctttggtatgatgcttcaaaggaaggtaataaaattaaaattaaattttcattaaaagggcttctcaaatatttgcaaatttttttccttgaatggggactgcttaaaacgccgaaggattttctcgagaatattattaactttgaaaacatttgtaaatttatcaaaaataattttttacttggttttcttctaaattaataatttagctttaaattatatttaacgaattttaagaaattttggaaaattttaccatcagtttggcaactatatttttgacaatttttgcgcatataagccctaatcattaaaataataattaatttgcaatgaataggagagggtaattggcgcaacgaatattcggcaacctttcgaattgtctggcaaaagagtaaagcggccaattccacggggacactaagtgaccgtgtcattaacaacacaaagaattggttgggtttccatcttttcattacttttgcggtgagtgagtaatccattaaatagtctaattatgggtaattaaggaattgatggacccgagcaaaggattttacaacaaagaagaggacaaagtgacattggccattgatgtcactgtaaaataagcaaaacggaggacaaaatgtatttttctgttgggaagatctcgtattgaattatcattgctaaattcgataatcggaggcgaataatataatatttacctaatacatttttgatctattcgaattattttaaaaataactgatttgaagcaatttcgctaaatgttctggttttagaccccaaaatctggttttttttaagcccgatgttctgattttgaaaaattttcaatcgcatcaagaaatatcactttctagggtgtcggttttcaaaagactttttcatttccgtgattaaccgagttttacattagaaatcttttaagttgaaaatgcctcacatttttttttctgcttaaagtcgtcggttcattttgtgtcaattagcagcacacttttgtcaaaaattccaaaataggtgcgcaaataagtgttaaaaattgaaaaaatccagtgtctttatgcacaaaaattcctaaagtgactaattttttatcaatttcgcccgcacaattgcatctggtcaagaaaataaa

SEQ ID NO: 56835 - DNA, 720 bp, Heterodera glycines
atgaaaatagtatgtagataacagagaatttcttgggtttccaaaaaaaaaaccgaccaaaaaaggagacttaaactaaatattaataccaaaaaaaacaaaccaatctttttttttgttgtattttgttgaaattataaattttcaaataaaaaatgcttaaaaaagatacaaaaatgaactttcttattggggaggggacaaataaatactgcggcaaaataatgacctaaaaataggtatgataaatgaacttatttgaagtaatccatcttttttaacaaagatgaatttgattaaaatgtaccaaataggatttatgaattttacaagttttaaaatcgtttttaaatgaaaaatgcaacaacaaaattaggcgtaaattaatcaattagttaattatcaaggataattaaaaatttcacttttcggtaaatattgatcataggccccaaactcaaaaatgcttaaaaacggtcagaatcgatgtaaaaaggttcgaaatgggttggaaaaatagaattaggggtcaggatgaaaagtgccgaaaatggagtgccaaactcagctgggactcaagtgaccgcattataaaaagcagtcaaaagacatttaaataatttttctaaggtgatttttggcgctgataacgaatgtgacctttattttcaaaattccgaaccccgaacccaaattcgaacaaaaactcaaaatttataa

SEQ ID NO: 56836 - DNA, 2979 bp, Heterodera glycines
ttgttcccaaatgtgccaattgtggtcagagatgagctgaaagaacaagtgtcagcccattggaaaaatgtgattggcacagtgaatgaagacggaagtgaagatttgacggcacaatatgaacaaatttatgcgaaattattggcacaacaaaacaaaactgaatgggcaaatatgcaacaaaaagtgaaaaaagcggacaaacacaaattggtaaaaaattaaaattaaataaatttatttcaaattaaaaatttagtgcaaaaaatcggtgagcggacaaaaactgaaaattttggtggtatcgtcgcccatttttgacacacttccgcctaaaaaggcgggcggaactgaaataatgatttatgctttgaccgagtcgctggtcaagcttggccatgacgtaagtcattaataaaaattcaaaattagatttaaaaaaaaataattattttttcgcccatttatttgggtaattaatttaaaaacaattgacttcaaatttaaggcataaaattaaaaattcgcccatttaattggctaattaatttaaaaatcaattgactcaaatttaaggcgaaattaattaattattcaccatttaattggcttaatttaatttaaaagaaaaattgacttcaattaaaggtcactttgcttgcattgtctggttcagaaacgagtgcaaaactgtttgaaattccattcaaaacgtacaaattttattaatattttttggaaaaaaactttttttcagtaacccatgggcatgcaaagacaattgggtgaagtgtcaactgccagtaatttacaatcaggtaattaaatgtgtaataaacatttatgttcggcacggcacggtcaaattattcatccaatcggattttgtaaatttccgatttgttaccgagtttttttcgagaaaattggtaattaccgatttttctggggacaataactggactaaaaaaccgtataagaaaccatttaatactggaaattttgtgaaaaattaatatgatttctattaatttatcgattttaaaatttatatttttacaaaaagaaaatcataaaaaataacccaaaaatagttactaaacaataaatttttcccaaaaaattgactccaggaaatggtcaaacgacatgcacatgaatatgacattgtgcacttccatgacccgtcaagtttcatcgaattccggcactttttgaaccacgcggtccacacacggcacatgcccgtggacgacaccgtcttctttggcctgttcagtgacgtcccgcacatttcgatcagtgaagagcaacagcggttgacaccaattggtaaagacactattaatcatttaattagtggggcgtttaattacatcattagtgggtcttatccatgtgagcgttccctaattttggcaccaaaattttgcttttaaaaattaaattaagtgcttgatttgaactgggttggctcggtgcacaacggcatcaatcttgacgacttcaaatttgtggaagtgccaaagcagcagcagccttatttggcatggatgggacgaatgattccggacaaaggcgtcgatgtggcgatcaaatttgccatcgaggctggcatgaagctgaaaattgctgcccaaattgtggacgaccatcgaaaatggtggatgaagcgcattctgccgctgatcagtgaaaagcatgctgatctgatcgaatatgtgggcgaaattgggccggaacagcgaaagtgggcggagcgaaaagcatttttaaatatttaaatttaaataatttttatttaagcgattttcttggcaatgccaccgcatttctgttcacgccaaaatgggacgaaccgtttgggctcggaatgatcgaagcaatggccacgggcacgccggtgattgccattcaacgcggggcggtcggcgaagtataaaacataattattaataatggctttaatataaattataaaaaggaaaggattgaaaatatcagaagatttcaaattaatttttaatgtattaaaaaaaatttcattagggtggcattatatagattaacaaaaatttgccaaaaaatttcttcacaaaaaaataaaataaaatgacaaattaagcgtttcattattttgtcaaaaattcatccaaattaaatattcttagtataatttaatatctctaagattctctgtgagcctataaaatttcaaaaaatttcatttgatttaaaagaaattgtgaccaaaagttttaaaatagggttttaattttttttcaaccttcgtagactaataagaggctcattagcccgcagggaaaactaagaaatttttggctgactttttaacatattttcaccaaatttggcgctttttgtgtcaaatttaaaaaatgttctgaaatttggcagattgtcatcgatgacgtcaacggtgtgacgttcgattatgaagacaaccaaatgattttcgactttatcaatgtcaagcaactggttgcccgtgtgtcgaagctagaccgtgccaaaattcgccaaattgtcgaacagcgctggtccctggagcaaatgtcgaaaaattatgtgaaagtttatcgcaaattactgcgagaaaattgtttgtgatgaggaaattgatgagtgaattttatgaaaatgattagaaattcacatcacatcatatttatttttatttattttttgcctatttattttgtttatttttaattcttagctatgttttagaaatattcgtataaatttctagaagctatacatagttgatttttttcgatatcagaactgaataaataggatatttcaataatccagctgacttcgctggatccagagctggtttatcagataatcatgaaattaacaattggatacgtcctcgcaatgtattcctccgccctccgtctcgccccactacttgctccgtcttcgcatgctcccttttgcgaaagttag

SEQ ID NO: 56837 - DNA, 962 bp, Heterodera glycines
atgccttcaaaacaacataatttacgtatgaagatgaaggaggaccgacggcggacggagaaatctgtcagcccaggtcgctcacccgtcccagacgggagtgcagatgagaatggggtggtatcacacccgggcaacgtaacgcccaatattggtgctttgcaattaagcaccccggcttcttcaattggaagtagaagaagggctagaccctcaaacgccggaacggagtcaattacggcttcgcaaaaaagtgcgtcatcagttgacacacaaagcatatctcaaaatgccgaatccttgccgtgcaaaaagaaagcgaaggttgatcaagcagaccaaccaaaaaattatgaagcaattacttcaacgcctatttccacgcaaagaagctgtggaggacggccgaccaagatgaggcgcggcccaggcaggagcaaagctaatgattccatgaacgagagctcgtcaatgaatcagagttctgaagctattacaaatctgatcgttttgccaaatgtgactgaaaagataaacttcagcacagtgcaaattaagttcgccacatcgcgaaatatggcatgcaaaattcggagatgggccgatgttgggctttacgagcgtgatggcgaaacagcacaaggcccacgctctggcccaagattcattgagacctgttggaatgatctgacacagtttctaaatgatgcctttgttgtcgagtatttggcatacttggcaagtatatcacaacgaaaagtggtcgttgttgatccagttgtgtggcaaatgggcatagaccgggtcatgcaatataaaaaaatgacatttgggtatgaccctaatgttccggcagaagtcatacttttgccagtacatttccctggacactggactctaattatccatgatgtgcaatttggcactcattttgccgattctttgcctaccccatatggcag

SEQ ID NO: 56838 - DNA, 73 bp, Heterodera glycines
atggaatatactgagggtaaagatttcctaggctcttcgtttgccaacaccgaggccatcaaaaatactactg

SEQ ID NO: 56839 - DNA, 601 bp, Heterodera glycines
atggctgatttaaagaaaatgaaaagagatacagaggcagagaaaacgtgagtaaatagagcaaagttaggactataaaaaattataagaaaaaaattttattacttcaaaaatgaattattggagggccgagtctaaaaatggtctccaaaaacggcatttttcaagaccatcaaataacaaaatgttttaagtggttttggaaattccgaatttaattaaactaagtaaattgaccacgctgagtccgaatatggctcggggtttagatttagagcccggtttcgggttccccgggagttgcggaaatgggtttagaacagggctcgtatccgtccttggatgccaaggacgtcctttgaaatgagcatttaaaaaatggaagaaataatcaaatgaaatttgacaaatttttgaatttctaacataccgcatttgctctttttatccccccggggggattatttttcaacctcctcagaaacggggggattattagatacggggggaaaaagggagaaggggggattatttttcgacagatttattttgtgtaaaatttttgaacatgtcgccaaaaaatgtcatcgcgtcaaaaaaa

SEQ ID NO: 56840 - DNA, 441 bp, Heterodera glycines
atgaaattatttccgctactattattaattattttatttttaattgacaaaattggatcagaaaggaaaaaattgcaacaaaagtcatttggcgaaatatttggagaaaaatggcaagaaaaagaagaagaaaaacgaaatgaactcaaaaaaagagaaataattgcaaaattttataaaataaaagagaaaattaagcaaaaaggaagaaaattctcaaaaaaagaatggaataaaattaatttgaaaatagcaaaaaaattgggcacaaatcaaacatatattcaaaaatggattaaacaatttggtcttcaaaaaaataaatgctataaatcaaaaagtgatgaagaaaaaattgtaattgtgcaaaaatttattaaaatggcaaatgaatataagcaaaagagaaaatattcagcaaaagaatgggaccaaaattaa

SEQ ID NO: 56841 - DNA, 912 bp, Heterodera glycines
atgtccgcaaaccgagagcagctgactgaaaatttaaaaaaaatcatcgcactccacaaactccagcaagacatgaagctcatccgcgactccatcctctcggggaactttgccgtgaacgaaatgggaaacaacaatatgatagtgtggacggtgccggtgccacgaaacgcggtaaaattttgcgaaacaacaaaaaataatgaaatcttatgtgtctttcaacttcaggggcctcaaggggtcgcgccgccgcgccctttggcaccgtcttgcccgccgccgccaccacaattgccggttttcccgccgccgccaccacaattgccgtttttaccgtcgccgccacaaatcggcatggcgccgttttgcccgcggccgccgcaaatgagcccagtacttgcgccactcgctcttccgccgctggcaccggcgccacttccgctgccatcatgctcgaccttcgcgaacccattcggtgtccgcgcaccgccaaacaaatgcgcggtgtgcggacgccgttttctggcgcctcgtcgacgtgcgacaacggaaaagctgccgagtgcaaaaaaggcgcgggttcacgggccagaggagccaatggacgaggaatagtgggtggcgtggtggggagtgaaatttgaatggtgatggtaatgcatatgtaatagttatgccattttattttgggtctcttcaattttaaaaacgaaaagtaaattttagatgatttaaaaccacattttagcaaagaaataattggattttgcctgaaattgttaatacaaattggcaccttgacttacttttttcacccaacatttatgattacttttattttgagttttttgtcttaaatcatttttttttaagtattttaattcataaaatggcatccctagtattaaa

SEQ ID NO: 56842 - DNA, 612 bp, Heterodera glycines
atgaaattgatagaaaatatatctattatttatagaagaaaattaatgaatattattcatcaatgtatttttcacagttttactacgttcgaaagcaagggtgcgtaaacagcttaagaaaaaaatatatgtaacgtgtgaattcaataataaaaggaagcaattagaaaacacgtgaataaaaaacaattaattaaataaattaattatcattatgaactaaatattgacaatgaaagccgtcgttagtggaaaaaaaagaatacaacatatatcaactttaagcatatttcaatgcaattataaaataaataaaaccgaaaaaccaaaaaaaaatacaaaaatgataaaattaaaatatattacttaaactacagattatcaaataattttttaaatttttccggttatagaatggaataattaaatttttattcaaaattagcaatgcttatattgcagataaatcaagaaaaataaaaagattggaaatttaactgattttaatatattattttaatgtttctataaatttatattatttttaattaacaaattctaaaaataataataatttcttaatgaatcattaggtaaaaaaacaaaaataaa

SEQ ID NO: 56843 - DNA, 73 bp, Heterodera glycines
cagggatgtgccgagccagacaaaatccgattccgattaaatcgccgattccgattatggccaaaaatccgat

SEQ ID NO: 56844 - DNA, 1032 bp, Heterodera glycines
atgcccaccaactatgactatcatagcaagcgattatggaaccgctcatggaacacaaagtgtgtggcactaccataccaaagtgcggaggtatggtgtaggcatctctgtgtcgggtaattactcccttcacagagcatttgcgccaacgcccacagcacatatgtgttccgtctacgcggattttaatccggggtgttgagtttgagcagctgcgcgttcgacactgctcagtgactcacggtcctccgggccagccagtcccggttattctctcgctgtaccaatgcagcccgtaggcagggcacattagggctaggaaccgccacccccgctgctaggaacaggcacaccttcaccctcaaggccagcgagtgaagggcccccgtccacaccagaccgactatctggctgggcttaaacatcgctgtgacacccggcgggctatgacggaaacatggtttcggtcaatcactgccgcagccctggataccagcggaataagccccgtggacagtgaacgcccgtgcccaccactctgggaagtaacccagtaccggggcaggactcctcggtttaaggatggcccccaggatatttgaaaaggcttaacaaatatcctaaaggggtttagtaccgagtaaaccaacaaaaaatggggtgagaaaggacagtacaaagtacttatgatcaatgaaaatgaataaaaaacaaggggaaaaatgaataaaaaaggaaaaaaaagagtggaaaataaaaatattttaaagagggaaaccaaaaataattaaaatttggaaaaagcggaaaattaatgaaaaataatttttaatttgaaaaaaactgaacgccaagaatttaattaatttttaaatttcaaaatacagaacggcaagaatttaaataatttttaaatttgaaaaaaaacagaatgccaagaatttaaataatttttaaatttgaaaaaacagaacgccaagaatttaaataatttttaaatttaaaaaatagaacgccaataatttaaataaa

SEQ ID NO: 56845 - DNA, 703 bp, Heterodera glycines
atgagccaattttccgacgattccctcccccctacccttgatggaccgtattcccctgtcggggatgatggaaccgaactgatggatgatgcgccgccgctggaaaacgtcatcaaacacctgccaaacaccgtacgtttttgcgaaatgtttttaaattttcttttctaattttgtgagatcgtttcaggttgtgccgtctgaagagaatgagcgcaagacccgcagggagccatcaattacccgcgaattggacgcggaattgttcaaccgagatggatttgtgtgtttatccgccgcacaggcggaagcgggacggttcaaaggtgtggttgtacaacttttttttaattttaaaatttctaactttaattaattattcgctttatgctatgaaaagtatataaaaatttttttttatttgtactttgattaattgaggtattttaaatgatgtttagcgtttcgattcattggccaatttttgctgagcctaacgttcggcgctgtttttccggaggacattctgcgcaacctctttaccatgtgcctttcctacgcagtcgagggggccgaatcgatgaaaatatctgcggaccacttcattttccttctgacgtcaaaacaccttgactacgaagtggctgtacactttaaaaaaaatcgacaacacggcaacggagaggattctgactcgttttga

SEQ ID NO: 56846 - DNA, 598 bp, Heterodera glycines
atggagcccggagcgaagaagcgcagaaagaggaagaatgccgaaaacaccgacggcgaagccatggaatgcgaagaagaagaggatgccgtagatgaggacgccgagaacaactggatgctggggtatgaagaagccggggagaaacccgagtcggtgacaacgtacgcatacgcccacgccggtatatttgaaaataaaatttttgtaaacatcgatatgatcacgtgctgatttatggtgaaatgttgcgcatgggagtccgccccgaactcatccgccaaggcaaccatctcctggaaatgaaggcgcgcaaaacaggagtctacacacccaccgtgtttcgggacaggtaaaaattcgaagatttaaattatttaaagttctattcattcagttataagctgataccgatcaaattggcaaattttgtcaaaacgtttggtctggaaattgagggcgtggaaaacaagaaatattttccacacaaattcaataaggtaaggataatttattgaaaaattgataaaaaattaataaaatttaggcggaaaactacggcacagtcttggaaaccttgccaccgatggaggactaa

SEQ ID NO: 56847 - DNA, 1183 bp, Heterodera glycines
atgtacccgcgcggcttgatcgaccccgagtacaattgcgatcattttgaggactctgaaaggggtgagtttgaagcttgtaattaagcaaatattttttcttaataggcttttgacaacagtcacacacattgagctggaagccgctctccgctcgtggtacaaggtgacgcatgtgtaccgtgcctatatctggcctctggcgtgcgattggagcaatgggctgttccactcgtacctgctgaagtttctcaaaatgaaatttgaaggtaaaatttaaaaaaaattaataaaaatcattaacaaaaatttaagcaagcggatatccggcgtcttgtacggaggctggcatcagcgaggaggagtcggaacggcgcaagcaggaccacatcgacaaggccaaacaaaaggcccacgttcatctggaggctgaccggatcaagcacaatcccgggctccgctacctgtccaagttgtgcttaaactcgctgtggggccggttcgcacttcggtaaaattttggttaagaattatgaaaaaatacaaatcctacagaaaccggcttacccaaactcgaaatcgtcgagtgctatgccgaggtggccaaactgctcaccaactccaaaaattgggggcagcagcatttgttcaacttggcggaaaaagttttggatgggcttggttaaaaggggcaaaaaagagccttggggggggaggccccccccaaccaaggggaaaaaaaaaatttttaaaaaattttaaaaaaaacaaattgggaattttttcccaggggggggcattggccctttggggcccccccctctttgggggggaaaacccctttttttgggaaatacccaaaaaaaaaagggggggggggcccccccccccccccgggggaaagagccccccccccccccccccctcttccctccccctggggaaaaaatataaaaaaaaaaaaaaaaaaaaaaaaaaggggggagaaataattttttttataaatataaaagaccacgcgggccccaagatttttttttcttataacctaaccctccccgccccgcccggtggggggggggcacccacccccctccctcgggggggggggggaggggagatcgtgggggggggcgggcgccccccgcccgccccacaccccccccccaccccccccccccca

SEQ ID NO: 56848 - DNA, 58 bp, Heterodera glycines
aatttgcggtgtcatttgtcaaaattgtccccatattgacaatgcccaaatttaaaaa

SEQ ID NO: 56849 - DNA, 1527 bp, Heterodera glycines
gtcggcgagtcaaccatcggcgagttggcgtcggcgagtcgaccatcggcgagtcggcgtcggcgagtcaaccatcggcgagtcggcgtcggcgagtcaaccatcgggcgaggtggcgtcggcgagtcgaccatcggcgagtcggcgtcggcgagtcaaccatcgggcgagttggcgtcggcgagtcgaccatcggcgagtcggcgtcggcgagtcaaccatcggcgaagttggcgtcggcgagtcgaccatcggcgagtcggcgtcggcgagtcaaccatcggcgagcgagtcgaccatcggcgagtcggcgtcggcgagttggcgtcggcgagtcgaccatcggcgagtcggcgtcggcgagtcaaccatcggcgagttggcgtcggcgagtcgaccatcggcgagtcggcgtcggcgagtcaaccatcggcgagttggcgtcggcgagtcgaccatcggcgagtcggcgtcggcgagtcaaccatcggcgagtcggcgtcggcgagtcgaccatcgccgagtcggcgtcggcgagtcgaccatcggcgagtcggcgtggcgcgttgaactgttcccctagtgcatgtatgtttgcaaaatggttaggacgctaagactcattttttgtctttatgctatttttaaaaatatttcattttatcataaaaacaaatttgaatatttatttattacaaaattttgaaataattaatattttttattgcaattaaaattaatatattcatctgattttatttaatgctcatcactaaaatttagttatttttttagatttgtagactaattttgagagttaattgttttacgtaatgatttgcatttgaatgattttgcatttttttaatcagaattttttataggaaattttttctaaatttactttatcaggatattttatttgcttctttctttgttcggctgaataaatgaatgttaggaatattgtatttgaaagttattaaatttatgcttttgtttttaattagatttctgtttttattaattaatagattttttaaaaattctctttgattaaattacggttttagttataaattaaatgttttttgaatcttttttattatttttttaagtttgagatatttaaattcttgaattttctcgacttcacgatgaaaaaattcaatttattgacgtccaactgcgatcgaaataagctatattataatatttttaatattatttttttaaaattaaatttgtagtgctataaaaacaattatttacataaaaatttttactcaaataattttcacgtaattttttctagagttcttggaaaggtgatatcagaatataattttaaaatttcttacaaaattgaaaaaaatttatgtaccagaaattctgagtcaagatttacttggacaaaaaaaaattttgttttcctaccccttagcggatttaagaaacaacctagcaccaaaatcttttcaggattggatttttgaccgattagtttctttgaaaattaaaaatgca

SEQ ID NO: 56850 - DNA, 925 bp, Heterodera glycines
atgtatggtaagtatgatgacatgaatccatgatcagatcatcccttcttggtgatcgcgatatttttttaatcccgtttttcatcgaaaggagtccattgtcaaattacttgcagattttcacaatttttctcacattaatccaaatcctggtaatagtaccgatggtagttcccccttttgaaaaaaaaaatttgtgatttcaaaataattaaaacaagtttttaggggttttctgggctgctgatcacgaatcttgcgtccatttcgaccaatccctaaacccggacccaaatttgaacaaaaagtcgaaaattaaacttttcgacttttgaatttttggttcaaaaacggcttaaacacatagaaacaaactaaaagtcatcaatcctgcaattatagatcaattaaactatttttatacataaaaacgcaaagttcgaaaagtttaattttcgactttttgttcgaatttgggtccggatttagggagaccaaattcaacattcttggtatcattcgaaagcccttcagatgcactattagcctgcaaaattccaaaaaatttcgttcagtataaaaaagttcgaaaaaaatttcgttcagtataaaaaagttcgagccaaaaaaagttggaaaatttggtttgttgaactcttctgaccataacttttttgaaccttaacggaatttttccaaattttgtaggctaatagagaacacttagggctatcgaatgataccaagattattggatttggttgacaaagaaaaagttatagttcaaaaactcgccccacgcgaaaacgaccccgacccaaaaaaaaatgatggaatgaagtgaaaaatgcgtaactttaaattttaaagtagaggaagttagcggacagatcaaacaaaaagacatttttatgaacacttcata

SEQ ID NO: 56851 - DNA, 1157 bp, Heterodera glycines
atgaaactgttgccgactgtgctccaacctgtgctatttttggcattcgtcgccaatgttttctcatgtaggggcacaaattttaatgaccaaaattttaataccacggatttatagaccaagagccgatattaccggtttggtgctatgaaggcatccatgttggtggccaagcgaatattttgacagtgaacatttccggcagcgacaaaaaatcgctcattttcaatggcgaaatgcgaaaacacctttgtgtaatatatcaatcagatagtagacaggacgtgaaagaatgtgttgaacacgtgtgctataagggtaattaattaattaaataattgatatttttacgtttattaattagaatattttgagtagctctgatttattcagtaagtccaaatttgtcttgttcaatttcatagtattttaaacaatttaaatagataaaaggctgaatataagtttggagcgaccagcccacaaaaaaaataagccaaaaaatttatagaaaaaagtaatttaataaaaaaaaattttatttatccggtaataatcattctgaatttaaagtttgattgtcatctcaaaaagtaattattaatttttcttttaaatttatcaggtaagaatcatttggaattaaagtttatttatcaaaaagtaattaataataattattattattttttgatttattaagaatcattttggatttaaagtttatttatcaaaaagtaattaataataataatttttattttttattaagaatcattttgggtttaaagtttatttatcaaaaagtaattaataataattattattattttttaaatttattaagaatcattttggatttaaagtttatttatcaaaaagtaattaataataataattattattttttaaatttattaagaatcattttggatttaaagtttatttaagattgttattaattgtagatggtgaactgcaaatggtgttcaatctatgcgctaagcatggctatagtcaagtttgtactcctgatgatgaactgattggacttgttgtggcgagtcaatgccagggtggtcaatacaaatgctcaagacgttacattttgaagaacgaccgaaccatcccgccggcgcaacgtgtaaaacaaactg

SEQ ID NO: 56852 - DNA, 1217 bp, Heterodera glycines
atgtcattgatttggaaatatttcaaattatctggtcgcgttgctttttgcaatatttgcgattttaaaaaggattatccaccaagagctccgacaacaccgttaatttctcatttggagcacaaacaccctgatttgcataaagagtttgcaaaaaagaaaaaggattctgctgcatttgaccaattgagcattaaaaggctgggcaacatttctagccattttttattttaaaatttagggctttttgttcatcagctccaagctgttcggtcccattaacaattgccgaagatgattttgatggcgaatcagttcagcctccaaagcacattaaatcgattatactgcactcattacaagcaaaaagttattccatttaggtttttgtttttattgataatgattttaggcccatgggaaaaagatggcgaaaaaactttaatcataaacaccaaaataatggaaatgatcgcagtggacctgcagccactttccatggttgaaaatgaaggattcagacgacttattcacgaattacaaccgaaataccatatgcctggccgcaaattttttacaacaaatttaatgccgaaaattgttgaaacattaaaggtgtttggccgttttaaattcccgaaatatataaatttttaggctcgcattaaaaaggacattaaaaaaacaaatttcatctctttgactatcgattgttggagttctaaagatgcagcgcactctcttctttcagttacctgtcacttcatttacgagggccaaccaaaattcgttgtcttggctgctaagccaattaaaggttaacaaatgtcatcatattttattaaattattaaattttaggacggcataacgctactgtcttaaaggatttattaatgaaagtttttgttgaattttcattagaaaagtcaaaaatttttgtcgttttacgggatgctgcagaggtgatggtcaaagtttgtaccgaccttggcttaaaatcaatcgattgctttgcgcacaaatgcaatttggttaaatatagtttatgcattatgtaaccttaaattatgtattcaggccatttgggacggtgttcgaaagttgaatgatgacgaatcgacaaaaagccttcttgaacggattaaaaaattagtcagaaagcttaaaaaatcgcctgtacagaaagaacaggaagggaatttacaaaaacttctg

SEQ ID NO: 56853 - DNA, 358 bp, Heterodera glycines
atgtcggaaagtccaaaaaaagtgggaaaacaaatggaaaaagcaatgtaaattttgatagaatcaattttcaattaattcattaattccgcgttcgtttagcttcatcactggcgacgattggctttcggtgttccatttggtccccccttttcagctgggccttggcattgcgttgctcagccaccgatttgaccgattggtggacgaacacttcaaaacgcggcgttgggcgttggacgaaattggaattcgtcgcacatttgaaaaggatggccaatatgagatgcaaattaccaattccaaattggatccgtcgccaattgagacaaaagtgttcgacttttacctaaagtga

SEQ ID NO: 56854 - DNA, 2199 bp, Heterodera glycines
cattccagtcactgggactcaattctccagcatttcaatcactgggactcaattctccggcatttcaatcaccgggactcaatcctccagcattccagtcactgggactcaattctccggcatttcaatcaccgggactcaacccaccagcatttcaatcactgggactcaattctccagcatttcaatcaccgggactcaatcctccagcattccagtcactgggactcaattctccggcatttcaatcaccggcactcaaccctccagcatttcaatcactgggactcaatcctccggcatttcaatcaccgggactcaacccaccagcattccagtcgccgggactcaaccctccagcattccaatcacttggaatcactcaatccacctgcattccaatcactgggactcaattctccagcatttcaatcaccgggactcaatcctccagcattccagtcactgggactcaattctccagcatttcaatcactgggactcaattctccggcatttcaatcaccgggactcaatcctccagcattccagtcactgggactcaattctccggcatttcaatcaccgggactcaacccaccagcatttcaatcactgggactcaattctccagcatttcaatcaccgggactcaatcctccagcattccagtcactgggactcaattctccggcatttcaatcaccgggactcaacccaccagcattccagtcgccgggactcaaccctccatcatttcaatcaccgggactcaacccaccagcattccagtcgccgggactcaaccctccagcattccaatcacttggaatcactcaatccacctgcattccaatcaccaacaataaatctcgccgattcttctgcataccaatcgctgggactcagttctacgaccttcaatcaccgttactcaatccatcagcactcgaaacacctggactcaatctcaccaattctacataggcaaaacattttaacattctactggcctttttgtttcttgtcatttcttaaacaaccctcggcatttcaatcatcggaactctatctcaccaattctccggcattccagtcactgggaccaacccaccagcattccagtcactgggactcattctcctgcatttcaatcaccgggactcaaccctccagcatttcaatcactgggactcaatcctccggcatttcaatcactgggagtcaaatctacgagcattccgaacactgggactcaattctacagcatttcaatcactgggactcaattgtcgtgcatttcaatcaacgggactcatccctccagcatttcaatcactgggactcaattctccagcatttcgatcactgggactcaatcctccagcattccagtcactgggactcaattctcatgcatttcaatcactgggagttaaccctccagcattccagtcactgggactcaattctccggcatttcaatcactgggactcaatcctccagcattccagtcactgggactcaattctcatgcatttcaatcactgggagtcaaccctcatttcaatcactgggagtcaaatctacggcgttccgaacactggtactcaattctccagcattccagtcgccgggactcaaccctccagcatttcaatcaccgggactcaacccaccagcattccagtcgccgggactcaaccctccagcatttcaatcactgggactcaatcctccagcattccagtcactgggactcaattctccggcatttcaatcaccggcactcaaccctccagcatttcaatcactgggactcaatcctccggcatttcaatcactgggactcaatcctcggcattccgaacactgggactcaaccctctagcatttcaatcactgggactcaacccaccagcatttcaatcactgggactcaattctccagcatttcaatcaccgggactcaatcctccagcattccagtcactgggactcaattctccagcatttcaatcactgggactcaattctccggcatttcaatcaccgggactcaatcctccagcattccagtcactgggactcaattctccggcatttcaatcaccgggactcaacccaccagcatttcaatcactgggactcaattctccagcatttcaatcaccgggactcaatcctccagcattcca

SEQ ID NO: 56855 - DNA, 304 bp, Heterodera glycines
atgagcaaaaatacctcaacaatgttattattttctctattagcaaaccgaatatttcttgttacaagcggtgattagtgaaaattaataaaaataataattcatttaatctatttcaagcctaaaatgggaaaatattcattttctaaattaaatattaatctttcttttcagtcaatgatttgacagaagcaattggttccatgaaggagaaattgttcaccatttatcaaaaatatgacactgactttacgccaaatattccttcaattcttgaaacggaacgtcaagaattttttaacaa

SEQ ID NO: 56856 - DNA, 5763 bp, Heterodera glycines
atgcctaatcttcggtcgcctccgcttactcgtcaaagagcactcaacctcggcattcgtctaaataacaacgcaaaccagcagggggggcaacaaattgtagaaccacagcacctagcagaccgacgtttggaaaacgaggctcgccataattctgtctcttcagttgcttcatcacttttggacccaactgaaattcgccgacgcctgctcatgtctggaattggagaaaatgctgctggagttcagaacggaccgcaagatgagcaacaattcgacgcactgctgaaccagcatggtaacgacttgtttcaaaatgaaaatcggggagaaaattttgagagggacgtttttcaaccggtggtcagagaaccgccgttgcaattttcggaaaattttgaaaatggtccgaggcaatatgagttagttggggtacggcctgttgtgacttcgacgccccatgcggtgcaaccacaaaggcgaccaaactctgaacccttaaacccgggcttagttcgtccccaagcgatgtttctgaatagttttcaacaaaatatcgccgcaaatccaaacggcaatcaacggcaaagagccgaacagcgtttcattgatgaagacgaacgacaagcggctctggttagacaccgccaagcaaatttgacccattatgtgaacaacgaccgcgattttaacgcgtttcatcctatcgctggtgctcaacacgtttggcgcgcacaaattcagcatgtttcatacccaaacaacccgcaaatcggcgaggttaaccctcaacaaattccgcgacaaaatcaaggatttgtagggaatcaacaaatttttcgtcccgttgcggtacgaaatgattttcaccctgaaaattatggcgacaatttcaacttcggacatccagaacagcaaaattttggtcagcaaagaactgaacaaattcaaatcgcaaatttggaatatgttttgactttggaccgtctgccagagctaaaaggaaatgaaggagcggataaagtaaaaaattttttcaaaaaattttcaaacgcaacggaagaatggcccgagcataaaagggttaaggcattagaaacgaaagtttcaggccgtgcagaacgtgcttttaatgcagcaataagctctggaccacatcgcttcgattcaattcgacgtgcaatgcagaatcagttggaagagacggattgccgtgagatgggagcatttgatgagctgatgagcggcgtaaagcgtcgttcgaatgaaaatttggacgcattggcggatagaatccaaagcctcgtctcccgtgcctatccgggattgacacaaaatctatgcgacgattatgccattaaacatttcatcagagctctagcaaatcctgagctatctctaactttggaaatgtcgcggaaatcgggaatgtccttcgatgaattcgtggcactagcagctcgtgccgaatcgattcagcgggcgaccagagtgtcatccaatgaaaacaaatactcggataatcggaaccgaggcttttatttttcgaataatttctcaagaccgcaaagttctgagttccaaggatactcacaacaacctcgaggaaggattgtttgctacaattgcaatgagccgggtcatctttctcgggattgtaatcagcagatcaaagggcagcgagtcaacagcaacgaaaatgagcgaattcgcaatcaatttgcgacgggttcgaattctttagcgattcgtaacaacgaagagtcgccaaaaaacaaccaaagaaattttcaacccaaatcacagaattttctcaaacaaaactgcatcgttatgcaggaggaccaaccacctgatgcattttgctgtggtgtgcaactgacatcggaggtttcgaattttttggagaatgagttgcatgagaaaaatcagagtgaagagtccaaagaaaaggaccatgtaggaaaaattttggtgatcagagtggagacgaacaatgttagaacggatgcaatgttggatggaggggctcaaatttcattgattggagcagaatttctttacaaattgataaaggagcacggcctggacctgagaaaatccggtttttctcgtacgaaggcacgaattgctgacgtaaacggacaacaattgaaatgttttggaatggttacaataccaatttcaagaaaaggacgcgagaaaacgccaatttgtttccatataacaacggcgcaatttggctacaatttgctgtttggtacgaactcaatgtcgaaattgggctttcttctatacgactcggtgaacaaagaaatgattgaatttgaggaagggcagcaaaatgatgggaatgcagctcgaattattttttctacaaaaatcgaacctcgaacgaccaaattaattgaaattggagtagacaaagaatggaatggtaaagatgtgatcatcttaccttcaaacatcgaaagcggtgttaaagttgagccaacagttggaaaagttgaagatggcagagtgattgcacaaatcacaaattattcgaccctttcgcaacgcgtcaatgaaaaaacttatatcggcatgattgaaaaggtggacgagatttttgacaccgaaaattcaattttgtcagctgaaatttcatcaacaatggcttacggcaaaaacgaaagtgggaaactcggacgcgctgatcttcacatcggagaaattttggggcatcataagaccgaactgttggaacttataagccaacacaccgaaattttcgctacttctgaacaggaattaagccaaactgacttaatccgtcacaagatcgaaacgggaaatgcgcttccaattaaatcgcaaattcgcccagtcccatatgcctaccgagaaaaggtatcggcaatgattcaagactacttaggccgcggaataattcgctcatcaaattcgccatgggcttccccgattgtgatcgtgccgaaaaaagacggaacgctgagattttgtgtcgattacagaaaacttaactctgtaacagtgaaagatgcatttccgctacccaacatcgacaacacacttttagccttgggcggaaagaaggttttttcgactctggacttcatttcgggatattggcagattaaaatggatcgtaattcgattgagaagacggctttttcgacagagtttggtcttcacgaatttttggttctccctttcggcctttgcaacgcagtggcaacatttcagcggtttatgacccgactttttgcggaatgtcttaacaaattcgtctttatctacatagacgacgtcttaatcgcatctgaatcatgggacaaacacatcgaacatctgaaagaagtttttaaacggatagaaaatgccggactgaaattgaaagtaagcaaatgccattttgcttcaaacgaacttccgtttctgggccatattctctcccgtgaaggattgaaaatggacatggcaaaagtaaaacctgtcctggatctgcccattccgtccaccaaaaaacaacttcaatctcttctcggttttctcgcatattaccgcaaattcatctacgggtttggcggaattgctgctccactttattcacttttaaaaaaagacataaatttcaagatcggcgacttagaaaagaaagcgattaatacgttaaaaagcaaaatcgtcagtgatgttatgcttcattttccaaacttcgaagcagcgaaaaatgacacaacgagaaaatttattctcttaaccgacgcaagtaaaattggtattgccgcaatactttgtcaacccgacgaaaaaggcaacattcggcctatttactttgcatcacgacaatgtaaaaactatgaaagcagatactgcccaacagaattggaggctttggctgtgcgattcggtaccaagaaattcagccaatttatcaccatgatgcccacaaaaatttttacggaccatcgagcattgataccaatgttcaaaagtaaaaaggaaacgggaaacagccgtgtggacaaatggctgatggaaatgaatgcgaaattcattttggaagttgaataccatgccggaaagaaaaatgtgatcgcagatgtactctcacgctctctcgctttaaaatgtttggattcgccaagtgaagccgaaaaagtcatcatcggacaggttcgccgatctgaaaatggtcaaagacctcaagaaatcttatcgcaccaggaatgggtgaagaaaacgaaagagagcgagctcggatttctatatgatttcctgacaacaaaagtactcccaatagaaccgaaaagtcggcaaaaactggcatcttcacttcacaatttcacaattataaatgaacttctttataaatgtggaaaagacgctgaacttcgccttttcgtcccgtcttcttttcgacaaaagttgataagagaacgacattcgggtgtttgttctggacatatgagcggaaagaaaatctttcttcagttggcagagaagtatttttggccgaatatgtatttcgactgtgttaaatctgcatttcaatgccgaatttgtgcgcatacaagaaacccgaggtcaaatgagcctcctctgaaaattgtagctacggcagaaccgctcgaattggtctgcctcgacattttatcgattggtcccgcgcactcgtgcaacaaatatattttggttgctgtagaccacttctcaaaatatttggtggcaaccgccattccaaataaaagtgctgacaccatcgccaaagagttcgttaagaactttatcttaattttgggagtgccgaaaaaattacacagcgacagaggaaaagagtttcttaacgaaactctaaacgaaattgccaaagttttgaaaatggagaagagccttacgtcaggctatgatcctcaggcgaacggagtgaccgaaagggtcaaccagacgattttgagcatgttaaaacgctcaacagcttcaaattggacgtgggatgatcgccttccgttcgttgtattttcatataatacgaccccatcagaaatgacaaagatttcgccacaccatttgatgtttggaaaaccggccaacttcccgtccgatgtcagtttccctgtaaatccacagtacacagttgatgtggacgaatacatacaattgttccgagaaaacatcgcccatttggtcgttaaggcgagagaacactcagaaaaagaacggcagaagatgaaaaataactacgataaacaagcaaaagtaactgccaacaaatttgaaattggacaaagagtaatggttatctttcccggcacaaataagcgttcgccgcatcataaaataatgtggaatcattttggtcctttcaaaatcttggaaatttctgcttcagcagcgtctgttgtcccaatcgataaactgaattcaaaaccgttgaaagtacccattgagaggatggttagagtgccggacggagtcccggacataagcacgcttccgaaaggcaaaaacccgtataaaaatcagcttaatgcgcttctgtgcattgtctgtctgatttacaacgaaaaacttgaaaatgagacggattataacctgcttaaaggcaaggaccatcctcaaaatatcagcaaaaatacttctttccagggagatagaatggattctcaaaaaagtccgaaagtaaacggaaaaaatttgatgggaacggaaattaaggattttttgggaaaattcgcggaattgtggcacaattga

SEQ ID NO: 56857 - DNA, 1591 bp, Heterodera glycines
atggaaaaccgcgggaaattgtgagtgaaaatattgtaatttaaacataaaaggagaaggaaattgaccaaaaataaggattgtttacccaaaggaatgtaattcattacatttaatttacttttcctgtcgtttcatctttttcaattaagttcattgtcaatctgatcaaccaatacggccgtgaacacattttgggcaaattattccaatcagttgccaaaacggttacatttgacaatgtccgttttgaacacttcgacttccatcgccattgctcctcgctgaattgggacagattgtcgttgctgcatgagagattggcacccgaagttaacaactttgggtaacatcattcatctttttacattacgttttcattattttcagctttttcttgaccaaattggagcgtaaaagtggtggtaaaaagtccgacggtctttgggaggattcgagcgcagttggggagagaaaatatcagaacggattattccgaacgaattgcatggagtgagttaaattaatcattttcctaagtaggcgttaattacttccccaatttcagttgtttggacaggacaaacgttgttcaggcacttttggccatggaatcattgcggtagttttttgggattttactataatacgccattttcatcagtcttcaactccaaagcattggcattttgcctcaaaatgtgaaaaactttgatgcctggcccggctttgtttatactttcaagaattgtaaatcgttcatatcagtggtgaattcgttttgataacgtttgttcagtgtgggccgataacggcgatgactgcagcaaacagtacgcgggcacagcggcgctgaaggcattttttggggggtgggggaatgatttgttcaaatttctttcgtcttttacagacggattacacacggatcggacgacggacattcggcggggcattgcaagacgcacacaattcacttatgcgctatttcaaaaacaattggagcgacgggtacagacaggtcaatggcattggcaaattggagataattcaccaatcaatgggtggtgtttaggacgcgatcaatctgttcctcggcaattacgtggtgaaccgatacaatttgcccgctgggttggaccattcgccagtcgctttcgatttgaatggcttcgccattgtgttctccgtgataacttttgccatgacaatcctttgtcttttggtgtccggtccgttttgcccatttttcctaatttttccccaaaattcagaaaaccctttcatcgctttgttttggctggctctttctgtgatgatgctctctttcatttggctccatggcgaagacttttccgaccgtcctcgtcttgttgtgtctggcaactgatgctaactcatcaatgtgccaattttggatgtgccgtttgaactccaaacaaagaaaagaaagttgtgaattttcccccaaactcgttttctacaatatgccgataagtacagtattcaacataatgtccggtcagttcggctttgccatataactcattaatgtatgtgtgtaaatgtgcttattattaggttgttttga

SEQ ID NO: 56858 - DNA, 87 bp, Heterodera glycines
atgttggcggctttgaatttttctgatcgaattttgggcggaattcgtcatccatcgcccgcattcattcgttgccacaatttggcc

SEQ ID NO: 56859 - DNA, 831 bp, Heterodera glycines
atggaccgagaaaacctggaagattcaaagaatgagaacaaacaactaaaggagaaaatccagaaacaagaagaggaaatggaaagaatgcgaaaggcactgaatgaagggcagagttcgtctgcgggtgcgggtacttcatcggccaaggttttgagcgattgtacgggaaggggggggggtgtttacaggggcgtcacggaaattgtatggcagttgcaattggggagggaggactatcaaaatgttgggacttggtttattttattttttgggtaatcaattgtcaattaatcggaaacaatttacaggcgtcagcgtctttctctgatcagaaaattcccgtccgtggccgtctttcgctttgtaaaagtgttaagtacgatgtaacactcggcgaaatcgaacgccgtgttacgggactcgagaagattactccgaacgagtacctccgttttctgcgcacacagaaggcaaaagggaaaggacgaaaattgcaggaagagatcgggaaggaggtttgtaaaacattcctaaacctgaaaagccaagagggacccttaggttttttgaaattttccgaacaaacttacttcggatgctaaaaacactgctgatttatttttactttattaaattttttgtccacagcgttggggaccagccattgctgctgcgatgcaattcaatctggaacgtgaaaagaatgaacaaacctgcttcactcctcttacagaaggggaggcatgcaaagcaagtttaagccatgggtgggggtggagaaactgttggatgattagccccaaaaagtttttcaaaaccaaattttga

SEQ ID NO: 56860 - DNA, 65 bp, Heterodera glycines
atgtcatttgcctcagtcgctggtcaaggcgatgggtacacacagcaggagctgttcaaatttcg

SEQ ID NO: 56861 - DNA, 418 bp, Heterodera glycines
atggtgatccgattcaagacatcagaaaaatttgaatgtttaacagaggaaaaatgggaaattccacctttaaagcaatacacaaaaaaagagcaaaccatcgatggtaagtcagcctcctcttcatgctcctcttggtcatcatcctcaaaatcagcggcatcggtcgccggaactgcgccaaaaattgataaattatttattgtttcagcgaacatttcggagccaacattgtgtgctgctcgggggttcgagccccgctagatgtggcataatttgttagggtgcaccccaaaatctcgccgccggaatctcgccggccgaaatctcgccgcagaaatttcaaaaaaaaaatttcaaacttagaaatttttcaaggaaaaaattcttagaaaaatttttttataagaaaatttaa

SEQ ID NO: 56862 - DNA, 213 bp, Heterodera glycines
aattttttcgttggatggaacaaatgaacatgaacatattattgacgggaaagttcaaagtgtggcgatcagtcagaatggcgacttgtacatgacgaaacagccgacccacgggacggaagagtccgccatttggaggtaattgcgtgggttttgttttcactgttctattactcttaattcagatcacacatcgatcatccaatagtctaa

SEQ ID NO: 56863 - DNA, 1344 bp, Heterodera glycines
atgttgaagcaggacaaagtgtggcaatgggcagattgtcaaaatgcttttgagaatgtgatcaagattttgaaatctgatcagttgctgacacactatgacccggcacaagagatcattgtatcggctgatgcttctgagcatggaattggagccgtgatctctcatcgcttttcggatggaagtctaaaagccatcgcacatgcatcatcgtccctgtcagcagcagaaaagaattattctcaaatcgagaaagaaggcttagcgattgtctttgccgttcaaaaattccacaagtatctcttcgggagacacttcgttctgcagacggaccacaagccgttgttgtccatttttgggaacaaaaagggaattaaggcttgcacagcgaatcgattgcagagatgggcaatcacattgctcggctatgacttcgaaattgaataccaaaatactgctgattttggtcaagcggatgttttgtcgcgtcttatcgctaagacaccagtgccggacaacggagtgatcattgcaaacattcgtgagagcaatgaaacgggagtgttgaattttgttacgaaaactcttcctctcgatcacagtgatttggctaatgccgcgaaaagtgatcaggcgatcaaaaatgtgaagaaatttgtctgctcacattggccaacaaagaacaaaatggccgcagacattgttccgttccatcgacgacgatacgctttgaccatcgaggatgaatgtctgctttatgcggacagagttgtgattccggcatcgcttcaaaaagatgtcttacaacttctgcatcgaggccatcccggaatgaagcgaatgaaaggtctcgccaggcagtacgtttactggcctgggatggacgaacaaattgagaattttgtcaaaatgtgcaacgaatgcacaatggaagcaaagatgccggtgaagactgagcttcactcgtggccgaaagctgatggaccgtggaaacgcgtacatttggactacgccggaccgtttatgggaaaaatgtttctcataattgttgacgcgtactcgaagtggcccgaggtcttcgaaatgcgttcatcgaattccgcggctacaatcgacaaattgcgatcactctgtgccagttatggccttcccgaaattttagtcacggacaacggcacacaattcgcttcaaaagaatttaaggaatttgtgaccgaaaatggcatcaaccatctgttctccgctccgtacaatcccatgtcgaacggacaagccgagcgttttgtcgatacgttcaagaggacatgtcggaagatcaagggagaagagcatcggaaatgttga

SEQ ID NO: 56864 - DNA, 1563 bp, Heterodera glycines
atgggcccaaaaaaagcgccgccggcaagacgaaaggccgagccaagtgaaggcgaagaggaagtgaagagaaagaaggcgaagagaattgtcattgaggatgaaccggaagaaggagcgaatgggacaggaagtcaattgcaacaaaatgggcatgaagaagcaatggcaccggtagtgaagggaggggacgaagaagacgaagtcgtttctgaagtaagcgaaaatgatgaattactgttttcttaatctaaaaaatcggtgaaaaaattttgttcttctcgaaatttttttgaagtttccgcggcgcgaatcgatataaatggaaacggaattttttaaatttcgatcggaatttttttccctttctctgtgcaggtcggcatctatctgttgccgttggctccgtccgatgctggtggcattgcaaagatggcaaactctgctggtgctgcttcgtcggtgtccatcaatcgacttcaattcccccagcagcatccgaatgtgctccgacgtcgcttcaatggcgcgctgtccggacgcggaaatgcacaggacggagaggaggaggaggaagaccaggaggaacagcgaaccgaccgaactggacggaaattatttgcacagtacaaggcccaggtcaaacatttgcggcttgggttcggctcggactgcgatgaggaggcgatggcatcggccgtcatgcccactttcgccggtggagggggaattgccgaactgctgacaaagtcagtcccaaagaaatgggttggggggaagcgaccgattgaccacaatgagtgcaatgtgggtgcactacgtttcccccgcccctccttcgagaattatcttttttatttccaaactgaaatatttcaaagaaaaaattcttagaaaattaaaattttcttaaaaaatttcgcggaggtgggggaacgacttgctgcggggtaatgtaccaataaaacgtcatttcaggaatcacactccgtcttcgtccgcccttttctcgccgcccccttcggcgtcggcctcttcctctgcaatcaaaggggggagcgatttgacctccgacgaaatgttcaccggggaaggcttttcccagcaaggcttgcttaattacgctgtcggattcttcaaaaaaggtgatgatgcatgtcatcatttattcttttctttctcaaatgacaatgctttgtcatttttagagagcagctcgtttcctttcccaacgaaaaaaatgaaaacaatcttttaaactttcattttcacaatatattttttctaaaatttcttccaaaaacattttattctttgcaattttcgaaaaaaaaatattaagtgaaagtttaaaaaattcgttttttttttaaaaattttcatgaggggataaatgtatttcactcgtccttttttccttgcaattttttaatttggattatcctttggcttcatgtctttgtttcaggtcgtctttttttgttaccggtggacaaaaccttcgaaatgcgaaagcccttgcgggggaccattgagcgcgagtcgacggcgcgtaccaccgca

SEQ ID NO: 56865 - DNA, 1067 bp, Heterodera glycines
gttgaacaacgaacagaatggaggccattttctcattcagcagcagccacgaacagaagaaaagacaaaacgccagatatttcactaattttgatttctgttttttcttgtgtgttggattggaaaccgtgtagtgctgcttcctctgcttgtgactgcccccgtcttatgtagaaatgctaattttcgaattaaaaaagcacattggacacataaatttgccaaaatattaaattcactattttttgagccacaaattccgcaatatgatttagaccaatttcaattctacaaatgatcatatgtttttaatttccttaaataaatcgttttttaaattccttacagaagccacgtgcaatgcaaaacaatgctaatcttcgttacccaattcgtttcatgcgcatgatggaaccatcgccaaatatcaatcgagcaacgagacgcttggaaatggtttccaaacaaaccactaaggcaagtcatctgattttgcaatctgagcaactcataaatgaaagtttttgcttttaggtggcggcaatttcgtcaaggcttgagtggcgcattgaccattttgaaaagctgatgaaattgatgaaaaatggccagaatctgatcagtaagtttgcttggttgttgatcaatgtgtgctttccttgtcattttaccttttgaaggcaaacagttctcctgcacttcttggttcctcagttgtttgggagctgcacgtttacccaaacggaaaacgcgaagaagacgttaatagtgcgtcgtaaaaaatatttctttccttaaagtgttccttctcccaaagatgtttcatttttcctgcgccaagtcggactgcagcggggcgaagacccagtaatgaccgaattccaaatttatgcattggacgcgagcgattgccggatcagcgtctgcagagacaccaaagacttttccaatcagcagggcaggggaaagtttcaagtgcatcgcgacaaaatgcttgcttccctccgacccgacggtaaaattgttttgttttttgctttttgccccaattcccatttgatttttgt

SEQ ID NO: 56866 - DNA, 1067 bp, Heterodera glycines
atggcgcttaaagccgagttggaaacccagaaaaggttggcggagcacaatgagatgcaggcgatggaagagaagacggacaatgaaaaacagaagaaaaatgaaaaggaaaaatacggtaaagaaaattaacaaaaataaaaaagaaggcttttttaaattctataatttaggttttaagtttaggcaaattttaaaatttcgttacaatgtttaagattctgtttttggactcactcaacaattgcaaaatgaacagacaaaacttttcggacggatggacgaattggagaagcaatttggaaaattgctgcagaaaaaggaggaggaaaattgtaaatacggtaggggtactgtaaatttcgaaaaaaacagaaattaatcggatgagaatttggaaaaattaattaattacatttgtacttgacaataataatggcaatttccatgttaagcattggctgaacaaaagcatttggaaggaaatggtgaattgaacaaaactgacaatgagaagcagcaattggtattttcataagattggcatttaaattttttcctaaaatttgaaaatgcgactcaattttatttgaaaattatgaaaataatttattaggacttttatttacatattttgaggttctcaacaaattttatatatttacaatatttcgtataaattactgttaaaaaatatatttatttacatactttttcataattgaaaatgttaaggaattttgcgaaaagtttgccaaattggagttggaattgagcgaaaagcaaaatgaaacacgtgggttcttatttaaaaagaaacattaaaattgctcaaaatattttcatgacaatttcataatttaatttaagattttaagagaattttattgttaagtttcgctcggcagaatcgctcaattgataaatgaggagaagaaacaattggacaaaatcactgctgaatttaacaatcgtcatgaagaacaaacggtgaatgaattggcattggcaaaaacttaaataaaaataatttattttataaaatcaaaaatgatttatttaaatta

SEQ ID NO: 56867 - DNA, 955 bp, Heterodera glycines
atgaaaaggtgaggtgatcagaagaaaacaatgcgtttcagaaagtttggcttatcaaaacaaaaatatggcatgaaagatttaattttttaaactttagcttcaaaaaattaaatttaaatgatggatttttataaaataattcaatgactcttaaaaggcaaaaaaaatttttagattttctaccctctccactcctccttgaatacaatttaaaagcataaaacttgttttgttttttgacttcgaaaacagatgttcaaacttttttaaaagttttgccttttaaaaatttagttttattctaaataattgaaaattttttgccttttcgaaaaaatgttcaaaattttggaaaacttaagtcacactttttaaattaatcatgtaacaaatgatgaaagtagttgagagatggggcttgcacctttattaaatttaattttcgcattttatagcgatgtgatcatcggattcgccccaaaacagccgaaaatgccattaaatggtacgcttttgaaccgttgcggcacttacgcatattcgagcactgccaattgtgtgcttaatgggtcttggaaaaatgctgatgtcaaattttttcctggcgatgttgtcggatgcggcgttaatttggccacccaacaaattttcttcaccaaaaatggccatcgattgggttaggaaaataaattaatggaatttttaaaatttattttagattttgcctttttaaacaaccatttgttggatgcttcttctgctgatcaattgttcccatttgttattttgtggaattctggggatcaaattgaggcaaactttgggccaaagttcaaattcgatatgaccactctttgaagaaacacatattaaatgtatttaatggatttcttgacgttttgaccaattttgttggttgcttattccatttgtcgaattataaagcttttca

SEQ ID NO: 56868 - DNA, 363 bp, Heterodera glycines
atgcttgccaagacatgtgcttccactccaaatatcggtaaaattttaaataaaataaaataaaataaattaccgtaacgccacccactatcactcaccattgattattaatttacttattcagttcgtacaccggtcagtgcaacaattttgagcatccaacatggggtgtcagccaaatgccattccttcggctgctgccacccatttacgagaacggcttcaacacgcctgtcggctgggacacgaacaaacgctattttgggtacggaatcgggggaggcggcaggggaattactgtaatatttttcgaccaaatgttgagatacagtgttctaagaattcggcgccaagaccaataaa

SEQ ID NO: 56869 - DNA, 1147 bp, Heterodera glycines
atgagtagtatagagcgtcaaaacctcgcgggtttctcgcgggtgtttcccgcacgaacccgtgcctatgggaggggtgcagctctttgatgttgccgcccggacattttcccgcacgaacccatgcctataggaggggtgcgtgccaaccgaaacctatgtgagggtctgtttctttgaagtctgccgcctggcggtttttaattttccccgaaacctcgcgggtttcccggcctatgggaggggtgcagctctttgatgttgccgcccagacattttcccgcacaaaccaaagcctatgggaggggcgtgtgccaaatcccaaacctatgtgtcctttgaagttgccgcctaacatccatttccccaaatcctcgcgggtatttttttttccgcgccgcgcagcgccgcggaaggtcatcaatcaaccacctgtcaccaatgtgacaggtggaggaaatttgaatttttcttttgcaaatttaaaatttttttttccaatcggagattattagcgtttatcaactccatacttccgcaacacttatacagtttattttgagggggtaatgagctgaaattgtaagaattatacaagctggccaaaccaaaataataaatggaaaattattggcgcttattgactccatccttctgcgacgcctatacaatttatatttctagtatatggagctgaaattttgagaatttcaaagtgataatgaaatgtaaatagagaatctcacaatttcagctacttaatctctaaataaatactgcagcaatattgtagaaggatcgggttaatgatattctctgatttattattttcacgaccatccttgtgaaattctcaaaatttcagctaattatcatctaaatataaactctaacagcgttgcggaaatattgagttgatagcgccaataatctccgacttattattttcacgaccatctttgtgaaattttcacattttcagctcattttcctccaaatgtatctgtataaatttgcttaagtaaattgtaaatcggagattattagcgtttatcaactccatacttccgcaacacttatacagtttattttgagggggtaatgagctgaaattgtaagaattatacaagctggccaaaccaaaata

SEQ ID NO: 56870 - DNA, 236 bp, Heterodera glycines
atgccaccaagatgcaaaacctattatggcaaaccgaaaacatttggattcgttaaaaaggtgctatttttaaagtaagtacccaaaaccgtgcgggtttttgcatttcctccccgccccgacgatgaggcacaatgcaggcgccgagtaaattaattgataatgaaattgtagaagtgcaaatttaattggtaatgcagcaaataatgccgataaataaattaatgaattggaca

SEQ ID NO: 56871 - DNA, 1758 bp, Heterodera glycines
atggcttacatttcttctccaggtccgccgatgccccccaaatgcttttccccatttgaacgactcaccctcgccggccttcgactcggccaatgcgctcgcctcattcgccgccttttgggactcgctgtcctcccagtctcagctgctcattctctccactgggctcggtgccgttgtttttgtggtgcttttgatcctctgtttgttctgctgccggagggaaaagggccatcggtcggggcgaaggcggaaaagcgacgcccgggggatgacggcacagcagcagcaggaaagcgcgtcgtcgatgctttcgggcagtgttgcggcttcgcagcacaaagtgcccgtgggtgctgctggctccatgcaaaatgggcacttgccgcaaataccacagcaccatcaccacatgttggtacagagttgcaacggcgggtccaccatcacaaacaggcaaagtttgcatttggcattgtagcactatgccaatgagtaaagccgatcatttttattgcttaaggctttctcttttgcggtaaacaatcggaagattaatccaatgaaaaatcccatcaaattaatttccctttcagcgatttgaacagcgctttctaccgcaaagtacaggacgaacggatgcgtgccgcgggtgtcatgccaaatgatgagctgctgaatccgttgttgccctacgggggcggtggcggcgacactttggaccgacacattccgacggcgccctttggcccaccgcagacgatgttcgagttgaagcactcccagcagcaactgcaccatgcacagcagcagccgtaccgattctgggaaaatggggcgacctctgccgacacaatgcattcggctggcgtgggatggcatccgccgtattacgttcaacaacaaccccaaaagcaatcctacggcagtgcgagtgccaacaccgaaccaacccaagcggagccgtaccaaatcgcgagcatccaacaagaacaggtcggtgacgacgagttggagggcagcaattttacataattgggcgattaactctcgagtcatttcgttatttttttttcttgcatttagttgcgtttctcggatcagatgatcggcgaggacagcaccacttttttgacactgggagaatgggaaggggcaatgatcagtggcgccactctcaaggcatcaatcgataaatcaatcgatcaaataaataaaacctatcaactaatccaatcaattttacctaattattaaccgttttttcctccaattttgggttgccattaaatcgctgaaaccgaatgttccgcacatcgccgttgagcagttccaagaagagattaaagccatcggcatgttcgagcatcacaacgttgtccgcctgttaggcgttagctttttgcaggcccgggaaatgtgtgccgtgttcgatcacatggtccacggggatttggtggaatttttgaaagtgcgggagccccgaggagggacagagtgagtcactgcaatggtacttctgaggaaaagcttcattttagcaatgatgagcaggaaagggcgcgaaacgcggaggactttctgagaatagccactcaaatcaccgcgggaatgcaatatttggccaacaaatgtttcgtccaccgcgatttggcggcacggaattgcttggttgccgatcagcaagtgatcaaagtgtccgacttcgcgcggatgaaaccgaaatatgcgagagactattacagagtgatcccataa

SEQ ID NO: 56872 - DNA, 956 bp, Heterodera glycines
  unsure (1)..(956): unsure at all n locations
actgagtctcaaggtggataataaatgaatggcatgttatcaataaaaaaacaaatcacaaaacgacagtcattattntaatcataaaataaggagaacaaatgtttttagatggtggtgttgactgatttgcatgctggtgctagtgtttatggcaagcaaatttcatcggtcgttaaacgtgtgaactctctcgatgcggatgttgtctttctcatcggcgatattgtcgatgcgccgcgcaaattgatcgaagaaagggttgaatcattgcgccatttgaaagcgcagctgggcacattttacgtaaccggcaaccacgagtattactacggcaatgcggaggaatggtttgcactgtttgaatcttatgggatccgcgttctgaagaatgagttcgtttgagcattgtcggaattattctacgcttccccttttgttaagtgttgtcaaatttaatggctattgtctgataggccttaacgacatcactagcgaggaaagtgggtgagcgccgaatgactaacattcctgatccattaatgtaaagacgtttcatctatttttagcattccaaatcacgtgatggatgtctcggtcataaactattgccctaaaaatgcgacgactatcgtattagcacataatccaagtgccgccaggaaaatttttgagttttcgcaatcaaatgaccatcctgttgatttgattttgtcaggtatcaaaaagcccgttcgttttttactttcatcaattgaaattgaggacacactcacaatgcccagtatttggttctgatgcctttcgcttacttcatcctcccttatctctatggcctctatgtgttgtcggatggcgcgactaaattatttgtttcggccggcactctcttccaaaatgcgccgatgaaaattccgtttatgtcggaaatttggtctattgaaattgaacccaga

SEQ ID NO: 56873 - DNA, 915 bp, Heterodera glycines
tttggtgcgtttcagaacactttctgaaaaaaatatttatgaattaattatgcaaaaaacaaataaataatgaactctcttccttaataattttcctgcaccgaaggtactcactcggccgtttggggtactcaaacaattatggggagcaaaaatccaacgcagaattaaagtacaggctatagggaagctattcccgaaggattcggtctccccataaatctgggcgcatcggttcggggggactgccccgaaaacaaaataaatcgattttttcaagtgtccgtttggggtactcaaacaattatggggagcaaaaatccaacgcagaattaaagtacaggctatagggaagctattcccgaaggattcggtctccccataaatctgggcgcatcggttcggggggactgccccgaaaacaaaaaaatcgattttttcaagtgtccgtttggggtactcaaacaattatggggagcaaaaatccaacgcagaattaaagtacaggctatagggaagctattccggaaggattcggtctccccataaatctgggcgcatcggttcggggggactgccccgaaaacaaaaaaatcgattttttcaagtgtccgtttggggtactcaaacaattatggggagcaaaaatccaacgcagaattaaagtacagactatagggaagctattcccgaaggattcggtctccccataaatctgggcgcatcggttcggggggactgccccgaaaacaaaaaaatcgattttttcaagtgtccgtttggggtactcaaacaattatggggagcaaaaatccaacgcagaattaaagaacaggctatagggaagctattcccgaaggattcggtctccccataaatctgggcgcatcgggtcggggggactgccccgaaaac

SEQ ID NO: 56874 - DNA, 884 bp, Heterodera glycines
atgccgttaagttggcaacattttttgctgattgttttctccgtcgctttgtccaaagtgcgccctttcccttgcggcgtttgtcccaaacgaattgtaagtacactaattgaccaagtagtggatttaatgcttaaattgtgtctcatttgtcagctcatcgaagcgtccgtcgcttcttcgtcgtgcggtgtctccgaagaatgcgacgatccgccgaaaaatgccgaaacaatcgcaacgacagccgcaccgttagcagaagccaaaggcaattcatcaacagaggcggggagggacgaggagaagggcaccgaacggacggcgattttggcaattgccatccgaactttttcaaatggaagcaacgaagaggtgaagccgagagagggagggcacgggctaattgtaagcactttctctgacctcagcagagatgcacttcgtccgattgccattcaaatggcatttgttttggcattccgtccgatccgttgtgcctttgtttcaagggcttctgtggccctctttgcaaatggggcaagtcatttgctaaactggctaattaaaaattggctttgttagaggcccgccatttttaacaaatttcagccttttgtcctggacacaacggatgcaatgggcacgggtggtgcttggccacttctgacagtgccaaatgcgtgtgccaaaccaatttttggggaaggcactgcgaaaagagcaaaaagggggagaagaagggcgactgaaaggaaataattggcgaaagatgaagcaaaatgatgggggattgggatcaattaagcactaataatacatattttataaatttatataatgttgacaaaatatgtataaattcaaaagggtcgacaaataaa

SEQ ID NO: 56875 - DNA, 1154 bp, Heterodera glycines
atggacacggacaaggctcgcgtaaaattggaggaagtgaaggaccgctacggattgggcggagacattgagaaggaaaaggagaaaatgggcatttacacgcccaaacacacgcccggagtgagcacgccgcgacacaaacactgacaataaggcgtggacaccgaatttttattttttttttaaagttaacatgaattataccaaaaaaataccatttcgacaggattgcaattttcataaatttttctgtaaagttttctggaattcatcgttaaaccaaagtttttagttattttaaatttggatctccaattgatatattttgctatttgacttgttatgactttcccatttcttaacttctaatatttccatatagtacaatggaaggcgatccaacctttgtaaatgttcaaccaaatttcgtacaacagaacttaagagaattgttagattcgcatttgccaaatcaaattgcccgttttgaggagagcagcgtaaatttggagagagtggctgccttttgtgaagcgaattaccttcaggtgaatttgattatctgtgttaacttttaagtgtttggtggtcatttatgcttgtgattggctatgacaagtccgaattgttcgctacgcaagaaaattttatttagtcgccaaacaaagccgaggcattggcggagacaaaacgttgcgcgctgcaaagtttggcgagttttgcttttatggttggcgatttgtcgcgctcacttttgaacgcacttgacttggaatcgctgaatctgtcggacaaaacttcacaaattcaaaacattgcgcaggcaaaaacgggattttcgaatggaacacattaatcgttcactaaatttttagttcgtttcaattcaaaaggaaaaatcggcaagacgagaaattggcaaattaacggcaaacaaaaatttgatccgtctcaacaaaatcacttatccttcttcagaagtacttacaactgctgaattatttttcaattgttttctttttaaaggagcgtaccccgcggtatcaccgaactccgattgattttgcgattctcgacggaattggaaatggcaagcgactagtgcaatcgactaatgactatggcacaattggggcggctcgtatgcaaggaac

SEQ ID NO: 56876 - DNA, 1056 bp, Heterodera glycines
atgggagcggaagaaaaaactgatcggaataggagaggaggaaaattgatcggaatggaagcggatgaaaaagtgaacggaatgagaggaggaaaagtgatcggaatggaagcggatgaaaaagtgaacggaatgagaggaggaaaagtgatcggaatgggagcggaagaaaaactgatcggaataggagaggaggaaaagtgatcggaataggagaggagaaaatgacgcgagagtgaagggcatttgcgggttgaatgatcggcgattgtgaagtgaacagagaagttcaagcgggacgaaatagcataggcaaactcaaccaccacggaagaacgcaagcaaaaaaaaccaaatgtcgataaatcaataccaccaccaccaccactgatcagtgatcactgatcagtcaggcaatttccattagcaaaaaagtcttcattctcccacagcagagcagggacctcaaaaaatttttgacttttttatgggttccatttttattctatttttactccatttgtaaatacttcctcattaacctccccacacgattagcaaagggtagttttttgtgcgttaatgatttgctaattatctaattaaccaccactcactcacatatgaaaatcaaatgacaacctttgtttctatctatttttttttgttcatccggtagaagagaattttgtcgatttttttaatcgttcctccgattttcacatttcattctcctctttctttcctatccattttctttttttttgatcagccactccaatcagtttttgatcactttgatcaatttgtatgagtcatttaatccaggctcactgacacattgcgccccattgatcaattcattcatcccattttgattggcaaaaatctgattgcttggccctttggcacaaaactggtgattaactcaggttaattacctgttggccctacacagtaatcacacattattactaaatgtactacttcttttcggcctcccggtttatttaattatatatatttttttttgttgtccccgtgttttcttatcca

SEQ ID NO: 56877 - DNA, 346 bp, Heterodera glycines
ttttttgcttgcgttcttccgtggtggttgagtttgcctatgctatttcgtcccgcttgaacttctctgttcacttcacaatcgccgatcattcaacccgcaaatgcccttcactctcgcgtcattttctcctctcctattccgatcacttttcctcctctcctattccgatcagtttttcttccgctcccattccgatcacttttcctcctctcattccgttcactttttcatccgcttccattccgatcacttttcctcctctcattccgttcactttttcatccgcttccattccgatcaattttcctcctctcctattccgatcagttttttcttccgctcc

SEQ ID NO: 56878 - DNA, 2185 bp, Heterodera glycines
atggaccgtggcatcacggaatatcagctggaggtgtgtggtgttgtgcttttagcatgcattaattttcaaaaacccgaaccaaaaacgcgaatttttcgtcttttcgtaaccccctccatttttgggggtcttagacctaaaaatcggcattttcagtcaccctgcacccattgcctaggcctaaaaacacaaaatgagcctaaaagcataaatttcgtcatttttttttaaatttttccctccctaggccgccattggcaaggtggtggcgtcggagaacgcgtggcaggtgtgcgacgacgccatccaactgcacggcggcatggggttcatgcgcgagtgcggcttggagcgcgtgatgcgcgatttgtaagcaaatccgggagggcgaggggggggggggtaaaaatttttttttaatttccgccatttttcgaaaaaacccgctagaattcttcccctccctatccacagacgcacccttccgtattttcgagggtgccaacgacgtgatgcggctgttcgttgcgctgaccggcatgcaccacgcgggcaaacggctacaacagttggccaaggatttgaaggcgtactccgtgtccagccttttcggggagctgaagcggcggactgtcgggtaaaaggaaattcaaaatttgaaaaaatccttaagtttttaataaaattttgttaattttagaaaattcagtaaaaaatgagattttattttttctttaaaaaattccaaaattttctgagaagtcatcgaataatcctataaaatttggaaaacactgaattcctagctcagtggtttgtgccttttgaacttaagtggaattgcttgggttcgactcccaccacgggttggcgtacatttttagcaactccgacattcggaacatcttttttttttgaaaaaaaaattaaagttttgtgagaaaaatttttatggttgatgttcagcgaagcccaggcccaagcagcggaccatgtgcacccgtcgctgaaggccagcgcggcgctgctcaaccaatgcatcggcgactttggcaaaaccgtggacgcactgatcatggcctacaaaaaggatgtgatcggtgagtgggggggggggggggaaaccgggcatttttatgaggaaaattcatttttgaaattattaaattttcaaaaaattgtgtaaaataccgaaccccgcttgaaatgcctatcgttggcacagtaccgtacctcgtttatgtttgccttcacaaacagatcgccaatacgaactgatcataatagcaaacgcggcgatcgacatctacagtatggcaggtcagtcagtacagcgcagtacaagtaccgtagtgttttttttggtccctggggcagaaacaatgcaattttcaaaatgaaacaattttttcttcgacaacaatcattggccataatatgtttttcagcggttctgtcacggtgcaacttcgccattgaacggagcggcgcggacaatacgcaacatgaccaggtcggagagagagagggggagggggggggggaagcagctaatttctacccccgaaaattttttataagaaaattatgaaaaaaatttaagaaatttttctaaaattttatttttaatttttcacagggaaggaaacgatagggtggaagggtttaaatgcaattttaaaattgcgaattaaacaatctttttttcccgctactttcagcacatcaccaatttgttctgcagacaggcgttcaagcggaccaaacacaatttgtacgtaataaaaggaaaaaattttgaaaaaatgccatttaaatgtcaattttattagattttcaatttattgcagaaaggaggccaagacgcccagcgagacggaactgtcactgatcggacgcatttcggaccaactccgtgagcagcaagcgatggcgcagaagcatccaattgaacatttatgatgagaaaacagagttttcgatgtatttaacctcctcctcctccccctggcatggaattatttttacacaaattttgcaccatttagtttttttttccttttttgagtatgatacggccggcatacactgtagttgggcatcacggaaagagaattgtattattttccagggagctatatgatactactgtatttgttcattgactataaatattttaaga

SEQ ID NO: 56879 - DNA, 897 bp, Heterodera glycines
atggcaggtcagtcagtacagcgcagtacaagtaccgtagtgtttttttttggtccctggggcagaaacaatgcaattttcaaaattgaaacaattttttcttcgacaacaatcattggccataatatgtttttcagcggttctgtcacggtgcaacttcgccattgaacggagcggcgcggacaatacgcaacatgaccaggtcggagagagagagagagaagggcacagctaatttcctcccccgaaaatttttcagaaaattctaaaaaaaaaatttttttttttaattttcttctaaagaactcaatttttttaaatatttttcacagggaaggaaacgatatggtggaagggtttaaatgcaattttaaaattgcgaattaaacaatctttttttcccgctactttcagcacatcaccaatttgttctgcagacaggcgttcaagcggaccaaacacaatttgtacgtaataaaaggaaaaatttttgaaaaaatgccatttaaatgatgaaaaaatgtcgtttaaatgtcaattttattagatttttaatttattgcagaaaggaggccaaaacgcccagcgagacggaactgtcactgatcggacgcatttcggaccaactccgtgagcagcaagcgatggcgcagaagcatccaattgaacatttatgatgagaaaacagagttttcgatgtatttaacctcctcctcccccctggcatggaattatttttacacaaattttgcaccatttagtttttttttccttttttgggtatgatacggccggcatacactgtagttgggcattacggtaagagaatttgtattattttcgagggtgctatatgatgatactgtatttgttcattgtactataaatattttaaga

SEQ ID NO: 56880 - DNA, 418 bp, Heterodera glycines; identical to SEQ ID NO: 53014

SEQ ID NO: 56881 - DNA, 1919 bp, Heterodera glycines
  unsure (1)..(1919): unsure at all n locations
actccttgcctggggaccagtgtgcttgcattcgaaaaaacacgagacataagcgcccgaaggcctttggcctgaggaagtgtcctaaccgggaaatccggagtgctcgtgtgagtgcctgtgcactgccctcggagctgtgtccagcggcgagatggttcttcccaagtccgggaagctcggatgcctggccagcgctgtgtcattaccacttgctctgtctccttcgctgcccatgcgcacgcttgcgctgaacggagttgtttctgctgaaactatccgtctttacaagacggctgtaatagcggcgcttggcaacgctcgctagcagctatctggttgatcctgcctgaactgatgtgttcatttcaaagattaagccatgcatgtgtaagtttaacctgccagacagggaaactgcgtacggctcattacaccagctataatttacttgaccttgacttcttacttggataactgtggtaattctagagctaatacatgcaccaaagctccaatctccccagagcggagcgcatttgttcgccacaaaaccaagcgccctccgggcgtccagtgttgactcagaacaactaagctgatcgcacggtcttgtaccggcgacgtgtctttcaagtgtctgccttatcaactttcgatggtagtgtatctgactaccatggtgatgacgggtaacggaggataagggttcgactccggagaaggggcctgagaaatggccactacgtctaaggatggcagcaggcgcgcaaattacccactctcaacgcgaggaggtagtgacgagaaataacgagaccgatctcttatgaggccggtcatcggaatgggtacaatttaaaccctttaacgagtatctatgagagggcaagtctggtgccagcagccgcggtaattccagctctcaaatgcatagaattattgctgcggttaaaagctcgtagttggatctgtgctagccgtccggtgcacacttttgtgtgttactggttggttggctnttctgccggtcttcccncggcgttggccttaccggtcggcgtcggtgggctggcgagtttactttgaacaaatcagagtgcttcaaacaggcgtttcgcttgaatgttcgtgcatggaataatagaagaggatttcggtccgattttattggttttgctgaccgagataatggttaacagagacaaacggggccattcgtattgctacgtgagaggtgaaattcttggaccgtagcaagacggactacagcgaaagcatttggcaagaatgtcttcattaatcaagaacgaaagtcagaggttcgaaggcgatcagataccgccctagttctgaccgtaaacgatgccaactagcgatccgccggcggatttattcgccctggtggggagcttcccggaaacgaaagtcttccggttccgggggaagtatggttgcaaagctgaaacttaaaggaattgacggaagggcaccaccaggagtggagcctgcggcttaatttgactcaacacggggaaactcacccggcccggacaccgtaaggattgacagattgatagctttttcatgattcggtggatggtggtgcatggccgttcttagttcgtggagcgatttgtctggtttattccgataacgagcgagactctagcctactaaatagttggctcattgcttctgtgggcacaacttcttagagggattttcggtgttcagccgcacgaaattgagcaataacaggtctgtgatgcccttagatgtccggggctgcacgcgcgctacactggcaaaatcagcgtgcttgtccttccccgaaaggggttggtaaaccggtgaaaatttgccgtgattgggatcggacattgcaattattgtccgtgaacgaggaattccttgta

SEQ ID NO: 56882 - DNA, 755 bp, Heterodera glycines
atgctcagcgatacggtagccacagttatgggagcggaacatacggtaaaagcagcaaaaataccatttttgttttatcttgctgtatttcttaaggaaaggttcataagaaaatatttacttttaacaaaaatccacgcaaaaatacatttcattaaatgtattcccagcggtttttaaattcagtgggaaatatttgagtaattctggtataattataattattgagcctgttaaatcaatcattatcttcctttaattctttcaataggaacaaattattggagcagcagttacggtaactcaagaacacagcccagctatggatacggtgggcaacagagcagatacggtacccatgaacaaaacggtggcgaaaatggacaattcgagcgacaaaacgcatggagaggaggaggaggacaatggggacagaatcagcagaattggggacagccgcagcagcagcagggagcaacagcagctgtagaaggtggccaaattgaaaagaatcgaaaaataaatggcaaaaattgaaaaaaaaacggaatttatccgaaacacaggaggatggggacgacgacagcagcagcaattcccctcccccgcgcccccaaaaacgcaaaacaattgggacaattccgacaatttcgccccttcgaccgcacaaaatcgcggaaaattgcgcgtcgaccttccgccgggtgcacccggcacaatggaggcagcggacgccgatcagtcgagcaaataaa

SEQ ID NO: 56883 - DNA, 577 bp, Heterodera glycines
atggctgtcaaattgatggaaaaggccgggataagcggggaggaaaaaacttttggtctacaacacctcggtctcatccagaacttttgggacaaggaatacccggaaatgtttcgcatagtggcatttgacatggtaaaaaaattacgcactttgaaaaaacatttaattttccagagaacgggaatcaaacctattttcaagggagaaggaattcgtaaaaatgaagtatgtgtgataaaagatggagaccactgggacggaatgaaatcagttacgcaattcttctgtgttcgaaacttttgtgtcagctgtgaagtgacacgcgaaaggccggagagacatcgattggaatgtaaggaaagatgcaagaagtgctgtagaatggggttcgggtttccatgtgcggatgtgtgtgctgggatttattgcgcggagtgtaatcgcaacttctacaatacggaatgttttgagtctcacaagaagactgcttgtagggagtacaaaaaatgcgaaaagtgtggagagacacccacccaaggaaaaaccacatgtggggagaaaatctgccgatttg

SEQ ID NO: 56884 - DNA, 1175 bp, Heterodera glycines; identical to SEQ ID NO: 26136

SEQ ID NO: 56885 - DNA, 820 bp, Heterodera glycines
atgacgatgttcccatttgttacagaaacagaaaataatggagttgaccatctgctgtcaacgacagatcagcggcaaggttggacaataattcaaaaattcgagatttattttttaattgttttgtcaatctggcatgataatggggattatgccattgatggggagatgagataaactgctggtctctattcggggtctctttgttctgtcactttcccatactttcaccttttaaaacctaaagtttcgaaaatttgtaaccagaagagctcttcacaatagtttttggttgttaaaaatttgtaaaaattcccaaaaaattttaaattaattttttaaatgccacaaagttcaaaaagggataatttgttgcttgagatttaatttaaaataattaatgcaaaaaatttattacattaaaagctttttaattactgttttttaacagttgaacaaaacgctacagaaaaaaatatgtgcaaatttggtgccatttcgtgtgctaattgtttaaaagaaaaggcaaaaaatgagaaaattcaggtgagtattttgcagttcatcttaaaggatcatcatcaatagggatgggatttctaagtttttacttattttttctgcggctttaactcaacgagaaatacacgaaaaacacattttttgtctgaaaattttgcgttttcacgcccttattcgaccttagaaatccttatttttgatgttcgcccttaaaaatccttattttggatgttcgcccttaaaataagtttttgcccttattttggcgttttgtccaaaatttattaacaaaaatgca

SEQ ID NO: 56886 - DNA, 782 bp, Heterodera glycines
atggacaagggcgccgccggagcgctgctcttcctcaaaaaagtacaacagaaatacaattttaaacccctacatggaaacacttaaaaagttcctaacccttattcaattaagacggaaaatttttcaaagttcaaaaatctcgcgaatgcgagaaattattaaaattgaaaaactggaccgggatttgaggcaggtcgtttccccagccgattcccatcccccggaaaattaaaaaaaataagtttaaacaaatttttcaagaaaaaattcttaaaaacttttgtttgtaagaaattttaatgaaaaaaaattataataaattttcagcgattttttggatttttttttttgaaaaacagtaactcatcataaaatttcaaaaaaacgctagaaaaattttttacaattttttttttgagcattgaaatgaattggccaattttttggatttctatttgtatcctgctgcagatgcttgaccaaattgcgccgcccaccggcagcgccgacaccgataaaatggtggccgatgtgcacgcctacttcctgcgccaccacacggaccaggaggtcgctgatgtgttcgggcctgactcggactacgccggcggcggcaccgccggcacgcgcaccgatggcacggcattccttcgtcgcagcggtctccaacggttgcccgccctgctggtcaacggggtgccgttggacaacgcattggtcggtggaaaccaataaagtttagacgactcaaacaaaaaacaatttttttattgggttga

SEQ ID NO: 56887 - DNA, 362 bp, Heterodera glycines
catcttcatgaccaaattcgtcgtcctccattttccgcatattccgcggcggcgtactccttctccatgacaacgcacgcccacatgttgcgttctcaacgcaacaaaaaattgagaaacttcgatgggcggttcttcctcatccaccatacagcccagacatcagcccgtgtgactactatctgtttcgatctatggagcacttcttgagagggaaagaatttgctgatcaaaacgaggtcgaaaatgcattggatggcttttttggatcgaaaaatgatcagttttataaaaaggggatagaaatgttgcccgaacgatgggggaggatcattgatcaaaatggtgagtgcatcattgat

SEQ ID NO: 56888 - DNA, 949 bp, Heterodera glycines
atgggcggaacgccaacacttcaagcccaaccgaatgccaacactatgggcggaacgccaacaccaagcccaaacgaatgccaacactatgggcggaacgccaacacttcaagcccaaccgaatgccatgggcggaatgccaacgtattatgccgtacagcaacagcagccatatgcccaactgcagtttgtttcccagcaggcatgttagagggatggggagttactttggtgacatgactgttagtgttgttcgagagtctcgacttgagaaaagtctcgggttttttcggtctcggggtcaggtctcggtcttggatcggaaaatttttcgttctcgaacagcactaatgactgtggctcggttttctagttttttttgacaattttttatgcgatctcccagggcccatccaactacggggcccaaaatttccagcagccggcgacggtaagacttggcactccatcggcgtcagtaaagcctggcactaatcaacccatgatgcccatctcacccacacaatcagtgctggtacggattctcaaaaaacgcgaaaacatggacgaaaagtgaaaatttccattaaaaataaattattatttattttttaatttttctccagtccatgccctccgctgagttcgccagccgacgatttgaccgtgcatattgttaacagaaaggtgaagagacaattagcattaatcaaccactaatagggattcgttttaaggaaaatgcctaaaatttttgcgcacttaatacgcacagataagcacgaaaaaagccctttccgctctggtttggggtgtctacgatgacttttataatgcccaattttgcctattatgggctttttgtgcttaatgcctaaacgcctatttttgtgcctatttcgccacttttggtgcctttctcagaattttctgaaaatcctacaataaa

SEQ ID NO: 56889 - DNA, 337 bp, Heterodera glycines
gaagaggagggcactcgccagggattctgtcacatccgaattcagcagaggacgggtcgaaaaacgatcacaacggtgcagggaatagcgccggaatacgacttgaaaaagattgttcgttacctcaaaaaggtaccacggacatagttgagtcagaaaatagttgcatcggaattctgtgactttttaggaatacaattgcaacggcacaatcgtcgagcaccccgagtatggcgaagtgattcaactgacaggggaccaaaggcagcacatcaaggactttctgtgcaaggtcgggatcgtcaaggaggacaactgcaaaatccacggattttaa

SEQ ID NO: 56890 - DNA, 2171 bp, Heterodera glycines
atgatgtttatttcaagattggtggatcgtggaaaatttttaccaggaactgaacgtgaacatgcttacaaagacacagcctggaagtcaccgacaggcgatcccggctttttccatatgtctgcgccgtgtatttatgctagcgtatggaattcataaatatttattccaaaattgtatttgtttaaggttttggaaaatcttgacctggatgctggaatgtcatttttaaacattggttctggaactgggtatcttagttcgatggttggatttgttattggtattttaatatgttaaagcaaaaaaatattacaattttaggagaaaagggcattagtcacggggtggaactctatcaaaatgttaccgaatttgcaaacgataatgtcgctgtgatccaacagtccggtgaagcaagtgcctttgattggtctgtgcgtcttattgttggcttcggtttatttgggctaataaattaaaaataggtgcacgccaatttacgaaactgggaacgcctttcaaattgaagctcaaatgaaatatgacaggttttcaaatttttttgtggatttattagcgacaatttttttcaattattggaaatttaaaaatggcatttcccgtccatttaggatttactgtggtgctctcgtccccgactcccatcgctcctatttttgttcccttctaaaagttggcggcgttctcattttgccgtttggacacgtggtaaatgttgcattttcctgcttttctaatggttttattaagcttcaaagaattgtcagaaaatcggaaattgaatttcttacacgggacataagcacagtgacattctcacatttgatccccgtcaatccggataatccgctctccaatcgacccataaaactcccttttctcgaaccccactcattgcgttcgatttgccgtgatgtgtacgttaaaagggagaccaaaaagatggttaaatttaaatcatttctttcagtgtcagacgctgtgtcagggcaaatgttcagcaaacccacaaagtggaaatgcgagttttgtgtgtcgaatcagcgaaggaagagagaactcggaatgggagtgaaagagaaggccttgagctgaattgggtttctcgccgaattcaggaacacaacaacaacagacgcacttttggtcgacgtcgtcgcttacagacaattcatttctatggttacttccaacagaaaacattgcatttttaaagttttagaagaggacaatgaagacgaagagcctgcagaggagggcgatgaaccgcgcattattccaaatttccaccaaaacccaatgcggtgaattttttatgcaaaactgatttttataagttgaattttatacggattgtaacgctagaactgtcttaatcatttgtgtcacttccaattaagacattttcttgctcttgttgctcgggaccggttgaaccagcatcacgctgcgcgtgctcgtcaggaggcccatcaaataaggggtcggattcgactggtcattggtgacagagatttggaattggctgtcaatccatcgccgacaacaaatgaagacgttaattacgtaatacaaacagacaatgtccatgcccatatccagtagatatttcgaggggaggaaacaccaccaacaaattcttattgccattttctaatgtaaactaataggcacaccaaatggttttaaaatactaaaaattgccagtttccgattgaaaaatgatttgttgattttcttaactctagggattccgttttatctcggaaaacaatcttaacgccgacgacaaccaacaaatccctaacattattgcctttggacgagaaaatggtgaggcagacgatgaccaaaacgagaacaatagcgaagagggaagagagatcgaacaaacgcaaaacaccaccggagaagaggaagaagaagacaacgaaaccgacgacaatgtcggcatgagttccactgaaagtgatggccaagacaaaatgaaagccaacaacggaaaagggacttgtaaaaatgaagacgaatccaagccaagtccaacggttgaaacagaacagaataaagtgcatcagtccgcttctgaaagtgagcatttcaaggccaataccggaaaaggcatttattctgtcattaagctgtga

SEQ ID NO: 56891 - DNA, 403 bp, Heterodera glycines
atgggattgacagcaagtgttggacaagacaatgacgagctaattgacaatctcgtgtcaaacgactctttgaaaacagaacgcgtcgaaaagatcatgaggttaatgattttggtacttatatgttatctgtactcagattttcaaaaaattttatgtttttcgctataacttttttctttggcattcaaatccaagattgttggtatcattcgaaagcttaacatgtttcgaatctaattctatgtatcacttcgcgattagacaattaccaaaaaagttatacatgaaaattgcgaaaaggtcgaaattagtcgaaattttgaagttttttcttactaaaattttttgcaggatagaaaatcatttcgattattggaagggtaatagagcatctgagtag

SEQ ID NO: 56892 - DNA, 155 bp, Heterodera glycines; identical to SEQ ID NO: 51421

SEQ ID NO: 56893 - DNA, 1005 bp, Heterodera glycines
tttgacgatgaagcatttcttgccttcgtgaaaggacctgccaattttgacaaattttgcgccggaaaaggggtcactaatgaccaaagcaaagaactgttggcacaaatttatggcactcatctaggcattttgttttacatgcgaaagaattggcattgtgccaatgttagggaagaatttgaagaatttatcgacccagaggaatgtcaactgtttcaaaattatttgtgcattgtttacgaatttttgttcaatgtttatgccgaacaagaggatataatgaaaccaattttcaagcaaccaattggatttcaaatatcaattttgatgtcattaatgtcggcattggaattaatggcaaaattttcgaaattttgtatttatgaattgaaattaattgaaagaaatgattcgacattggccgaaacaattcaacttgaaaatgagcaggaaaccttggattattataaggaaaagtttgggcaaaattcaaaaagtggtgagtcatcggcacgggcaaaatttgacaaattaatggaaaaaatgttcaaaaaattggaagaaaaagcaatggaaagagacaaattagaaaaaagttcggaaaaaaacttttggcaaatggccaagggctggccattatcattgcgatcattcaacggagcagcttcgacatcatcaacaaaagcagtagatgatgcagcacaattgtatgacagtgtgttgtacttgcctaattacggaatggccgacgcggtgagccaaaacatttcagcgggtgttgcccatttcataatgttcgggaggaattggtgtcgcgtctggtccaaggatggcattccgagtccccaaaaatttttgtaaatcgaaattccgaccccaaaatgacggaaaacggagtctgaacccggaattccgtgccatctctggtctagacaggaaaacctacaaaaaataaattagttttttaaaatttatttattgcaggtgtgtttcggtttttaa

SEQ ID NO: 56894 - DNA, 1206 bp, Heterodera glycines
caggctgttcggcgtgcgcatgtgaccctaacggcgtgaacatgacccaagcacgggtgaaccatatttgaaggttggtttattattattatttttaaaaattatttcattgttaacaaaacgttttgctggacgattttctagaccatctgctgtttaactaaataagaattttttttttttgcaaaatagttagaaaagtcagtcgtttaatgagtattttggccctgactttttttatacgtgttgaaaattgttttttaatttttaaattaataaagtttaacaagcgctttcaaacagtaccaagaatgaaaatcgtctaaaagatcatccttgctccgtttatttttctctaaattattaaataataattttttaagtgtaacgacattgatggacaatgccattgcaagcaaggaagagggggacgaacttgcgcggattgccaagacttttattggggtgcaaaaaatgaaaaaaaaaccattttggccaattattattttttaggtaatccactggctggggaatgcatgccatgcgagtgcgacacctatgggtcgcaaacgttgcagtgcgatcggcagacggggaactgcatgtgcaaaccgggcagtggaggcccaaagtgtaaccaatgcgcacgagggtgaacataacgccacagattaacttaaaaaatgattttgaaaatttactcacattgaacagttacactggtgtgtggcctcgttgccaagcgtgcggtgaatgctttgacaattgggacgcaattttgcaaacacttggccaagagttggaaacattgatcggccgtgccaataacattgaggacaccggtgtgaaattttgtgaaaaacccggtaaaaatttttaatttatgttactttcaggaatttcctcggaatatgatgacagtttcgttgagatggaaaataaaattggtgaagtgaaacgacgcatggaaggcataaacataacaaaagtaagcaaaaaatatatcttttttctatattggagtaatttcgtcgcgagattgtaacatttatttcctcctttaaacaggaagacatggaacaacttcgtcgacagatggaccacctgcaaaagcaaatagacacaacgcgggaaatgttggcggaaaagaatcaacgagtgacccgcgtcagcacagaagtcaatctggcggaggagggggttaag

SEQ ID NO: 56895 - DNA, 453 bp, Heterodera glycines
atgcaaacggcactaattaagaaaattatgacttttcccgatcaaatagtcattcgctcaaacagctcgtagcagccgatcataccattaatatcttaaaaagcaaaaaaaaaaattattaaaaaagagagacaatcattaaattacaggcgtccagaaggcccaaagccgaagcagaagaacgcgacgactgacagcaaacacgaaccaaatccgaacatttattaagcacccaaatagcctgtgggaaaatataagaaaaatttagttaaattcaaaaattttaagaagcaatgttaaaaataagaacaaatttaaaaaaatccattggtaacttacgtaattgtcctcttcatcaaaactgagatccgttagagcgggcagagctgtcaatgatggaaccgattcagcgaattttttcagcccttaattgggatcggacccaaatagaaa

SEQ ID NO: 56896 - DNA, 632 bp, Heterodera glycines
atggtcaacaaagagcaacaagtaagtttgagataacattcacatttttggttagtcatttaattatgtgtctctgattttataaatagataaaataatcggattgaccgcccctccttttttgatttttaccgattttttcattttttgacaacttcttttacttgagatagccgactgatggatgataaggcggtaccacaaatataaactcctaaattgtggtggattcaaggaaattccaggcagacttaaaattattccaaatagctgaaaaatgccaaaaattctgccagccgagctaattttggagctgagtaatttcgcaaaatttgaccgaaaatgggctaattaccgcgtgtcattttcatttgacaaatttttgctggaaaaaatgggtgattggctaattgagatgaaaaaaatggtcatttaaataattaatttactattaatcagataaataattttcgcaggtagaattatgcaaggagtccattgatcatctatgcaacgccatcaatgggatcgaagatgaacaacaaaaaacaacagctacgtgtcgcgcattcaatggcaaggcaacaaatcaaataaattagacctttttaatcaaattcagacaaattaaa

SEQ ID NO: 56897 - DNA, 2110 bp, Heterodera glycines
taaccattcatccgtcgaagaccgtaacattacaacaaatgaacgggccaccagtgtcacactgtaccgtcttattccaaatgccagctacgcaataagagtcgcggcccgtacaaatgccggagtgggtgccttttacattggcgaaccggttgtgatgagtaaggggccaatttcccaacaaatcacttacaattagcacaatgttttgcagcggaagaaaccctcaaccgacacattcgcctttttgaacgttctgagaatgtttggtatcgacagccgtggagtgttttggtgtgcggaattgtgctgtggtgtttgctccttcttatgatggtccttttttggtttcgctgttgtcatcaaaagggacggagcgcagcggaggccaaggaaagggaatttatcaaaatcagagatgggagtgtagcgaacagcacgaccatggtcggtggcgatgcgcgaaatgctttttgggtggcacacgagcaattcaatggtggcacggtggaaacgtccagcggaacattggccagagttggtggacagcagaaccaccagcaacatctcagctattttcaaccgactaattactctgctgatcgtgttcctggtccacataacgacgctgttaacagccagcatcacattgcactttcaaatgaaatgttcagcaacggaattcccatggttggccgaatttgtcccacggcgactcttcaaaggcataatggtggcgactgctcttctcctaactcgcctcattatcattatgcccatttgccgttttatgctgaacaaaataattcgctctcaactttccttcagcagcgacctaatcccgaactttatgatggtatgaagatggcattttcattttttacattgattatttcattacgatagatccaagtccgtacgcaacgacgactttggtttctcccactggggtaattacacaaacacttcgacccgccgtacgtcaaagcaaaggaccggcacttccgttaaaaccggcaccaaaagaaccaccaaagaattttttatgctcagcggcggtgatgcatttgacaaccaacagtaagcagcgtgtcaatggcaatttggaagttgtggaacaacagccgaacagcagcagttgtggagctttgttggaactcaacagagaatggaagagacagcagcgcatcaccgccgaggaacaaaaaaagcgagaaacaccgcagaaaaagggtggaacaacggcacagcggagagaaaatgaacacgacagagacatgggagagaatcagacatatggaacaacgggaagagggacgagaggaggagggggcagacggagtcaacgaagtagcagtgcgaacacggcacagaaacaatcttcggcattttgttcgctcaggagagtatcacacaaggagaacggcagcgaatgtcggcagaatcaacaggacagtccacagacggacatttcatatttgcaatcgtctgacggaaccaacggctctaataacaataacaataagcgaagccagcaaatgaatcgccaagtgaaatacgacgacactgcacccgaatatgatccggttatgacggactcattgagtcaaattgtgcacagagaagacattcgaaagaaaataggtccttactttacactaaaacttgcgtatttaattacaaatccgctgtcaaacgctgcaggtcgtgagaaggctaatcgaattgtacacagcaacagagtcagtttgattgaggatgaaggacaggaggagagggacccgctgatggaagatgcctttggtggtgacgaggacgaattggacgcggatggggaaatgagcgaaaacgaacacagcggaaaagagagtgaccgaagggcgaaaaggacgactgacccaatgaaaaggtgtgaagaagagtgcaatgtcgctaacgagcactattacgggttctcccccgccccgaaaaggcctaatcgacagccaatgatgggtatcaatatcagcactctgtcgggtgagagaaaataaaaatgacactttccatagggatttcaaattcagttggtgtggatcggaggacaaccgcctctccggcccatcgatga

SEQ ID NO: 56898 - DNA, 327 bp, Heterodera glycines
atttttcctttactgccgcaacatcgaattcgcttttgatgaaatcatttttcagttcgcctttgttcccatttctttcatccgttcaaattcgcttcaaatcaaccaaaattacaatttaaaattaaccattcttaatggttgagctgtccgctgtatgttttgtgtataaatccttcatctgtcatcttttgtatgtcattattcattatatatcattgcgccttttgtctaattgaacaaaattaaattaacgatcttaacaaaaaggtatttattgaattaaactttgatcattttcttaaataaagcaaatattttttgcat

SEQ ID NO: 56899 - DNA, 205 bp, Heterodera glycines
atgctccaaaacggccttaccattctgcttctgatcagtgttgtgatcggccattccttggccaaccttggcccaaccatcaaacataatcctcattttaaaaccgtacaaactgcgcatcattagcatgatgccattgcgaagaagcacgaggcgagcaattagaggaggggggaattttgagtgaaaattcatttcgaaataa

SEQ ID NO: 56900 - DNA, 565 bp, Heterodera glycines
atgaggattatgtttgatggttgggccaaggttggccaaggaatggccgatcacaacactgatcagaagcagaatggtaaggccgttttggagcattttatgagtgagtgagatgaatgggaaattgggattggaatgtttgaaaaatgccgacttaaataacccaatttaggtaagatggcatcattaaatttggcaataaaaacataagagtcacatgaatgccaaattaacgtggacaaagtgccaaaacggcacaaaaacatttccgcccctttccttaccttatggacagaagaattgtcaaaaataggtgatatcataattggaaaatatttatgtgaaaaggaaaataaaaaaataattgaacgtggcaaacaattatttcatatacaatttaattttaattctttcgaaggcaatttcctcttcacaagtgttcttgaatgtaaaataaaaaatatattttttaattcttaaattataataaataaattcagatgctaacaaatttcgttaaaaaatgacaaaatttggcacaactcagaaaaccgcgggaattaaa

SEQ ID NO: 56901 - DNA, 1228 bp, Heterodera glycines
atgtcatcatcatcatctcccgaaaaaattttggctcaaccttcgtgcccaaaaaaggcaaaagtggacgagcgagctctgtggaaaattttcaaaggcaaatacatgctagcgatttatctctgcgatgatgactggcggaatctgttcgagaacaaagagaaagttcgccgaatggacaacgaccgtgtggccctaaacttcgaaatgtgcgaaaattgtgctcgtgtgaattgcaacggaacggacatattggctccgtcaaagaaacgaaaactttcaaccgatcaagcttaatgatatcatgatacctttcttttattattattattatgtgttttgccctcaaactaataaaaaataatttaattcaatttgcgcaatggtggcagggggtggggggagggaaggtagccatctgtcggcagctacatcgcatggttgttgttgttgttgttgttgtgttgttcggcaaatatccacacacactctgccctcatccttttccttccttatttttgcattttatctcccaccctcttcacggttaataaaaatgagtgcaaattccgcatcggttgaaactgaaattgcgtcactgaaacaaattattggcgcacagtccgtaaaattgatgcagatgcgtcatcattttgtgaactaccgcttcagacttgagcaacttgaggcttgggccggggaagtaaggtattcaatgttttttgtgatcacaatttttaactagggtaaagacaaaaagtttgttcgttcaccaacacgcaacaaacgattttctgtggacgacgagccagcaacatcggccgcaacttccggtaagggtagtgtaatattactgggaacagtgcgctttttcagatgggatggcaatggaaagcttgaaaaaagattttttggaggccaaaatgaaggtacttgtggaagagaaggtggccgaggcaaaagaattggcagaattttccatctctgatgcggagcgcaaaatgaaccaaagtttgaacaacgcaatgcgcgttggacgtgaaagagaccatcatcagttacgctgtgtagtggaggagcaacatatccgctgccgtctccttaccctgcaaaactaccccgtcgccacaatgacaaagctcaacatcgagttcgctacctcgcgacgtgtctcccaaacgggagacgcatcgcatgttttgtctgatagacgacccgatgtttggga

SEQ ID NO: 56902 - DNA, 1135 bp, Heterodera glycines
  unsure (1)..(1135): unsure at all n locations
taattaaatccattccttcgggggaccgtgccgggtgccgcggggtaagcagtgctggttcgtttcatcacggcaccgaaccttttggctagtcagcaatcgttgcttaacttgccagatcggacgggtgcgcatgattccactgttccaagcaccccaccaaaagcaaaacgatataaccaaaatataaggaaaaattttttaaaaaattttttctccatcttcctttttgatactaaagcatcagagtgctaaaattaagttgtaaataaaatttggtgcgctttagagcactttctgaaaaaaatatttatgaaacaaaaaaatcgattttttcaagtgtccgtttggggtactcaaacatttatggggagcaaaaatccaacgcagaattaaagtacaggctatagggaagctactcccgaaggattcggtctccccataaatctgggcgcatcggttcggggggactgccccgaaaacaaaaaaatcgattttttcaagtgtccgtttggggtactcaaacatttatggggagcaaaaatccaacgcagaattaaagtacaggctatagggaagctattcccgaaggattcggtctccccataaatctgggcgcatcggttcggggggactgccccgaaaacaaaaataaatcgattttttcaagtgtccgtttggggtactcaaacaattatggggagcaaaaatccaacgcagaattaaagtacaggctatagtgaagctattccggaaggattcggtctccccataaatctgggcgcatcggttcagggggactgccccgaaaacccaaaaaaaaattttttggataaaaattatttaaatgaactgactagataatatttaaaataggttatttctcttcctttcagtatccctgcaaagtttggtgcgcttctgatcagtttctgaaaaaaaaagttaagcctaaactttttggcctgtttaaaaaggaattaaaaatttttaaaaattttattcatctccctttttgatagaaaaagcatcagagtgcctaaactaacatgtaaataaaatttggtgcgtttcagagcatnttctggaaaaaatatttatgaattaattatgcaaaaaataaacaaataatgaa

SEQ ID NO: 56903 - DNA, 572 bp, Heterodera glycines
atgcaagaagcagtccatcagttaaagaaggcgacaaacgctttaagcgaaaaagtaattgaccttttatgtagcttatagatattgtggaaaaccattcaaatttggcttcccaatttacggacatttgcttaaaaattctttttgtggttttcttttcgctccttctattgtttctccttttctaaattaaattttcacttttagtgcaccaattgtgcgcccgaaaagagagcgtacagaagcaattttcttttggtgaagaaatacttcgaggacacaacatcactcatcaaaagcgaagtgaaactttggcagacggtgctcgaggagaaggaagaacaattgaggtccaaggacgatgaaaggtcattgagatgaggctacaggcctggagcgggaatttttggaattattttaaaaatcgaaaaagaaaatgatagaagaaattatttatttgcttagaagtatctaaaaatatctaattaataatgataataataatgtgtttttaaatttatttaatctgattttgataacttgaaaaaacatcgggcacttgaaaaaataaa

SEQ ID NO: 56904 - DNA, 309 bp, Heterodera glycines
atgtccgtctcgtggggcactcaatactccaaactgaagacaaatcttcggctggctgcaaatcgactccgattgttgcagaagaaaaagactgagcaggcggtgaaggcgcgctgtgaaattgcggactttttaagcagtaattgaccattttagttaattgctttatttggaatggcttaaatttccctcgaaatttttatagaattcagcgctgattttcggattaattattcatccaaattttagcggacaaagaggacagagcccgaattcgcgtggagacaatcattcgcgaggattttgtgg

SEQ ID NO: 56905 - DNA, 979 bp, Heterodera glycines
gtggtcactggaggccaatatgatgttgatgtggtgttagaagatccgaatggcaaagtgttgtacaaggaggccaggaaacagttggacacccacacgtacaaagtgagtgatggcaccggtgaaatcgaatgccaaaggtttatttttcataaaattaaaaaaccataaaatgtgggtttgcctccatttttctgaattattgtcctgatttgtgtgacaaaagagtaaatttttgagattttcaaaatatgtggattgaaaaaatacacattttttgaattgtttatcaattttttttggcaacactcaaaaaaactactctgccgactcattgtcaggcaacacaaaaaattttttttgaaaaaatagaataaccatcaaaaatgatattggcattgcccaaatggtataatatggggtagggattgggaaatttgaatattttgcgccggaaaatttcctgatttttttgatcctgtataggtttttttgcctcggtttatgccaaaccctggtgtatataagtcaaattttgaggaggtcgggggacggaaatttcgaatttctccaacttttggcttgtctacgccggaggatttcctgtattttttgggatcctgaattttttttttgttgaaggtttcagattataccaaactggtatataggggccaaattttccgaaattagggaaagggggcgccggaaattcggatttcttcaacttttgggctttacccgaaaactgaccaatttctacccaaatttatttgcttccgcctttttagacagaggccaacggcacgtacaaagtttgcttctccaacgagttctccaccttctcacacaaggttgtgtacctggactggcaagtggggccggacgagcagcacaaaatgatgccaattccgcgggccggcggtgcgcaagcgacgcaaatggagcgcagcgcggagacaatcagtgaccggctcaa

SEQ ID NO: 56906 - DNA, 1217 bp, Heterodera glycines
  unsure (1)..(1217): unsure at all n locations
aagttcatcgccgatttcatcggcgccctcaaatttgatcccgagcnncggccgacgtttcccacgccgttgccnctcctcggcggtgngcacaatgtgagcggcgaaagcaccggcgattgccaatcgaaaaaccttaaaaatccggcaaaaattttaaaaattcgattcggcacggacacccaaaagcagacaaatgcctgccttaacacattatcagctgtaatcgccacactgagagaaagcggacaaaatgattttttgggaattaattttaattagggaccgaattttgttacacaaaaacttcaaaatcaatcacaagaaataatcatattcataaggaatttttgtaaaagaatgaaattttaaatttttcttctctaaaatattttggataaaataaaattttttaaaattttgttttaaataaattatttattcattctgataaaatttagtaaattttttaatattcaattaccttatctttttcatttctggtaaaaaattttgtattttaaaatgttaacaataagcacattttgtgtattttctgaaattttttcgggcgattcttaggggtgtaattttcatttttgttaagaatttttccgaaaatcctgaaaaaggcgccaaaaatggcgaaataggcacaaaaataggcaaataggcattataaaagtcatcgtagacaccccaaatcgtgcttatctatgcatattaagtgcgcaaaaattttaggaatttgcctaaaaatggaagccataataataagtttaaaaattttggatttgtttatcgttagaccgcaatttttcttaattgttttcgagttttgactgttgcctatttgttaagcctgtactaccaattttcactaaaaagcattagcaatttaatgcaatttctattccttttcagtttgtgtgccccaccgaaatcattgcgttcagtgaccgcgtcgccgagttcaagcagctcggctgtgaggtgatcgcctgttcatgtgactcgcatctcgcatttggtgttttttttttgttttcaatttttttgtactcgtataatttggtccatttttcttaggcttgggtgaacacaccgcgcaatgatggcggacttggcaagatggacattccggtgctcagtgacttcagcaagaaaattgcggctgactttggcgtgttggacaaggagaccggactgtcctatcg

SEQ ID NO: 56907 - DNA, 661 bp, Heterodera glycines
atggcaccgtcttcctcctctgctgccgccatgacaccactcggcgtcattttggtgtccaaggacgagtcggccgagcgcgtgctgttcatgtacccatttgagcgccgtgtgtcgccgcactccgcccacattaacagcaggggtccgcaaacagtgggaggagcagttcaatttttcttcacccattctctccccgccaacaaaattgatggtggaaagaaattcttgtaaatattcaaaaatagaaaaacgctttttttgaagaaaccaaaaagtaaatcaaaaggtatagacgaggtaatccccatcccaatttcctatttgccatttgttataaaaaaattcagaaaagtgccatgagcacaaggactcagtggtgtcaatgattggtaaagacgtgccaaagttgggcggcggcggtacgccggacgacgtgccgtgccaaccagctgcaattgacagcggtgatcagcaacaacaacgtctctgcgacggcattgcgttggacggcatttcgactgggtcggccaaaaatgtaatttcgcaattaattttttaaacttctttcagttttcccgtcaaaatgttggcccctttgctcgtcgccaaaggctccaacggaaatgggacgccttttgatatcaaagtactcttttga

SEQ ID NO: 56908 - DNA, 836 bp, Heterodera glycines
atgcctttaaaatttaattgtgccattttcgtaatcgacttaccaccccctctcccacatcgttcagcgaactcaccggaggacttgtggagcagggtcatcgcagcgtcgcagtcgttcaagaaagccgcgttctgtgagcaagtcgccgaggaagaagaaggctgcgcctggctcatccgcgcggaagccgtctcgtcgtcgtccacggaccgtgtcgcggcgccgtgccaccagcaagcgtcgacgcagtgccagcaagaagaagacggcgaaatcgtcgaagaaggatggagccactaccaccgccactggtgctgatgccgggacgacttcgacgacggcgacggacaacaccaacgcttcccagcaaagtgaacgtgagtttctggcgaaattcaagaattgggaggagtacgggtgctgatttcgaatctgacactttcaaaattcttaggttctgaagggagtgcaacggatgagtcatcgcgtggttctgaggcggaggcgaccaacaccggtgggacagcggcggatggaggtcgtgccacggagtagaagcaatggaagaacaccaacaatggatgatgacgaatcggatgagaagcgattttccagcagaaattaactgtattttttgtctccatcataattatatgttgagagtggccctctttctccaattgtttgtgttgtacaatattcatttcctataagcccgtgagatgcttgccacacctccgttgtatgaattccccctaatgtcagtcattctgatgttgtattgtcgatttaatcgctatgtgttgtctctcaattatgtttgctctaccata

SEQ ID NO: 56909 - DNA, 1297 bp, Heterodera glycines
atgtataaaacgaaccgcgaagattggaaaccggaaatgtctgggcgatacaatcagcggctgtatgaactttttgtgaaatacgccccatggattggttggatgctttttgggcatttgcacacggacacttttcgcattataaaagtggccaattaatgctcaattaattttaattgtttccaaacttttgcccagtcccccgatggaagtgccgttcagcgaatgtttctgaatccggcggtcactccgctgttcaatctcaacaaccccgccttccgaatttacgaatataacacgaaaagcatggaaattgaggacataaaatatgtttaaacttaatgaaataatggaagcaatgcttttcgttttagaactttttttgttaacttggaagcactgaacgcaaacggagccgaaattagcgaagcgaaatttgaatattcatttcgccaaacttatggcatccaatcgccgttaaatgcaaaatcattggacaatcttgtggagcggatgaagcaaaacgaaacactgtttgaccagtacttcaactactcctccgtccaatggatgacacgaaaactgaatgaaactgaaaggtgccaaaaaaagacggatagagggagggggcggggaaatgccatggcaaaccaattatcactaattgataaaaaatgcaatggattcaggaagtcgcatctttgtgtcgttgaattcgttgactttgatcagttggagcgatgtatcaatgcaaaggtaagcgattggaatttataaaattaattaaattaaatttttaacttcatttttcacagatgtctttgccttctttctacgtccttctgcttgtgggttctctttttgtcatttccgttgcgtttttggctgcttttttctttttgccttacattcgaaagaaaatgggcaaaatttgaatttatttgtaatttaaaaaggcattcttttcgggaaccggccactttggcgcaggccattttggcgcaagactctatatcattttgatttcacagcaaaattaaataatcttggtatgattttaagtggcttgatagtgcctattaacctgcaaagtttcaaaaaatttagctgagaaacaaaaaagttatggccaaaaaacctcaaaaatgcattttcctggccattttggcgcagcgcgccatatcttttttaaaacctaatataattttttgaaattttgcaggctaataaagaacatttagacctattgattaatatcaacattattttatttggtcgaattaaaaaaaagttatga

SEQ ID NO: 56910 - DNA, 1180 bp, Heterodera glycines
atgtttggaactattctgctgaagccataccttcttctggccggcttatgcctgttcatatacggcaccgaggcatggaaatgcaagcctggtaaaaagggaccgaccggtccaccaggaccgcttggaaaacctggagcacctgggaaatgcccgacgaagccaaagtacggcaaaacaacaacacccaaatacgacaccacgacttccaagtacggcactacgagaccaaaatatgacatcacgacttctaaatacggcacaacaacgccagaatatgagacaacgacatcgaaatatgggaccacaacatccaagtacgacaccacaacttccaaatatggcaccacaacatccaactacggcacaacgacaccacaatatgacactacgacttccaagtacggcaccacgacgccagaatatgacaccacgacttccaaatatggcaccataacatccaagtatggcacaacgacgcagaaatatgacaccacaacttccaagtacggcactacgacttccagatacgacaccacgacttctaactacggcacaacaacgccagaacatgacactacgacttccaattacggaactacgacttcggaatacgacaccacaacttcgaaatacgacactacaacttccaagtacggcacgaggaccccgaaatatgacaccactacatccaaatatggaacaagaccgcccaagtatacgcctagcaaaagatcggccatgtcggagtttgcggtagaatattagatgggaaaattttgaaacaaaataaggaaaaattaaaaattgtacaggatgcggtagtgatcagagctgctcgggctgagtttgccgacaaaaaatgcccagtggggcgccccggcgatgccggccccgcggggccaccgggccctccgggcaaaccgggcaaatgtccgtcaccggtggaacgctatgtcaagaaaagcgaagagaaagaagggtacaagagaaaggaggaaacggaagaaaagaaagaagcggaacgggagaagcgttatgatcatagcgttgaaagcgacgggttcgattttatctcaattctcagtttcgagtcttaggttctaatctcggtctcgatttttggggttgctcctagacgcttggactcaattctcaggggttaatcaatcgtagggga

SEQ ID NO: 56911 - DNA, 257 bp, Heterodera glycines
atgcctcagggaacaacagcagagccaatcagtgcgcttcaaagttatgccccgaattggatggatcaattctgctggcagttcgagcacctaatttatgcgatggtgtggaaatcgaatgcatatgaaaggagagagataaaaggagatataaaaacagatttatccagaaaaactttgttgttcattaaaaatatggatttaaatgcgaaaaattgaaatgcaaaaatatataatacagcaatttttattttcca

SEQ ID NO: 56912 - DNA, 1643 bp, Heterodera glycines
atggccacttcaacggatgagggcggaagtccgagggcaaatatggaggagggattgttgtcattgccccgggactcggtgactttgtcagtgccaagcagcagactgaaaatgccaagacggtccaaaggtaagtaagtacaacttaattggcccatgagcttgatgggcatggcatattcctgcctctcgaaatgaatagtaaaaattttaaattttcgataaattatcaaattttttgtaaatttttgggccaattttttctcagtaaaatttaataaaagttggttttccccagtttttcccatatttgctgtacctttgcactctatccctcaagaattaaatgaaatgaatgtgaaaagagcgggagagagaaaatgaaaattatagatgcagagcggaagtgggaaagagaacggggagagagagagaagagagggagagagagagagagagagcgatagaaattgaaaatagagaaagcatagagacaaaagtggcagaaattggagatacaataggcataaagaattgtgaaaataaatagctaattcatagaataaggtagcgagagagagagagatagacgagagaaagaacaaggagagagaaacagagggagagagagattaatatatataaagagagaaagaaagagagagtctgagtgcaaagagatgtgtgccaatttatttgctaattgctttgtttgccgccgccactttatgccaatggccatgtaatgaaaagccattttcattattacagaggacaggttgttgtcggcattaggaccattcatttatttgttcctgccaaagtcatcccatcccattaaatcccctaatttatttaaaaaaatgttttttgttcgccaattagaaagcttggcgttccatcgcgacccgttcaatcggccggaattggtgcacaccttgcgcgggcgtgagcttgtactgtttgtgttactgtacgcaatcggtgtgattgccattgtgttcatatttggtgagtgcttttttgggtggaattttgccgaaattggcattccaaattttgtttgtagcacttttatattttggtttttgagttgcaacaaaattttttgtcctattttttattttcaatatttcaaaaaattgccaaaaaaacgaaaaatgttcccttgagaattaatctatttaaaaaattgaattatgaatttctattttaaaccaatttttcccgtctaaaagtttttagtgattttaatgaattttaagaaattatttttgtctctgtgaaaaaagggtaaaaatttaaatgaaaaatatcaatttttcatttttatgtcaattttaaaatttttaaaatttaatttcaatcaaaaacaaaaaaaatggcaaaatttttcgataacaattacaaaaaacagagtgtacaatgcccgtgttttggatcaatgatcaaagtcgcgcagagcagcgccgtcgtgccgcaattgtggtccgatcggcacagaaagtgatgctggaccgagaaatgccatcgtcaattggcccactcagaaagacatgagcaaaaagaactgaaagacaaatcagcaaatttgatcaaaacttttaatgcatgcttatagttaattagatttatttaataaa

SEQ ID NO: 56913 - DNA, 298 bp, Heterodera glycines
atgaatgtgaaatttgtgggtctgaggaaaattgtgatattttgtagagatgcgccgtgaatcacggtcacggttaccgtgaatttcacgggttttttcactcacggtcacgattcacggtaccaattcacggttattccgtgaaaaatgtacactggataaaattgaatatttacaaattacatattgttttcatagagaaatttagtcattttttgggaaatttttgctaagaaacagagcaaaattttcaaaaatttccccggcggcgtctatcggcaccgccggcccaatttaa

SEQ ID NO: 56914 - DNA, 799 bp, Heterodera glycines
atgaaggagtgtttgaagaaaaaattggcacaaattgacgaaatgccaaaattggtccgagttttttgtacatttttcactggacatattgatgccgataagttgattgatgctctgctacactcgggctggtccacagttttcaacgctcaaattggcgaaaagaaacacggaaaaagcattttggagaaatttaacctggaaaattaaaagaaaaattggattgcaaagaaagtgttgacaagtatcactcgttagttgtccttgtttttgcttcattttcagagaaatttcattaactttttaagcaatttttttggtgcttttagaccatacaatcacaaaactttgtcatcccatgtgatcaattagtgatgctcgagagcgaacattcccttttctcgaaggactcgagactaacacaaaagcacagccgactgaccaatcataaaatggaaaacccaaaaaaatgacaaacaaaacaatagatttaatttatatgaattttttttgaaggttactaaaatattgtcccagctcctcatttcttaacagggtatttttgactgaaaactcaatttctttaatggcgtaaaaaagtctcgaaagccaagacttaaaaacccgtgacttgagccgagaacaaaacatccgaatcgaattgagtccgacactctcgagaatcactactgatcatcagacttcactctttctctttctctcttttttcaaattattaatcccactatttatcatatagtgtttttttcgcctttaattgttttcaatttttcggcga

SEQ ID NO: 56915 - DNA, 604 bp, Heterodera glycines
gctatcccccgttctgctcagagactccccaggagacatacagaaaagtgatgaattggcagcaaaccctcgcttttccgcccgaaatacctatttcaaccgaagcaaaaaatgtaaattttctgactgtcgataagcacttgttaatgctttctttctgcagacaataaaagggttctgttgcgaagttgacaagagactcggcaaccattcgggcattgaaagcatcaaacagtgccctttctttaagagggtcgactggcagaacataaggtccctcactttttggttctttatacttctttttaaaggcttttgccggcccccattcgcatcgaagtgaagggaattgcggacacttccaacttcgaccactttggggattccgatttggccttgcgtatgtgcacacattgaatgcttttagacattttttcgtatttcccttttagccggcgttaaggaagttgcctctgacaattcgacaccctccgtaaccgacaaaggcgaatttgtgcattacacattccaacgttttcaatgtttggtatggaaagcccatgtatttgacactcttctccgattcagactcagcagaaaaggt

SEQ ID NO: 56916 - DNA, 489 bp, Heterodera glycines
  unsure (1)..(489): unsure at all n locations
aaataaatcgattttttcaagtgtccgttntggggtactcaaacaattantggggagcaaaaatccaacgcagaattaaagtacaggctatagtgaagctattccggaaggattcggtctccccataaatctgggcgcatcggttcagggggactgccccgaaaacccaaaaaaaaattttttggataaaaattatttaaatgaactgactagataatatttaaaataggtttttctcttcctttcagtatccctgcaaagtttggtgcgcttctgatcagtttctgaaaaaaaagttaagcctaaactttttggcctgtttaaaaaggaattaaaaatttttaaaaattttattcatctccctttttgatagaaaaagcatcagagtgcctaaactaacatgtaaataaaatttggtgcgtttcagaaccctttctgaaaaaatatttaagaattaattttgcaaaaaataaataaaaacgaaagact

SEQ ID NO: 56917 - DNA, 367 bp, Heterodera glycines
atgggcaaagatttacagtaatattctctcgtaaatgaaaaattttattttgaatttttccatttttttaattcaaaaataacttccaatttgataaaaatatttaatgattaatatattttttgctttcatactgtacatttgcttttaattattttttttttcatttcaggcggatttcacatggtaaactcgcaattgatccgataaagacacaaaatcattgatcgcttaattatatagattttgtatacattaataatgctttttggttcgatcaatctgttatgcaatatttaaaaacaaatagtgtaatatgcgtattattgtaactttaaaaatattatttcgatttcatgctttttca

SEQ ID NO: 56918 - DNA, 1064 bp, Heterodera glycines
atgcgcagcggtgccccgcttctcctcctcccctcccccgccgttgtgcttttcctcctcctccgcttcttccggtgccgtgttgcagtggtggctgtcgcaaaggttgcacccgccgtgtccgttcagcgactggcactgcgcattaaagcgctcgcaaaagtcgtactcgccgttgaacacgcagtggtgataggccaaataggcatggcgactgtctgtggacgaaaagcattgccaagcgccgcagaaatcgccggccgattttgttggactgaccgacacggcacgtcgcattcagacacatggaccccgcataggaaatgcagctgatgttccgcttctcctccgtggcccgcagagttccgctcacgtcgttgatcaaatcgtacatcatcatatttaaaggattttatgccaaaaggaaatgaagatgagaagggcattttaaattcaaagagtgaaaaggaaaagccaccaaatggaaacgaagaaaaaacaatttcaaagcgtaaaaataacacaaaaaggaaaaattaaagtgaaaaaggaaaagagcaagttggaaaaagtgaaaatagcgcaaaaagaagtgaacctaatgaaattggtactgaatcgggcgaaattgatgaaaatgataaaaaaagccgaaaacatcagtataattggccaattttttattaaaactaaatgtgtttttaggtggcataaatctcaatgaagaagcgcatacgagtctaaattcgcatgatttagcgcaaaatttaaatgagaaatggcatgaaattggcacagtgccaaaagaaaaataagaaaagggcattttaaatacaaaaagtgaaaaggaaatgccgccaattggcgacggggaaaaaataatagaagaaaaagacaatgaaattgcttctgaatcaggcgaaattgatgaaaatgatcaaaagcaaaggagcgaaattggcattgtgccaaaagagaaaaatgaaaaaggcattttaaaggcgaaggaaatgcaagaaaaaacaatttcaaagagagaaaagaagccaaaaaggaaaaataaa

SEQ ID NO: 56919 - DNA, 327 bp, Heterodera glycines
atgcgacgtgccgtgtcggtcagtccaacaaaatcggccggcgatttctgcggcgcttggcaatgcttttcgtccacagacagtcgccatgcctatttggcctatcaccactgcgtgttcaacggcgagtacgacttttgcgagcgctttaatgcgcagtgccagtcgctgaacggacacggcgggtgcaacctttgcgacagccaccactgcaacacggcaccggaagaagcggaggaggaggaaaagcacaacggcgggggaggggaggaggagaagcggggcaccgctgcgcatccgcacgacgaaatgccaaccgaaaaggcg

SEQ ID NO: 56920 - DNA, 114 bp, Heterodera glycines
aaaattccctcaaaaataaaaggtctattgcgcaccgccctccctatcatgctcgagagcatttgtatgtgtataaaatttatcaaaaaaagagatagccatttttctgggata

SEQ ID NO: 56921 - DNA, 1821 bp, Heterodera glycines
atgcttcttcttctcctgcgtctcccacccgtcctggatccgaagggattcaacggcaaatttaattatttaaaaagtgcgtttttgtaatgccattttcaaatttcagtttggcttttgccaaaatcagcaaaatgctcggtggcaaccttcgctttgtgatttctggcggtgctccgctcaatccggagacgcagcggttcatgaacatttgcttctgttgccccgtcgttcagggctatgggctgacggaaacttgcggtggcgccactttggcggatggtcgttcattcaaaaaaacatagtctaagcaaaagcattttttcactttcagaacacgacctcagcaccggttcggtcggaccgccgcttcggagttgtgaaattcggcttagagaatgggaggaaggtaaaattcaattttgaaacggtcccaaaagattaatttatttattttttcgggggggggggtttgtgtcggcataattaggtccaatggcggacgtaattgaaaatttattcccaaatgcatatctttctttttcagctggttatttgcccacaaattcgcctcctcagggcgaagttctgatccacggggccaatgtcgcgttgggttacttcaaagatgaggagaagaccaaggaggacttcgtcgagttggacgggaagcgttggttcgccaccggagacattggccaattccgtaagcaattgactgccaccaaaagcattggcataatgacaaatttgttcatgtttaggcgaggatggcagtctctgcattattggttttaattagtgagtgttgttggcaatttctctctcattttcagaccggaagaaggatttgatcaaattgtcccacggcgaatacatcgctttggggcgcgtggagacggcgctgctgaccaatccgaacgtggacaacatttgcgtttatggcaacccgcaaaaggactatctgatcgcacttgtggtcccaaatcgcaaaaacttgcaagcacttgctgaaaaggtgggagtcaaaaacggaaaacaaccgtttcgcgtcatggcaatgatataattaataagccatcgcttctcccctcttcagaatgccgtcaatgagtcgagttgggaggcaatttgtgccaacaaagaaatggccaagcttctggaaaaggaactccaaaactttgtttcgggtcttttcttccggccaacctttgccttattaaacaactctttttcagggaaattgcgcagggaggaaatcccgaggaaagtcattatctgtgcggagccgtggactgccgactcgggaatgctgaccgaagcactgaagttgaagcgcaagaacatcgagagaaaattcgcggaggaaatccgacagctttatgaggggaaatgattgggttgttaattcccggaggctatttcgcttcaatttgatctcgaccatcaaatcaagcagtttcattgtgccgtaattgccatcatcatgagctttgtacccccaattatacgcaattaatttttgttcggttttcattggtcattcttctgtcagtgcgcgtttatttatttttgatattcgttagggcttttgtcgagagaaatgtccccatttgtcgctattaattaatgtgtaatgtttgaatttgtattggaattgtacaatttcgtaaaggagtaaatggtgaaactccatctaattttatgtttttggttggtttaaaaataggtaaaacagcaggtccaattctaaagtacagccaaattgcttatgtatttattgtcattaaaaaaagtatgccccataaattaaaaaataaa

SEQ ID NO: 56922 - DNA, 3409 bp, Heterodera glycines
aatcccgcaatcccgcacgccttacatcggaattttaaatgcgggatttgcgggattaatccctcgtgatcccgtcccgcaaaaaattttgagttccagtcccgcagcgggatccgcaaatttgaaatttcccgtctctagtgattagtattactaattagatgctgcctttacactttgttttattaattattatgcgtcgtttctgttcagtgtttgtcgcctgcgttatgttggccgttttcggctacaaagaacttcggaagagaggcttttttgtagcggacggagaaagacagaacgaaaatttgatttagaagagagccgaaataatatttattcatttattttttaatttatggggcatactttttttaatgacaataaatacataagcaatttggctgtactttagaattggacctgctgttttacctatttttaaaccaaccaaaaacataaaattagatggagtttcaccatttactcctttacgaaattgtacaattccaatacaaattcaaacattacacattaattaatagcgacaaatggggacatttctctcgacaaaagccctaacgaatatcaaaaataaataaacgcgcactgacagaagaatgaccaatgaaaaccgaacaaaaattaattgcgtataattgggggtacaaagctcatgatgatggcaattacggcacaatgaaactgcttgatttgatggtcgagatcaaattgaagcgaaatagcctccgggaattaacaacccaatcatttcccctcataaagctgtcggatttcctccgcgaattttctctcgatgttcttgcgcttcaacttcagtgcttcggtcagcattcccgagtcggcagtccacggctccgcacagataatgactttcctcgggatttcctccctgcgcaatttccctgaaaaagagttgtttaataaggcaaaggttggccggaagaaaagacccgaaacaaagttttggagttccttttccagaagcttggccatttctttgttggcacaaattgcctcccaactcgactcattgacggcattctgaagaggggagaagcgatggcttattaattatatcattgccatgacgcgaaacggttgttttccgtttttgactcccaccttttcagcaagtgcttgcaagtttttgcgatttgggaccacaagtgcgatcagatagtccttttgcgggttgccataaacgcaaatgttgtccacgttcggattggtcagcagcgccgtctccacgcgccccaaagcgatgtattcgccgtgggacaatttgatcaaatccttcttccggtctgaaaatgagagagaaattgccaacaacactcactaattaaaaccaataatgcagagactgccatcctcgcctaaacatgaacaaatttgtcattatgccaatgcttttggtggcagtcaattgcttacggaattggccaatgtctccggtggcgaaccaacgcttcccgtccaactcgacgaagtcctccttggtcttctcctcatctttgaagtaacccaacgcgacattggccccgtggatcagaacttcgccctgaggaggcgaatttgtgggcaaataaccagctgaaaaagaaagatatgcatttgggaataaattttcaattacgtccgccattggacctaattatgccgacacaaacccccccccccgaaaaaataaataaattaatcttttgggaccgtttcaaaattgaattttaccttcctcccattctctaagccgaatttcacaactccgaagcggcggtccgaccgaaccggtgctgaggtcgtgttctgaaagtgaaaaaatgcttttgcttagactatgtttttttgaatgaacgaccatccgccaaagtggcgccaccgcaagtttccgtcagcccatagccctgaacgacggggcaacagaagcaaatgttcatgaaccgctgcgtctccggattgagcggagcaccgccagaaatcacaaagcgaaggttgccaccgagcattttgctgattttggcaaaagccaaactgaaatttgaaaatggcattacaaaaacgcactttttaaataattaaatttgccgttgaatcccttcggatccaggacgggtgggagacgcaggagaagaagaagcattgcccttttgatgttcagaaaccaaaacctgatggactacgtgttcggcatgctcgagcagtacgccagttcactggagcaggaggtggaggagcgcaccaaagagttggtggaggagaagcgcaagagcgacattctgctctatcggatgctgccgcggcaggtggcggacaaactgaagctgggcgaggcggtggagcccgagtccttccaaatggccaccattttcttctcggacgtcgtctccttcaccactttggccggcaaatgcacgccattacaggtgacaaaatcagtgatcacatcagactggggaagctgagtgatttgttcaaaacttacaggataatcactctgatcagtctggggaatctagtgatttgggcagaagaaatgtagttggtgataacgaatgggacttagtctgactattgtgatcaacatccattctgatgataatatgattcttacgtcctccccctctccgccgtttaggtggtgaatttgctgaacggactgtacaccgcctttgacggcctcatcgacacccacgactgctacaaagttggtcagtcagcggccgatcacttccatttgatcattttacaacgcatttccccgcacagaaacaatcggcgacggttatttggtgtgttccggcattccgaagcgcaacggcgaccaacacgcgaaggaaattgcggaactttcgttcgctttcctccgcacggtgtccaacttccgcgtcgaccacctcccctccgaacgcgtcaatctgcgcatcggcttccattccggtccctcccctcccctcccatttcaaatttggcattttcaggcccagcagtcgctggcgttgtcggtctgacgatgccgcgctattgcctttttggggattcggtgaacaccgccagccgaatggaatccaacggaaagggtaaaattggggggggggggggggggagaaaacaaattcatttcccatttcagccggcaaaattcacatttcatcgagttcaaatcgcttcttgaccagcgtaatcggaggatatgtgacggagccaaggggcgaagtgattataaaggtaattaggggggggggggaaaggcttttgttaattaattgcctaattaattcattagggaaaaggtgtgatggagacattttggctgttggggcgaattggcgaagtccatttgccggaggggccatccgtgccggaacggaagagcccagcggaaatg

SEQ ID NO: 56923 - DNA, 1848 bp, Heterodera glycines
  unsure (1)..(1848): unsure at all n locations
tccacccagaattgaagatgggtttttagacttattgtcaatccgagaaacatcatcaattcgaattaaatctccaaaatatttggtacagctggaattaagtaatggaaaaagagagagcttaattgtcaacagaattgatcagattacgggtaaactaaagagaattgacataaattcgggcaaaactgaatttattgatgaaaaacctgacatactaattggaatggcagaattttggaaattctttaaaagtgtcgaacagattaaagaaaatttgtttaaagtggacacaacagtcggccctattatttgcggtcaaatgaaaaataattcgggtaaattggaatcattatttgaaaatataacagccgcagtcagtgtaaagactgaggaaccaaaacaattttggaatttagaaactataggagtatgggataacccggaagagaaggatgatgagattgccttgaaaatgtttaaagaaacggttcaacgaaaaaatgggagatacgtggtaagttggccatggaaaggccctagagaagaattaccaacaaattttgctatagcataccggcgtttaatgagtatgttagaaaagatgagaataaccccaagtcagcttanagcattggatgagtcatttanagaaaatttaaaagagcaaattgttgaagaatcctcaataaaagggtttggcgaacattttctccctcatcattgtgtcttcgcaccgggaaaaaagccaaggattggttatgatggctcagcaaaaccaaggagtggtaaatgcctaaatgacatgctttttcgcggcccaatcgaaatgccacagcttccagggcttttaatgcgatcacgaataccaaaaattgctttatgggctgatattcaacgagccttttggacattggagttaaaagaggaagacagagaatttgttaaatttttatgggtaagagatataagaaaaccaattacaaaagaaaatcttctagttctacgttttaaaagagtaccatttggagtaatttcctcaccatttttactgggtgcgacggttcggtatcatttaagtcaaattgattcacaacttactaatgaaattcaaaaaaatttatttgtcgacaatgtttttgtaggctgtaaagacgaaaaagaagctatggaaaaatatgtgtcaatgaagcaaatatttgcggatgctcggatgaatttgagagaattcgtttcgaattcttattgggttaataatcagatactagaaaatgatagactcggaaaagaaaaaccaaagattatgggtgtacaatgggatgtacaaaaagatgaatttttaattaaatttgcagaaccagcgaattcaaaaatgacaaggagaagagttttaaaggatttaaactccatttttgatccttgtggatggacatcaccatgtcttttaccggcaaaattatttttccagactttatgggactcggaaagaaaatgggatgacaatttgaacgaaaatgaatgtgaaaaatggattcagatcacacaaaactggaaaaaggctaatttcacacttaaaagaagaatcgaaatgggtaaaagtgaaaataatcaattacatgtttttgtagacgcatcgaaggatgcatatgcggcatgtgtttatttcagaaatgattgtgaaaaatgtgaaattaatttattatattcaaggagccgcttaaaaccaagaaaaatgaaagtttctataccaagaatggaacttttaggggttttgattggaacaagggctatgaaattcgtggagaacgaattgggaataaaaataaaaaacaaattcttatggtgtga

SEQ ID NO: 56924 - DNA, 691 bp, Heterodera glycines
  unsure (1)..(691): unsure at all n locations
atgaaagcgagttgtctgactggtgcgtgagttacattttttaagaaaattatgagaaaaatttttgacaaattttttactcggaaaagggatcacaattcctttncaattttttcgataaaatcctaatcaaaccaaatttccttgggtgtctttctttagctcttaatttttttagaaatccttcaaaatttcactcagaaatttggctgggcaaaagaaagttaaaactaaaaagttgtgaaatttgattgacttgagtttttgagttattttggtcattttttttttaaattttgcaggtttaagaacagattaaaaattaacaaaaagaccaaatgtttttgatttatttgtttaaaaaataattaaggggtgcacatgatgaaatggaagaaggaaaagaggaagagaaaaaggaagaaggagcagatgaagagaaaaaggaagaagtagaagaggaagagaaaaagggagaaggagaagaggaagagaaaaaggaagaaggagaacaaggaagagaaaaaggaagaagaagaagaggaagagaaaaaggaagaaggagaagaggaagagaaaaaggaagaaggacaagaggaagagaaaaagaaaagtggttgattagtgacaaagagtgaggattagtttttcaaaagacaattatagaattttgcaatagaaatttattaaa

SEQ ID NO: 56925 - DNA, 356 bp, Heterodera glycines
ggaatcgaaggtgttgtaagcttttttcctttttttacttttaaatttatttaaattttcaatttttttagctttttttcgaaaaattttttgtctttttttcggcaggcactgcctctgacaatgttttttatttatttagaaaaataaatttattttttttctttttaatttattttaattatatttcatccttaaattttttaataaacattttcaaactttcaccttattaatttaaggcgaattttgccttttttaataaattctcttgtgaaaaggcaaaaaaataggctcttttaaatatgcctatttaaattactttcattgctttcctttcgcttacgaccatacca

SEQ ID NO: 56926 - DNA, 644 bp, Heterodera glycines
atgtccgaattgaattgcgtggtccaatttgcattgggtgggtgagcagcagacgacctttttttggtgtcatagcaactcgtacaaaatgcaacagctcatacaatttcttaggctatgcctaggcttaggcctaagctataggctagtccttaactttggcctgctctggcctaggctaggctttattttcctaatacatatttcttgattttcgtacgagttgccattgactccttttttattaattaaatttattggtaattgtttagcggtggggtgaatcaaaatcttctcccaaaaatgcgagattcgaaaattttaattttgagtttttgctcaaatccgggttcgggattcgacgtggctcaaaattaatatcagattcgggttctccgctctttaatttttattcaaaaatttatttaactaattattcttcgaattcaaattttaggccattgtctccgcccgccgaccaaaacaacgaaaaaggcgccaatttgtgaacctatggcaattgatgagaaaagaagaaaggaacgaccatttgattacctctgctggacttgatttgatgctatttactctttgaatgtgcttactttttcttttgtttaatggattttcattcaaaaattgca

SEQ ID NO: 56927 - DNA, 367 bp, Heterodera glycines
atgaacaggcggtaaggcatttttttaaaagccacaaattcctcacttatttagcctaattgtttcccatttcagttggatttgcaacgacgtttggatggacattttcccatcctttgaccgtgctcaacttggcctcaaattggcacttctttcgccacgtttcgatgcgttggtggacaaacatttcaatggcaaaagcgaattggcaatttggagaccaatcgaaattcgtcgcaaggacaaaggaccagaaccgaacctatctgtgcggatggatgacaaatctttgcccgaccgtccgttgcccagcaaaatccgttttaagagccttcagattaagtaattaaaaatcagagctatgaca

SEQ ID NO: 56928 - DNA, 804 bp, Heterodera glycines
atggatttacagcaaggatttatgcaaattccggttgccgaggaagacattgaaaagacggcattcatttcacacttgggcatttttgaatttataacgatgccttttggtctaacagcggccccggacacgtttcagagagtcatgaactcgttgagacgacggttaacggcggcgatgttaatttatttggacgatataataattggcagcgaaaccgaagaaaatcatttaacggatattaagaattttcttttattactaaaaaaggttggacttaaattaaaattggaaaaatgccattggggaatgtccgagatacggtaccttggctttttgctaagtgaaaaaggtgttagaattgacccaaagcaggtcgaagcggtacaaaattttaaggcaccaaaaagcctaacagaattaaagtcattgttaggagcactaacatattttcggcgctttatacacaattttgcgcatattgctcgaccattacagacattgactcaagataaatttgaagggaaaattgaagaaaattggggcccagagcaagaacatgcatttcaaactctaaaacaaatgctcacgacagtaccagggttagagtcaccaagattcgcgagagcattcacaattgagtgtgatgcttcgaaaaaggctattggagcagttctccttcaggagaatggtccggttgcttacatttcaagagcattaaatcggcacgaaacaaattacccttcaattgaaagggaggctttggcattagtttatacagttaaggaattctcgccatatatc

SEQ ID NO: 56929 - DNA, 628 bp, Heterodera glycines
atgcagaaattagtgaaatagtaagtaaaaaatataataattaaaataatatttaattggtagagccaaaatgaattgttggcgtattacgagagggagcggttgctgggcgaaaacgatgcgccgttggctatggatggaattatagccgagttgcggggtgaaaatttggcagaaaatgatgacctaattgcggcgggggaggaggtgattataaaaaaataattttaaaataattgaaacgatttatttttaataaatttaaattatcaaattgcaatttttgttaattttaggccgctgggcaagatgggaggaggaggaagaagaacaggaggagggggaggaagaagaagaagaggaggaggagggggaggaggaagaagcaaacgagagtgtgatggggagcagtatatggtccgggtcaattgactcggccattactggcttctccacaatgtcggcaacgcagcgaaaaaaagtgttagggcgcagccgacagtggtggcaagagcgaaaagagcgcaaaaaagcggaaaaggggagatgcgcgaaaactgcaggagcgccggaaaatgataaattgaattttgattaaaattcatttttgtgttgttgttaaaataaa

SEQ ID NO: 56930 - DNA, 1139 bp, Heterodera glycines
cttaaaacaggcccagagcattatgataagctgcacgaaatgattgaacgaaaccccgaaaagtacggagtcgataagtcgtccggcgaaattctaacaaacttcaaaaagccggtgattaggtccaactacattgactcactgatgtacttgacaggacagagagcagatgtgccgaaaggtcatcgattttttgttcaaaaaattggcagcgacccgcaaatgatgaaattttttcattcccaacggggagagggtggtagtaagcggagcaagcgcaaaaaattcgttcttgttaaagcaagcgctataaaaacggtaggactcagccgaatggagcaaccaaataacacgcaacgtaaattctttaaaccgcttctatgggcaaagctgtagtacaaaaattactggaacaagtgtattacgatcttaggtcgccggcaagttacgcaggtattcaaaaagtattgaaggaagcgaagaagcgaaatccgagcattactcttcgtgatgttgaccattttttgcataaacagcgcacctacacgttgtttaaaccgcgcaaaaaccgcttccgcagactaaaaactgtgcccagtggactacacacggactggcaatgcgatttgtgtatcatggacgcgctaaaagagcataatgatggatttcgctacatcctagtgtgcatagatgttttaagtcggaagattttcactgcagaggtagagtccaaaaaaagtgagcacatgattgcggcatttgagaagattttcaataaggcaggtgtgctgcccaataagctgtacagcgacgctgggcttgagtttcaggcaaagaaaatgattgactactggaaacaaaaggagatcatcaagcacgtgatgtacagcccacatttgcatgctggagctgtggaacgcgcaaaccgtacgctgaaggagcgactttacaagtattttagcgaaaagaacacaaagcggtgggttgatgtgctggacagcattgtgcgtaacctgaacagctccgcgaaccgaacaaccggagtaaggccaatggacgtcaactttaaaaatgccgctggtctacggaatcgcctatataaacaaggcgagtcgagtcccaaaacgccaaaatttaag

SEQ ID NO: 56931 - DNA, 1183 bp, Heterodera glycines
atgtctgggtttgacccttttaaaaggttaggaggacaatttattcagattagatgtttttgtcaatatagcagcctattttgaataaacttagtcacaggcatttcactcacagcctattttgaaattttttttaaatttcgaattattatattgtgggtccttttctgtgggccctatgtctttgtgggccctttgtccgcgggtcctttgtctgtggctcctttgagaggacatcgcatttacgtagacatagaaaacataaaaacgaatctccaacagattaataattttttattttatttttatgcttagcttattaaaggcctcaacagcagattattattctaaaaattaattgaaaaattaaataagaccttttttgaatgaaacacaaaaaaattctcccgaactgaaaaaggatcctttgaaatgactctctcagttaattctatttcgaaaataaaaattcgtcattaaataaataattgtttttaataatagtttttttaaaagttctatccaggtgtacatttttcttttccttttttatatttttaaaatatttgtaaaaatagttgcaaaacgccaaaattttggcttatttttagtgtcaaaaaagccaaaatgtgagtttaagacgaatagtgacattattaatagaagcaaagcagattttcagactaaaatgccaatataaaaggcactaacataaataaatttataaaatggtaggcttatatttcatttgaatattgaggaaatttgggtgagatttgcttcatatctttatgcagaatttttgtagaattaattataaataattaaataacattcatttcgcagaaaaaggtagtagcttccgaacaaacattattcttgcatattgttaatggccttttggaagagcttagacaaaatttgaaacaaattaaccaaaagttaaaatggccagcggaaatgaataaaaaagactccgataagcagaaaaaagatcgattatcaatgtccgaagagaagaaaaaagatttattgtcaatgttagaaaagaagaagaacaaggagagcccatgtgaagaaattctgccgctttctggcgccaaggaaaaagatacaaagaaaaagtgagtggtaatttatttttatatttctataaaaaaaatattttaaaaaacgcaataaa

SEQ ID NO: 56932 - DNA, 390 bp, Heterodera glycines
atgaatttcaatcaattatttatatttactattttattaccattgctttttctcataaattctgctaattttattcacgcaagatcagcaaaaatacaatcaaaagcaggtgaaatatttatttataaacaatataataatttaattgaagatttttttctaatttaaatttagtaaaaaaaaaatttttttccttacattattagatttaataattttgaaaattaacacaattcaggcaaaattccgaagattttatgcgattcggttgatgagtgtccgtacggaatgcgctgtaaagccggcatgtgcatgaactagaaaaagaggcgtgtaaaaatcttttgaaataatagatttatgtgtgattatagtttttaaaatataata

SEQ ID NO: 56933 - DNA, 1577 bp, Heterodera glycines
atggtcgacaaattccgtgagactgtccaatttgtggacgatggcgcgccttcattcttgcgattgggagccgcaaaaatggtgaagaaagagcagcaaagacattgccacgcctgtgccaagaaagtgccggacagcgaactgttcatttgcaaagactgcaataagccaaccaaaaaggtgggcggaggatcacaagaaggaagccaaatagttccaattatttcgacctcaaattcttaccaccactttcgaaaatgaatgattggttgcatttttactcatagaattaacaccacggaaattgaattatttaaatttaaaaacagtaaaaattggtgttttaaatggtaaaaactaacaataattcagcagttcatctgtgccctctgtgttgttcgttcgcataaacaggtcaaccattgtttgtttgacaatttcatttttaaaattccattttttccaaaattttccaatttttttagcacactgtggtgacattggactgtttggccagtgagcgcgaccgcgagttggccgcactgcgcattgaagagattctgaatcatgctcaacggatggtcgacgaatcgcgaggcatgcaaaacgacattgccaagcagtttgagacgatgcgcgaggtgaatcaattagggggcaaaaaacaggaaacatttatacacaataattcataatttaaaattgaatatccgtgtggaatgtatggtttaggaaataatatcgtctgaaaacagtccatttttgcagaatctgttggccaaactgagctttttctacgccttgcaaaacgagtgcctgaacggtgaacaaattttgctgaaagagcacattgaagagaaagtatactcggccattcaaaaatgcgaacagcttaatgaggtccattaaattcagtaaacacttcgccaaaaatgactcctccttccatttcttagcattttttgcgactgcgcgagctcaaatcggagtttgaacagcatctcaaacgttggcacagcggtcgcggaagacgcttcatcgtcgatggtgtcgtcgtgcacagctttgttgcagccgatggcacatcaaacgcatcgctttcatggtcattttggcggttcatcatcatccggcatgcccggacagataacagcgcctaattcgtcgacgagaaagtgaggccgtattgggttagcaaatgcctgtttgattttccatgtaaaataacatccctggttgccagcaggtgtcatttcgcgttcctcagcagtcccactgatgctgttgttgctggtgacagagctggcaattcttctgccgaactgatggctgtcgcggacaaatggccgtcggaaacaccggcggaagcagcagcagcaagagggcaccgcccattttggtccgtcgtcgttcgcgtctccgtgtctttgtctttggcgctggtggcccctctgctggcatcagtgcgtcctcaattctttccgccgggcgcactccctccgcgggtgacgaccgcatgtactacggaggtgagccgaagcggcagcccgacttgttcagcttcttcgaccaataaa

SEQ ID NO: 56934 - DNA, 291 bp, Heterodera glycines
atggtcgcccgtcgtgccgaaactgtcgcaatcgtacggcgactgctcttccaattggccaagcaggcgaaccggcgacgcgtgcagcagcgcagacgactgaagcaacagcagcagccagaagatgatgacgaccaacaacagcaggatgatggcgttgctggaggcggagatgatgaacgtgttgaggaggaagaggagggggacaacgacggcggtgatcagcaggaggaggacaatgatgacgattttattgatgatgacgctgttgtttgttttcaatccgactaa

SEQ ID NO: 56935 - DNA, 1001 bp, Heterodera glycines
atggctccatataggatagtcgcttatgatttggaatgcacggtaattgttttttagttgtaaaaataataccttatgatttagacgaatacgattctggatgaaaattcattgaaaaaggagactattcataaacccaattttattagtgcacgatttacctgttcattatgtttgggagaaattaaggagtgcgaaatttgcggtgacggcccccggcatttaaaatggtgtagtatggatagaattgacccgttaaattgttttgttaaatggattataaattttcaaaaatatgatacatatgcatatgcacattttggtggtaaggaataaaataaatttacaaggtgttaaatttttctttaggacgatatgactcacactttattttgagggaacttgcgaatttaggatataagcagccagaattgacaattgcggatttaaaaatttatgaaattaaatttaaaaagggcgaaaaatccccgaaatttttcttccgggacagttggcttttaatgcagaataaattagctcatttaccaaaaacatttggattggattgtgaatcgaaattatatttcccacaccaatttaacaaagaagaaaattacggtaaaaagatttccattaaaaaaaaaattaaaattccaattttaggcaaaatcttggctactctcccaccctttgatgattatttccctgatgaattaagtgaagaagaatatgaaaaatttaaaaaatggtactatgcaaattacaataatggatttattttaggtaagataaaaatattttaattgtgacaaaattgattttagaggaaaaattggatgaatattgttcaaatgacacggacattttaatgaaagcgcttataaaattgagaaaaatttttatagatataacaaaagataaagagacaccaaaagggattgatgttatgagattatccacaacaattgcatcttcatgcatgaattagggaccaaaataaa

SEQ ID NO: 56936 - DNA, 1125 bp, Heterodera glycines
atgaacaatgccgacactgttttgcacgaaatatttaggattaaccaatcgtatagtgagttcgacctacagcatgagcccatttcctgtataataactacatatagtacaccccgaggggcaggtaaaaaaaataattaattaaatttgacataatattttaggatttaacccattggatttttgtgaaattaaagaattagggagaattagcgtcaaaaattcggacaattattgtaagtgaaatggaaaataaatatattaatgtatcttttaggtttattttacgccttaactttaagcagattttatcaattaattaataaaaatgatgaggaggccatttcaagggaccaattcaaaaaaataatagcgaatgaacagagacaatgggaggcagttaaacaattaatgacggatgcaaaaataaatatgaaagaaaaatcatacggattagaacacttacaaattattcaggatttttgggtaaaaataaaaattcaggattaatgagaaattaatttatttaggactcgaaatttccgggaaattttcgtattgttgctttttctagggatgttgggcttcgtccaatttttaaggggaatggcccccgaaaatataatgtgtgtatttttcatgacaaaaatcattgggatggtgggtttgtatagttttttcgtaataaaaaatgttttaaggaataaaaagtataggacaattttttaacattaaacataaatattgtattagttgtgaaactacttatcaaattgaggaaaaacatagtttggagtgtgaagagaggtgtaaaaaatgctgtcgaataggtaacaataaaaaagaaatcttttaatggaaaatttaaggctttggtttcccttgccccccggaaagaaaaacatttaactgtgagaagtgtaacagggctttttttaatgagaattgctttgagcatcacaaaaataaaatatgttctttatatcaaaaatgtaaaaaatgcaaaggagaatttaggacggacacagaacataattgcggtaagttttaaaaatgaatatttataataaataaaaaactttttcgtatttttagatcagaaacattgtagaaaatgtcatttaa

SEQ ID NO: 56937 - DNA, 1002 bp, Heterodera glycines
atgaccgcctataggatagtggcttacgacttggaatgcacggtaatttgtttttaggtctaaaaataatatatttggtttagacgaatacgattttggatgaaaaatcattaagaaaagagactattcataaaccaaattttattagtgcccgatttacttgttcaatatgtttgggagaaattaaggattgtgaaatttgtgggacgggaccacggcatttaaaatggtgtagtagggatggagtggatcctttaaactgttttgtaaaatggattacaactttggaaaaacacgaaacatatgcatatgcacactttagcggtaagatttgaaaaaacaatgaaaaaaatctaagaattttttagggcggtacgactcgcactttgttttgagggaacttgcaaatttgggatataaacaaccagaattgacattagcagatttaaaaatttatgaattaaaatttagaaagggagagaaatttccgaaaattcattttcgggacagttggctacttatgcaaaacaaactggcacatttaccaaaaacatttgggttggactgcgattctaaattatattttccccatcaatttaacaaagaagaaaattacggtaaaataagatacaaaaaacaaaaaaatgttattttttaggcaaaattttgactacactcccgccttttgaggactatttccccgatgaaatgagtgaagaagagtatgaaaaatttaaaaaatggtattattcgaattataacaatggattcttattaggtaattaataaaaattaatgtgtttaaaataaaatttagaagaaaaactggatgaatattgctcaaacgatacggatattttaatgaacgctctattaaaactgagaaaaatatttattgaaataacaaaagatgaggaaacaccaaatgggatagatgtaatgagattatcgacaacgattgcatcttcgtgcatgaagtaagttttaaaaaatgaaaataaa

SEQ ID NO: 56938 - DNA, 689 bp, Heterodera glycines
atgaacaatgccgacactgttttgcacgaaatatttaggattaaccaatcgtatagtgagttcgacctacagcatgagcccatttcctgtataataactacatatagtacaccccgaggggcaggtaaaaaaaataattaattaaatttgacataatattttaggatttaacccattggatttttgtgaaattaaagaattagggagaattagcgtcaaaaattcggacaattattgtaagtgaaatggaaaataaatatattaatatatcttttaggtttattttacgccttaactttaagcagattttatcaattaattaataaaaatgatgaggaggccatttcaagggaccaattcaaaaaaataatagcgaatgaacagagacaatgggaggcagttaaacaattaattaatgaaaccaaaatcaatatgcgcgcaaaaaattatggattagaacacttacaaattattcaggatttttgggtaaaaataaaaattcaggattgatgagaaattaatttatttaggactcgaaatttccggggaattttcgtattgttgctttttctagggatgttgggcttcgtccgatttttaaggggaatggcccccgaaaatataatgtgtgtatttttcatgacaaaaatcattgggatggtgggtttgtatagttttttcgtaataaa

SEQ ID NO: 56939 - DNA, 634 bp, Heterodera glycines
tatggcacggaaagacttccgatttccaacatttttggggtcggaattccgacttccgaaatttttgatgaaaagtcggaaattttttaattttttttttaaaaactagtaagttttctacaatttcagtagttaacagcccgtgaccttcgccaccttcgccagctgacactaattagaagtgacaggtggtggaaagggggtgccaattagtcactaattgactgaccggggtgcgctaattggtatggtcagcagtgagaggggtgacaattaattagttaattggggggggggggaaccaaaccaaaacctattgaacggtttcaaattgtcttgtacttttttgacagaaaatttgcttgatttaaaaagtgacagacgaggggaggggggaaattttttgattggaaatttttgattggtcaccagtgacagatggggaaaattatgatttgtcataaagtgacagatgaggggaaattcaaattttgggagggggttcgggaattcaaagtgacatttgcggggaaaatttaaattttgctgtgagttgtattttgatagatcaccaaactgacagctgagggaaaattcattttttttagttgtagtaccactaatgacctattag

SEQ ID NO: 56940 - DNA, 1112 bp, Heterodera glycines
atggacgactcaattctcgcaagcattaatgacgacgagaacaaccagcaacaaatgatgccgccaccacaaccactgtcatccgccgccaatgccttttccaaccacggcagtgcgtcatcatcgtcatcttcggcacatgttgacaatttgctgctgcacagcaccaacatgatgccatcgacagcatcggcaacagacaatttgtttgtggttgcggaccaacaacaacaacaacaacaacaacaacaacagcagactgaaaatgacaacaataacaacagcaacggcatcatccaatcaaagcaacaacaacaacaacaagctgaacaaactgaacgacggagtccggaagaagtggtggacgagctgatcaggatagccgaggctaggttcggtgtgaaaatttttgagacaatttttaaaaattacgcaaagttttggcgttcattggaaatcccggcaaatttgaaaaatgtggagtgtgcgtcctgaggccgaagaagcggccgaattaaaccttaaatataaaaaaggcgcgtaggaagccgcgcatgcactagcaacgaagtcctttgcgcgaagcgctcatgtcagcgcccgcccatatataccaaaagtatactgtctacaccgagcaattactatgcaaagcatactgtctacaccgagcaactactgcgccccacgctagtttatactactatagagaaacgttgcagttcgtcttaaaaaacaaaatctcccggccgaaggccgggagcgccctgaaagtagtggatgggtcttacaactttttgaggcgcatctgggaaaaataagggttttccgctccggtggccaactgagtcccggcggctgatttctcacttttgcttgcgtttgatggcccataactttttttctaaaactctgatcaaaaaatgcttgctggtaggaaactaagttgaagtgttttctaattttcaaaaaaaattccaggcctctacctatacttggaagggctgcagaaattggcaacttttcagtaccaactttgcccagttcagtccccgttgaataactcattaggctttgacctgagcgcggggtggccggcggacttattgtag

SEQ ID NO: 56941 - DNA, 480 bp, Heterodera glycines
gggctcatccatacccaactcatccatgacccaactcatccatacccaactcatccatacccaactcatccatacccaactcatccatacccaactcatccaaacccaactcatccaaacccaactcatccatacccaactcatccatacccaactcatccatacccaactcatccatacccaactcatccatacccaactcatccatacccaactcatccatacccaactcatccatacccaactcatccatacccaactcatccatacccaactcatccaaacccaactcatccaaacccaactcatccatacccaactcatccaaacccaactcatccatacccaactcatccatacccaactcatccatacccaactcatccatacccaactcatccatacccaactcatccaaacccaactcatccaaacccaactcatccatacccaactcatccatacccaactcatccatag

SEQ ID NO: 56942 - DNA, 569 bp, Heterodera glycines
atgcggcggcccgtcaaagcgaacaacaacaacagccgaatggcggtaagttttgcattttcgtgtggtatgagtttggtttcaatttggggcccattctcaaataatgactttcatttgctatgagggtgtaggcaatgtggggaacggcggatatgcaatgaatatttatgctccaatgttcgccgcttgcccaatcgattccctcgctctcccccccccccccccccacttgtctctgtatgggtaagaggcaaacgctgcggcatttgtaaataccgtcactatcgattttttacacttaaatttaagacattccttttcaaaaaaagagggaaaaaacggattaggtaggtagatatatgggccactaaatttaattttaaaaaccattaaactgtatactaattttaattttttcgttgttcagcaggctctgttccggctccgcaacaacaacagaatcaggaaaatggcatggagagggccaacgttgaccaggcgctgaacgacgaggctttgggggcacaaaatggtgagtgattttccttttatgactagaaagagca

SEQ ID NO: 56943 - DNA, 693 bp, Heterodera glycines
atggccgaaatatgggataaaaaggccaaaatggcgaaatatggatttattcccgaaaaccaccaaaatatggatttatatggactaaaaaccttcaccaaatcaaaaaattttaggtaatactgtgttttgtccccccctttaatttttgaaaaaatttccatataatttataaccatagtaatattcatcttaaaattggtttaaaaatctgaaataattcatgcttgcttaacttttgaggctgaacaacaaagtacttcacacctacttgatcagatcactccttcatggtgatctgtctgaacaccataaaatacactgaaaactggagtaatttttgaaaaaaattcctaggatatgacttgtacataaaaagttatacttcattgaatttttgatgattataaaaaatcattattttaccgaatttcaagggaaaatggtcaaaaaatcgatgacaactgtccgaccttgaccaactgcaaatccccaaagaaatcgactcagacaactgcattcacgagtacgctgtgtatcaataaatagagagtgccagagaaaaacaatatcttttttttctctaattttgtgtctccttttggcgtactatctaatatttctattattagcagggctgcaaaaaatatgcacgaaaaataaccaaaatatgcacataaatatgcaaataaa

SEQ ID NO: 56944 - DNA, 154 bp, Heterodera glycines
taggctaatagagcctgtgaagagctttcgaatgatatcaagattgtttgattcggtcaataacttcaagagttatattgactcaaagttggctcagacggagttggccagacggagttggcccgttccgcccacactatgggtcaaacccagt

SEQ ID NO: 56945 - DNA, 137 bp, Heterodera glycines
aatgaataaaaataaatcaaatgttaaaaattcacaggtgattaaaatatagtgtatatgtggcacagaaaatttcctactcagaactcattgcttttagtaaacccctgaattcctttgccttattaatttgcacc

SEQ ID NO: 56946 - DNA, 230 bp, Heterodera glycines
  unsure (1)..(230): unsure at all n locations
atggcttataacgcatcgactgacgtggtagacagacattaaattttatttcaaaatctcccttttatttggccattgaatatttttgattaattgtttttcagtggttccaatatttcaattcaaatgggccccaatgggtgattcttctggcagcgtatggctttcgagctttgtgggcaacccttggcattatggatcattntggcattgtgtacatcaccccntaa

SEQ ID NO: 56947 - DNA, 777 bp, Heterodera glycines
atgacatcacataactctcgcaatattagcgttagtgaatttgccaaacatttgagtgccaccgtaggacgcagtaccgtatttattgttgttgttttgccacggtcggctcactacggtacattgaggttgcactgctgagactgatgtgaccgcagaacccagccctttcactttgataagccatgggaaattttgttggaagcgattacggtactcattactgtgaggaaggaaaataaaaatcaatcagaagggcataaaacaattacataaaatttggaatatagtaaaaaataaaaatgcttccgtatcacctgataatgtacagtactggtgcatttgcgctgtatacggtaattgtgaagaaagaaaaagcgatggaaacggacgttttgacaaaaacatttacaacgacaaagctttggaagagcatgttgacgctgcttttgaggaacacgccgaacagattgagcgcaatgataaagatcagagacttggtcaatttgcgattgttggcattcatatcggaaattattgatttttaattttaaaaataattatttttaattcaaatttttgaaaaacacttttcgatgtcgcgttgaatttgaacaccgtaaaccagcacagggaatacagtaccatcagtgtgccgctcaatgacagcccattgattttcatcagagtgcccattccgccgtagcccatttcatttgtggtgcaggagaataagcgaaaatgggaaaatcgataatttaaaaatgaaaaattaaa

SEQ ID NO: 56948 - DNA, 1006 bp, Heterodera glycines
atggtcattttcgaggtatgtatttttgatggctgatttaaagaaaatgaaaagagatacagaggcagagaaaacgttagtaaatagagcaaagttaggactataaaaaattataagaaaaaaaattttattacttcaaaaatgaattattggagggccgagtctaaaaatggtctccaaaaacggcatttttcaagaccatcaaataacaaaatgttttaagtggttttggaaattccgaatttaattaaactaaataaattgaccacgctgagtccgaatggagttggagcagtacaagttcagggttaaaagataggtcagatttaaggccatattcggattctactggtctaatttgtacagaaaaccttcttttttgttatatcaggttacttttttgaccataaaaaatcgagaaaaattagtgggccaattttcaatttttgcatggtcgggaaaaaatactaaaaaattgaataagcaaataaaaaatgaaacaatggcatgaaatgaaagaagactttctgacgaacaaaataaaaaaagaattattaaaataactgcagaaattacggagttatgaatttttgaatttgtcaaaaaaaaattgtgcggaaacttatgttacaccctaagtaatagcctaaaatatttttgtgagcatttttggaatttatttgattttgggaaaatttaaaaaataataatgaatattttttaaggttattttgtgttaatgaatatttttcaattttagataaatgccctcttaattaaacaatttatatttgaaaactgtcttacgcctcaccccttaagttcgcctatgaccaaatggttcgcgactgtccgaaaacgtgcaatgtttgcccgggagtttgtgaagatttgggcaccgaatgtccagaccgacaaagggcgggttattgtgggagagcggtgagaaaaaaaagaaaatcaaattaagactaattaacaaaatatttaatttctttaaaataaa

SEQ ID NO: 56949 - DNA, 576 bp, Heterodera glycines
atggtggattggggtcgggaaaagccgaaaatgtcgggtaacggggaaataaataacgatgtagtaaaaggtgaatataaaacaaactgagacgcaataatttaagataattagacgaattacatattaattggtcaattagaaaaagtgaattgaaaaaataaaaaatcaataaagggatattttaaataattatcacatattttaatttaaacagtgttttttttgtcgacagatgccgaaatggaatttgtccgtccgatccatcgcaaatttgccgaacaatgagtgacggaaacgaatattgttgtcagttagttttgtttgataaaagagaattaaaatttaaaaatttaggcccactaccggcgggaccatcaccagcagggggaggaggaggaggaagtgccaatgattcgagtattgtttaaatgcattttgaaaacaaagacaaagaaagggccatataattttctctaaaaatttgaggttgcgcggacgtggccagagactgtgcacaacgtgctgacttatgcataattgaggtgtaattgacagtttgcataattaaataaa

SEQ ID NO: 56950 - DNA, 315 bp, Heterodera glycines
ttcaaagccttctacggaatgtcttcggccactgcgatgctcaaacaccacggcactgtggcggagtaccgagccagcgaaggcaaaacggtcgaaatcccttaccggtggactgttttaatttcaaatgaacactaatgttaaataacaatttgaagaggtgatgttcgagagacggtgaagtcccttttgggcggagttcgctccgcgtgcacttacatcggcgctcaaaaactgaaggaaatgcctaaaagggccactttcattcgtgtccaaatgcaggccaacgaagtgtacagcgccttcgacgcataa

SEQ ID NO: 56951 - DNA, 484 bp, Heterodera glycines
atgttgttcttgcaaattgcctttttgcttttgcttgcttcaattcaattggcaattggatcaccaattctaaaaagaagaggtgagaatttactgaaaatttttaaatttaattttttgtctcctttttgattaaaatttttaaaaacttttattgttatattaaagaacggttgttcttcataagaatattttatattcatctggattctaatgaaaaattttcagaaaaaaaacttcaaaaaaaaatcaatttttatccattattaattattttaccattaaaatttgtgccatttgagacgaaaaggatgccgcgcaatcgtcgcatacaatattgtagtgtcaaacattgataatgattctcaaattttgtcgcaacaaagcttggatgcccaacattgggccttgaccaacggacttgtcaaattacaatgttactccattaaggacaaaccctggccataatcaaattaattataca

SEQ ID NO: 56952 - DNA, 1246 bp, Heterodera glycines
atgacggctgatggtcaacaaatccataaagtcaacttcctgtccgcacgtgtgacctgctccgattgtgctgattctgttcaatgtgcaattgagcaatgtgaaatatgtatgaatgaggatggattaatggaacggagcaaatattgggcagctttctttttgttgcgatttattttatcctggacactgcttgtaaaggagcgaagctgaaggcgatgatccggttgccaactttgtagaatggataatgagggcgtggagtgaagaatttaacacatatatttgggtaataatagagcaacaggcaccaatgtatttccatttaaggcacacaacgcgtccagatttgatggccatttcgttcttcgttatctcggagagaccagaaggagaccagatgttgtaatgaatgggctaaaaatttttgaatttcgcctccaacattcgcgtgggaattcgcttcttatttggcgtgactcatgcctgctcctaccaatacggctggatggactgaaaggcacatttggccttgactgcccggacaaacccttctttccttatggcttcaatcggaggtcgggctttggttctaccaattgtagtcaatcagctatatttttaagagaaaattataccattcgattgccgcagcttcctccaagagacgattattttcctggatgcacgacacggagggagctgaattactttatacggtttttgtttaactgataaatcatcagcataacttaaatcatgtttaggacacagacagcgtaattgttaagcatcgtcgaggagttgagccactgcagactggcgaattccttggacaaatgtcggaggaatacaccggttattccatcaaaagttttgtctgtggaggtgagtgacttcgttgctatgctatcttttttaaactgaagctttactacaaggcgcaaagcaatacgcattaaaaatggttgatgagcgaactggcgaaattagatatgtgcaaaaaatacgcggcataacatttgatgtgcagaacagtcaagcactacaattcgaacattttcgtcataaagttttgaactatggtcgacaaggagaaatgccagccgtgttcagctatgacaaaattcaaccaacccgagcgagtcagattgtaacgcgtgagcagctcaagcgataccttccggtatgccaaaaaggaataatcaccgatgagcttgatgttcttccttttggttatcaatga

SEQ ID NO: 56953 - DNA, 396 bp, Heterodera glycines
atgaaaattgatttgtttcttattatattaacattaatttattcacaaagaaacattgaatctgtaaaaaaaatccgagaaaattttgacgaaatatttggcaaaggatgggaagaaaaagcagaagaagaagaacaacaaagggacaattcagcaaataatttacaaaatggaggagaaaatggcgccgatttaaatgatcaaaaaaagaaatggacgttaaaaaatgatcagcagaaaagggaaattatccgaaaatttgacgcaattaatgaaagaatgaaaagtaaagaaaaataccaaataaaaaaccgtgtaaaaattgagaataaaattggaagaattttaggaacaaatcgaaaattaatttacaaatggaaaaacgaatgggattaa

SEQ ID NO: 56954 - DNA, 3829 bp, Heterodera glycines
atggcgaaaagattgacaatgcaaagtaaatttcgatttttatataaatgccgaaaaagttggcaccataaatttggcactaaaaccatgccaaaaattaatacaaagaattgaaaaaaaaattaagtaaatcggaaattttgatattcaatttttttaattgatttatagctttaagaaatagtgcatatttgcatccttaaaagcggggcacccgaattttaacgtatcgctaacttctcttcttatttcaattgatcgtttaagcaaatctttggaattggtacttgagttgttgaaaacggaatgccaattagccaaaattgctagcaaaaattcatcctcaagttacccgaccaatggttatttggcaaaattttgtgacaaaaagacaggtcaaaatttggacacaattgaaaaactaacggaacatttaacggatttcattgaaaaagatttgccaaaaattgtggaagcaatgaaaaaaacagaaacgacggaaataatttttaccggtagagtacacggtacaatggctgagattttaccacgagcaaaacagtacccgaatgatgcatctctgcttctatatgcgcaagcgatgaaagcattgagccgaattagccaagaaattgagcctggaacaaccaaagatgcactgacgaaaacgttgaaaaagcatacggtagcttcggacgatggcgatacagtaaccttaatgccaagtgaattgacacaaatcatcatggagctttggacaaatacaattttgaaaggaattgctaatgccggccaagaaaaatacaattatctgcaggtaaattaaaagattttgggtggtaatttcatgaaaattactttgatttgaaatttataaatgtacctaataatttatcataaaatttacgcccgaataacccaaatgatactcatataaattgatttattttttcataatattatttatacatacaattaaggaactaaattgcacataattaagaatagtgaaaataccattaaacctttatttgtcagccccaactcaatggcaccggcgccgaccgttcacaagaccgtcgtcatagacgcgcacctccagtatttcatattcattccaacataattatgatgattttgctgattgtgcaaatgtctttaatcgccgtagttggcatcgatgcctctcgaagcgatgcaaattgggtcacagtgtttaccgctttttttaccatgtttttcatttggcgtgttcaaattccgggccaaccgccaccgccaagtatacatttttcactgaatttcaatttaattttgcccgtggttcaaacgtggattggtgttggcatgccatttggcggagcagcacagcgaccacctgcggcaggggatgattaccgggcacaacatttgcttgcgatgctgcaaatgttcaacgcaatgaatggtcgtgccaacacagcggcgccgtcggcaggttgggaaaagcacgaaaaatcaaatgaatagcaaatgtcgatgaaatatgaataaaatggcaatgggatattttatcatggattatttgtcagtgatactgtatttaaggaaagatactgtgatttaaatattaggtggatcaatcagaagatttatagcgtgttctgcgtaaagcctacaattacagtatcaactaattcgtcatttttttaaattttcattttttaaaatgacagaacaataaattaataaattttttagactggaatagggataggagcgcggatatcacaacaacagcaacaactccggcaacaccgacggggaacaatggaaatgatgaccgtaaacaagttgaacactatgaccctgtttcggacacatttgttggtgcggaagagacatttgtgaccactacgacagaaagtccgatcaattgggaaggagaagggacagaagacagtaatggcgacactgatgactcattactaagagagtacggtaggccaaattgagcaaacaaaacggaagccgaagatggcagaatatgagaggaacgaatgaaaagagaagaagaaagaggagcaaatttttatggcatataaccctcatttgttgccaaaagaatgtcggacaaatttacatttccatggcattaaaagttgaccaaaaaccatttatttcccattttaaatgatttttgcttttaactgattgactttttccattgtttgcctattaaccactaaaattcatggaattttatataagtttttgttgaatggaaaatcattaaaaattagtaaagagtagagattctgagctaaagacggaaaaatcaaatttcctttggaaattgataaatgtttttgcgggacctgctaatctaagctcacatgggggataaggagatttcaaaaaatttaaatttaaaaaaattattataaaaaaactattaacaaattcaaactttacaaaaaaagcgtttgatcatttttaaaattaagaatatttgtaaaaaatttgattccaaggaccataaaaaattgtaaaaatttccaattgttttattgatattgaataaagaggaaaacttcatttattcattcatgtaaataacttcatccaattattttacaaaaaaacaacagcaaccttaacctttgattaatttttcatttaaattaagctacctttgtcatttccgcaggttttcagaaatcaattaatgcaattaattatcctgaaaatttttaagttgacaagaccaaacttttttatgtctttaatttttaaactttttcaatttttttttaaatttccagtctctattcatctcaatattagggacccggttttgaggcatatgccttttttcttcaaatttcctatgacttaatttatattcacgtaccgaaaaacctaaatttttttatatttaaagataaaacgtgtttccatgagtattcggggttgctgatcacgaatatgacatccatttcgaccaatttcgaaacccggatccaaattcgaactaatttgtaagagtaaaaaatttaaattttcaaatttcacatttttaatataaaaatagtttaaatgatcttttattgaaccaatgatcattttcaacttcgtttccgagtattcaaacaaaatttgaaacaaaaatgttgaattcaaaaatttaaattttcgactttttgttcgagttctagtccggtgttccaaattggtcgaaatggatgctggattcgtgatcagcgactccgaaaagcattggaaacaatttccatggcttttgaaaattaaaaaaaaaatcctatgggctgtgaacagtacaagtacccgtttttgaagtgggaaaagaatttgcgtaaatgaaatggcagaccaaacgtggcactaaacgttttaataattgtggagcaaatggggagagaaaggatgaaaatatggggaggcccactgtcgactaaacaaaatgataatgagggatgagggagaggggaaaattggcaatcaatcaaagccaaatccaactcacttttattgggaggacccatcaaattaactgattatttcctgatgttggccctctttttaagctttgcccaaaaagtcgaaaaagtgaaacgcgtacactaattaagttttaattatggtgtaaaatagcgtaagaattcacttcgtgctcatattccaaatttaacccaatcactggagtaattttagccaacaagggtaggacaaagccaaaatctattaagcctaaatgggaaaaaattttcaaaaattattttttttattatttcctctacaattaaaatataaattttgatgaaataaa

SEQ ID NO: 56955 - DNA, 1102 bp, Heterodera glycines
atgaaaagcctacggaatgccgcatatggagagaaaacaatgttggccagaagtgaacagggcagcgtgtggaaatcgtaaaattcaaataattgatttaaattaattcaaaaaaaaataattttaaatgaattataagaattgccacggaggaggatggcacaacaaggaatgtgacaataaaattgcttcgtgcgccgtttcattcacccggcacagccaaatacacattgcgcgaagtggcactgctctccacactgaatcatccgaatgtaatttatgaaagtattgaatgtctaaaatattgtaataaataaacaaatttataattatcaaaaataatttaaattttaaatgaaaattaaagtaatataaatattcttctgattaaaatagaaaataattattgcattattactccttaagaattttcagtttttttattaataaattatcatatttgaaaataaattatgcattttattaaaataatttctctcaaaggattgtgtttattaaattgtttttttaatttaatttcagttaattgctctttacgatgtccgtttgccacccaaattaaagccgttgaaaaaatttgatgatttacacttggtgacggaatattttggcaaaaatttgcgcgaaagaattgtggaaaagttgaaaaatggcacgctgtggacgcaccaagaattgtcctactgtatcattcaaattttgtgcggtgtcaattttttacacaattctggcattgtgcatcgggtaatttacttaacaattaaattattaactataaaaggttaacttatttttatatcaatttatttttttaatctaaaatttaggatttaaaaccgactaatgttgtaatgaatgagcgtggtaatgtgaaaattttggactacggtattgccagagatattgtgccagaaaatctgacaaccgaagcgggaacaccaatttaccgagcaccagaaatctacttgggcattgatagttacgacaaaaaaggtaattaatgtcccaatattatttttttgcattttattgattgctaattaatttacatttttttttattaagcagaatgcagattaaa

SEQ ID NO: 56956 - DNA, 521 bp, Heterodera glycines
atggtgaaaagtgttgtgagtttgttaaaaagttacaaaatttcatcgccgtcaaccacttcaaacacaactccatcaacaaattcatctgacgacagttgtgacaatgaacgacaacagcaacaacaacaatcggatgacataaagcgaggttagcataaatttaatatttaaaatccaattaaataattcattaaattaaattttaaaattatttttaaaaatataaattttttagtgaatggcgatatgaaaagcctacggaatgccgcatatggagagaaaacaatgttggccagaagtgaacagggcagcgtgtggaaatcgtaaaattcaaataattgatttaaattaattcaaaaaaaaataattttaaatgaattataagaattgccacggaggaggatggcacaacaaggaatgtgacaataaaattgcttcgtgcaccgtttcattcacccggcacagccaaatacacattgcgcgaagtggcactgctctccacactgaatcatccgaat

SEQ ID NO: 56957 - DNA, 2243 bp, Heterodera glycines
atgccgccgggcaatgaaatgttggcacccgattggcaaatggttaatgtgaatggtgccaatttttatgggaacgatacatcatcagcagttaataatgccgcacttgggggagcagtgggaagtggccaacaacagcagcaaaacccacaacattttgtggccacaaatggcattgccattgcacggactcggcccatcaaacggccgagtgttcgccgttcggtgtcggcgctgaacatcccaatgaaagtcgtggcgagtgccaacgccacgccaaacgcagcagcggggggtgccaacaacaacagcaacaattgtggccaatttggaacgccatctccggtacggcacttgcgagcggaggaaaatgagcaaatgtccaaaaacgggaattcttaaatgccaatattcttaactatgaatcactatttttgaactttccgccactaaaataggtaattacgttcattattttggcattttgtcatttagtattttttagaaattccttaataaaaacgcaagaatcaacaatatcccttagaattgaattccgtcaaaaattcaagaattgttccctaaatatttaaaaatttgaatttggaaaatgagtttgaacatgtaaaagagcatcttatcgagaagaaaaacgcagggtttgggagagaggcaagaaaagtactggtttccgtttctgctggtagcaaggggaatttttgttgctaaaacttgattttctaagactttttaattgagttcagcgatttttccgtgaatctttgttttttacgtcggttttcgaacttttagcgcaaattaaaatcaatgaaataaatattaaattttaattgccccccgagtttagcaaccatcccaacaataccttacggctggcactgccaattttggacggcccggtccaagtccaccacaacaacagcaccaacaactttcgtatggccaagtgcaacaacagcgagacggcggccaatggttgagcagcgcaacaaataatggcggcacatcgcccgaatctccgctgtcaaatcatcaagcccaacaaacgcaacaacagtcaccagcaacaggtggttatcggagtcgatcggcgtcgatgaacgtgttgaccacgccgacaatggaaagtcagcagcaattgatgttcaacacgtcaatgggttccagcactaataataacaacaacaacatctttgggcacagcatgcaaagactggtgattaacttatgcccaagggttttaatacgttttttcctgacaaatgagttcccagatacatgaaaagcgtgaaaatttgttttagcgactgatgttaagctattactttttattattttaacattataaagaattctttaaaaataatttttaaaaatattacatataaggagaaagataaaataaaattttattctaaaccccaacccattgatcagcagacttcgccggatgagagtccgttggatcatgtaaatgtgcatcaacagtatgcagtttcaacatatgcaaataatgagcaacaacagcaacaattgcttttatctccgtcaccaccaaaacgcagcgcatccttcacagatatgtgcgcttcctatcagcagatgaacattcagggtgggataaatttaaattaaatttaaaaatatatttttttatgtaatatatagcatttatatgggttctgattccagaattttttggataattttttgatgtttttaaaaagatttttaccaaaaagataaaaaatcaatttatcataataatttatttatgttaaagtaattaaaaagaaatctcgcttttatggatattaaaaatttaaaagggttcattatttaaaaaatataatctaattattttaattcaattaagaaaatatgcaaacaaatgtgcaagtgactgaaatgcaacagcaatatcagcagcaacaacaatttcaaattcaacagcagcagcagcagcaacaacaccttgaagggttttttgcgcctccttttgcatatggtaattttttaaaaatttattttagattttattaaatcaatttatataaataattggttaattttatgcattgaacttgatccggatggaccacagccaaaaatatctttggcaaatcagcagcagtcggcagcacattttgccgcatttaaaggcataaattaatttagaattttttaattttttaaaattttaaggaaatgaacttactcca

SEQ ID NO: 56958 - DNA, 61 bp, Heterodera glycines
gtaaatattgatcatagtccccaaactcaaaaatgcttaaaaacggttagaatcgatgtaa

SEQ ID NO: 56959 - DNA, 887 bp, Heterodera glycines
atgttcaatgaaggccaaagaatgattatcaacaaaattcatgaaaaaggtaaatgttgtaattattgattatatcgatattgcgtaatgttagctcaattctgatgacaagtcaataacaagatcattaatgaaaataatgtaggtaaatgtgacaatattaaattgtgtgaataaaataaaatatatttaataatatttaaatttaaataatatcaaaaaaattaatcaaaaagagggctttttgaattatgtaaaaaaacaatataaaaataaaaacaaaatggatgataaaaaacaaactctaacaaataaattatgtttaacgcaattatatattttaatttgtcatatttaattaaaaataaacaaaaatacaatggataaaaaatataaattagagaaaacaaagaaaagaaaaattaacaaaagagcagcaaattaaactaggtaagggcaatttgattaatataaaatttaattaatatttaactctcatttataaaactaaattcacctaaatttttaataatatcaaggaatacaataatgtaaaaagcatggaataataaaaaaaaggtgaaaacaatgttgttgtttttttgataaaacttaagctgaaatcttataaataattaatgctgcggcaggaaaatgactaaaatcttttaatttgaagaattgtttgaaaaattatttttattaatattataaaaatttactaaacaatataatacaaattattttttaagtaaacataactaaaggattcgatgtagaaaaaaaagaaggaaataaatagataataagaaataattaatattttattttatgaacttttcttacaattaaattaaaagaatgtatcaaaaacttttaaaatcata

SEQ ID NO: 56960 - DNA, 290 bp, Heterodera glycines
attttctaagaaaaaataggagttttgggggcgcggcggtgccgataggcgccgccggggaaaaaaattggaaattttgatcatttataaacaggttttcactgaaaattagccaatttataggtaaaattttgaaaaattttatgggaatttaatccaattcttaggggtgtaaaagtcgcatttcgcgccaaaaagcgaaatgcgaaatgcgaaacgccaaaaaatgcgaataatgcgaaaggcgaaatgcgaaaagcgaaacctaggcacatccctgcttcacaccc

SEQ ID NO: 56961 - DNA, 947 bp, Heterodera glycines
tcaatgccaattaaaaaagcgcgcttctggattttatcatcaaaacgttttatcagaggagtacaaaacgattgctgattacaagcaaaatgcacagtggccatgtctggaaatcgatcaatatgaaaagtgtggtctatttgttaacttataattttaagcaggaaattatcaatggacattttttttgtggagtttgaaaaaaaaaaagttttttaattccttttttttgtttgcttaactgacaaccccagctatataggttagcatttaaacaggataataaaaagttaaaaagatagtttgcaaccggaaattttggctgacagacagatgagtataaagttttaacaattttaataggctctcagaacttttggggcaccctgcatttttactgacataactcttaaaatatatagaaaatgtttacagaagtaaaattttagcgttttttggaatggcgtaacagaagaacaaagaatatttgaatatgcccaagaattgcctatgcaaaagggtgacaaagactggcagccatctttgggctccatcttagaactacagtttttatcgacaaataatggtggtcttggtgttccaattgagggaattacgtcgccctatttttatttacgaaaagccggctcatattttaccgcccacactgagaattctgacctttatagtgtgaatttattgtgcccttcaagtggaacagacaatgttggcataactatatggtacttttagtgggggggggggtctttttatgacaatgtattttcaggtattcgattccggcggcagattttttgaaatttaaaaatctgctctcaaccttttttgttaaagaattcacaaatgatccggaatatttgcggaataagtcaattttggtgaaccctaatatcatccgtgaaaatgggatccgatgtatccgaact

SEQ ID NO: 56962 - DNA, 453 bp, Heterodera glycines
atggccactgtgcattttgcttgtaatcagcaatcgttttgtactcctctgataaaacgttttgatgataaaatccagaagcgcgcttttttaattggcattgactttaaaaatataagaaattatttgatattaaaacaaatataagaaattatttggtaataaacaaacataaaaaaatatttgatatttttaagacaaaccgaacaagaacacggtttcggttagtaattctgcatataggaagttgaaatgattccggtatgcgaaaacgataacaccgataagtcgcgaccagacatttagcgatatgatgttatcaaaaaaaataatcaatatttgagcccaaatcatcagagctttggggggatcgttttggcgccgacaatagagtcgtaatcacacattttcgagaatctaagggaaaaaaaatacaaaaaaaaaaagcaaaca

SEQ ID NO: 56963 - DNA, 1562 bp, Heterodera glycines
aagaaaaagacaaaattggcaccagaagaaatacagccgaagaaagaaaagaaaaaattgcaaccggacgaaacacagtcggtgaagcaaaaggcaattctggaagaaatacagccgaagaaggaaaagacaaaattgtcagtgggagaaacacagccgaagaaggaaaagacaattctgaaaagaatacagccatagaaggaaaagacaaaattggcactggaagaaatacaactgaagaaggaaaagacaaaattggcattaaaaacacaaccgaagaaggaaaaaacaattctggaagaaatacgatcggtgagaaatccggaataaattcaacaggcgattccggaagaaacacagccgaagaaggaaaagacaaaattggcaacggaagaaacacagccgaagaaggaaaaggcaattctggaaaaaatacgctcggtggcaaaaccggaagaaatacaatagaagatggcacaggcgaatccggaagaaatacggtcggtgtcgagtccgcaagaaatgcagccggagagggaaaagacaaaattgtcagtgggagaaacacagccgaagaaggaaaagacaattctgaaaagaatacagccgtagaaggaaaagacaaaattggcattgggaaaaacacagccgaaccgggaaaagaccaaattggcactgggaaaaacacagccgaagaaggaaaaggcaattctgtgagaaatgcaaccgaagaaggaaaagacaaaattggcattgagaaaaacacaggcgaagaaggaaaagacaaaatgggcactgggaaaaacacagccgaaccgggaaaagaccaaaatggcactgggaaaaacacaaccgaagaaggaaaaagcaattctggaagaaacacagccgaagaaggaaaaggcaattctgaaagaaacacagccgaagaaggaaaaagcaattctggaagaaacacagccggagagggaaaatacaaaattggcactggaagaaatacaactgaagaaggaaaagacaaaatcggcaccagaagaaacacaaccgaagaaagaaaagacaaaattgccactgcgaaaaacacagccgaaccgggaaaagaccaaattggcattggaaaaaacacagccgaaccgggaaaagaccaaattggcaacggaagaaacacagtcgaagaaggaaaaggcaattctggaaaaaacacgctcgatggcaaatccggaagaaatacaattgaagatggaacaggcgaatccggaagaaatacggtcggtggcgagtccggaagaaatgcagccggagagggaaaagacaaaattggcattgggaaaaacacaggcgaagaaggaaaaggcaattctgtgagaaatgcaaccgaagaaggaaaagacaaaattggcattgagaaaaacacaggcgaagaaggaaaagacaaaatgggcactgggaaaaacacagccgaaccgggaacagaccaaaatggtactgggaataacacaaccgaagaaggaaaaagcaattctgcaagaaacaacagccgaagaaggacaaggcaattctga

SEQ ID NO: 56964 - DNA, 1183 bp, Heterodera glycines
gtgttttttccagaattgccttttccttcttcgactgtgtttcttccgttgccaatttggtcttttcccggttcggctgtgttttttccaatgccaatttggtcttttcccggttcggctgtgtttttcgcagtggcaattttgtcttttctttcttcggttgtgtttcttctggtgccgattttgtcttttccttcttcagttgtatttcttccagtgccaattttgtattttccctctccggctgtgtttcttccagaattgctttttccttcttcggctgtgtttctttcagaattgccttttccttcttcggctgtgtttcttccagaattgctttttccttcttcggttgtgtttttcccagtgccattttggtcttttcccggttcggctgtgtttttcccagtgcccattttgtcttttccttcttcgcctgtgtttttctcaatgccaattttgtcttttccttcttcggttgcatttctcacagaattgccttttccttcttcggctgtgtttttcccagtgccaatttggtcttttcccggttcggctgtgtttttcccaatgccaattttgtcttttccttctacggctgtattcttttcagaattgtcttttccttcttcggctgtgtttctcccactgacaattttgtcttttccctctccggctgcatttcttgcggactcgacaccgaccgtatttcttccggattcgcctgtgccatcttctattgtatttcttccggttttgccaccgagcgtattttttccagaattgccttttccttcttcggctgtgtttcttccgttgccaattttgtcttttccttcttcggctgtgtttcttccggaatcgcctgttgaatttattccggatttctcaccgatcgtatttcttccagaattgttttttccttcttcggttgtgtttttaatgccaattttgtcttttccttcttcagttgtatttcttccagtgccaattttgtcttttccttctatggctgtattcttttcagaattgtcttttccttcttcggctgtgtttctcccactgacaattttgtcttttccttcttcggctgtatttcttccagaattgccttttgcttcaccgactgtgtttcgtccggttgcaattttttcttttctttcttcggctgtatttcttctgg

SEQ ID NO: 56965 - DNA, 1306 bp, Heterodera glycines
  unsure (1)..(1306): unsure at all n locations
atgccggacagtttgggcaaaaagtcgatcaatgtggatgaagtaaaattntaaaaattaaaaaaaaaaaaaacaatttttagtggcgccaaattttggacgtcctttggagtgacccgaagcctcagaatggatgttggccaaatgcttttcgtggcggtggcagctattttgggccggatgtgacaaagaaatttttggaaaagtgaatttattttttatttaattggtttattttcagaatgtttatttaacttaaaaatttccctattttatttttttatatttaattatatttacagaaatggcttccgtctgttaattcgatctcacgagtgcaaatatgaaggtccgtccatcataaaagcattattgtataattgtttttttaatgtttatgcattttaaaattaaaaatttaaattcaaatatctaaaaattataaaattttaattgatcaactaattcttataatttttccttcttttttcgaaaaaagctaaaattgtatttgttcaacaaaaatttcatttaaacttaaaatgcttttcatacgaatgttctaacccaataaacattttaaaaatatttttttttgaaaattagggcaatttaaaaaattaaaaaataaattttaaatatttagcaaaaattaaacaatttaaattgatcaactcattttttaattccttttttctttccaaaataagctacctaaattgtttttttccgtttccataaaaaaacatttttaattcgtcaaaaaacaaaaaattcattttgaaatttaaatgtttaaaaaaaattttcaatccaataaattaaaaaaaaaattttttttttcaggttacgaatttatgcatgaaaatcgggtgctcacaatattctcggcctccaattactatgaaactggtagcaacagaggtgcctatgtgaaatttgttggcaaagacaaagcgccacattttgtggtaaatatttttttttctaaaaatttttaaaattttaaattttagcaatacatggccagcaaagtgcacaaaaagatcaccgttcgtgaacggtaattcagaaaaatcacataccaatatgaaaacataaaatttatttataataattttatacaaaaaaaatatgtttattagaattaattttaaataaaaaatacttttattgaatttattttttaattttttaagacttagcattgtcgaacaatctgccatcaaaaaactgagtgaaaaattggtgtccttcaacacggagttgcagaaagaatttggaaaaattgattcgaccggcacag

SEQ ID NO: 56966 - DNA, 791 bp, Heterodera glycines
atgaccttcctcaccgacattcttcatccgaacggtgggaaaagcggctggcgcaacaattcatcaaattccagcaaccccccccccccccccctttcagttgacatgagtggccaggtctgcatcagcattcttcacccgcccggcaatgatccgctcggctatgagcaggcgtccgagcgttggaatcgcaaccgtaccgtggagtccattttggtgtcggtccaactgctgctggcggagccgaacttcaacagtcctgccaatgtggatgctgccgtaagtgattgattcgtccgtcggcacatttttgattgaccatcatcataattttttgtgtccaaatttccagattttgttccgcaacgacccggcacaatacaggaaggaagtgcgacggcgcgtggagagggcatcagcatcgacaccgcgagcgaggtcgtcatcaacaccaccgccggtagcgcagccgccgggagaacagcagcagggtacgccgcaaccgccagcgacaccgccgcaagggcaagaagcgcagcagcagcaacaacaaacgggcgaatggtacctttgatgtgacgtgatgcctctgagtgatgatattattatatagttatgtatatgtattgtattgtatgcatgtgtctgtcgtccgatcatttcataaattaatggtctctctctgtgttcgtttgccctgcttttgttcgctgttgtacatattatgtgtattgtcatcatctaccaattattgtatatacatatgtgtacatatgatggtgtatcgagca

SEQ ID NO: 56967 - DNA, 1222 bp, Heterodera glycines
atgtctgaccacgacaacctggtcaacccgcggtgggcccactcgctgatcaaaaccgccgctcgcaagctgtacacggagaggacgtggaaggaggaacactttaacgacttggtgcacacagtgctcgtccaacagcccacgctgaaggcatttctgctgaacgttctgctgaaggaccaccacgacaaacgggcgcatgaaaaatggcgcaattttgtgtcgacggaacgctgtcgaatgtcaaagtcagcgcgggcttcccggggacgcgataattggccatgcaagagcccaaaattggcaaccctttcacagcgaggggggaaagggggtcaccggcgaacgggtcagaggaaaattattgaaattccgaaccaaacccaaaaagaacccttatgtcattagaaaattggcttaaatcgcaaaattcggtttgaatttttagacaaattctcacaaaaatattcaaaattttcccgttggcgcttctcggcaccgtttggctggatgtgttccagtgcttttggtctgttttataaaataagaaattctaattttagcgctttcgacatggtcaatctatgctctaaggatgaacagactcagtttttgtctttgccgcgtcgttgcgccgtgtacgaaattgacactgcgcacgcgtttcgcgtttttgaacgccaacttgacgagtactttctgaagaagacgcaccgggttttggtcggtgttgacgccgagtggaatccgtacgtggccaggagcaggtcagtaagcggttgattgaatggtcatggacactttgtaccagcgcggaattggaaaacttccttatagaaggtcccaatgttataataccataggtgcctaattagaaaaagaaaactaatttatgcagtaattaaattcaataaaatttttgaaatattcgtcaaacaaatatttccattctcaccccgcccttatttaatgtatgttcccctccagggccagtctgctccaactggcactggtcaactccgtgtacctgttggacctggacgcgctgtacgcggacaagtccttccagcagttcatcgaccgtctcttccttgataaggcgatcatcaaactcggctatcaatttggcgacgacctcgccatgctgcgcgcccgtttgcccgcctgtgtcggcctctatcgcccgcagggcattgtgtgcattggacagttggtagatgaa

SEQ ID NO: 56968 - DNA, 910 bp, Heterodera glycines
atgaatgtcatattcgtgatcactaatcagttaaaactttctgaagattgcttgttagttaatcttcttaaacagataagaaatttatcaaaaaaaaaaaaaaatcccccccccccatttttttcattttttaatttttcattaccctctttataaatagcgagggaattcccttttttgctcacatcagttcatttcatttattcattcattgttctctgcaattgttgcctattattattattattattatgtgtcttggccggaagaaagggaagcgatttggttcacctgcgtccagcaaaaaggtgaacaattttttgagcatcatttgttttttgtcctgtctaattctttctgtcccttttcagcgctttcgtccgaaatcgccaaagaagattaagtccttttttgcaaagaagaaagccgctttgtcgtcgtccaagaagcctggtgccaaaaagccgttcaagaatccgtttgccaaattcaagaagtctggtgccgccggatcggacaagaagcctgatgccaaaaagccgttcatgaatccgtttgccaaattcaagaagtctggtgccgccggatcggacaagaagcctgatgccaaaaagccgttcaagaatccgtttgccaaattcaagaagtctggtgacgctggaacggacaagaagcctgatgccaaaaagtcgctgtttgccaaattcaagaagtctggcgccgctgaatcggacaagaagcctgatgacaaaaagccgctcaagaatccggctaagatagcagacaaggtgtggcttcccgaattaccattttgtctaacaaatttatatttttgacatgtttaagcctggaccacatcagcaacctgttcatcatgatccgtctcatcagcctccgctcaagaagcctg

SEQ ID NO: 56969 - DNA, 1169 bp, Heterodera glycines
atggaaaattttacgcgttttcttcacttcatcaattccctattcgtattcaacaattatttgttcgtctccaagtctcgtccaacgtctgcatttattgttcatcaatccttcatcggttggcatccgcgcgcatttcaaaatggacgctctcaaaaagcttgcgagccgtgcacgacaggtaaaaaaaataagcgtattctgaggaatcaatttaaaaatgccatcccacattccagaggtcggcggagatcatgctgaacgcggagaagaccgaaattggtgaggaggccatttctggattccaaaaattaaaaaataacaatttttcccaaaatttcaggcgccgagcttgaagcgctgctgaccaagacagacaagacggaggaggacatgaagaagctggtgcataccatcgaggtgtacctgcagccgaaccctggtggacacttggaatttgcaattttttggaggaaaacactaatttttttcccccaattttcagcagtccgagctctggacggtcttggggaggcgttgaaggtgtggtttttggcacattcacaattagcaacatatttttaatgcgcaccaaaatttaagggagcagcatcgatagtggtgggagccgagtcgaccgtcggaagtgagagaattttaatcggaaaatgctcaatttcattagccccactaattgttgccttttctgttgtttttcagccactttgccacagacagagtcgaaaatggcaccagcagggcaaccccaacccatccaatcgatcaccacgcaaaccttggcaagcctccggcacctccaggagaacgaactacgcaccgtccaggcgtggatttgcttcttttttttactcaatttccgacaatttttaacccaaaatccctcccttatcatttgcagaaggagcgcagcgtgttgaacaagaaacggttggatttggacgtgacaaaaagccgttggaagcgcgcctcggacgacaaaaaacccgctgtacgtcgtgtgttcttcgccgccggggctccatttttcaataattgacaaatttcactgtttttttcaggttgaggcagagttgcgcactgcccaggccgaatttgacacccaactggtgaccatcatcactgcgttggaggctcttcaaacggctatg

SEQ ID NO: 56970 - DNA, 140 bp, Heterodera glycines
atggcttccaaatgccttcctcccgaacttttgtacgaaattgtgcctttcgtccttgcgaaaatgctgccccaaattcgctctcgtcctgtcggctgcttcacaaacttttactgccacgtgtcatcaaatggcaaaag

SEQ ID NO: 56971 - DNA, 166 bp, Heterodera glycines
atacgcagtaagcaaagaataaaaggagaaaggaactttaaatccgacaacataacataaaatgacatatttttaatgtcaattttgcatattcacaaatttgtgtgcgtacactttcaatcacatttttatatttgcactttattaccgataaagacatcagaat

SEQ ID NO: 56972 - DNA, 101 bp, Heterodera glycines
ctgctcgcatccaacagtcgacgactgtgaaaaacaaggacattcggaaattcctggacggcatttatgtgtccgagaaggtggccattgccgatgaatga

SEQ ID NO: 56973 - DNA, 1096 bp, Heterodera glycines
atggccgaacggtgcaattcccttcgccgtggcaccggcaccggtggtgccacaatttgcgcacctccgtcctcaaacaatggcaaaaaacggctgccgtgcccaccactcactttcctcaacattcccaacttctcactggacgagctgtacgcgcgcaccttttcccgtcccgacttggaggcgttggtcgaaattcaagagtgagtaaatgaatgagggcaatttagcaattggggaggacaaaaaattgatagaaccgtaaaattgggcgtattagttcatggcaaaatcatgatttttattcaaaaaataagttgttgttttttgataaaaatcgttttcttcgagcgttgagtttttttttcaattccatcaaaaaaaaaatatttaaaaaaattaaaaattctattttctataaaaaaaaaatttttttctttatttgccatttttcacaccgtttttatagaaaagcgctgacagcgcagaagggcgaattggtacgcgttgagctgaccatgttggactcggatgaacgcgaattggttcaactgcggaagcagcacaatgttcggcaaattgtttttttattttgtattcctaaatttatattaaaaaaaaccctggaaatttttttttttttttttttggaaaaacagtaattcaccataaatatttttggaaaatcgcatgatttttttttcaattggcaatgctggagacaatccaatctccctcctccctcttttttcatttagcgaattaaaaaacagcaggaaagtcataaattttcaagccgtttctctttttttttcataccgtacaatatacaatatatgtatgtcctatccatttttcccgttttttacagaatcttcaaacagtgctgaattcaatgcgcaacgccaattggacagaacgcattggggcagagagtgcgacggcggagcgtctgcacaccgcaattgccgcaatgcgcacagcgctggcggagaagaaacggtagtttattgattgattattgtattaacaaatccggttaatttaaaaaaaaaaaatttgcgaaaaacaaataatattttaaaatttaaataaa

SEQ ID NO: 56974 - DNA, 330 bp, Heterodera glycines
atgatcagcaacaatatcaaggccaacaataatatgtgcaaattggacaaatgcactcaatcggatgacggaaaaatcggcgccaatttttatgccggcggaggttgcgaaagatgcgcaacattttggcctattttggaggggaaaagcagaagccgaagcagcagcaaaagtgttcatcaaaatggcacaattgaggaggagggggaggagaaaaggccaaaagtgattggcaaatttgtttttgctgaactgtttgaaaagggtggtggacgaaaatcgccaaattatggcacaatggtggcggacaacaatggccgtcatcaatcg

SEQ ID NO: 56975 - DNA, 520 bp, Heterodera glycines
atggagcaggtgagggccaatggtggcggtgaccaacgaccgctgattccggcacccggcaacggcacgcccaccaacatgttgcctcaatacgccttccacatgaccatgctggtgccgaaaatccgaaaaaaaattaaatttgaaaaaataatttttgaaaaatttttccagcaccgccaaaggttagaggccatgtacccggctggcacattctccaacacatactttcgcactgcgccaatgccaccgccgcgggcacttatggtgcgcgaccgtgccacccgtcccctttctatttgtgcccccctccccggaaatttttaaaagcgatttttttttattaattattgaaatttttctagtaaaaagtacttcaaacaattttttaaagaatttttttttatcattttttgaattttcatgggaaaattttttaaaaaacctgaaatttatttatttttccattcgaaaataagtggggaacctcccccccccccgccgacaagaaaataataaa

SEQ ID NO: 56976 - DNA, 1219 bp, Heterodera glycines
atgaaaaaagcggaaaaacggataaaagagttggaaatgacaacggaagagctgaaaagggagaacaacgaattgaaaaaggaaatgagtaattacgacgaagcgaaaaaagagttagagaggacaagggaggaggtgaaagaagcgaatgagagagtgggaagggcaagggaggaaatggaggaaaagaagagggagtggggcgagagagagtcggtcgaacagctaaaaaagtgagtgaaaagaaataaatgtattacaaaaagaaatgaaattcaacagagaagagacggagaagacattggaattggacaaagagaagtaaatgttggcatattcaaatgagaaatggcaaaagtggacagacttttgaaattggaaaaaaaaagaaaaaaagccatttcattgcagttgtaagactgatcagtgatcactattaacccaaattgaaatgaaattaacaagcgaaattaaaaacaactaactaaaagccctctttttgatgctgaacgcccaagcagcaaaagtctgtgtcaccaatacatacatatgtaaaagtgtgtagaaagaagcaccgattcaacgtttctttaagaattttggaaatggaaaaaaaagtgattgaaatgaattcaaagttggaaagagagcgcgaagaatggaaagagaaagagagaaagctgacggaagagagacaggcgacagagaaggaaatggcaaaacaaagcgaacggtgccgacggaaagaattaattaccatttgaatgaatgtttcagagcattcaaattggcagaggaagtgcagaaatgtgagcagaaactgtcaaaaatggaagagaaagaaagggaatggacagaaaaagtgagagaatgccattgggagggatggaaagcgcaatttgcgactcattgtcaggtgggccgagtggaggacgaaaaagccgaattggcagcggaactgttagccgagagacgacgagtggaaaaaagcgaaacggaatttgaaatggccaaacgattgttggaggagaaggaagagagaatacgggaaaaggagagagcacaaaacgcacaacaattccccggcacagcggaagaaacgcatttcgaactgcaggagcaacagcagacgaaagtgccaatggcaaaggcacgaaaagaaagggacggaaacgatggggacgaaatttgccggatgagcgcggagttggaaaagtga

SEQ ID NO: 56977 - DNA, 434 bp, Heterodera glycines
atgtatcatttcactgttagttatacagtgtgttccaaaattatacgttcaacaattgaaaacatgtaactttttatagggcaagaaaaaatctggaaaattcatgtaagtataacttttgatttttatcaaaaaaaagtccattgcaccaacgtgatcagatcactcattcgaggtgacctgaaaaccgtaaaatggcttgaaaccatcctagggggttggaaaaatttttcatgaaaggaaaatatgacagatagaagggcgcaaaatttgttacaaaagcaaaagattccatgtctctacgacttttctacatggagaaatgaaaggtcgaaaaccgagcatccaaaaagtacaggaatccaagggaaaatggcttaaaaatgtttttatctgtaaattatcagatggatgcttagaattttatgaataaa

SEQ ID NO: 56978 - DNA, 491 bp, Heterodera glycines
atgtacggctcgtcacgcattccccgtccggctgatttggcatccaacaattcatcccgtccggccagccgtgcatcagatatgggctccgactttggcaccaatggtggcgtcaccagcgcgacaccctcacgcattccggcaccgcgtgcccagcagcagaagggggtacgattcgcgagcggaacggggtatgttttcggattgagaaaattgcagatttatttatttttaatttttgtttattccctctaatttttgaaaattcctatctaaaattgaaatttcccattcaaaacaaatacataattaggcgtcatgcctcattaaaacgttgatacatctacttcaactaaaaattatatttttacaggggcagcagtgacgggagtggccgtaatacgccttcggtcctctaatgaatgcgtgtgcggaatgatctggcggtgtcggaatgtttcacccgctaatgaccgcatcaattaacaaaa

SEQ ID NO: 56979 - DNA, 477 bp, Heterodera glycines
atgagtcaaccaaatgcgcttgccaaaattgcgaagagacttatctatgagacccgcatgtgtaaagagttaaaagaaattggactgcaaccgcatcatcagcatagactcgaagaagcgcaacagaagtttgctaaaggagagtgtctgacacaatgtgaacttactctactgtttatggaacaacaagagcgcttgcggcagaagcgcttccggcagcagcagcaactgcagcagcaaccaccgcagcagcagcaaccgcagcagcagcagcaaccaccgcaaaattggattttaagtgatttgttaataattttcacaaaattgtctattttatgtgcatgacttaaggttttttgtgaatttgaatgggccccagcggcgcaggtagtcgccgccggaaaacaaattttttagagcgatttagttgtaaatcattcccaaaatttaaatttttgttggttttagtgcttaaaa

SEQ ID NO: 56980 - DNA, 2146 bp, Heterodera glycines
atgcgtcgtctattggaagccgaccagcttgcgcttggttgtctggacacatggcttatgatgaagctcagcggctgtgatgatcaaagctttgtcaccgaaccttccagtgcttcttccaccggaatgttcgacccgttcacggtgattgctcattcattttcccagtgtagttaatcattgtccatgcatttaactctaattatacattaattgattttgttctgcattaattaggccgagtggggccgtcccattttgcgtctgctcggcttccccgacccgggcgcggtgctcccgtcgctggtcgacacgacgcggctcggcgtgcacacggcgcccgagctgttcggccgcgcaattccaatttttgcatcggtaaaaaacgacggatatttttttaaattaattttattagtcctatcccacagtcaaaaacaataaaattgaattaattagtgtacaatatttttttttagctcggcgattcccaagcggccgcgttcggtgccggatgcattcgccgcgggacctgaaaatctcactgggcaccggcactctgttcgactacgtgagcgggcccgaaattcacagttcaatgcatggtcggtcgggaattggtattgaagaatgttgttgttttactcttcgaaatgggaaaaaaatttttgaggcgtcccagatttaggacaataaattttactaattgtggcgactgtcagtgtacgatccaagtgctatcgggtgaatggcattttttaattctaaataaatttttttagaaatcttcaccaatttccacaaaatacagcgataatttgccaattggcattcccccgcactttacgttgatcgattataaatgaatttcacttaaaaattaaaatattttttatctaacctctaaaaaaatttttccaggaatatatcctttggtggcatggcgtttaaatggcatttccactcatttacttgaggtggatcgaaattgcatttcctttttaattttataatttcaattttccacaattctcaaagggccgttccaatgacgtggcgtccgcagtccgttgggcccaatccgtgggattgattgcacaaaatttggaggcattgcagtccgacgacgagccggagtttgacaatgccgacggagacgaaggtggacatgacgacagtgccgtttgttttgtgcccgcttttggcggcatccaaacgcccatcggtgacgattttgcgtgtgccgcactgatggggtgagtggcaccacgtagggcaccacaatgagcgcattttttgtcaggattcgttccgataccacgcggcgtcagattgcacgtgccgtgttcgactcggtcgcctttggcgtctaccaaatttggcagtgccttgtcgaggaagtgccggaggcccgcgccggcgtgtgccgaattcggtgcgcatttgcgggagggagggacaaacgacttgggggaggggaatccaaatcggtgcagaatgaaatctctaactaaaacgccgcgggaaaaaatgccaaacattttccaattagcttacttttagcatttcccattgcttctaacgctgtctgtctgttttcgtttttttgcttccatttttcaattttctcctctcttttagcctctgcggcggtgtgtcgcgcaattcgcgcatttgcgaacacatcgccacgctcattcgtcgtccggtggagcgcgtgtgtgagccccagttttgctctgcgcgtggtgccgcactgttggccggcatcggcgccggtgcgtttcccttgaagattcagtctccatttgactaatgcgttgcgcaccctctgccatttttgacgatttcccaaaattcccatgaaatattttcgagtcggaattctcgacagtcgccaatgtgtccatctcccattttcaaggactgtggacacttgaccaagtggacagcaccgtcggcaacggtagtggcggtggcaaaagtttggtcggcgttaagcgcgtgttcgctccgcggaagggcgctgccgcttcggcacttcgccgtcgattcaaccggtggagggatgcgcagcggcggtgtcttcattattatgaacggaaatgatggaaaggacgacgaaatgccaatggaatttttatga

SEQ ID NO: 56981 - DNA, 1108 bp, Heterodera glycines
atgcttggatctgctccgaacaaaagagcacagatgttttttaaggattctctatcgattggtgaaaagtatttttttaaaggtctgaatgaaaaaaagtttcttcagaaattttttgaaaatttttgtccaaaatttttgcacgcctcactaaaaccatcataactattcttaaaatggacggaattgaaaaaagaagggtcgatacatgtacctgagagtgttttctttccaaccgtgtataaatgtttagggttagggtttgggaaataccctaaaaagggatctaattgacaattggttttctgcctttttcagccctgcttttcagaatccggctcagggggatacgcagggaatcagggtgggttttgagtgggatagtaaaatctggcacgttaggaaatattgtttatatatgtagagatcacctacgtgcaaattagcatggggtagaatgccggactcaagattggatcttggcatttttttaaaagcctgaatttaagctaattaaattttttgcgaaatcggtaaaaatggcacatttgggatgctgggctatatatataaagaccacctacgtgcgaatgggcatgatttataatgccaaactcaagatctgtactttgcatttaacactgaatttaaccaacttcttatacaactttcagtacaactttctacacaactttcaaaaaactttcaaccaatttctcaactttataaacaactttcagtcaactttgcatacaactttcagcacaacttttaaaatttaacaaaagcggccgagcgagtaccttaaggttatttatcctattatatgacaaatctgtgtcatgctggccccggtgttgaaagcggccccggcgctttcacagggccccttgtggccctggttcaaaagttggataatatcggaattaagggaaaactgcttaattggttatctgagtttttaaaggaaagaacttatacggtaaaaattaataacaaatattcaaaatcttatccgattaagtctggtgttccacagggatcagttttaggcccactgttgtttctaatctatataaatgatcttccgaaggttattccttcggaa

SEQ ID NO: 56982 - DNA, 1848 bp, Heterodera glycines
atgattctcttcggcacgaccattacggcactcggtgccgatgaattgggtgccttcaatggacgaggcccgattgtcatccaatactttcggactcggcacaaccggaatttgatgttcccggaggctccatgtctgtgtgagaaaggagggcgaaaccatgtgagctactacccattggaactgatcgaagtacgagaaacgttcgatcgcgatcccccgtttgactttggaacccgaatgccatgggatgacaatccagaaactgtcaacatgggacccctagagggagaaaaatccccgaaacggttatccataagcagcaaggggagttccattactgtggaatatcatggcactccacagtcgggggcgggtaatccaatggaagggatctcaccggataaccactcggtgattatccaagaaattgactctgagagtccgacgggaaatccggtggaaatgcgcggagatccaccgagatcggaggaacgatcaattgtgatgaatgttccggcgaattcgaagattgaattgatcgggccgcttaaatgcaaaataattttgcttgtgctgtccgcatttattatgattcactcggtcggcgcaaaacaattgccatcggcgctgattcattcgccttcccgcggtccttcttcattgaaaatgcgagaagcgccgatgaatcagatctttctgcacggcttcggcggagatgtgcacccgggaagcgaagaagaggcggtgaatcatcggccgatgagcgctgttgatggagatgcttccttccgaatgaagggaacaaacatgagtcatccgtttttgtgcgcctatggcatgaatcagggacacaaaattgtgtcctctgccctctggcggcagctatataaggaggagggaaaggagcaaaaagtcacttgcctttccttattcctcccccttcaaccaccggaactccaaccgaccatggacatttcaaagttattggatgaaagcgaagaattcgttcagcagcaacagcaacaccatcaacaacagcaaaaacaacaagtcgtccgtttcgtaaaaattgatgaagaaagtgacgacgaagcgcttcgaatcgacatttcggagagtgagtcggaggaggaggacgacgacgatgaggaagaagcggtggcagcactcgaagcagcggtggccagtgccgcaccatcgccggttgtccaagagaccaaaaagcctcgaattcagggacctatggaggcaccgaagaccaaacgagtggcggcagctgagggaccattcgtgaagcgagcgcgcataggaggcccgctgaatgcgcagaaatcgcgctgcaacaaatgcggattgcttggccatttgtctggcgacgaggctcgctgcccaaagaccaatgccctggtcaaagcggagatggatcgaaagaaggcggcagcatttgccaaacgcgcggaagcaactatggaatgctcggcgcctccgatcattccactgccagtcaaaggtggtggacaggcacgtgcggccagagctggaggcgttgctgcctcaatggtcgccggtggacgcgcatcagctgagggcgcatttcgcgcatcgaaggaaagagcgcgccaagaattgatggccgcaatggaaaaacccaaggcggcagccatcagagtggcggaacggaaggcggcagcccgacctggtctccaagtgccaatggagacaaatgccgtgctgaatggactcagcgaaatcggtgcacgaatcgaccgcgagcgagacaatcatttgagcatggctgaggaattgcaacaacgtggaaaacgcgccgtggcagcaatggacgaa

SEQ ID NO: 56983 - DNA, 345 bp, Heterodera glycines
atgatcctgaaatacttcatgcacaaggtgtgaccaaagaatgaacatgaacaaaaaaccatgaaaatttgttacccggggtttttggggtgtctggatcacgaatctgacacaattttaatcaaatcctgtccctaaccctgaattcgaacaaaaagccgaaggttgaaaaattaaaattttaggaatttttgttcgagtttgggttagggataagaattggtgtgagattcgtagtcagggaccacaaaagtccctggcaatttgtctaataaattcaaaaatattcattttgtaatcgtcgtttggtaaaatccgccattttagcgattttttaaaaataaa

SEQ ID NO: 56984 - DNA, 417 bp, Heterodera glycines
atggtaatgaccatatttacgataatgaatatcaatgttgccctccttcgagtatataacggaataattaatcaaaaagccagtgcatataatggaaacaattgttgcagaaatacagccacccattgtgctgccatcagcacgctttgttcttcttatgttcaaccggcgattgtttttttggtgtgaaaatggatggttttttgctgaaaaaacaaaaattattcgatgaataagctttagctgttcaacattaaatccatcaagaaatggtgagaaaaataaacattttttctacaaattgttgctgtttttgggttaattcacaaaaaggcagaatttaaaaaatctgattgatcgtcattaaatttgtttaaatttcagtttatgctgcatattatgatttgtaaattttga

SEQ ID NO: 56985 - DNA, 673 bp, Heterodera glycines
atgggcaatggaaggagtgaagtgagtggggggggggggaagggaaacggaagttggccatttgcaaaaatcaaacgagtttcccttcattggttcggcatctcttcctttattttccgttcttttaggccgtgccaaattagtcggcaattaaaggtgattattttcattaatttggtcacacattcatatgccagtcccaaatttgccttaggtttcccacggatgcgtgtccaaaattctgtgcagatttgctgaaacaggcaatgccgcattagcaaattggtatttaaggccttataaaattaagctttcaggctcagtttctcccggggcagcttcttcgcctaatcattcgctgccggcggcgaagaaattttctataaaaaggcaataaatgaaataaacaaataaatattttaaaatatagggtgaaagacacacaaagaaaaaagcgacacccggcggaaggccatttaaagcatagcatttcagtgatattgggggaagaaggggcaaatgccgaccaaaaacagcaaaattacggtgaattatatttaattttaaaatcgaaataataaatttaaaactttttcagcaggacggtctcgccaatcctccgatgcttctccaccacgccgagtcagaacttggttcgcccctgaccagctga

SEQ ID NO: 56986 - DNA, 183 bp, Heterodera glycines
gtagttgcttgcctgtcgccaatgggtcagcgaattccgattggtggacgaacccaagatcggcatggaaaatggaaatgcattcaggaagccaatgcagttaaacttgtccaggaactttgaaaagcacagcaaaatatgaacaatttacacgaatgaacggcttaaaaagatgattaatta

SEQ ID NO: 56987 - DNA, 501 bp, Heterodera glycines
atgtctgtaaaatgaaaaaaattttgtttaaaattttaatattacataccaagacataattcattgttgagtttttaagaaataatgataatagatttttttttagaattttagacaccaaaagaataaaaactccctcccatttacacacattttgtttcacaaaaaaattaatttttcattgttttatatataaaaaaaaacagttggtgtctaacaaataaaatgctaattagaattaatcaaattagtgtcaaaataatttttaacccaaattgaagtaggaagcattaattattttgtgacgaattttaagcaattttttttttttaacttaatgtgaaccaagaaataatttcaggtattttcatgggcaccaggcgatgctgccgagaaattttttgaaaaaatattactgaattcacagtaattaatagaagagagtttcacaaaattttttgctaaaaagtttccaatttttcattttttttttacactaaa

SEQ ID NO: 56988 - DNA, 2205 bp, Heterodera glycines
agcgacccaaacaaaaatgctgatcagcccaaatcggatggcattgatagaacagtagtattaattgatcaaatgaatgccaacaaggtatctgatcagttggaaattgatcggccgaaaagtgatcaacaaaagccatcccattgggcaaaaattaaggtaaaaattgaaattttctgaaaaatgaattttaatttatcaaatcacataatcattcatttattaaaataaaaaaattttcaaaaaatgaaaaaaaaaaaaattatttgcgttttcagacaaatttttttgcggcctatcagaatcgggttgtttttcattggtcaatattttccattattatcacagcgattgtttatcaggtaactttaacttattttaataataaatcatatttaattttaaaataattttgaaattttaatttttaaattcgttcaatattccacaatatttttttaattttcaggcacaaaattacattcaaacattgtgggcatatcgtaaagttcatgaaaaatatgtttggaatggttttgttgagagcattaacacacttttaagtaagaaaatttgttcgttcttttttaaattaataaatttatcaattgaaaaattaaataattaattatgaaaagaataaattcttaaaaaatctaaaatttatgcaaagttttaaatttgtaaattttttttctaccatttattatctacactaattacataaaaagcaattttcaaattcatcaatgttcttttttctttgccaatctttcaatatttgtttaattttgcataaaaattttcccattccttttttctgatgtttcccattttcataaattcattttttttattttatattgtaatatatttttccacaatttctcttttttcatcatcattttttatattccattttttaattgtttcttccatttataaatgctgctgatatttatgcccaaatgttttgctattattttttttacatttttctctttttcccttcaatttttcttttaatttaattgttattttatcatataattgatccctcatccgaatatctgtttatgatattcattccaaattgtcttttccatttgtaaattttactttggctggcacccaatttttgggcaatttttctttcaattttagccatttctttttctgagtattttttccccatttgcttaattttttctttgtttttaaaatttttccacaatttctcttttctttttgtcaattgcatttgaaaactgttcacaattttgtccaaaatttattggcaattgttccaattgatcacaatttgttgcactttcttgtttcacttgcaaattttcatcaaataattgatcaaattgtgtctcatgtaataattgagcattaatttcatcattttttgtctcattttgatcatccatttgtccaattattccatgttgatcagtttctttctctccattttcctccgatttttcgtcccatctttggccaaaaatttcatcaaaacttttttcatcgtttatctttccagcataaatattatcagcatttttgaaaattaataatgaaaataatattattttaattttcatatttcttaataaacccattaaaatgattagaaatacttttacgaattcatttttattcccatatttatgctgatttattgcatagctttactcagcaaatctacttattttttaaaataatgtttacattttttcgaaattctacttattaatgttttattttttataaattatactcattttgattaaatgaaattatattatatttttttaattattttgaaaggtgtcattttaagaaaattttgaattaaaaattctatttttcaaaaaaagcataaataatctaattttttttttataattttcgaatttttagggtcccgttttaattgccaactcaacaatttcacataatcgtggccatggaattgttattgagagcacattggatggacgagcatttgtcaaccaaagtcgaattgaggtagcaatttaaaaattaaaatgaaatattttggtaatttattttaggctaattatggcgacggaattttttgtcgtcaaaagcatgacggattgtcgtcaatgcaaaaccgtcttggccttgaaattggcattccgctctcaattttggacaaaaaattggcattaa

SEQ ID NO: 56989 - DNA, 753 bp, Heterodera glycines
atgaaaattaaaataatattattttcattattaattttcaaaaatgctgataatatttatgctggaaagataaacgatgaaaaaagttttgatgaaatttttggccaaagatgggacgaaaaatcggaggaaaatggagagaaagaaactgatcaacatggaataattggacaaatggatgatcaaaatgagacaaaaaatgatgaaattaatgctcaattattacatgagacacaatttgatcaattatttgatgaaaatttgcaagtgaaacaagaaagtgcaacaaattgtgatcaattggaacaattgccaataaattttggacaaaattgtgaacagttttcaaatgcaattgacaaaaagaaaagagaaattgtggaaaaattttaaaaacaaagaaaaaattaagcaaatggggaaaaaatactcagaaaaagaaatggctaaaattgaaagaaaaattgcccaaaaattgggtgccagccaaagtaaaatttacaaatggaaaagacaatttggaatgaatatcataaacagatattcggatgagggatcaattatatgataaaataacaattaaattaaaagaaaaattgaagggaaaaagagaaaaatgtaaaaaaaataatagcaaaacatttgggcataaatatcagcagcatttataaatggaagaaacaattaaaaaatggaatataaaaaatgatgatgaaaaaagagaaattgtggaaaaatatattacaatataaa

SEQ ID NO: 56990 - DNA, 1321 bp, Heterodera glycines
atggagtttaaaatagttttattatttttattaatgctcaaaaatttaaatacaatttatgctggtggaataaaagaagaaaaaaactttgacgaaatatttggccaaagatgggacgaaaaagaggagaaaaatgaagagaaagaaactgatgaaaatggaataaatggacaaatgaatgatcaaaatggaccaacaaatattgaaaattttgtgcaaagattatttgtagaagaatctaatcaaatttttgatgaaaatttggaaatgaaagaagaggaaagtgaagaaatgtccacaaattgtgatcaattggaacaaatgacagaaaatagtggacaaatttatgatcaaattccaattttaaatgataaacaaaagagagaaattgttgaaaaattccataaaataaaagagaaaattaagcaaatgggaaagaaatattcaaagaaagaaagggtgaaaattgaaagaaaaattgcaaaaaaattgggtataaatcaaaagaaaatttacaaatggaaaagagaatttggaatgatgatccataaaaattcggaagatgaaaaacgccaaatattaaagcaatttgatcaaatatatggcaaattaaaaacgaaattaaatgaaaaattgtataaaaaaagtacaaaatgccaaaaaatattagcaaaacatttgggcacacatatcagaagtatgaataaatggaagaaacaattaaaaaatggaaaaactatgaaaaataaaaaaactgatgataaaaaaaaggaaattattgaaaaatattttaaattaaaaaatgaatttatgcaaattgggaaacattcacggaaagaatggaaagaattttatataaaaataaaacaaatatttggtttgagttataagacaattgaattatgggccaagaaatttgacatcaatcaaaatatttcaaaaggtgaaatgttttttatataaaataattttaaaattaaattatcttaaattttatatagcgaaacattttgtttttcgatgcagttttaaagcaatttctgttattttcgtacttattttcttagtttttttgtcataatccaaaaattgaaagacccaatctgacagacattacctcaaaatttcaaaaataaataaacaaattttaatttattttatttaggggaaagaaaattgtcattattatggaaaaaacagcgagtgctcagtcggatttgaaatgtctgaaaatattgccttttccgattttttttttttagaaatttaggaagcgcactcgtaccatctacctaaattatatatcttgtaaaataataaa

SEQ ID NO: 56991 - DNA, 73 bp, Heterodera glycines
atgccaaacattttcaaaatccttctgattgtgcttttggccgtcgtctcattccgtctctcggcttctactg

SEQ ID NO: 56992 - DNA, 690 bp, Heterodera glycines
ctggaaagccttgtgccaaaacgaatgcgtcgatggcactccaaatgttggacaaatcgtccggcgttggtccacaaccatgcggcaccaacatgagctacgcatactttgtcacttttgtgttcctctcctcatttttggtgggaaaattttaaatttattggttgattctttctcaaaataattttttcaatgtttgaaatttcgaactaacttttttctacaatttcaatattttattttttttaaaacaattttgtgtaaaattttggtgccttaaaaaaatattattttttcaaatcccgcgggatttcctgagtttggaagctaattactaaccccaaaccttgcaaatttcgacttgttcgagttttcttcggaattggtcaccgtgattatagtgaacctctaaacccctacgagaacacttttctcgtttttctatgaccaaaaataaataaatttacaagtaaaatggtctctcctttggcttgtaaaaattttcaaaaaatcattattttcaattgcgccacacttttttttcaaacccttattttttgagatgttaaatttgttcgtggctgtgatcatggacaactttgactatctgacaagggattcgtccattcttgggcctcatcatcttgacgagttcatccgcgtgtgggccgactttgacccggccgccac

SEQ ID NO: 56993 - DNA, 1459 bp, Heterodera glycines; identical to SEQ ID NO: 26246

SEQ ID NO: 56994 - DNA, 223 bp, Heterodera glycines
catcggttcagggggactgccccgaaaacccaaaaaaaaatttttttgaataaaaattatttaaatgaactgactagataatatttaaaataggttatttctcttcctttcagtatccctgcaaagtttgctgcgcttctgatcagtttctgaaaaaaagttaagcctaaactttttggcctgtttaaaaaggaattaaaaatttttaaaaattttattcatc

SEQ ID NO: 56995 - DNA, 1150 bp, Heterodera glycines
atggagaaaatcgtctacttaaagctgatgcaaattgtgctcactttggcattcatttggcaactcctttcacttcaccaattctgcggcacttttgccgacccaaaggtgcttctgtttttgttgccaattcatttaacaatgatatgcttttcaggccttcatccatgacatctcagttggccgttgcaaacgctttacgctcattggaaaggactcaaaaagcggcgaatttggcgctgtgttcgaccaggacaaatggcacaaccaactgtcgatgatcagcaccaatggtcgaccaatcgaagaacagcaacaccaattcatggacgaattagccgcgaaattgccatccgctgaacgccattgcattccgataacggtccgccagcaaaacgaataataacgataaattaattttcatttgttttttcagatttcgctttttgacgggattggcaaagacatgaaccccctcaacaatggcactttgcgtcgtttttccctcctattgtgggccgcattttggtcgcttcttccccttggcattgccaccatcatagtgctacactctgtggaacaatataaaggagtgagcgcagtttgtggccacagcaaattcaacccgacaaaatcgcgtccaaaattgcttttcagtcgaaattcgatggatttttttttgaacaaattaaaattaatttttgtcgtttgcatttctgtgttcgcaaagtgtcaaagcatttaccattgtgtcgattaatttgttttgtttttaagttccccttctatttcaatgccttcgcttctatcttcttctggtgtgtctctgctgcgttctcaaccaatttgctgctttattggacgagcttctggacttgcgtcaacttccaagcggaccacacaaatgtgccgttggtcactttggtgtgtttgttttttggcatttattttgcgcatttttcaactttgaggtgctcagcatcgtcatgatgtgttcgtccgtctccgagattttcttcatatattcgctgcgccagaagaagaagaacggaagtgccgtcatcatgtgaacaataaggccagagacgaatggaaagatgctggtgccaacaaacataaccaatgcggcaatgaaacgacgatgttatga

SEQ ID NO: 56996 - DNA, 122 bp, Heterodera glycines
  unsure (1)..(122): unsure at all n locations
ctgcttctgntgactggtgntcgcctccccttgctcatctgtgacgacgacacttcgtgaacgaacatgancgacactgcaaatcgacagcgacgcggccgaggcgagaacgcacacgagtg

SEQ ID NO: 56997 - DNA, 777 bp, Heterodera glycines
atgctttcgccccgtttcgatgctcttgtggacatccatttcgatggcaaaacggaattgacactttggagaccaatcgcaattcgcaacagtgtcgcagcagtgccagaattacatgtgtttttcgacggtgccaacaaatccgtgccatttccattgcccgacgcccattcgccgccgatgccaaacaacattcgttttaaggaccttcgaattaagtaattggaaaatgaaaaacacttaataaacaaaaagcattcactctttttcagttgcattgaccattccgtgatcacatttcttcgtgccaatcaactcattttccaaaagggcaccaatttgcgtctgtcggttccttttggtccattcaacattgatgatgtccagtcaatttgggatgattttgcgcgtcaaatttggcccatttttgcaccaaccattcgacactttggctttcccgattgccatattttggacacattgcttcgtctcgtttcgccgacaattttcacggatgatcagatcaacattcattcaatcaattccggtcgtcagtttcccgaagcgattggtgatgatcattttgaggggccaacaacagcaacattagatcgatcaactacaaattatgatggatcaattgcaacttctgctgctgctggtcaagcattgtcaaaatggttgcacatttcgagaaaagatgggcagccgaagcaattgcgattccgcaattttgccaatccgccaaacatggaatggcaaaacaatttcaaagag

SEQ ID NO: 56998 - DNA, 1384 bp, Heterodera glycines
atgaaatttgcaaagaaaatgttaatgattcccgaggcggaatatttggctctacggagtgcgatgaatagtggtgattatctccaaaatgaaaaagcgagtttagacgcaaaaatttctcagaatttacaagaccccggcataagcgagtacctcaaggcgaagagacatgattggctctataaagaaagacgtacggtaaaggggatacttgaaaataggccacagaaggtcgtgattgagaatcatgtacccggtccaaatgttgcaccatatctgggcctcaataaccaatccaaaccacaggagaccgaagaaccacggaaaataattattcctaggaaaagacttaaagagcgaactcctgatcctgaatcaaataatgatacccttgaggagttaactccggaaccccaaacaacatccacacacaaaacacccgttccaatcaaaactattatacacccgacccttttaaacggtctttttaggtacgtgaaggaaaacaaagatttatttaaaattacggcggccggaaaggtacagtcgaacatgaatttgccgattgaaaacagtaattatagggatgttttgttgtatctcgcggggaagaaagatgaaacaccgcgcggtgcaaaatttcttaaagatcggttactgaaggatccaacagtaaaagacatggttgataaatcgaaggtcatgtggggacgtggaagtaaaaaggcaataaaatctataaaaacacacggcatagcacgagagaagaaaccattcaaaccactaatatgggcaagactgtagagaaaattttatcaaaaatttattttaatttaaaatctccggcaagttttgcttggattcaaaaaattttaaatgaggccaaaaagattgactcggaaattacgaccgatgacgttaataaattcctagaaaagcagagaacatacacgattcacaagcccatcaggaaaaaattcccgagactaaagacggtaccgagcggcttccataccgattggcagtgcgatttgtgcatatttgaccagttgaaaaagcataacgacggttacaaatatctgttggtatgcatcgacgtgctgagtcgaatgatcttcagtgcaccggccaagtcaaagaagagtgaggacatgattgaggcttttgatcgggtgttcgaaaagtcgaaaattatcccgatgaaaatatatagcgacagcggactcgagtttcaggctggaaaaatgaaaaaatattttgaggaaaaatttattatcaaaaatgtgatgtatagtcctgacctcacgcccggagtcgttgaaaggggcaatcggacaataaaggagcgcttgtacagatattttacaaagatggacactctacg

SEQ ID NO: 56999 - DNA, 452 bp, Heterodera glycines
atgagaagagatgatattttcttttttaagactgttattgactacaaaattaataaagaatatcatttcttatatttctattcaagattagcatttttaattattatttttcatgtattttttatttaatataattattttatacctctatatcaggggtttgacttgtctcagaaaagacgagagcgagagttcggcgagaagcgagagttcccaaaaagacgagagttggcgagaggcgagactttttcaatttttctttagccttattttttacgttaaaaaatttcattcataagtacaatcatacaatttgatatgataaaaaatagagtgccacgggaccgggaatttttggcaaaaccgggaccgggattaaaaattaaaaaaaaaattcaaattttaatttatatcaagtgaaagtaatgcaaaattatgtggttttttattga

SEQ ID NO: 57000 - DNA, 425 bp, Heterodera glycines
atggctaacgactctcattcatcaaatgcgctttctgaaacttttgggggttccgcgcttttgaacatcaccgtggacactagaggcattgaggaaaagctcaacaacctgcaattggctattgaggattcgactggaaatttgggcgtgcaagtcagcgatctgaacgcgagagttcagagctcgcaaacgctttcttcaattgcggtaaagttgtatatattatttatgataattacatgacttatttagactgaggacatgcgtcaggacatttgtgctctccaaacgaaagtgggtacggttgagcacgatttgaagcgagctctcgcaaagctgcatattctttccaggaaaaagttgcagttctcgacaatactatgaagctggcgtccgtcaagattcaggatgttgtgaagaaatga

SEQ ID NO: 57001 - DNA, 1477 bp, Heterodera glycines
atgttagcaggacagaaacaacctcgcgacagcgggtgcggtctcactcaaccaccaaaagaaaagaggatggttcttcttatgggaaagagcgcaaatgttcaaattgtgggtccgctgagcactggttgtcccaatgtcccgaaagacaggttgtaactcgtgttttcaacccaaaaaattttgtaaacggcatgttttagtagttctttctattaaggaactgcagcgggttcggtcgcattcaaccaccaaaaaaaaggacgattttccatattggaagggtgaccagcgcaaatgttcaaattgtgggtccgctgggcattggttgtcgcaatgtcccggaaaacaggtcttttttaactcatgttttcagtaaaaaaagattttatggcatattatttgttaaggaacagatgcagtcccatgggctgtatccttcagaagcactacaggatccatcaacgcgtgcttcacaaataaggcgcaaacagtttactaagggggtccgtgctccggcaaagggtgcgccgggacagccacttgcatgttaccattgcggcggaccacacctcgtcaagaattgtccaaaggtgtttttgagcttaaaactataaatcaataatgttttaagcggcaagcaaaccccaagtgttttaaatgcggggggtccggccacaaagacgttgattgtccaatggcgttgaacttgggcaatccagacttgtttccccaacgggactttaacactcgtggtattttttaaattttttttagattttttgttatgcgaattacattaagcaggatgctacaactgtgggggtccgcacaaggatgcacaatgtccggcacgcagcaactttccatcttatgccggcattgatcgagatcggaggcgcatgtatgcgttggacactcatgggggatccgctgggcagtactatcgtcgctcagaaaagggtactgaaacagttttttgtaagagtctacacctttgaatttaaagatccaaagtgcgatcactgtggagggcctcatgaatctgacaagtgtatttttggtccacgaaataaatgcgcaaagggtgggtacgttcatgggaaaacagcaaaatgcgtcgaaacgaccgatgagcatatgggtatgtttgtttctaatatacaactactattattctaataattttaggaaatggctgcaaaatatgcggcgaaatccatgatggtgattgccccgaagcaatgcagaagttgcactgtcctcattgtgggtacgatcacaaatcctatgattgtcctaaccaaccaatacgttagttttttaaaacatatgcaaaaaatatcattcaatcttttcagcactctgcggagtttgcggctctctcgcgcacaccactaaaaagtgccaagagcgctgcgctttttgcggaaggaagcacctgaccaaggattgtcctgattcacaaccaggctaa

SEQ ID NO: 57002 - DNA, 56 bp, Heterodera glycines; identical to SEQ ID NO: 52733

SEQ ID NO: 57003 - DNA, 1011 bp, Heterodera glycines
ggttctgctttccaatcgtttaaatattatgaaagtcggcgaacggaaatccgtcaaattttccggattggacaagacctctgtaaaactgttgacgaatacaaaaaagaattgtttgggttggtttttaattggactttgggaaaatatctgtttgagggtccaaaaccgaaaccctcaaaactgatcggaattgaaatgtccaatttgaacagcgattgaaccgtccgacctttaataacccataaaaacggtcttaaagctcgttttttctaattaatgcccttctttatgggttttgtgtttgtgtctcaagcgatatttaccgaaatttaattttgattttaatttaaaaaatttaagagatgatcaatcacataaattttgtgtgtatactcgtaaaggagattttaacaaatttactgaaacaaaaaaagacttcactgagcagggcattgaatttggatttaaatatttaatggtaattaaatcatttaaatattaatggtaattaaatcatttaagtattaatggtaattaaatcaatttatgttttcaatatttttatttctaattaaggaatcatttaacaacatttctgtcgttttattgggagaagacaagcaatttttgaaggatttaaaaatcaatcgacatgtaaaatattgggtttactaatataataaattctaattttacagttaattgccaacgtttatttgccaaaagtaatgccgagaatgaatgacatggcttttgccataaaaacatgcgattccttgctgatcactgcacagagttcaacgtttggctggtggatcgcttatttaatgccggacaatgccaccattttttataattcaaaattcggcaaaggtcggacatttttttatgaaaatgagttgcgattttttgtgctaattacttcaatttaggcgttcctcatactcggttaaactttttggctgaatgggtaccgatacaattaatcaaaggaaagatgactcttga

SEQ ID NO: 57004 - DNA, 69 bp, Heterodera glycines
atggcaccacccgcggcggcagcaggagaagacgaagcgggacatgaggacaaatggggacggcacatg

SEQ ID NO: 57005 - DNA, 690 bp, Heterodera glycines
atgcaattattctttttattcgccgttttcattgctgccaatgcttttgactctgcccaaagtgtcggcaaaacgtccgctgaggacgaagttcgagcggtaacggaaggggcggcaccgcagcggcaaacgccgacgcggaaatcgttgaaaatgttcggccacggcctacgccatcacacgggcatggatttgctgatgaaactcggccagcaacaggcggaggagcccaaggtggtcaaattttgaaaacattttacgtcattatttttgaagttcaatttttttcaacaaatattgaagaattttgaaacattttgtttaaataaaaaaagaagttgcaaccaaataatttgatgcatttggcatattaatttcaaaatttaaattaataatttgctctttcctcctccatttcagtcattctcctcaatggacattcttcgcctttttgatgggcttgaccaccagttttaccacgatttggagaaagtgagaatgaaatttattttcactgaaagataattgcaattcgtttctttattttaggcacaatcgctttttgaagaaaatgccaaagttgtgaaaagtcttgaaaatcgtgttgtcaaacttgagagtgcaatggcaaaggcagcggagcattgcgaacccggcaaagtccaattggtctcggctcattacgacacg

SEQ ID NO: 57006 - DNA, 451 bp, Heterodera glycines
atgccatttgatgagttagcagaatgcctgcctgttcagcaagagcttttcaacatccttaaaatctcactttttgttagcactaaaacgcccaaaaattcaaaaaattttcagaaaatcccatctgatcagatttgtgatcaagaaacttcatacatttgcttctttattcagcaccgatcaatcacaaattatacattttttagtggaatgagcggaatgtctgatcactcatttgattaatagtgatcatttgtcctgttttgatcaatttttgttttccaattcaattactcttttttttaaattattcccattttaaaaattctttttccctttttattaccaaattgtattacatacatatgaatgcatttatttctttactagtcaaattagtcaatctgttctgtccaccgccgcttttaatgggctgtttttggtgcttcga

SEQ ID NO: 57007 - DNA, 279 bp, Heterodera glycines
tgcccttaatactattgttgttgctgttgttgttgctgttgttgttagtgccatgcttctgcttttgttgctgctggtattgaccaacaattgcggcggacgcggtcaaatggcgccaaattcggttgaaatttgttccactatttaatataaaaataaataaaatgaaataatgatttttaataattaaaaaaaaattctacaaactttacacatgctccataaaaataataaaatccaaaaaaattcgttaaaaaattgttttttttatattcgccc

SEQ ID NO: 57008 - DNA, 1920 bp, Heterodera glycines
atgtcagatttcttcctcgacaattccgacatggacgacaacgaactggagctgaagctgaacaatttgcaaatgttgaaaaatcggcgtgccaacaaatctctgaaaatgccacccactgacattggcactaccaaattgccggtaaacggcaaaggcattgacaaaaaaggttattgttttcttggaagcattttttaggcacgaggaacctggcattcttttgtctcaagtttgaaatccgaacccggactcgaatttttttttcttggtcatttttccagcaaatacaaaaaaaaaatttttttttttttgaatttatacttcaagctttcatttgatgccaagaatttaggtattaaccaattaagaaaaaaattatgttcaaacaaactgaagattggacgcctaaaatgcaacagagccgggtacttcagtcttttgctaccccccccccctcgaaaaaattcaaaaaattataatatttttgttttttcgagggcactcgctgatcacatgaatatacatctgctgtgtatcgatttaacaaaataactatgattttttggaagtttcaattttttcgagggtggcggatagcaaaaaacactgaagtacctatagccgttgaaaatttccgcgtcaaatttaattatttatttcttgattttctaacccaatttcagcacaattgaagcgggacattgaaacaaaaatgggcaccactgacagcgaagagaaggaaaaggagccgaaggagaacagagtgccaccaaacgaaaatggcaatggctatcgaccgctgtcagacaatgccaaggaaaaaaatggtaatattttcgtgcttttttttgggacacccattttttcgcatatatttaaacatttatcttgatttcctaacccaatttcagcccaattgaagcgcgaaatcaaagaaatattgggcataattgacagcgaagagaaggaaactgagccaaaggagacaaaattctgcgaaatgttttcatgggttcaggtatgggtcaaatgttaaaaataagacagaaatgtcagtcttaccgattaaacttaatttttagaaaatcataccgaattttcaaatctagaaaaacctaaaaaaaattcctacaattaattttttttcagaatcttttttcatttaagctgttctttggcttggctttcctgctcctttcattcgctgtgttctgctggtgtgcctcaaataaaactcaaacctcaaacactgttcgtttgctcactttttgagggagcggcgggagacatttcattacaatcgaaaatttaaaaaaaaaaattaaacacaggcctcaaaaatcccctaaatttttttaagaaccagaaatgcgattgaaatttttattgttttcaaaacgtgattactaaaactaaatttgaacaaaaaacaccgtttgtcaattttaggctaaaaattaccaatgggaaacaaacataagccagtagctaaaaaaaaattcggaggggggggggaaatacgaaggcaatttttttttgttgcttttcgggccaaaaaaattctacagcactacataattcttatgtgtattttatgtatccatttttcagccgattcattccaacagttcttccgtgccttccattgtccgtgatccaccctttttggtggtttggtttcccgtgatccatgccatcgtgttttacattgccactggctcagccatctttgcaaatatttttgtcttcgtaatgctcgttttgtgttttcgtctgttgcgtcgcatttcggccagtgtgcagcgtagagaagctgagaagatgaaagaattttatgcgaaaattgaggcagaaatagacgaggaagagctggagatggctgagtttgatgccaatttgagatgggatgagacttga

SEQ ID NO: 57009 - DNA, 892 bp, Heterodera glycines
atgagcacaccaccaaaagcagacgacaaaaagaaggaagtgggcggaattctgaaaatcggcaacacatgctgcatgggcgctgcactccaagcattggccaacgtgacggcactcagcaattttctgatcgaaaagtgggtgccaataatgccaatgtccaatgccatcaatttatgttttcacccctcttttttcagcgaaaaccgactgcccaacaacaaactcgtcatggaatatgtgcaaatgatcaaaagcattttggtgttgcgacaaccggcggcgccattcgaactgaaggtgtggtgaacagtgtgccgtggtgatggtggtgttgcgtttcatgactcgccgttttttcaggaagtcatctccagccttaccaatttgttcgctgattcgttccaacatgacagccgactgcgcgacattccgctcgacaaaattgacatttggtgcttcatgcgattgttcaaggacaaggacgaagatggacagggcgaccgcctgatttgtatcagcctggcccaggtggggagttcaagcagtaccaggaggacaaccctaaccccatttgacattttgccgctttttttagcgcttcactgatgaatcgcattacattatgggagcgtcggacgctggtcaactgcccatggatgtgccgctgatctccatcaaccattgtctcgcggatttcatcaaaccggaagacattgaaggctcacgctgtgcacagtgcagcaacgcaacgccatgtttgactgttgttgacaactccgttgacgaggcggtggagcaggaaaaggcggagaattgtccaactacatcgtcaagaaaaaataggcaggcggcgattttaagcggaattattttgaagaaaaaaaagtga

SEQ ID NO: 57010 - DNA, 1472 bp, Heterodera glycines
atgccagcttctatcttggtaagcgtgctgcctgcatgtacaaggggcgcaaaacgatcgcacgcggtggtgggccgaagacgagcgattttttggtcggttttataaaacaatattttacttcatttttatgtttctgtagcattagggtgagcagtgcatgatcagtacaaaaaatagaagtaatatgagggctcttctgttttttgatttccaaaagaaaaacatgaaaaccccaaaattaaataactttttatcagtcttttaattaaacacaaaaaagttttggactttttatggctgtatcccctattctacagaaatttcagaaatgtgtatcaacgatttcgttgttgattttttctctcctttaagttggctttgtttatgtgccttctttttgtacaaagtgcttgcgccgaggaatctttttcaatgaaagtaggagttcataaactctttgacaatgcttaaatacattttttcaggacctagcgctggagtacaagataaaatatgacttctttttcgcacctgtgacgttgattttggctgtgttaagcctagcgatggcgttttctgctggctttatggttgtcctcaaccgcatgttcagtttgcacatggatgtgcaggaaaacaaaaaccaagtgaaagaacttcgaaaagaattggacgagaatgttaaaaattttaacacattgtattctgaatttgttaatttgaaaggagaggtcaatttgctgaaaggcaaataggtagattattttataaaataatttaattgtttttcatgcataattgtgttttaaattcattaattgtgtagacagttaacaaaaatccaagtatacatccgccggtgactgggccgttttgaaatttcgacatcagtagggaatgatattttaggctctaagaactgcctaaataggtaggctctaaaaacccccaaaacaggcaaaaaccatttttaagtgtgtaaaatgtcaaatttaattttaaaatattacatatcagaaattgagataaataattttaaaatgaaaattcttcatatgaaaacaaatagctaaataattttggagatgaatttgcatttttgttaataatttggtaatagtgtacctagtctgcccccccccttttttggaaaaaaatttcaaaaattgtagtcgtgaaaacgtgtttcctgggcttttagaggtcgataatcacgaatccggcatccgtttcggccaattccgaacaccggacccaaattcgaacaaaaactcgaaatccaaattttggatttttgtctaaaaaatggtttaaatcaaaaatagaagtcacagaaatgaatgataaaaccttcaaacaaatttataaggtcatttaatcagcaatataatatctaggtaatccgtttttaatctgtgtgtgcctaatcattttttgataatttgaaaaaatatcggtcatttgaaata

SEQ ID NO: 57011 - DNA, 474 bp, Heterodera glycines
atggccccagggccctgtttccatcccgcatggctgtatataatggatttcacgaaatccgtaattattgatctaatttttgttaaaccacacacagatgacagtccgggctttgtattcagcggatggcaatgcgcttttcacaacgatgaaacatattgtgccgaaaagacggcgaaaaatatgagtcagaagtacaaaagtgtccattgcaaatgcgaaattggtgaacagggcaaagacatggctaatgataagccaattatgacgcttccaccgcctaagccaacatcgccgccgacgccaacaacgacggagccaccgagtgagccgctatatgtatacataattggattactccccgccggggctcccggaaaattggacattgtaaaaatggcatctaaaaaattgggcattggaaaaatagacattggaaaatagtagattaaaaaaattcataattataataaa

SEQ ID NO: 57012 - DNA, 141 bp, Heterodera glycines
tttgtcatccatcgaatccaaagtcgtgaagggcagtacaaactgtgcaaggtgaagaagcaggcggtcggtgacaagcaagtgccgtacattgtcacgcacgacgcgcgcaccattcgcttcccggacccgcacgtcaag

SEQ ID NO: 57013 - DNA, 583 bp, Heterodera glycines
atgtcccgtcgaatggacagagaaacgcgttctcgtcgagttcgtttggataatcacagcactcaaaggacaacggcatcaaaaacagtggaagttggggcagaaggctcaacgaccaaccaaagcagaataaaagctgagggcggcgagcacagtgacgatgaggtgaaaaaacaacaaacgaataattacgaaagagaaattatgttttttattaaataaaatgacaaactcggtgcatattctttaggaaagtacgcttccatgggctgggttaaccaagcaattaatttatgccttttcagactgtcgccgatgacccgggcgtggacgattatcgcactttgtgcactgtgcgcatttccttcttcaagggctttggtctcagctacccaaaacggacaattcaggtactgtttatgaattatgagctgttcgctttagccatcccactgttccccatttgttttacgcttccattaattcccaggaaacgccttgttgggttgagctgcacctgaaaagggctctccaattgctggacgaggtgatgaacactcccctgatcgaccatttgacttag

SEQ ID NO: 57014 - DNA, 1754 bp, Heterodera glycines; identical to SEQ ID NO: 26271

SEQ ID NO: 57015 - DNA, 1528 bp, Heterodera glycines
atgccgcacctttgcattacagtaacactttttatcgtaatcactttgttaacaacggttgctttgacggatacaaaggtttatgaattaaaaaaagatttcacatttgttaacattgcttgtttaaagaaaaagctaaatgacagtgacgccaatgctgaaattgacaatgaaacaattggcgaacagcagaaaaacattgcgacaacagaacaagtaaaaattatattaataattatttttaaatatgaaattttattatttattatactggggtgatgatttaatgcgcgaaaaaacgaaaaaataattaaatggatttaaattatccaggacattaaaaaatcatcaccgaatattaattttaaaggcaaaatcaattttttaaaattcttttgtcattaaaatttgtttcaggaaaaacttatgctatttaaggcaaattccgtgaacaataataaatttataacaaaaataattaaattgcttttaatggtaacactaattattgaattctttcatctgaacgatttcataaattaattcaatttagttgattcaccaactagtccaacagcttcaacaaattcagcaaaaaattttggtcatccaaaaaaatttgccaaaacaacaaaaacaagaattatcgcaacgacgggttgaagctgtacaacaacaacaacagcaacaacctaccggcgttgtgaagctgaacacagcgcgtttgaacaacaattcaacagttgatgaacgaaaaacaaattcaagccttaaggcacaaattaaagtaaacgatttttaaacattaattttaggattaatatattaagcgaaaaaagcatcaaataaaatattcaaaataattaatagaaataaaaaatgaataattaaattatattttttgtattttttaagttaataattatttaattcacatttgtgagattaattattattcttcccttttaaaattaatattttgttaataattttttttacaaggaatttcgacatcgttttgcgcaacctcgtgaacaagtttgatgaaatactttcattgttttaatttctaaaatttatttttagtttcggaaattaatacgagcgaaggatcaggtgcaattaaaattcatttcattaaaaaaaataaaattttacattgtaaagccacagccgcaaattgctacttcaattgacaaagtctgatagtctaattaatcctctaattaatattttgtaattattttaaaaagacaaactaataggcgaattattaatttaatatccattcagacaattttgaaagaagctcccacacgggtgccaacacgtcaaccattggttaatttagttttaatattttaatatattttttacaattttttagcccgttgcaaagcatgaaacaaataaaccatcgaatcaagtaaaaattttctaaaatattccatattttcaaaaattttatcagagccaaaattttgcgaatcagccggtaaaaatcaatattgttttttgaatgaataaa

SEQ ID NO: 57016 - DNA, 602 bp, Heterodera glycines
atgtgccctgtccgcaacatgaatggaaaaaaaataatggaaaaggttaggataaaaaatgttaaaaataagcaaaagaaaattcgactaaattcgaaattttacaataaaattgctcttttggtttgaaattattttaaataattttttgttttttatttcttgtagcattaatttttagaaagaaattcctgaaaaagtcgagagctaggctataaaataatggaagaattaataaggctggtttctttaataactgaactaaatcgtgaagaaaagcgccaaacagttacaaaagtgacaaaagccctaaaaagaagagataatgacaaataggtcgatattctttcaaatttttgcaaaccaaatcatttaattacaagcttatataattaaaacaataagtaaatttcattgaaattcatttaatttatttcatagtatagaagcaaaaaagttttttgtgatttttattcattaaataaacaataattaattaatttttagcccaaaaatctgttaagtgatcagagatcaagtatggtgtcaaacaattggcttttaaccaaattcgaataatgctattcaatttgacaaataaa

SEQ ID NO: 57017 - DNA, 289 bp, Heterodera glycines
atgaatttgaataaatctgactgcaaagcaactagagaagtaaaacattaaaataatttaaaatttagccataattagtatttaaatgttacattaaaattatttaatatataattcccatttaaatgtagcatcttcttcatgacaacagtgttcattttgaaggtgacaatgaaatttttatgacaaatcacattcaatttgcttcagcatctgcggcaccagtaaaataaaatgcaaatatattaaatgaaaattttaaaaaaatttagccacaaacaacaataaa

SEQ ID NO: 57018 - DNA, 379 bp, Heterodera glycines
atgggggataatcagagaaaatacggtaaattgagaagaaaaaaattcgtaaattattactatttgaaatttaaatgaaatatggattaacgaaatccgttgggcgtttgtccgtaatttatgcggaagaaaaggcgggacaaaaattgtttatttttaaatttatatgggaaagaacttttgttatttgcgcggctttttgctgatttttaaaaaatttgaattggggccccagaacaggaaagtacctttgcgataattagatattaagttttaataaaaattatttcagcaatttttccaaaatgcattattatagaacacaccaaaaatggaataattatgacaatttaaaaaatgaaaatgttacacaaataaa

SEQ ID NO: 57019 - DNA, 303 bp, Heterodera glycines
atggcattggttatatttttaattaatttagggtaggactccgataattcggtctgacaaaagtcggagtcggggtttttctgggttagctaaatcaggtggttgggctattttttcatggtcattaattaatgagtaggggattctaccttaaatcaattaatattttttcagacattgtcttttccgatatggaaattccccttggagtgcctccttctgctgggagtggaagaagcactaagcccggcattggccatcactttgtgatggtttttggtaaaaaaaacaatataaattaaa

SEQ ID NO: 57020 - DNA, 1300 bp, Heterodera glycines
atgaagctcatccttcagctcaatgtcttgtttgcgtgcttttggagcggtaattatacaataataatgaattataattaatttttagtacatttttaaatgttcttaatattatttttttttaatattttagcaacatttctcagttgccgtaagggaattattggcaccgttgataagccctttgttgataaagagctcacaagtccttcgactgcttgccctgaaaagaaagagctaaaattttgtgcgaaagctgtctgcttccgagagggcaaaggtagaaaatatgataaacaaacacaacagcagaaatgccaatacaaataaagaaattaattaatagtcgtaaattttgaattttttgtttaaattttttcaaaaaacaaaaagcaaaaagtggcaaaaatagtgaagaaatgccattttattaattggcgaaaagtacacaatgcttatgttgtttgttctcaccaataccatatagtggcaatattttgggcgctaaaatgtttttgttcctgtctttttcatcgaaataaaaccgtcgcaaaaataattttaaacccttccatataagaaattctcaatatgcaaaaaaaaacgcacagatttaaaaaagtaattattaatcacattacataaaacaatttgttactttttttcccaagccgaacactatgtgaccgtttacacatgctccactattaccgattgcaattctgctggtcgtgaatttttggcaaagaaggagtgccaagcaaacggaagcacagaagaagcctgtgaagaggagaaaaaaaagaataaggacaattttatcagaaaatatggcaattaccggtgcgagcagtgccaatttggcaaagataatgaagacaatggcaacgcaaagttcccgccgtatcagccaaaaagtagaaaaaaaattgtttttaattaatcttttggaaaaaaaattggggaaaattgttttcttatagcattaaaatttaattttctgtttaatcattttttcaatggacaaaatcggataaatttgtaaaaccaattaaatataatttacattgtaaaaattttaatttcattgaagcaaaatttgatcattttttatgtttttttaaattttagtagatttaattataatttaggttaattaactttttaaaaatattattaatttttttttctttttacagcgcctccgccaaatcctgtgaacgcttctgttggtaaaatttttttttgccaatttcattttaatttaggataatgaactttttaaaaacaaacaaataaa

SEQ ID NO: 57021 - DNA, 747 bp, Heterodera glycines
atgccaattagcaacaaaatttaccgcaatccaaacactgatttctcgtctgatcagcaactgatcgcggcccaaaagttcgcacaacaatttgttgtcaatttgtaagaaagcgttggaacggaacagaaagtccgcattttggtcaatgtaattcaaacatcgcgcagcaaattcctgtcggagggggggggggggttaaaaaataaattacaataattaaagcggttactgtaaaacattttaattaatttttgtgaattatacacctttttgttcggcaattaaagctttgaacgtttttttaaaaaggaaacccaagaaaatttaaaaaaatgcctagaattgaaaaaaaacttttttttttcgagtatgggataaagttaaccgtaaaatccttaaccttttttgtccaattcataacttttacatttataaatgttattttcagcggttttacatccctaaaaattggagccccaaaaaattcggaatttttttttaatttttgtttcaacatttgccacctcctcttcaagaatacgggttcgtacgagtgcagagaaaatgtcacgcagctcagaaacggggaattcaacacacgctttgaccaactcggggattttgtattttttggctaaattaaaatccaaatttttcaaaaaaaaaaaattttttttttgacacctgcgtaaagtaaagcaattgcgttgtcgccattacgttcgcttaggtcgtcccaataaa

SEQ ID NO: 57022 - DNA, 286 bp, Heterodera glycines
cttttttgcggcctgtcgagatcaccgacgtggagcccagcgcgttcaaagtgttgctgaacttcatttattgggacgacctaagcgaacgtaatggcgacaacgcaattgctttactttacgcaggtgtcaaaaaaaaaattttttttttttgaaaaatttggattttaatttagccaaaaaatacaaaatccccgagttggtcaaagcgtgtgttgaattccccgtttctgagctgcgtgacattttctctgcactcgtacgaacccgtattcttgaagaggag

SEQ ID NO: 57023 - DNA, 1286 bp, Heterodera glycines
atggacagtaataagaaaaggaatgaaagtgatggaccacgaattgaaggcaaaatgggcgagaaccgttcatcaagcagtagcagcattagcagcaacttaattgatccaattaacagcaatttcaatgatccatccgctgatgatgaccagccaatgttgatcccaaatgaatgggcaattaacatgctaatgtaaatgttttgtttgtcgggtttatatgattaaaatgttgaaatttaacaaatattcccaaaaaacaaaagttttgagtgaaaattttgaaaaattaataagatgctattaatttattcagtgaccctgaaaatgtaaaacagtttaaaaaaattaatcacccctccccctttggttttttaatgtttctatataaactgataattaaatttgtggattttacagtatataagatagaaaagtgcttgaaaaaattgcttttaatgttattttatcaaatcagtttctgaattattatgttaacacagggacacttcgtcattaatgtgccattcgcaaaatttgcaacaaaatcaattcatccccaattataaacattttccgtcattatcatcatcatcatcatcattattatcactaccatcatcatcatcagaggctacaatgtttggagaggcacgtgaaaataaaattgaaaatgaaatggaaattttaaattctaattggtcaattgtgcagcaaaaaacggccgataaaaacaatgattatgaaatccaaaaagaaaaacgacagaaattggaggagttacaaatgggaaacggcgcattagacgagcagcaaatggaagcacagcaagccaaaaaacttttatgtattaaattttacaaatataatttaattttaaatggaatagagatgcatttttatgagcactttgattttctaaaaatgtgctctggaaaaagtggcacaaaatggatgtataaccaacaacttgagaccggcgggatcgggacttcccgcgagatttttgcgggaatctcgatcccgtgctttttccttgcgtgatttttttttacgggagcgggattttgatggcattcccggttcgaaataggtcaaaattagctaaattttcccgacagcgactatcgccatcgctggactacagaagccttctttttttattaggagattgaccaaaaaaccgagaaatttcattattttatgacaaaaatcggttaaccgctcaattttcttttttccctcccccttaacttccctaaaaatgtttgggaaatagcattaaa

SEQ ID NO: 57024 - DNA, 677 bp, Heterodera glycines
attcacgtattcgaagtcaaatcacaggacaaggagaagcagcaagaaaggcaaagacctgacactttaatcgcgtttcacagaattgtgattacgccagaaatttgcggacacagacaatttgagtaaattaattaattcaattttaaaatatattttaatttttaagcacttggtcatattgtactaaagtcagtgtataatgtgaaaattattataatttttgtgtttttatttagctcaacttttatgggttgggaggaatcgatggggcgcaacaatttttcgggaaggggaagaccaaagaggagatcaaggacatggacgagttcgacaagcgcgggttcatgcagggtgtgttttttatgcggttgaagtttggtggaaaaaccgatcacttacttttattggacctgttctgatcagagctggacgagatttcgggttcgaaaatgtagaaaattttggggttttgcactttgatttaatgctaaggattattcggtgaatatttcccagccctgctttcgaactttagcgagtagtccatgacaatttgctcgaccattattataccagtgacctcgagaccaagaatctaggcccttttttgtgccaacgatcagactcaatgccgttgatcttttttgggctccagccccattctgacaaataaa

SEQ ID NO: 57025 - DNA, 257 bp, Heterodera glycines
  unsure (1)..(257): unsure at all n locations
gacaaaacgtcgtccagccgaaacgtcgtcgancgaatttttcgaccataacttttttctttctcaaccaaattaaacattcttggtattattcgaaagcattcgaaaaatgctattagcttgcaaattttcaaaaatttttatttatgcacaaaaaaatcagagcaaaaaaagttcgaattactgggtttttgagttccttctggccataacttttttgaaacttaacgaaaatttttgagattttgcaaattaat

SEQ ID NO: 57026 - DNA, 565 bp, Heterodera glycines
atgaccccgaagttggagggtcagtcagtttactttttgtatgtaaaagtattggcatggcaattattaggtttaactgatacttttctgcatacattaaagagcacgatttttaactaacgtcaattatcacgaatatgacacccgttttgactaatttcgaagcatgaacccgaatcaaacagagttaaactttttagttttcgcgatcagcgaccccgaaaacccctttgtcctttaaaaaagtatataattaagtacatatttgaatctgaaagggtatgttaaaagaacctttaaatttaataagtaacaaattatttatttcttcagtcaagtgaaggttgaaatccgagatgaccagcaacttctgttcaaatcctgcaacggccaattcgaactttttcttcttaccgccgaagggtcgagtcattccgacggcgcctcctctgcaaacttttcaaaacttggaccgattaagcgaactgtttgtttctttcttgttcaatttatgaagctgactgtgaattaaagaacgaaataggattctgtgctaggaaataaa

SEQ ID NO: 57027 - DNA, 1201 bp, Heterodera glycines
atgaatccaatcagcgccaaaatattgaatgcccactatgggctaaaacacccgcaaacaaagttgaacatcacccttaacgaggcaattgcacttggactttatgacccagtcacccgacaatttctcaataacaatgagcagatggattattgggattccttagcattccattcgccgaacactgtccacctctacgtcaaatttggggctataaaagtgacaccgatggacttggattatgcactgaagtgtaagtgggcgaaaaagtttctaaatacctaaataggattttcggcccaaaatgcgaatttaactaattttaaaaatggtttcgttttggccaaattttagatttaatgcgaccttaacaatacttggtacttgttaattatcttttcaaaaaaatttttgagaataaacttgttttttagttttttagcgtcggaaaacccgattctggcatctattttggttccgggtttgaatttgggccaaaatagattccagaatcggatttcccgaacctaaaatccctaaaagttttctttaaaaaataaaaaataaatttttttttttgaaaatctgtaaaaaagtacccaataattttcaatgtttcctgggtttcattaaacattccaattttttttatcacctatacaattttgtttaacaatatttcccattaagattttttggaccggtacgtcggagagttccgccttttggaataccaaatttctctgccggaggccctcaaatacggctacattgaaattcgcaagccacaaccgacatttgcattgtcgttgaccgattgcatcgaacagacttggataaacagagaaaccggactgttcattgcccgtcccgaaaaaccgcatggatttggcgaagcaatgcgtttcaatggtgacgggccatcggaaattttgaagtgcgatgtgcgcgagtgtttcgactcggaaaacaacacgcggttgaccattgccgaagcagtgcgccgaggaattttgaatctggcgaccaacacattcgttgacacaaagaatggcacacagctgacccttccacaggcacatcatcgcggattcattcataaaccgttgactctgacggaagcggtgcggatccaccttttggatgagaacgaacagtttcgagatggcaccaaccgtcacacactgcttcaggcaagggc

SEQ ID NO: 57028 - DNA, 406 bp, Heterodera glycines
atgtcactattttatcaagaaaatataaggtttgcgcaaaatttggttttttaaattttacaaatttatttgagaaattttatttctttaaattagagtgccacgggaccgggacctggtagcggacaactgagtaccgaggtcccggttttgaccgggaccgggactagttccggttttttcccggttttcccagccaaaaattcccggtttttcaacccgaaaaggtcccggtcccgattaagccaaaattcccggtcccgtggcactctactttaaattaattattttcatgaaatgaaaaatgatcacttcagggagtgatgattttgattcggcagaattctatttatttctttattaaaatcattaaatataatttggatttataattaaaagtaataaa

SEQ ID NO: 57029 - DNA, 698 bp, Heterodera glycines
atgccaaatatggacataaaatatggatataaatgccaaaatatggacaaatatggaaatatagacataaatagcgaaatatggaaaaatatggaaaatatggatatagaaatccatcctagaagcttaaaaccaagccaaaacatgtttttcatgcgttccaggccttccacagtcctggaaaaaatatggagatttccatataattccgagccctattaataaatttcacccaacaaagagtcttttggcttttcactgttctccgttggcatttcagctgggctattgagaatgcttatcgtgctgatggtgataataatgatgataccatcatccgttgctgaagatgagtttccaatttatgtgatatgtaagcatttacaaagaacgctacacagttataggcgatgccagggaaaaatttttgggctttaatgaattttgtaaaggaattagctaaataatgtaaattgcatactcttttaaaatattaaatatatttttaagtatgaaatagttttcaggacccggttcgaccctatacccgtaccctggacccggtttaaaaactttggttccggacctgaacccggcttttgtggacccggcaatactcggaccaggtttttgtcaaaattcccggactgaaaatttttcaaattccgcatttggagtaaatctaaatgaaaaaatca

SEQ ID NO: 57030 - DNA, 791 bp, Heterodera glycines
atggaagattatggcattaaaaggggccacaccatttatgtgtcggttgatgaatttaaaatttatgcgaaacgtaagcattacaatatacgctacccagtttgggtgagcagcacggacactgtgacaacattggaggaaaagttcaaggcggtgtatgaacatgctaatggttgtgaatgtttatcatttacgctgaaagaaggtccacgaggcagtaaagtttgggcctccgccaaaatggacgaattaggcattgaagaaggatcatatgttactttggatacccgttattgtgaggatccaccaagagttggtgaattttagggatgctcggcgagttgtcaacacaatttccaagacttgagaatagtgatcccgtaagttgattgagacagactaaaaaaagcccggagaaaattctggactcgagaaatgagaccgagaattgactctcatgagccggttgagacagagactcaaaaaaaacccggataaattttcgattcgcgaatttattcgacttgagaaacgagtctttcgagcatccctactaaatgcacgcagttcccgttgctaacaatgatcagtagggctctaatttttagatttttgcaaatttttcaagagctcccagtgacctgaaacgcacaaaaacccagttttttggcagttgttaagcctcctttcaaattattagtctctattttctaggttttatttttatagcctaaaaactaaaaaaattgaaagaaaaaacttattttgacttatttggtgtttttcccaaa

SEQ ID NO: 57031 - DNA, 98 bp, Heterodera glycines
tcccccattcgtacattcaaagcgaaaattagtcaaaataatgttattgaattgtttattgacgcccttccagcaccatgcccttttgataattgaaa

SEQ ID NO: 57032 - DNA, 1560 bp, Heterodera glycines
atggtaaatggtcagccttgtacctctttcactgatgctgcaataaggcacggtcttcttgaggatgacaaaatctgggataaaacactcgctgaggcagcgttgtcacgatggcctgatcaaatgaggtggctcttcatgagcatcctcgtttatggccagcccagtaatgccgtcgaattgtggaacaagtacaaagaccaaatgtactttcctcaaggcattaccacatcggcacaacgccaagcagcagagcttgaagccctagccgacattgattggcggctgcacagctgctttaacttaagctctgtgcattttggcttgccagacccgccaaactcaattgccaaaaatacaaatgcggcaattaataagtttttctttggcgatgatgatttgaatttgcctccagggcaaccaaatcctcgtccacagccaaatacccctccgccacttaacagcgaccaacagaaggtctttgatgctgttttgttggcaatacagtcaaaccctagggattcgactgtcccccgccgtttcttcatatacggcgatggaggcacaggaaagacattcctgtttggccaaattattaggcgcttgcgaaaggccccatacacctacaaagtgcttgctacggcatccactgggtgtgcagccattttgctgccatatgggaaaacagcccattccacgtttcgtctgggtagagaagtgtcattagacaaactcccaagcattccgctggagagcttctttgcccgtcggattcgtgaggcccaactcatcatcattgatgagatcaccatgcttcacaacacggtgattgaggtcatcgaccgagtgtgcaaagagatggcaattcgccagcacaaggatctcctcttcggaggaaaaacggtcattttcagcggtgacttcaaacagtcgctgccggtcgtgcctcatgaaggcttaaccgctcaggtgacagcctgttttcaaacgtctccgttgtttggtcaattcaccacgatgaaattgaccatcaaccagagactgggccaaggtcagcaagcgtacttgcaaatgtgccgccaaatcgggctcggagaaaccggagagcacttctggattcctccgcagttcctcgttaagagcaaggaagagctgatagattatgtctatcctaacttccaacaactccttggcaatgacaaggagctgctcaatcgtttgattctcgctccgcacattgacacgtgtgatgaagtcaacgagatcatgatggcgaatgtgccaggtcaagtgcgggaatacttgtccacggataagcccctagacgaccgcccactggacatcgatgagatcgagtccgaagtggctgcgttgaaccggcgcacagactcgggcatgcccccgcacagtctccggcttaaagtcggatgcgtcgtcgtccttcttatcaataaaagtgataaggaaggactgatcaatggcacacgcatagttttggaagaacttggcgatgatcgcctcattggtcgtgttatcaatagcaatgctattggcggccaa

SEQ ID NO: 57033 - DNA, 1102 bp, Heterodera glycines
aggtggagagaatagtcaatgagagaccaatcacttacacttcccaatctgaagttattcagcccctaagacctattgatctaattttacccaacattggtaacaatagattggaaataaacactagatctgttgagaactcagacaatgattatattttggaaaattcaaacactgctaatgtagtgcaaagataccagaaggcaatgaatatggctgaaaaattttggcaaaattggaaagattcctatttattgggtctaagggaacgtcatcaagggaacaaacacacaccaggaaaagcaccaaaacttggggacgtggtgatcatttctgaaccacaaactccaagaaattgttggaaattggggaaaatagaagaaattatgtcacaacgaactgcaagagtcagaatttcggaaaaatcaattattgaacgtgctattaagcacttatatcccttagaattagccgaaaatgccaataattctgactctggcattagaaagcaggaacacagttctgtgaaacaaattcattataattgggcaaaggaacctcctcaaaataaggcgcttgttaaggaaaattccccaaatcactacagatgggcaaaacaaccaccgaaaacaataaatgatataactaatgtgacatgtatttcagaaatgaacaaagacttcgatgccgtgtctcttgattgtgaagagatggaaagagatctcgaggacgaaaacaaggaggaagaatcgaaggatgagagaaagggcatttcacaaattcctgttgaggaaaggcgccccagggatggcgttggagaaaaaagggttattattaacgctcccatcgcattcgtcggggatgacgaagtggaaccaattggacggacattccaagacaacgggctccgtgccctagttctggtgcactcactaagggacattgcctggtggcatcggttaccagaggtcgtcatcattaatgatgtttgtcagatggtcgtcgtgcggacaacggaatgggccgagcacatcagaccatttttgagccttttgggaagatgggccaaaccggcggtctggattggtagtccatacatgtt

SEQ ID NO: 57034 - DNA, 434 bp, Heterodera glycines
cataaacacaagtctgtgatgtcaagttctactgtctgtgccggtccagccaggcgacgcctcacaacatgtatggactaccaatccagaccgccggtttggcccatcttcccaaaaggctcaaaaatggtctgatgtgctcggcccattccgttgtccgcacgacgaccatctgacaaacatcattaatgatgacgacctctggtaaccgatgccaccaggcaatgtcccttagtgagtgcaccagaactagggcacggagcccgttgtcttggaatgtccgtccaattggttccacttcgtcatccccgacgaatgcgatgggagcgttaataataacccttttttctccaacgccatccctggggcgcctttcctcaacaggaatttgtgaaatgccctttctctcatccttcgattcttcctccttgttt

SEQ ID NO: 57035 - DNA, 1103 bp, Heterodera glycines
gatttaatcgaaatggattaaaagtcggcaaaatttaaatattaataaatgtaataatatgtagtgattaagtatatttgtgaacttgtccaagaagacgtcgagcggaaaactggcaagagtggagctcttccaacagagctccaagttttggccacattgggatatttggcatcttcgtcgtttcaattatggtgcggagacattttgggaattcaccaagcatcagtctcgcgtgccattttccgtgtaacaagagctttatgccgaaaggccggcgatttcatatattttgatgattacgaaaatgtacagtaatttgtgtaacttttttgataattaaagagtttaggcacgtttgtgctctattcccgcttttaatgcggtggcaggaatgccgaacgttatcggtctgatcgactgtacacatatcccgattttgatgccctctgaagtgcggcatggtcgggattattacaatcgcaaaggatggcccagcataaatgcccaaggcaaaaaaagaaataaaataaaaataaaaatgaggattttagccattgtcgaccataatggacgctttttaaatataaattgcaaatggccagggagcactcatgacagctttattttgcggcactcaagtgtttggcaagattttgaaagcaggcggttgcgtggtgtcttgctgggtaataaaattatttcaattttcttctatcatcaaatattttttaggtgatagtggttatccctgtaaaaaatggcttttaaccccatttgctaatcccatcaataattcacaacaacagtataacaatgcccacagcaaaacgcgtgtgattattgaacaaacatttggcaggtggaaacgaagatttcattcgcttcaaacaccaataagaattaaattggaaaacattggcatgttcataattgccgcggccattttacataatattgcactcatgaaagggattcccgaatttgatcaagaagaatttgttgatgatcagccggaaaacgatgatcgtgtagtaataggtgaagatatcatcagtgatggttttgcagttagggcaaatattgcccaaaattacttttaa

SEQ ID NO: 57036 - DNA, 1525 bp, Heterodera glycines
cattcaacaattaaaatggaatttttctctccatcgagccgtttttttgaaccaaatggaagaggtcgagaagaatttggcggatgtgaagaagaaggatgtgcatggcaacacgtcagttttaagataaataacaaaatcgaaataattatttccatttttaagcgcacttcacatcgcttgtatgcttggcaatgaaggtagccaatgtgtactgcgtttacagtattattcgatgtatttttattttacagaaattgcgcgcattttgttggagaagggcgccaaagtgcgggcgaggaacaatgccgaatggaacgcattggacgaagccatcgcgtatggcgacgttgaattaggtgggataatttcacttatcaaaactcaccgaaaaccggaccaccgacaaattgacgcggcatcgacccttccgacacgccatttcattccctcgaagcggcaccaacccttttccgacgcggcattgtcccaaaatggcacggaatttccccgaagcgtcaacgacctgtccctcccccgacgcggaaccgaccctcccgacgtggcatgtcccgaagcggcacgaccatttcagggttttccccatcccctcgtttaatttgagcaggaaaatgcaccaactcacactcactcacccgacgaccaaaccccacagctttaaaaattaaaaaacaaaaaatgacatttttgtttgtaatttttagcatttaataaatcatatataattttattgaattttcagttcaaacggtccacagcatatttcaagcacaaaccaaaatcgcaatgttggacaccgcgcgaaaatttaacgcaaatttgccaggaatgggcgattttagcatcgacataaaatgggtaattagcaattttaatacttaaaaaaaatccaatctcaaacctcaaattttacaggaactgaccacactgttgcgtaatatttttcctttaaatataacataatttttgacacaacctatcttcaagcactgccatctcgtttgcgccctgaagataccatcactgtacacaaaaaaggagaaaagttgcgcgtcaatttttccctcaaggaatttgacatcacaactttcaaatggtaatttcatttgctaattcgtcggggttggagcttcataatttcttttttggaggattgcaaaatgatagttttaaagattaatttgagatcccttggtattgtttaaagaaccttttgtttattaatgtttttcaattcaaaataatttctaggcaacggggcgacatgactttgctgctggacatccacaaggatgagaaagcagtattgttggacaatattgagaaggtgaattttgccaaatttctcaaaattaaccattatttctagaaatattgcgtttttcgaacggaggaagtgttgccgcagcagcttctgacggagaagaagatcaccaaataccatttgaacgccaaccaactggacttcaagagggcaaaaacactgctaaaccatgagaaaacg

SEQ ID NO: 57037 - DNA, 1816 bp, Heterodera glycines
atggatagcgcacagagcgggcattcgaatattcgcaacgggaggcatcgggggagtgcaccgtggaggttgttgaatgcattttgaatcttccaaaataaccattttttaagacagccaagacgtgagcgccgatctgacagaattgggccgaacgccgctgggcgttgtctgtgcgggcgttaagtccatcctggacattgaacgaacgttggaatatttggtagggagcaaaacgacagggaccgagcatcggcagcagaacaattactgatctgacattccattttcaggagacccaatcagtcaatgtggtcgttctggacaaaagtgcggtctttcccggcttttttggtcctcccactgcaattaaaggcccttatcacaccgattcattggataaagtggccgacattttgcgtacgtccattttgtggcatcattatttaattctaccaattttatcagttctgtccttccaaatgggcctcccaaatggcactcttatcgcatgtccactcactgacgatgccgttgacaagcggttagtcgacgaaagaaatgtaattgcggaagcgactaaaatggcactgaaagaggccgaagaagcaggcatcagaggcaaggaggtgacaccgtttgtgctggagagaatccgtcaacgggcgggaaaagccgcaacagaactcagtgagcgaacgcacaaataattacgagaatatgcgtcctttctcctcacttaaacagctttcagatatcgctttactcgaaaacaacgcccgaattgctgcccgcttggctttgctttgctccagcaagacattacccgccggcattgaaaagcagcccttgataacagccggccagcaaaactcgtccagtcaatgcgaaaacggtggcacagtgaaaaaacgccgtcccaaaattgtcagttttgtcatgtctgctcatttccactgctgacaatggtatcatattaaaggtgtgtgccggtgcctctgtcgttgatgtctctgtgtttcttgaccaaagttccgttccgccgcttggcccagccgccgtcggcacttatcttccggcgcggatcattcaaacaagtggtggggtggcgcggaaccatgcggacgcactgagtcggttgggatgcgacgtgacactcatttcggcattgggcacaacgacggaaagaaatagcggcggcggtgaagagtcacggaacgatacagtggatctttatggacgctttttgatggaaaaatgcgatcacattgtttgtctttataatcataaaccgttaagaattgcaaaatttgtttaggattggtcccatgtacgccactgtccgggcacagcgactgccagttcagttgggatttgttcaaagggcacaatcatttcgcaggcattcattgcggtggaaccaattatggagcgcatagatgagaaatatgtatgaattaatgacatgattggtttgtccgaacctttttagattcggtcaatggaggcacacattgccaatgccgactttttgctggtggatgccaatatgaacagcggggcattacggatagcggtcgaattggcacgcttgaacggtgtcaaaggtactcaaactgaaagccaatttagggggggggtatctacgaccaaaagaaaagtgtctcttatcgcctatagtttggttcgaaccgacaaattggaccaaggtgccgaggctgttcgaagcgcttggcaaaaatgctctgcacaaagtgagtgccatatcgccgaacctgaacgaactggaggaagtggtgcgacggttgaacgatga

SEQ ID NO: 57038 - DNA, 245 bp, Heterodera glycines
atggagaaggcctgcaaaatttggagagattatatcgattttagtgcgctaggttcgatgaactttttaaatataagcctaaaatttttggcctgtttaaaaagcaattaaaaatttttagattttttattcatctccctttttgatagtgaaagcatcagagagccttatttaacttttaattaacatttggtgcgtttcagagcacgttctaaaaaatatttatgaattaattttgcaaaata

SEQ ID NO: 57039 - DNA, 184 bp, Heterodera glycines
atggagaaggcctgcaaaatttggagagattatatcgattttagtgcgctaggttcgatgaaactttttaaaatataagcctaaactttttggcctgtttaaaaagcaattaaaaatttttagattttttattcatctccctttttgatagtgaaagcatctgagtgccttatttaactttcaa

SEQ ID NO: 57040 - DNA, 2647 bp, Heterodera glycines
atgaaagagcagaggaaccttttgctccgtttggatgttgaatttgaaaaggccaaactccaaaaagccaccgaagcaaggggtaatttaatttgaaagtgccattctcgtcttcctttttcaggagcatcttttccatttccaattaactcgtcaagcgattttttggactgggaatacgacgacagttgggacagagaacgttacaaggacatttctccgttcgtttctccgccgcaatcgccgcccaaaatcgtagaagagacagaagacgaaatgactgactacggagagaccgaccaaaaggagggacaaaggggattcgtagaagaggagtacgaaacagcaccagccaaaattggcaacattcgtctgacattgccgaaatatgcggcgctggagaacggcacgacgaatggacaaagcgatgcgcaacattcgccaaacgacggacaaagtgaacataacgacgaggaattggagcagtcccagcggatgaacaccgagagcagggaagaagacgagaaggtaatgaacaaagcggacggaggggaaatcagtcccggttccaaaacatgaacaatttttaaggaccatgaaatcaacccagaacattttccaaaaaatagttcggcatttactctaacaattaatttaggatgtaatttgttctccatcaaacgaactgaaagtgacccaacagtcgccggatgagcttgtctctgtctccgtgcattcatttgctccctctgcaacaccccagcatttcccttttgaaacgacaacgacattaccatcggcagaattttcgtccgacccattggttccgtcgctcacctcagagattcttctcaatgagtttttacgccaaaatgttacgatgtcctcctcgtcaaattgcgacaataaaccgttggaaaatgacggcaacaattcagttgtcaatgccatgacgaagtcacttttgtgtactcatgaaaatggcgcagaaattaaattgaatgatcagcaagagagttcaaaagaggagtttcgggaaagggtcatgaaagtaagaaatttaacgaatgcaataattatttacaaattgctaaattttcaggaaaaggaacaacgagaagtaaataaggaaccagtaaaactgaaaattaaattggacaaaatgaatattaacaaggtggaggagagaaatgcccatgaaaacggaaatgaagaaaaaaaggatggacgagaaaagaaagaaagggaagaaatgatgagaaaatcggaaaagaaacgacggaaggcggagaaaaaggagaaaaagaaacaggcaaagttggaggagcggatgaagaaggaacgagaggaattaaataagtgcgaaccgcagccaagcccatcgtccgtacacctccaaaacgacgaccgaatgcctacccaatcgctgaaaatttcactgagtcgtttggcttgttggacagggacgaacaacgtaacgccggagtacagctcgaatttgggcggccatggctttcattccaacaaagaaagtgtggatttgacaaatggacactcaacaccaaaaaactgtcaaataaagccggaaaacggaggcggcgaccctttgaaattgcgcttgattctgaatagaggaggaaatagcagcgtggaggtgaaatcgacggaacacagaaagaaaagcaggaaaaggaaaagtcacgaggagaagccaaaaccaccggaagaacaggaagaggcgccaccgaaagtgccaaggctaaaaatacgatttggaactgggaacaatgaggaaaagattgaaacgaacgcacagccaaagactgaaccaagtcaatgtgagtgactcacaaaagtgtcttttccgaaggaaatgttttttagacttacccctaaaaagaggagaattttccgggaaaaccggcgagcaaattgaggaaccagaacaaattcaacagaactctctcagtccgccagaattttattgcagcaacgacaacaatcgaatccaattctctccatgttgttctggtagcgtttgtttttgttttttgtggtttatgaaactttaattacgcttatttttcagaggaatctgatgacgacgaactcagaaataggacaaacgaactcttctcaaaattgtgccaagattagttagcatctaaaacattgattcatcgcaggaaagttaataatccaaagtttttcccaaaagcatttcgataactcacttaacgggttttgcatttgttaatttacattttctgtcatttaagtagcgccgatatcccttgtccatattttcatttgtttatacctaatttaaagttcactcacattgtcgaaattgtggagttgaatttagaataatgaattaagtcttactcaagcattgttgcgcagtttaaacatattttggtttccgtccccgtgctttttttgcccaaacaagtggctgattttacagtgttaatttgtaatctcattgtcaatgtctattacagctcttctcattttcgatgatttcccatttaattgcctcaaactttttaactgtgaaatactaattatgtgtttatgcataaaatataatatgaccgtgccatttgtttaatacttaatttatgggctgttggataataaa

SEQ ID NO: 57041 - DNA, 155 bp, Heterodera glycines
atgattgcacgtattgccgaaaaaattcgagaccaatttccgaatgttgaccgactaattgcaaaacgaaagccgtctttgtcaaagcgccttaccgagtcaaaaaatttggaaatgtatcacagatgcaatttcaaccaaccaaatttgaagaa

SEQ ID NO: 57042 - DNA, 570 bp, Heterodera glycines
atccgtgaaaagcagtgcggtgacaaaaatgtttttccgctgaacaaatggctccttcttccacgcaaccacaaagagcatcttccgttttatcttttaatttataattatgaaaggaaggaacgaattatgatttgattaaaaagttaaatggcaaattgagtttttattagcgtcgtcaatttcgtgagctaattatgtctttgttcgtccccggggttaaggcgcaaaagggagctggaatgagcaagtttgaagtgtatgctcttgatcagtcggttagtttctaatcaggcaaaataagttttataaattaatttgccgaaattagtaaatattcaaatataaaaaatagcggtaagacttggactcagcccacccgaaaaaatgacatgaatttgttataaaactgcttaatattgaatattattcacaaaaatgtatgaaaaagtgacgatatatagcgaaaatttttatcaacatttgaaatttttcaaaaaaacgtcatttttgagtgaatttatcaagaaatatgctgttatacatctatttaatactgtatttttagca

SEQ ID NO: 57043 - DNA, 1276 bp, Heterodera glycines
atgtacggcataaaattctcacatgcggcaccttattgcgaaattttggcaaatgtcgtctcgaataccaaaacgccatttatgattagcattgaggtgaaaggcgcaaaaaaaattgaaattttgctacgatattttttaaaattttaattattgtttattaaaatgataattatgaatcactacttttaatataacaacgtaaaattataaattaaatcccaaatcattcaattaaattttatttaaacgtaaattttaaatttgtctatgtttttaagcttcccgatggacagcagacagaaaaactggttttcgaagagccgggagccaaaaatgttattgtaagcaaaatattaattaagttttttaaaaattaattaaacaaattaaataattttttttagttaaagggcaataattgtgcaagcaaacattggcaattgaacacttttaggtggcattttaatttaattcaattttttgttacaaaattttgtctttacacagaagagatgaaaatggccagtggcaattggcgaaggaggtaaatttatcgaaaattttctcataatttcattgtttatcgagtgccattttatttaaacttcgacttttttcgttttgatttaatccctgagacattttgaaaattctgaagatattcagtagaaagccgacagatttagaacttaaatatccgccttcattttcattggatcaaaattaatctgtaaatctctcactgtgccattttcctatagatttgacaaatccacgagagataaccgcttgaatacattaaaatgagtgttattccgagaatttcttgagtcaaaattcccgaattaaccatccacatttatgccgcattcatgtcaaaattcccgaattaaccatccacatttatgccgcattcattgttttgttttctcccgtttcagagcaaggccaaattggacggcgcgggtggccaaatgacgctgaaggtggaggacgcgttgcagccgcgcgttgccggccgtcttgccgtgtcgtgctcggaaagtgccatttgcgggggcggcccattgtcgggcaatgccggcggcgatggactaatgacatggggatagaagaaaatcaaaatcttttagtataattatttttgtaattaattatttaaatttgatttcatttgtaatttttctttaaaaatgttatgttattcgtgcaggaacaaaagtcaaattatttaactcataacaatttcgctaattttactttgtttaataaa

SEQ ID NO: 57044 - DNA, 1445 bp, Heterodera glycines
  unsure (1)..(1445): unsure at all n locations
atgccaaacacggggatggaaaatgggctgaaaaaggggtggcaaatgttggaaaaatatggcaaatttcggagggatgccatgtgcgatcggattgatcagatcagagccacgtggcaagacgacggcactcaaacggcggaagagcaaaaatggtagggcaaaaagagggtttggggataaatggtgggcggtagactgattggaggatcgatcaatgatcaaatctgggagggactgatcggcgggttgaccccgtcaaaagggggggggggagaggggaaaatggccgatcagtagccatataaacggtggaagtgatcggtggatcggtctatggcttaagtcttttgatcacgggtctttatatatttttgattttgtcaaattaatggccaaaaatggtgacaaaacggcgatcacttcctatttgttttaatataaataaagtcaaaatgccaaaaaaccttttcaggcttctaaaatttgacgaagaaattgagaaactgcatttacatcgccttcaccaattgatcagttgggaagtgccaaattcaaagccgaaactagcggaattattccatatgaaacgtctggagggggagaacgtatttgcatacagattgagaatgattggattggccagcttagaagaagcagatcaaatgagaagacaggtgagagaaacagagacagagaaaaatatacgtgagagagagaggggagagagaaagagatagtatgagagagtgagaaaggggaggggaggagagagagagcgagagaaagatagagaacgctagaagaagagaaagaatgagacagagagaaatatagagagtgagagagagatagagagcgagagagagatagtatgataatgactcgagctctagggtactcgaaaagtatcaaaggaggattgagactgggtttccgagactctacacggtacgaaaaatcttttcacgcgtcaaaagccgacccgaaacccgagactctcgaatagcaataaaatttaatttgacttttatcacattcaaattaggcttattaatcgtctattttgcctcctttcttttttctgttcagattcatcagagactgccagaattggttggaggagaaaagcaaagggttaacgaattaatggaaacgttgtcaattcgtttgagtggaaatggtaagcatcaaattaagttttgctcaaataaagcgaactctttttaacgcaaaaacaatttttattttttatttactttatattttcattaaacaaaacttattttattttaatttaaaaaattatgattttcaatatttttttagtaattaaaaagaaaatttattattgnnntgtttactctcatattanaattnncattatttgtccatttgttttttattttcccatttttacgcaattttaattttaatttaataaa

SEQ ID NO: 57045 - DNA, 1136 bp, Heterodera glycines
taattaaatccattccttcgggggaccgtgccgggtgccgcggggtaagcagtgctggttcgtttcatcacggcaccgaaccttttggctagtcagcaatcgttgcttaacttgccagatcggacgggtgcgcatgattccactgttccaagcaccccaccaaaagcaaaacgatataaccaaaatataaggaaaaattttttaaaaatttttttctccatcttcctttttgatactaaagcatcagagtgctaaaattaagttgtaaataaaatttggtgcgctttagagcacattctgggaaaactgccccgaaaacaaaaaaatcgattttttcaagtgtccgtttggggtactcaaacaattatggggagcaaaaatccaacgcagaattaaagtacaggctatagggaagctattcccgaaggattcggtctccccataaatctgggcgcatcggttcggggggactgcccgaaaacaaaaaaatcgattttttcaagtgtccgtttggggtactcaaacaattatggggagcaaaaatccaacgcagaattaaagtacaggctatagggaagctattcccgaaggattcggtctccccataaatctgggcgcatcggttcggggggactgccccgaaaacaaaaataaatcgattttttcaagtgtccgtttggggtactcaaacaattatggggagcaaaaatccaacgcagaattaaagtacaggctatagtgaagctattccggaaggattcggtctccccataaatctgggcgcatcggttcagggggactgccccgaaaacccaaaaaaaaattttttggataaaaattatttaaatgaactgactagataatatttaaaataggttatttctcttcctttcagtatccctgcaaagtttggtgcgcttctgatcagtttctgaaaaaaaagttaagcctaaactttttggcctgtttaaaaaggaattaaaaatttttaaaaattttattcatctccctttttgatagaaaaagcatcagagtgcctaaactaacatgtaaataaaatttggtgcgtttcagaaccctttctgaaaaaatatttaagaattaattttgcaaaaaataaataaaaacgaaagact

SEQ ID NO: 57046 - DNA, 1759 bp, Heterodera glycines
atggcttttcctttttcagtcacttctcgcgcaccaaaagcaggcgaacagcaggggcgcgagtacaagtttgagcgcaaggaggacattctgcaacgcattcgtgatcgccaaatgatcgaatggggcgaatataatggtaaaaaaaattatgaaattgcttattttaatatcattcgacatccctaaatgttctctattagcccctaaaatttcgttaaatttaaaaaaaagttatggaccaataatgttcgaaaacaaggttttcgagtttttctggcaaataacttttttgaaacgcaataaaaatttttgaaattttgcagactcatagagaattcttcatgttatcgaatggatatgaagaattaaaaaaatttggttattcttgaacaaacttatgaataatttttcaacacaattttttccatttgatgatttttttcggtaacgtactaaccccaaaaaattgaaaaaaaattttctttcaggtgctttgtatgggacaacagcagagtccgtccgtgaggtggtccgatcgggacgcgtttgtgtgttggactgtagcgcgcgagcattagaaactctttacaattcagagtaagggcacagtcttcatcatttaatcacaaataccaggctcatgtcatattcgtaagaagtgtttcagagaaaatgccatagaattcatggaatttaaaaaataacaattttttcactccaattctcctaataagatttttttaagaatttaagactgattaaaaggctcaaccttcaatttatcaaaaaagaattttgttaaatttgacttaagaaaaattatcactaaaaatttaaaaaaaaaattttaaatttccaatttaaaaattaaaaaaaaaacacaaacacaaaaaataaataaattttaaattagacacttataaaaactgattaaattaaaaattatgaaaattatcaaatttaaaactgtcatgaataggatctgttttttctttatcaatactttatcaacaataataatcagatttatgccatttgttgtgcttgtggcggcaccgccctttgaagaattggtgcagctgagtcggctgcatgggaagccgcgcgaggaggacgaactgcgccgaatctgtgatcagtctgatcagttgttccacagtgattatgccaaatgctttgatctggtgctggtcaaccggaaccgggacatttcattgcggaggtacggtaaattgggcgaaatgataaaaaaaaaatagaagaaaatggtagctacggtaattaggcataacaatacaaaagaaaccaagtttgaatgatggtaagggcagcaatttaaaaaaattgagatatgatacctaattcaattacaataaacaacacaataggagctacggtaattaggcctaccaagacaacaatgcaactttgagagatggtgaaggcaccaataaaaataaataaaattgttgaatcatagtttaattatgtcattttttattgaaaaatatttatatttattggacacaatttcaattgacatttctgtaaatctagttttgtgaaaagttacagcattatggatatggtaaaataaaattaatcaattcgaacatacagtatctgctgtccttcgttcgctattaatcgtatccatcaaaggttgttggacgcgttggaagcactgaaaaccgaaccacaatgggtgccgttggaatggcttcagggtagtgccaatgtgaagtcgaaaagctag

SEQ ID NO: 57047 - DNA, 438 bp, Heterodera glycines
aaaatctataaaaaatttaaaaatgagaattcatgcgagattttctggaaataagcttaatagggcctagttaagctgtaaaaaaaatttggggcgatttgaaagagaatagaaagaaccaggttcgatgaagttttggtaagccaaaaaaaatccaaacatttaaaaatctataaaaaatttaaaaatgagaattcatgcgagattttctggaaataagcttaatagggcctagttaagctgtaaaaaaaatttggggcgatttgaaagagaatagaaagaaccaggttcgatgaagttttggtaagccaaaaaaaatccaaacatttaaaaatctataaaaaatttaaaaatgagaattcatgcgagattttctggaaataagcttaattgggcctagttaagctgtaaaaaaaatttggggcgatttgaaagaga

SEQ ID NO: 57048 - DNA, 1372 bp, Heterodera glycines
aaaatttgagttaaaaaaactaatttttttaataaatttcttagctacattttgcctgggaaaaatcggctgacggttcatctgaaaaacaaatggctgatccgacaacgaaaacgatggagtcaggtgagtaaaaatgagaaaaaaaaattcaaagccacgcgaaaattggtaaaatttaggggaaaaaaaaatttaaaaattctaagtccaagaaataagcaaaaatatttttctcttattttattcccttttaattctctttcggaaaattcgaattatttctgaaaattatacaaaaaaattcaaagcccctcgaaaatttcaactggttagaaaatttgaaaaattcttttaaaccgaacccacaagaaaaattttcagaaaatttttggctattttttttggaaatttttacaggtgatgtatttgtactatttgctcggctatcggcttgccatgcgagtgcatgagaatcgaaggcgagagctgttgtccgagaacacgttcatcttgacgcttgacggtgacgtggactttcaggcaacaaataaataattttttattatttatgtaatattttattataatttaattaattattcaaatcctcgttttaaaatttctaaaattaaattaaattattttatttttttgatttatttgattttacattttaactatacgaaaaatttattatttatataataattcattttgttttaaaagaattttatctaattatattatctaattttggtttttatttaaatggttaagtaaaatatcatttattatttaaatattaaattatttctttaaatcatttaaaataatatagatttaaaaaaggctttatcttttatttaataaaattaaaaattatttaaatatttttgaatttttattttcatctgacgaaaacaaatttaaatttaattgtaatttttagcttattcaaattttactttttaaatcactatgaaaaattgattattataaatgaatgctttttttttaattcctaattatttttaattaagtttgtttttatttaattggggaaattaattaccaataattaccatttattattttttattagatatatttctttaaaatatatatatatatatatatatatatatatatatatatatatatatataataaatggattttaaaaatgttttattttttatttaataaaattttaacatttatttaaatgggtttttatttaaattttttatttgacaaaaagtaatttaattacactttaatcggaatataaaattaattaatcaaggcatttttcattaaattttaagttagccaattttacaatacatacctttttaatttcgtcttt

SEQ ID NO: 57049 - DNA, 1229 bp, Heterodera glycines
atggcactgatgacggggagagcagtgtgcgcacctatgagtccaccgccatctctgactatctggtggagcgcggtggtgggcccgccggtggtggcatggcgtcgcgtaaagtgccgtcattgtgcagcagccaactgaccgccggcagcgggaggcccgactgcggggggctgatacggtagcgctgagtttgcgatgcaactttttatatttatgaattttatgaaaaaatgaagaaaattgactaagaaacctaggaatttttctggaaaaatcttaggaatttaagaaattttttaaaattttccagtgattattgtgaaaatttttttaaaaaacttagtaattcatatataaattttgaaaaacccttttctttctcgagtttttcttttaatgcaatttctaagattttttcttgaaaatttctatccctcaagagcgagacaaaatctcgggactcaaaaaattgcgctttacaatttatgaattttcaaaatttaaatatatatattttttttgccagggagcagccgagcgccgctgatgccatttgcaaaatttatgtgtgcgcaacaatgtggcatgaaagtgcactggagatgacgtgcatgctgaagtccattctgcgtcttgacgaagtgaatgaatattatttgctgatggggatcatatccgtgggaactctatatatcccatccatgaatatgcatatgcattgcctgtccaaagatacaagctataggaatacaaaattgggtccgatgatataaacggaaatcaaaacctataaactataaattatgtgtatacccaggcgatatactcgggaatattcgtatatgtttctatgcatatatttatatcacggaatgtaatattggatggcttaaatttggttatatatatagtatagatgactattcttttatggtgctgtgacgaagtgacaaaagtctgaatgtgggcgaagtgacaaaagtctgatgtttgtaataattaaatttaattattattttaattaaattggctaaataattaatcataacttagcttaaacctagtcaaattaatgaaatttagtatttagcgacagctcaaagtaccctctactatttatgtaattttttaaaaattttgcataaatttacaaaaagtgtaaccaaaaaagtacgaaaaattttgacttaacaattttaaccctaactttattgaagttcaataaa

SEQ ID NO: 57050 - DNA, 1272 bp, Heterodera glycines
atggccaagcagcggcacattggcccacacaaaaaggcatatcgccgggtggaaaagcgtgcaccaaaaatgcaggagcaggcaggagaggaggagatcatttcggcatacaatgtgaaaattattttcaaaaaatttttagaaaattatcgaaattttaatttaaagcaaaaaatttaaattttgaaatttgggtatatatttttttgtttattaatttcaaatctctaaaaattttccaccagatttacgatgatcgcgtggagttgaatcagttcaccacggcgtacgacgcgctgtggcttgcactgttccaagttgcgtgcgcactgctatgccatttcagcgccaagtttgcatgcaaagtaagtaatcaagtaagccattctcacgaaggcataacggcacagttggtttttgagaatttttagctaagtattattatttttttttgaaaaaatattttggcacaggttgtgatgcaacgcgttggcatggcgtttccgatgatgctcagcggcccgctcagcgtgtttcttctcgcgcatgcgtgcgaaaggtcagcaaattagaacgttgtgtatttaattaaatatttattattttgcgaatttatattttaaaaataaatattttttgaaaatgttatttcttattaaaatatttataacaatttaaaatataaaaatttattatgttataaatttcataattttaaaaataatttaaaaattttaatttttattaaaataatatttaataatttaaaatataaaaattattaatttgcaaattttataattaaaaaaacataatttaataattttaatttattattaataattttttaatcatttaaatttttaataatttaaaatttttattattaaataaaaaaataataagaatttcagtcatacacaaaacgcgtgctatatgaacgattggctaagtaaggagctgttctggaaatgcccggaccagtaagtgccattaaaagcgccaaattaaattgttggcattttccccataaaatttagggctttccattggcaattttggacagaccctgcgatgctgctttggctcagctggtggttggcacaatgctggtcagtttatatatgagaaaaatgtgcaaatttttttttatagattaatgtaaggaatttttgaaaattttcgattttttagaaattttagtgaaaattttaagttttgccagcgtttatggccactgccagattcaaactccctttgtttttaaataaa

SEQ ID NO: 57051 - DNA, 819 bp, Heterodera glycines
atggctgagaagcttaaacgagctaaagttcgactcgagttttctgagaaaatgttctatgaaagagcactcaccgaatggagagacaaaatattaaaggacagtggtaataaaaatcacgcttttgttcttcggaaagcattatgcaatctcaaattgtttccgctcgacgtcaatggcttttcagacctaagaaaaatccgaggtgaatacataattttattaattgcaattaatgtcaatgagatgttaaaaatccaggaattggcgttgacattgcgacccgattgtcttcggcttggaaattcacatgcgctactcacttttgcacagaatcccctacaattggccaaataaagtctctgaaaagtggcgaggcttttgtgttagtcgagcaatcgtcaactgaaaacggtggacgagttcccttagtggcgggcgctaaacagcgaaaggcaattccaagtcaaattggccaacagcaaaagagtcaaacgaacggaaaacaaaaaggacaccattttgaaagtgcgttgaactttatgacatctttccaagcagtacagagttttttttctttcagcggctcccttagtacggtcaaattcgcaagaatgcgtagtcatgcataagtcggagtcattggaagtgatggactttgatcatttgctgaatgtttctgtttcacaaccagccatttcttcttttgcttttgaggtgtccactcaattgcaaccaattcaaaccaatttaattcccttttccatgtttagaattgtcggccaaaaagagcaatgtctcctccgcccacttcaagca

SEQ ID NO: 57052 - DNA, 1378 bp, Heterodera glycines
gaattggtcggtgatacgcaccagcaacacatggtccgaactgtgactgctgtcacatcgctacacattctgttgtttgcagggcctgtccgaatggacctcaaatgcgtgaaatattttgaacttggtaaatttttttgtttttcttttttgatttttgaattgatttccttatttagtggatccaaacggttctctccggcaacaaaggaaattgtttcgcgataaaattcttcgaaagcaccggaaagaacaacgaaatttggagagagaacttcgacgaagacatcgcaaacaattggagcaaagaaacttaatggagcagaatttggaagagcaaaacaaaaagaaacagcttggaaaaagacaacggggggaggagagtgaaaagtgtcggcagacggacgggagggcacagaacgccacagacacaaaaagcgattggaatgacagcggacactcattggagaagagagaacagtggcagacgtcgacagacagtaggcagagaaagaaacgggaagagaacgaggagattggcggtaattattccctaaatgactctttccttttcaaattatatttttatagagtccagtgccacgagcagcagtgatgactcattcgactcttttcctgcggccaattccgccatggcaacaccgtcttcactgagctcaaggtaaagtcgcaaatgaccagtaatgagggacgatttaattatttgaaaatataggaaatttagtgcactcagcagtttggaaccggaactggcagaacaattgcccgaatacatgcgcagttttacaaaatcggagcccgaagaaccatacgaactgcttgaactcgacaattggtttgggttccgtggatctttcagcgatttacaggtctttacacctaacagtaaaaaaaatagtattcttgaatcaatgaatttaccactattagccatttctaattttcaataagaattgttgtgttcgtagatgacggtgaagttgcgctttcgtctcatggattatttgacgcgcgttctctcccattcggtcaacttcgaactatcgcccgaggacagggtatgacaaattatggccaagattagcaaaaaaaaaaaaatcaaaaaaatatcattccagcgtcttctcgactgtttgaacgaaactcttacagcggcgcatcgatcacaaaagtttgccaaagtcaacgatttgtgaagacaaagtgcgaatgacagaggaagttgccttaaaatcaggtgcaaaatgattttggatttaattactcgtaatacgtaatctgattttttaggtcgccatcaatgatggcttcatccgagatgatgaccgcttttaaaagagaatgtcattgcttgtct

SEQ ID NO: 57053 - DNA, 337 bp, Heterodera glycines
atgttttttttaaacatttttggttagaagtttctgaaaatttaatgaaatattcctaaaattttcatatttatagcgcaagtcgagagctatcgtgggatacaacgattattttttatgttgtatttaagaaaagttattactgatttttctcaaaaattctgtaaatttggcaaggtttttacgaggtcggatttacaaatatgtatgaaaaacgcattattcttctcaggcggaacttatgtataccttccgaaaatttttttttgcaccattcacagattttcttaacaaatctgaatgcgcgatataaccagcagagaccagaaatagacca

SEQ ID NO: 57054 - DNA, 697 bp, Heterodera glycines
gacggctataactttctgattggcccctacaccggctaccgtcctgacaccaatccgtccgtgtccaacgcgttcgccaccgccgcgttccgctttgggcatacgctgatcagcccacagctggagcgactggataaagcactccggccaacgcccgaggggcccctcccattgcacgaggcgttctttgcacccgagcgtctgcttgccgaagggggcgttgacccgttgctccggggcctgttcggcacaccgctgaagatgccaatgagtgatcaggtgatagatagaccacagaccgcatgagcaatgcctgttgaataaaatgcgattttaggcttttgaatcgcgtttttaaatatccttattttaaagccaaattcgtatttatggcagtgatttgcttattgggaagttttcagtggaagctctttgatagtaccacttttttaagagaaagatatcaataatttaatttttcaattaaggttttttaaacatttatttatactgtatttttaataaattcttttttttttgcaaatttttatttttaaaattgtattagccgaatgcatattaattttcagctattgaataaagaactgactgagaagctgtttcaccgtgcccacaatgtgtccctggacttagctgccctgaatatccaacggggccgtgaccatggcattccagg

SEQ ID NO: 57055 - DNA, 975 bp, Heterodera glycines
atggtccgcgatgcccacgggcgaaaaatgagcaaatcgctgggcaatgtcatcgacccattagacgtgatccacggcattacgcttgagcaactgaacaagaagttggaggacggcaatttggacccgaagtaaaaaaagaaagaaaaatcgcaatagtgtctttgctcatcctccgcagggagttggaaacggcaaagcttggccaagcaagcgactacccccagggcatcccggagtgtggcacggacgcactgcgattcgcgttgatggcctacaccacgtaacaatggcactttgccataattgaaaaatgcattcgtttagccagggccgtgacattaatttggacgttctccgcgtgcagggctaccgcttcttctgcaacaaactttggcagggcacgcgcttcgttctcagtcggcttgggcccgactttattcccagcgatacgtttgaggtaaaaacggacaaagtgttggaaaaacaaatgccaacttttcccaatattctaattaatgccaattcttaaaataagtccaatttctgggttcaccaaagaagttggtctaattgtaagataactgatttttgtgttattttttggcaataaaacatgtctaaatggaataaaagacaaaaaagccgattagggcatccactcgttgattatttattttattgcaaaatgtttttgtttgttttaagccttccactttggcacttaatttggccgaccggtggcttctctcccgactgtcccattgtgtttctgaatgcgatgtcggcttccgcacttacaacttccggcagctgacttccgccattcaccacttttggatccacgaattctgcgacatttatttggagtcggtgaagagtattattgtcgttaacaatgccaacaaaaagggggcggacgcaattgcggaagagcgaagcaaaaacggcaccgatgaagtgacaacgcaaaag

SEQ ID NO: 57056 - DNA, 363 bp, Heterodera glycines
atgattcacgtgttaattcacggtcatgtgcgtttaatttacagtcattattcagtgtcaatttacgggttaaatcacgtgtcaattcacggtcatgatttacgtgttaatttacggtcatgtaagtttaacttacagtcattattcacgtgtcaatttaggggttaattcacgtgacaattcacagtcatgatttacgtgttaattcaaaatcatgatttatgtgttaatttacggtaatgattcacatgttaattcccgggcatgtacgtttaatttacagtcattattcacgtgtcaatttacggcttaaagcacgtgtcaattcacggtcatgatttacttgtaaattcacgatcatga

SEQ ID NO: 57057 - DNA, 287 bp, Heterodera glycines
atgtttaaaaatctgattatttatgcatttcgcaatcacaactcttcaaaaagcacaaaaattcaagagaaggtttaatgattttttagataaaagataaaagctggttaaataaactaaaatatttatttgggtaatttttaaaaataagtaaaattatttattcttcagatgaaaatagaacataaacaacgacttcatccacccgaggaactgtgaaagaatgcgtatgggcgtcttcagcacgcgcgcgtaaattgtcattttaaaccaaaaagtaaaataaa

SEQ ID NO: 57058 - DNA, 387 bp, Heterodera glycines
tcggcacgacggtcaatcacatcactttgctcggcggtaaattgctgtggttcagttttatagatccagatgtaagtggtgaaagtgataagaatataattgtttttcatttctttttatgttctattttctaggctgtattttaaatttttaaaaaaagtatattttaaaattttattttcacctattttggcgttttgcacaaatttccttaacaaaaaagcaattcacccataataatggttcgaattttgaaaaatttattttttgtaaaattccttataattttgattcctttttctaacagcaaaaaaataagttaggttaaaatttaaattgaaattatttattttttccatgaaattggtgaatggactaaaaatgata

SEQ ID NO: 57059 - DNA, 771 bp, Heterodera glycines
atgaaagtaaaatatactctgggcaccgtaatcgacgaacatcatcccaatatggtgacacaaaattcggctaatcagcgcgccaatcataaagcggctgatgatcatgaaccactggacaaacagattcaactcaaattcaagatcacgatggattcgagaaacggaaagattggcgtagaatttcgactgaacggtcaacacattacaaaagacataaatggcactgtgcttacgtgctgtccagcagaattggtgccgtttgaagacatccaatacattacggtaattgagtacacattactgtaatgcaatacaggatggtaaatttattgcatacatcaagtaatcaaatacatatttgtaatccatcatattacggtaatcgaatacttttctataatccaatacaatatggtaatcaaatgcatactgtaacccagcaccttacggtattcgagctataaacataacaaacgaataccacattgcttttgatgatattgatgaatggagcccttttcccctctttttatttggcgctaaatcctaaccgattttgggtgatttttggggtccataaaaattcgcttttacatcccttttattataattgttttaggcgaaaagttttgacatggaattgtcccctgacacggatgtgcagatatattgtataccaccagagaaatgcattttaaagacttaatttatatggatggatggatatcaatcacactgtatttagataattggcatatgaattttcaa

SEQ ID NO: 57060 - DNA, 1955 bp, Heterodera glycines
atgcgctactattctctctacaaacgtgggatcattaccgaagacagatggaggtggattaaagaccgacagactactgttctccaacaaaaagtactacttttactccgagaggcagggatcccgacaactgaaccggaatacgacgcggaaatttacatccatcaagtgcaaggattgtggagcacaaaatatcccggtgattatttttaaaaaggcatttataaaaatttatttattttcaaatgaaaaatagatttatatttttacaaattttcaggcgaatataaaatttttattttcaatgattaccaaactcgtccaatcacaaaatcagacgtcaccgattaccaattccctattctgctctaccaccatgacaaacattttgacggcattaagacaatatcaaaattttggaacaaacgttactactgcctctcctgtgaatcagcattcagcaataaatcacaacactcaatgaactgcacatcactctgccacggttgccgggaggtgggcgtcgactatccatgcgaatcccaacaaggatacttcaaaaaatgcaaacattgtaacaataatttctacaacaacgactgctatgaacgacacctccacaaggatttgtgctcgaaatttcagcgctgcgaagattgtggagttatttacaacatcaaatatcacggaacaacaggtcaccaatgcggagaaaggttttgtcgtctatgtaagcagtttcatgtaaaagaggaagatggcgagaacccctgcaaaagctgcttcatacaaccgctgaaactacacaaaataaaaccataccgcattattgcatacgactttgaggcgacacaggacaagaaagtgggcaatcgtttcgaacacgaggttaactttgcagcggctaccatcatctgcaccgactgcatcaacaatggggaatggaaaaattcactgcttggaaaaaagtgtcaaatttgcggtccaaaccgcacaatcacattctcgccatttgactacacgaatacaaaagttgaccaaaaaatcatcactcaaaacccactgcgtgattttgttggatggctactcttcgatcacaacaaaaagttctcaacagttgcctttgcacactttgggggccgctacgacatgacgatgatcatcaaggaggttttagcgcaaggtataaacttaattttaaatttaaattaattctttttaaataaaggtattcacaaccctgaaatcatcaagcaaggaaatcgtctctacgagttaaaaatcaaggacaatgaacattgcccactcacaactctccacgacagctataatttaatgcccatcaaattatcagccctcataaaatcctttggtctcaaaattcaagttagttttatttttatcaattcttgttttaattattttacaaatttactttttaggacaaacaacattttccccacatgtttaataaagaggccaactacgacaacgtcctaccgcaccttccacctcgtgatgactactgccctaaacaaatgaaaaaacccgacctacaaaattttaacaactggtacaataacaactatgaacaaaaattcgacctcaaagaaaaactccccgaatactgctgcaatgacgtccatatcctcacccacgccctcatcgaactgcgccgggaattcaaacaactaacgcaacggaacggaaaacacggaggaatcgacattctttggcaagccatgaccatagccagcgcctgcgtcaaaaactatgcactcaaccatttgaaaccaaactcgcttgccatcgtccccgaaaagggctacactcctcaacaaaatcaaagtgcattggccatcaaatatctcgactggtactctcacaccaacaacgtcaacattcaaactgctcactcccggtacggcgaatatgtgttcaagcgcgaagggcag

SEQ ID NO: 57061 - DNA, 2363 bp, Heterodera glycines
gacagctataatttaatgcccatcaaattatcaggcctcataaaatcctttggtctcaaaattcaagttagttttatttttatcaattcttgttttaattattttacaaatttactttttaggacaaacaacattttccccacatgtttaataaagaggccaactacgacaacgtcctaccgcaccttccacctcgtgatgactactgccctaaacaaatgaaaaaacccgacctacaaaattttaacaactggtacaataacaactatgaacaaaaattcgacctcaaagaaaaactccccgaatactgctgcaatgacgtcaaaattctcacccacgccctcgtcgaattacgccgagaattcaaacaactaacacaacggaacggaaaacacggaggaatcgacattttgtggcaagcaatgaccatagccagcgcctgcgtcaaaaactatgcactcaaccatttgaaaccgaactcgcttgccatcgtccccgaaaagggctacactcctcaacagaatcaaagcgctctggctatcaaatacctcgactggtactcccacatcaacaacgtcaacatccaaacggctcactcacgatacggcgaatatgtgttcaagcgcgaagggcaggtatatcaagtggacggctacatcaaaggcacaaatgggaggagggataaaataattgaagtaaatggttgtctgtggcacggctgcgaggagtgttttgatgagatggacgaataaacgaggatgccgaatggaaagacgctaggacaattaagagagagggaagtgaggaaacacgatatattgagccgttacgtcgacttggaggtggtatgggagcacgaaataaatgaacaactaaagaaggacaagcagatgagggaatattttgaaaactggaaggaccgctcaccaataaaaatcagagacgcttttcacggaggacgcactggaccgatgaagttactccacacagcaaagtcaggccagaaaatcagctacaaggacttcaccagcctctatccgtggaccaatttttcgaccgactatccccttggccaccctaaaatcatcagttttccagtaaatgagcagacggtcaactggcgctctccatccgacaacccctacaaaggacttctcaaagtgttgcttctacctccaaacaacaacataaacgtcactgttatgccaatcaaatttgatgagcgccttctcttccctctctgtgagaagtgcgccaaacacatcaccgcaaaatatcccaatggtctcaaggacgacaactactcctgcccgcatttcaaccccaacgaccgagcctttgtatcaacctgcacccatcttgaactaaacgccgctttggaggccggttacaccgcccgcaaagtcttccacgtcctccaatacgaccagtggagtaacaatgtcttcaagtcctacgtgagtgaaatgatggccctaaaaatccacgccactggcttcccgtcatggtgcgagagcgaagagcagaagagtgaatacattgaggagtgctgggggaaatttgcaattaaacttgacaaagaaaagatgaaagctgaaccggggaagcggtacatcgccaagctctgcctcaactcactctggggccgcttctccatgcggaaccttctctcaaaagcaataattgacaacgacgaaagccttattcatcagtataccgaagacaaaaagattgagctaatcgacttggaaatgatggatgaggacaacgatgtattcatgctcacttacaaaccaaaggaggagtttgtcgacgaaaataagtactccaatgtagtcatctccctcttcacaacatcaatggcgcgtctctacctctacgaagctctgaaaaaagtggccgacactcccggatgtgaaattctctactttgacacggacagcatcatctacgttcatcccgaggacaacgacccactcccaacaggaaagggacacctcggtgagctgacggacgaaaatccagaccacgacattttggaattcatcagtgctggctgcaaaaactacggactgaaacttcaacggaaagacaatggtgaaatttgcttcgacttgaaaataagggggttcactctcgacgaacagactgtacaaaaaatacactacgacacagtaaaagagcaaattttacgttatggttccgatgaccccgctgaccccataattgttacatatccccattttattcgtcctaatcttatccaaggcaaagtgtttactcattccctcacaaagcattatcaacccatattcacaaaaggtattattaatgattcattccaagtcctcgaatttggttat

SEQ ID NO: 57062 - DNA, 2232 bp, Heterodera glycines
atggtccattggacgacgaaggtgtcaaacggtgccaaagatggcactggtggagcagctaaaaatggtggcggtgcggcccgggacaccaaccagtacttcttccaaccccagccggccgacgttgagatgagcgcgtacgtttgagtcccctcggggacgacttttttaagagagagagcgagggagggagagagagatatagatagagggagaggaagagagggagagagacagagagagagagggagagacagagagagagagacagagagagagggagagagacagagagagagagggacagacagagagagagagagacagagagagagggagagagtctctcgtactcaatttatcggctttcaaattttcatttaaaaaatgccaaaaaagaaaatgtcatttttttacagttatgccctgctcacttacatgctgctggacaacaaagagcacgcgctgcccattgtccgttggctgaccgcgcagcgcaattccctgggcggcttttcatccacacaggtggaaatttgttcaaaattcaaatttggcgctaaaatgcaataaaaaggatccggtaattgatcagaagagtctgaatacaaatagcaccactagatcatagaaaagatcaaaatctcgaaaccggcttgatcaagcatgtgcttaatcgttggattttataccatgacgtggtttaaaaaagaagcattgatcaaaccaaaatcagtgaccaatctttttttttgactgatcaagcctaattccgtatgattttgggtcagataaccgctttttttgtgatcccaaatcaaatccattgattggactaaccagtgatcaatcttgatcaatcagtttcttgttttatgattttatgattttttgttcaaaaaaaaaccccttcttccccccccccccaggacacagtgatggcactccaatccctgggggcatatgccgaaaaagcctactcgccctccttcaacttgagcatcaaagtgcagaatggacagcaggacacacatttgttcaccatcaacgcacagaacgcacttgtcctgcagagttacgaggtgtggtggttgatggtggtggttttaaatggtgcccaaatcttaaaaatatcactgattttgtctatgattagccaacaatcatagatttaatcctttggtaaatgctaattactaattagtaattacttttaaaaaactaagtgctaacttacttttattaaactggaattttccagggttttaaattcaactctttggatttatttacccattgggttttggctaaaaaatcaatgattgattttaaatttgccatttaatatttctatgagtctcaaaacagttctttagagcatctaacagattttataaatatttatggcttgtacaaaaaccatacacaattttttttctttaattttccgcatttttttaccgccgattttgaagctcataggacaaaagtagtgaattttttttatttcgataatttgtttttttcataaataattcttctctgattcatcgagttttttgactgtattttgtctaagaattttctaaaatttcgcgcttgaaattgcggctgtttttggcattttacaatctcggtgcttaattgccctgtttttggcgttttgcaattttttttaaattaattattttccattttttagttgccaaatttggacgcgcccgtcgagctggaggcggtcggcacatcgatggcatttgtgcaggtccaatactcctaccatcgccaaacccttcgggaggacgtgccattttattgtgccaaagaagtgcgcgaggtgcgcaacggcaaccggctgcagttggagctgtgctgcaagtgcgtaaaacagaaaaacatttttggcactgccaaatttgaattttgatcaaaaaaggatcagatcagtaaatgaatttgattaaaaaaatgatcagaaaattttgaattctgatcaaataaatagtcaaaaaaatttggaaatttttttttttggaatttcaacttttttcatcttttaattttgaatttaattattaattaattattattattaacaataagaagaattaaatcactaggaattttattttatttattttttgccattttttcagttacacgcgtgccggtgcccgctcaaacatggccgttgcggaggtggacgcgctcagtggataccgctttgacgag

SEQ ID NO: 57063 - DNA, 2990 bp, Heterodera glycines
agtccaagtcaaacgctccactgatggtgtcacgctttaccgcgccggtgccacaactgttgccagcaccgcgccagcgcaaatactttccggaggcgtggatatgggccgacctgctggacccagctggtccaaggtgatgagtgcctaatttgcgtatttgtgcagaggcatactgtaatactactagacgatggttaggtaattaccgtattttatgcagtacataccgcactatttggacaatgatttgcgcgtatttgtgcgggaatactgtaataactggacattgttggccatattcgcgccggttttttgtaatatttgggcagaaatatgccgtttttgcgcagtgcatactgttctatttgggatatcattctaccatttttgtagcgggttatgtttttacagtatcccttgtaccattatccttttgtcggcatgctttacgtgtacgatggttttttttgatcactttgttctgtgcacttgtccatcacttccctcgtttcatatctaacactttttgatcattgctgctgcccaatgctaatgggaccggccaattagcaactaattgctcataatcacctccactaatttctgatcgttgctcgttgatcactctatcactgatcagtcaataaatgtaaaaataaagttggaggagttgcaactgcgtacatgctggcggaagataatcccggcatttcgtactttggcggcccgcccatcgctggtgccagtttgcgctcattgaaaatggaccgaccgaagtcggcaccggcgcgagtgcgatcggaattcccggaaacttggatttggacagatttggacactgctgctggtgatgggaaaaggttgcacgggttacggtgttggtatagaattttggatacggtagaaaacggactttggcatttctccaaaaactagataatttgtttatgcattgaaagggttaagcaattggaaacgggttggatccctttttttggttgatgccgaaaaggccccaactgtagctacagtaatgggggcatacggtaggaacagtattctcgtgtgtattctcgctatcttatgcggctactgtgtgtgtgtctgataatgcgtttgcattttttgtgctttttgcgtgtcatcatctatcacctatcatatccaccgtcgctttgatcatcctttgtcagaaactaatcaatattattgacattaattgacactaattaggtcactcaccaattgattgggtgatgatctcgcacctttttatttacgtcaaaccttaacaattattttgatcctcttgctaattgatcagcagcaggtgttttctttctttttttttagcctcactgatcacacacacacataaattgatcttttttctgatcattttagacccatttcagaaaaaaaaatttatgcatagcgaatttcggaccgttttcataatcagcagcacttttctcgtttctgctgatcatgcatcattattcatttgcttgttgatcaccaatctgatcgatcaatcaatcaagaccacaataggcatcatgaccgatcctaattatggaacacttggtgaactccatagtggcatttttgggctggcgtcggcatcggcaccgacaaaagtgcgatcggaattcccggaaacatggatttgggccggtttggacactgctgctgatgatgatggcaaaaggttgcgcagactacggtgttgttgttgttggcggagttttgaatactgtaaaaagcggtgcaaaaattgcaaaactaaaacatggacaaattgcccaattgtcatggacattccgtcaaaatggcatctttggaaaatgccaatgttttttaacagattaaaggacattgaatggtgaaaaaaaaacgcaaattatattgtattttttgtgaaagtgtgattgatgcttctgagttgctgcgcaataaagggttgaaaagtcaaaatttcatttaaattttttttcctgggacattttttaatttaaccttggaattttgggggaaaatttaaaaaaaaattaagcgtaattacctataacaaatttcagcgacagcggtgaggtggtgtacgatgcgaaggcgcccgacacgatcacttcatgggtggcatccgcatttgccatcaacgacaaagccggacttggggtaaaaaatttttcaaaaaaatctgtctaccgtatcccgtttcctaccatattccctgtgggaagggaacacacatgcgcaactctgcgcttttttcacattatacgcttactctcgcggtatactgtacaacctataccatatggcgtgtggtttaagccatttcgattccatacgatgttaatgtacgtgccgtacaaatttggcacattaagccttccaaatctttctttaccgtacatccctcattggtgtaccgttgtgtactgcacaatattctatccactaccgtatccacccacccgttcctcttcagttggcaccgtcgaccgtcaagctgaaggtgttcaggccgttctttgtccgtcttgagctgccttatgcggtgaaacgtggtgaaaagatggcattgcaagtgctcgtgttcaactacttggagaatgagcaggaagtaggcaaaatgaattaggaaaaaacaaaagtgatcggaaatagatcaaagcgacaaccaaatgatcagaaaatttctgcccttctctgatcaatgccatatttaacaaatttctctctaaaaaatttttataaaatcagcagggggttgtattttttgaaaatttgttctaaaatttctatagaattccccaataattggtgagaaatttcgggcataaggagggttaatcctcaacttttgtgctgtattactaccgtaattaccgtaccaaacttgtattacaggtcactgtaacattgaagcaccagcccggctttgattttctgcaaaaggacggctccagcattaagaaagg

SEQ ID NO: 57064 - DNA, 114 bp, Heterodera glycines
tgaagcggcatcggcgggcccggcatgccgggctgctccttcagcttgcgctcctcgccgccggcaaaatcggtccgcatgtgcatgtacatgggacggaagcgccagtgccct

SEQ ID NO: 57065 - DNA, 787 bp, Heterodera glycines
atgcattttgataacgatggtgatgtaattgaagatgattacggagaaaatattgatgaatatgattcgcagcagaatttgggtacacaatcaaaccctcaattaattggtgaaataatgtccactaaaatggcaaatcaaccgccaatgtttatctccggctgggaagaggatgagcaaggcattgagcaaaaagttgtgttgtttcttaattgatctcgctctctgagaatctttttaaaggatatgagtgacccgattgagcagtttctttccgcggcggaggagggcaatttgcatttgatggaacttttgttgagtgaaaggcctgatcttttgatggttattgcattttttaatatctgtatattttaaaggtctagtttgttttaaggcacgtgatcgcgataattacacagcattgcatcgggctgcttacagtgacaaatccgaaacgtgcaaatggttgctaagcaaagtttagtctatctcgccctctccatattattttgtttgtccaatttccttttcaggtgctgacccggaagcaaagacaagcgaaggttggacgccattgcattccgctgcaaattggggaaatttcgaagtaatcgccacacttctgagttggggtgttgacgtgaaccgtcggactgagataagtttatcattcctactttactttatttcaaattcgataatttttgttgattattttaaggcaaaattgtgcctctccatttggcaattaattcgatggcggatgacccgcacaagcagtacatga

SEQ ID NO: 57066 - DNA, 1081 bp, Heterodera glycines
atgtaagtgtcgaatgacaccataataatttgcttctcaagggttcacaagacctccccgtaaccaaaatttcaaggcaataggataataagataaaattttcaaaaaaaaaaaattttccctggcgcgccaatcggcattcgccgccctcctcccttatttttcttgaaaaatttttaatttttcaatttcatactgtatttttccttttaattagccctccaaatcttttttttattgaaattgcaaattcaattttaatttgccaattcaaggacggcgatctccaccaattgctgctccatgacgagcaaatttcgccccgtgccaatttgcccccgttgctcgtccgtctcgcggactaccgacgccatgctgaccaattggactatgtgggcgtttcgtttggcctcacgttggcgctgctcaaattttggaaacggcttggctttgtgcccgtttatttgcgccaaaatacgaacgatttgacgggcgaacacagctgcgtgatggtgccgcaaagttgcagggggaggaggaggtgaacatggcgaagatgacggaaacggcaggatggacggggaacggagtgagtcagtgttcatacacagacagaaatttggttgggcacccaaattcaaggagtcggctttccccaacgggcatttatcccacaaaaaataaattttttatttttacaactttctaagaaatttttttttgaaattaaattggtaataattttaaaaatattgaaaattttcgttggaaattttacatgggaataaaattcaaattttaaaagtttctgattttttttctaaaattttttaagaaatcatttttagaaaagataatgcaatttgtattttgagaaatatcctttcgtaaaattccattttgcttccctcctccaaataaattccaatagggcatcatcatggcatgccggtgaatgctgccgcttctggcgccactttgaactcggacggcacttggctgtccgccttctttgtggagttccgtcgccgcttcgtctcgttgcttggcacttcgttcagcgcgttcagcccccacttac

SEQ ID NO: 57067 - DNA, 349 bp, Heterodera glycines
  unsure (1)..(349): unsure at all n locations
atgattgttgtanatattgtaatgattgttgtaattnttntaatnantgttgtaattnttntaatnagtgttgtatnttttttaatnaattttgtaaatattttattaattttgtatgtnttataataatttttgtaggtnttgataaaatttatatgtattgtaattanttttgtnattgttaatnaaatttgtaagtgttataataaattttgtanatgttttatnagttttgtanttattgatgaaatttgtagatattataatgaattttgtagattttgataaaatttgtagntgttataatnagttttgtatgtnttttataanttttgtagntnttaataaa

SEQ ID NO: 57068 - DNA, 1256 bp, Heterodera glycines
atggccaacgcaatgtacgcggcacgggcgcgcgcggccaaggcggaaaagcgtcaagcgcagctgcgcaaggcggccagagcaagggcaggaaacgtaagtttagattaaaaaaaatttaaaaccgaaaataattttccccaattttttttcccacagaccgccaaatcgagacgagccgagcgctgttcactttgctggggccgactgagccgaatcacgcgtaccacgatgggctgccaccatccgctgcaccttggactccatgtgcgaatctttatgcgacgtgaagcggagcgcatgcgttggaccaggcgctgatggaggaggagaggtgggttttgttgaggtgtgggacggggggcagcagggaggacgagtgtaatttttggttctgtttcagtttgctgtgttgtgggggagggagaaaattgaaaaattcagaatttattggactcaatttatttttaattatcatttttttgaattttcaggcccggaaacgagaagtcgtcacaatcgcatggcaaacggcggaaggatggaaagaacggacgacggatcacacaatgaatgattggccgagtgtatttattgatgtatttgtgatggatattcattcatttgttgtctcatataaccatgtcagaacacacgcattgtttgtatcacttaccattatatttgtactgaattgaatgcataaaaattctgtttgctattgctgtttctccatttgtgccaaatttgaatttcaaaaatagaatttttcttttttcgactaaaagtgaaaattctgattttcgggtctaaaacgcacagaaatggaatggaaaatcatcaaactaaaattttgaggcacaaatttgaaaaaaaaaattgaattttctttttgttttaatttgtgcaaggtgtgctgagtattgaatttatcagaataacattttgtccatttttagggggtccgtgccagattttgggttcgttttagggcttttgctaagtttaaaaaattagaatttgtcatgcaattgccgattatcccatggtgagtgttctttgcttacccgcgcctcccatggcatttcacgagtgtacccataaaatccgaaaccgttgaataccctatcaaatgtagtaggccccaaaacattttatttttcagtctcaaaaatgctatttggacgcttaaaatgccacccccgcccccgtccccgggggcgagaaatttctcacccccgcctccgcgactctga

SEQ ID NO: 57069 - DNA, 53 bp, Heterodera glycines
atggtggcagcccatcgtggtacgcgtgattcggctcagtcggccccagcaaa

SEQ ID NO: 57070 - DNA, 1191 bp, Heterodera glycines
atgaatcattttggcttaggcatttctgctggactaacaatgcttatgcggctgatgatgcgctcatccgttgctgatgatgaatttgaaattagctcagtgattgagatcagtgattttgtctggtcatgtgggcccaccgtaatggtgaagggagaggatactgtggccgatttgaagaagaagttcgcagaagagattaaaattgatcccaacagacaagagctgagaaataaaattgagcccaaaagacaaatgctgagactcggcggtcgctttggttcaacgcttgaagacagtaaaactttgaaagtttatggcattgaaaaagaccaagtcattagcataacatttgatgaatatgaaatttttgtgcattttaacgagaaaaattacccaatttgggtcagaaaaagcgactacgtagaagatttggagaagaaggccatgcaaatgctgaaaagggagttggacattaacatagatgatataaaattaaagagtcgtcaatctcctggaagttatgacatgttttttgaacaatggtatacaatggaacaatatgaaattaaagaaggcgcagttatttacgtttgttatgaatatcattacaagacattagttgagtttgacattttcattgaatataaccagaaaaagtacccagttcgtgtaaaacgtgcggacactgtgcgcgatttgaagatgaaaatcggaaatatccaagagattggtattttgcccaaccaacaacaaatgctgagactcggcggtcgctttggtccaacgcttgaagacagtaaaactttgaaagattatggcattgaaaaagaccaagtcattatcataacatttgatgaatatgaaatttttgtgcattttaacgagaaaaattacccaatttgggtcagaaaaagcgactacgtagaagatttggagaagaaggccatgcaaatgctgaaaagggagttggacattaacatagatgatataaaattaaagagtcgtcaatctcctggaagttatgacatgttttttgaacaatggtatacaatggaacaatatgaaattaaagaaggcgcagttatttacgtttgttatgaatatcattacaagacattagttgagtttgacattttcattgaatataaccagaaaaagtacccagttcgtgtaaaacgtgcggacact

SEQ ID NO: 57071 - DNA, 1035 bp, Heterodera glycines
atgggatttaaattcattgtcggcaccaccaccattttcctgctaattcagtcggttggcctaatcactgctgatcggcaaaagcagcaaaaacaacaacaacaacaacaacaacaaaagcagcagcaaaatcgaattgtgctaagcccaaacagagtgccacattggaaagtggagaacaatattaatagaggttaaaacaaaatttgtgattaattaatttaattaaagtagcctgccaactattaagaaaaataattaatttaattaaagtagcctaattactttcattcattttatattaataaagatggattattagtttaatattttgaaattaatttaatttatcttttaatgcgtatttattgtttgtttttgtttgttttaaggaccattttatggacaaccagaacaagtccatttgtcttatgccagtgacccatcaaaggtaaaatgtttatttttattttattataaaaatagcatttttccacttttgtgatttgttttgctaacagttttcaatgaatacccttgaaaaatgcacccaagattatttgttcattaaaaagtcgaatacattctttaataatgtaacatttaaaacttttaatttatcacaagctaaacattttttcctaggaaataattttatgtccttgaaatttgttatttgataatcatagctatggatattttttccaagatttttcattaattaagaagattttaaattaactaattaattaattaatttcttaaactaattaattaattaatttacaacagttgtgggtcacttggctgacctttgacgacacattggactcgctggtcgtatggggcgaccagtacagtcagctaacgcgcaaaacgccggctacagtagactattttgtggacggtggcaccgagaaaacgaaacgatacacccatcgggcactaattgaagggctgaagccgggacaacgctattgtcagtggaaatctctcattttatttttggcatttttaatcaacattaaaatttga

SEQ ID NO: 57072 - DNA, 1816 bp, Heterodera glycines
atgactaggacagtggatcatgcatctacagtgattattttttgtcgtgcatttttcagtgctaatatgtaagcgcattaaactatgagatttgaaatgttttttaaatcccgaaaatttactccaccaacaggcgagaaatcaaaaaaattttagttataaaataatattttaatgtaatcttttattaatgcaaaattgttattaatttactaatttcttaatccaataattgcttattttaaaaaaaaattaacaaaaaatggaaattgtcaccaattaacatatttttatgcccatttgcaaccgtttaaatttgctctatgtaaatagtgcgggagaccacaccacggccatttcaaaaatcaattcgttccccttttcaaaattgttggcccctgagcgctctttagacttgtgccaacaaaaaattttttccatttttggcacaaaatttgctgccaaaatttgcaaaaaaaaagtcactcaatttgcttgtgatttatttaatggtttggttttttggcatccattaaaatatattaaggttcatcccgggtccattgggagcaaaaattaaattttcttagaattcttggccgatttgtaagaaaattttgcaaacattttgcaaaaatttataatttttaatcatttttaatattttatattgctattaatggaatatttataggaaaattttcggttccctcccaccaatatcttttttttttgatttgcatttaaatggacacacatgctttttccaatacttgtttcttgaaaaatggaaacagaaaagtacaaatcaatttttcctattaaattttgcaaattttttaccgtaaaaatttaaatcctttttttgaaatatttatttaggcttttaaatatttaatttgttattttgaaaggctcactatgcatttttgcccatttctcatgcctttagtcaaattattcacaaaactttgcccaaaagcttagatcaaatttccatggccaataagctgctctgggaaatttcaaacaaaaaaatatttttaaacattatttaaaattgctgttgtttattctttttctgagatttatttgtgagagaagaataaaaggaaaattttaaaatgtaaaaaatatagaaaaggaaattttttgctcaattatatgtaaattaattattttattttatttttgctaaattatatgctttttaaaataaataaaaatgtttaaaaattttaataaaatattagaacatttgcaacatttatgttattttctggggaaatttgatatgcacatatgttgtgagctaatctgttcatttttttaacttttttaaaactttgctctcgatctttcaattgttactaaagaaatattgaaaatttaacaatttgaaaaaaatttaaatattgtagaaccaccgagaaaatttattaaaatttttaaattaattcaaaaaaaagttttactatcttaatttctgagcggagcagggcatgttcagttacaaaagtccaaagttataaagctccaaacttgtcaaatgcacgtcagacgcgaccaccgtgccaaatccgttaatcgcacgatttaaatctcgtttataaaaactactaatcctaactgagataattccttagaacgtctttatttaatgctttaaatttaatttttgcagcattttttgaggcttttaatgcttcaattattaagcatcggaaagacgttccctatctttaaaatttatttccaaagctcttccattcacttgttatgaacattgataaagctaatgacatcatttgtggta

SEQ ID NO: 57073 - DNA, 1116 bp, Heterodera glycines
atgggccacaattttaccatggtggagttgggctggctgtgtaccgcgctggtgtcactgatgcgcaacagttcgcctcccctggtacacactgatcagaatgcgcaacaaatgctcaaactgatcagtgatacaaaatgctcaaatagcaacagtacaacaacaacaattaacggattgtctaccgtaccaactacagtaggaacaacagctacagtacagctgaatgctgcactgcttgaaaaacttataaggccaggcgctgctgatcagcaggtcagcagtaccgattgaaactgggattccaaccataattttttgggatttggaatgaatttgggatttaaaatttgcataaatctttaaaaattaaaaattaagtcccaacaaaataaaatttttgctgacaaccaacgattgcttgactggcttatgacatttgtgtacatgcttatttcaatgtttggcataattggcaatatttttggtatgttgtcgagaaaaaaaaaattaatttgattaatattaattaagtggtaattgttgtacgaactgtgccaggaatggtatgtgttttaatttatttcaataaaatgggtttaaaaatctgaattctttgaaatatttttaataattttagagataacaacctactaaatataatgagacaattagagttttttaatttaaaaattttcgtttgtctaaacatatttaaaaatgccatgtttccgaaacgggaaagcattatccagggtagttttaggcgctaatgaaggatatggagtatgaaaaaaaatcatgctttttcgaaaaaaagccaaaaaaaaaatttgtctatttttaaaaatcaaaaccatcggcatatcggcttaatttagtggagtgtggcataacgaaaaagttaccaatataaaagataaatcttttcaaattaatcaaagatcactccaaccaactgttatttgatgtcattggcaatttccgattgcatttttctgctttctgctgcaccggttgagctcagctttttgcacgttgattggtacgcgtttggctccattggctgcaaagtgctctcatttctcccatttttgggcataaattcgagtaaaa

SEQ ID NO: 57074 - DNA, 144 bp, Heterodera glycines
gaacgggctggatgccgtcgtcgcctgctgatcatcaatgtactcattgaagaccacggggagtacaaatgcacagccaaagacgacgaaacaatggcccaactcattgtgcaccccaaattcgtcaaaaaagcggagcgctag

SEQ ID NO: 57075 - DNA, 378 bp, Heterodera glycines
atgaatttgttcgtgaacggcaaaaagacgacggagcatgtgtatggacggcaggaatgggaaaacggcaccgtgtacacttatgccagcctggcattcagaccggggtaaaaaagaaaaaatggaattattaaaaataaaaataaggcaggaataaaaaagaaaattggaattaaaaattaaacaagataagggtaaaaaagaataaattaaaaatatcagggtaaaagcgtatgaaaattaattttcagaaaaattcaccataaaaaagtgatttcctgcgaagcgcagcacccggaaacgaacacaaacttacgcgactcgatcactttggatgttttctgtgagtttggcctaattgttatgatgatcggataa

SEQ ID NO: 57076 - DNA, 80 bp, Heterodera glycines; identical to SEQ ID NO: 51817

SEQ ID NO: 57077 - DNA, 409 bp, Heterodera glycines
gacgaatgatggaaaccgtgccaaaatgcagcaaaagcgccagtcaaagcaaatttgcaaacttggccaaagcaacgcatccatggcagagagttcacattgattttgctggtcctttcttcggaaaagattacttgatcattatagacgcctattcaaaatactcagaagtttttgagatggcaaccaaatcgacggcagccacaaacaacaaacttcggtatttgtttagtcgtcacggattacctgaaattttggtatccgacaatggaactcaatttaccagcaatgaattttcaaaattcatttccaacaatggcatttctcacctcttctctgcgccatataacccaatgtcaaatggccaagcggaaagatttgtagacacgtttaagaggtcattccgaag

SEQ ID NO: 57078 - DNA, 1296 bp, Heterodera glycines
aacgatataaccaaaatataaggaaaaattttttaaccccccttgtctccatcttcctttttgatactaaagcatcagcgtgctaaaattaagttgtaaataaaatttggtgcgctttagagcactttctgaaaaaaatatttatgaaacaaaaaaatcgattttttcaagtgtccgtttggggtactcaaacatttatggggagcaaaaatccaacgcagaattaaagtacaggctatagggaagctactcccgaaggattcggtctccccataaatctgggcgcatcggttcggggggactgccccgaaaacaaaaaaatcgattttttcaagtgtccgtttggggtactcaaacaattatggggagcaaaaatccaacgcagaattaaagtacaggctatagggaagctattcccgaaggattcggtctccccataaatctgggcgcatcggctcggggggactgccccgaaaacaaaaaaatcgattttttcaagtgtccgtttggggtactcaaacaattatggggagcaaaaatccaacgcagaattaaagtacaggctatagggaagctattcccgaaggattcggtctccccataaatctgggcgcatcggttcggggggactgccccgaaaacaaaaaaatcgattttttcaagtgtccgtttggggtactcaaacaattatggggagcaaaaatccaacgcagaattaaagtacaggctatagggaagctattcccgaaggattcggtctccccataaatctgggcgcatcggttcggggggactgccccgaaaacaaaaataaatcgattttttcaagtgtccgtttggggtactcaaacaattatggggagcaaaaatccaacgcagaattaaagtacaggctatagtgaagctattccggaaggattcggtctccccataaatctgggcgcatcggttcagggggactgccccgaaaacccaaaaaaaaattttttggataaaaattatttaaatgaactgactagataatatttaaaataggttatttctcttcctttcagtatccctgcaaagtttggtgcgcttctgatcagtttctgaaaaaaaagttaagcctaaactttttggcctgtttaaaaaggaattaaaaatttttataaattttattcatctccctttttgatagaaaaagcatcagagtgcctaaactaacatgtaaataacatttggtgcgtttcagaaccctttctgaaaaaatattctagaattaattttgcaaaaaataaataaaaacgaaagact

SEQ ID NO: 57079 - DNA, 924 bp, Heterodera glycines
atgggagcaaaatggacagtgcgagagtttcggaaagcggtgggagtgcaagtcaagtgcatgagggccgccgaatccgcgttggcagcaatgaaaggacccgaacgacgacatgagcagcgatcggagcccgaacgaggcggacggaacgcccgaacaggacaaggattccagcgggcatttatgatcagagatcagcccccggagaaacgaacgtcgaacgaagcacacaccaggaccgaagtcgcgatgccacccactcgaccagcgaatccgaatcgtgtgccgctcgggagttactcccgaccgatgggagcgcattcccaagcacaggagggacagggaggacaaccccgacaagggtgctcgttgtgtggacaaacgggacaccaaccaagccggtgttgcaaatatgggtcagcacaagccaaaaggaggagactgatcgagcaacgccgttgtctcaaatgcctgggatccgatcacaccgcgcagcagtgtacacgaaaaacagcctgccggacgtgcgaacaaatggatcaccactggctgatatgctggaagggggagagaaggaacgaaccccctagccactcgagaacggaagatgcacaacaaaatcggacgatgatcattcgggaaattgaagcgaagcacgtgcgcactccccctcccaccgagtccagcaaggacgggatgggggctaaaggggaggacccacctttgctcgacggagagcagagagcattcaccaccgtgggccagcaactcccggcctatttaatggtgtgcccggtggtggtggcatcggaggatggcatgacagaatgcaataccaatcttcttctcgacccagccagccatggcgattatggggatgcggctctgatcaagcagctgggcaccgagaagggtcgggagtga

SEQ ID NO: 57080 - DNA, 1248 bp, Heterodera glycines
atggccgggctgcgcatgacgcgcgctcgcctgcgccaattggaacgcattgcgcgccgccgcattcccaccgcgcggctgcgaccgattgtggggccgaaaacatttttggacatcaattacggggacgacgaagaggaggaaagcacttcagcaaaactgccggggcagcaggacgatgagggagacatggactacaccccggcaaacgacccgaccgcaccaacggaacgaagacgacggaggaggagacggaaaacgaagacggagggggagaagggacaaacggtgagcaacagatggggaaagtcatgggcaagagggacggtgagaaaggcaaagtgcggggacggttttcagcgatgtttttgaaaattagtaattattcataagaaagatttctaatttttttttcttgaaattttctttaaaaaaacaaaacaaaatgcccttaaaattccaaaataatgataaaatttaattgctaaaacaggctgacaaagtttcttattcgcagatttacaataattgttttctcactttatgtttttttagcaaacaaattccgaccgttcggcttctgagtgtgatgatgctgaagacgcgtcatcgtctatgcgctcctccgacacggactttgtctgctcggacatggacgaacaacagcagccggagcagggaacatcacaatcagcaacagttgagactgaacaagtaggagatgaacaacatcagaagcaacaacgatgcacacatgacgaggaagaggaggagggacaaagtgtcgaatatctgacaaaagtgggcaattaatgatcaattaatcaatttaagcaaaggatatcgaaaatgaatgtcttttgtcatattaacagaaaacaattttcatgcaggtggacaatccgatctatccaatcttcatcaaatcgttggccaccgacacggaaattgacccggaagttcgtcagcaactatacgatgacggtacagtttgctgttgtttgttgatcaaggcgagactgaattcatggctatgaaagggggggggggggggcttccccttcggagtttgaattaaaaaatggggatttttaaaataatataccatcttatttagaagacaatgaccccgagtacgtcttcccggactttgacgatttgtgtgatgagcaggaggacgaatacgaattccgacgggaccgagccaccgaaattccgcgtaattttttatgacaggaatttaattta

SEQ ID NO: 57081 - DNA, 4097 bp, Heterodera glycines
cacgttcagcttctctgccaagccattgtgggcacgtctcaatatgccaacttggtggaaccacacaacaaatctatgttgatgctggtcagtgagtcatgattattaatttttaattgaaaactactaaaatagtgaaaattgtttaaaaaatcgtttcagagcgaattggacggattgtctcgcgagcgtggcgccaaatcggcgtttaacgtgccgacgctggaggcggccatttacagtgcgcacgacatcaaagcgtgccgcgaagtgaatttggcattggcatcaacagcggcagcagaaacgaatggcgatgagctccaacccaaaaacactgtcgaagtcagtcggattgaaatcaaattgttttttggactaatttatttagggtctcattattttttaatccgtcggtaatttctcgtaattaatagaaatgtaattgccataatgtcaccgcgtatactcacacttttttctaccgaaacagctgctccaactcaaggatgagcagcggcctagcaatgagaccatgtgggtgttgtcgcgcagcggtgccgtccgttaccccgacctgttgtgcccgtaccggttcagcagtgccgaagactgtgataaattgcagtcctcaaaaatgggtccaacgcagcgatttttgcattcggaacaggcagaaattactaaattttctgggccgccgaaattttttttcaaaattttcaagaaaaatctctgtgtttcagttactgctcgccatcggtctctaccaattgggtggtgtccagtcacatcggaatggcaaaatgcgcaaccgttaccaacatattcagcagtactttctgcccacaaaacgagtcgaccaaattcgcaatcacattgtcagcaacacaaattagcgattagatctaatgacaatggctaattaattcaaacggcgctttgttttgtgtggcattggcccatttttaattccaaaaaaaaaaaaaaatcaattttacctattttaatattgcagaaaaatgtgcattcgtccccgtcaccgaccatttaccaccagttgatcatgcaggcagaaaagggccattttccggtcacttatcggcccgatttgggcgaaaaagcccagcgaaaaacgccaattgaatggccaacgaatgtgcagccctattggcttaaagtgtgtggggatgcattaagtcacttccgattttttaatcttttaatgcaatttaaattaaatttttccattttttccccattttagtggctttccaacctgctgggcaaatgccaaacccagatgattatggtcgacgatggtgacaacactgacaatgatgcgggtcaacaattgcatggcgttttcgaggcattgaatggcactgatcagccttcttctcctcctgcccctcctcctgctgctttcgcttctgctgatcatctccatcaaccggcatcatctgacacgtctaattccgaagcccaaactgctcaaaatgtcaaagttgagaatgcaaatcgccaacgacacgtaaaggcgggaaaaaagccgaggatattggctactgctcgaaaacgctgcgttcccacagcaacgggagcggcaccatcaacaacttcaacaatggaacagagaaaggatgaccaacagcagttggacacgacgacaaccgtcccgtacaacaacaacgaagcggccaccgaactgcttggagacgttttcattccaggggagcaacaacagccagattttgtggacgtggaggaggaggaccatgtggtgggtgtggagacccggtggcggaaacgtatacgaacagcctcgtcaacaacaacggaagacggggcaagtcgcttgagtggtgttgccgctgctacagatgttgctgaaaagggaggaacaacgccgccgacacaaacagttacagcagcagcaacgatggtaaacaacaacgccagcagcaggaggaattgtagcagtgcagcaaacggcgccggtggcgcagaagccgccacattgtcgacgatggcgcagatgacagcgaaaagcgccggcgttgaaaatattaatggcactaattgtgccgaaagtggtgtcatgcctgccgcaacagctacgtcgcaattggtgcgtttatctatcatttattaaattggaattgtacctgaaccaattcggaagatttatggcaccattctttttcagcaaaagaagtcacggcgacatgaacgggccgagcgcggaatggccgcgctgggcgacgcgcattcgcttgagcaaaccgaacgggcgctggccgccgcaatttacgaggacttcggcaagcgaatgttcatgcatcaggcaaatttgctcacttttttcttgccacttcctcctcgtaaatccacagacgttttgccctctggcaatattcgcaaaatgccattgtcgccatttcaggacaaattgcgtgccgtccagcgcgtgttggccactgctccaccgccgcgttatgatccatcactgtctgctgcttgctcaaccgcacaatctttcgcctctctatggcaactgatgggcctcacccatccccaactgttccatttgttcgccgccattgcgcccgaggcgcagctgccgcacgcactgcgcgtcgacccgcactggcaggcgtgcaaacgcgcgctgcgcatgctgaagaccatccatgtgcgtttttgcttgtagtttggtcggttggcagcccaattcgggaattctcgaacttttcttctcgtcttggtgccaattcctgacacaatttcgattctcgatcagacttctagggccattcaaattgccaatttttcagacttatttggctgcgagtcgaacccttgcccagatgaagcatatgctcaaattcctcaaagagagtgagttaatttctgtttatgtataaaaaaataaacataataatttaatggaactttgtggggtcaaatttatagatttttttgcatttttttgttattttaatttctttcttaatacaaagttttcatctttgctattgctcttccactgtttcttttgttagtttccgtggacatcacttctgagcaacagtttttcgaggctcttcagcgccaatttggggttagggacgagccgttgtggcggctgttgcgacgcgaatggatgggcggaaaatttgttgaaaagtgggtttattgggttagcacaaaaccaatgtttaattttgagttcagaaaactcgtttcaaaactatttaacattagagcaaattggaatcaaagcaattctcaaacaaaaaataattttcagcgtcgaggattgggagtacgaatttgtggacatggacaagcagtaccagcagcaacaacaacacacgagcgaatgcgcaacagtttccactgatggaattggcaacggggacaagcagcaattccagttcgaacatgtccgacttccctaccgacgcgacccgtccgaacgcagtcgccttcgcgtccgacacggccgcgtcacggcggaactgaacggacggttgtgcaacgtgtcaattggtgccaatttcataaggggggggggcactgatttcaattacatttgccattgtttaagcctgtgcttcgtcatcttctggtctctcctcctccgactctttgtcggttgttgaacctcagcagagcaattgtccaacaacaacagcacgtgccagtgtggacaaatccaatgaactgcaaaagaatcgctgctgttggacccgaaaaatggacatggaattaatgttggcctacaagaatgcgggtggcgatcagtaagttttttaattcattctttacggggcaaaaaatgttaaaatgatggaatatttactggactatggactgtatacaaacttttgggtgttttagcaagaaatgtgtgaacgccttcctacaccaacgttccacacaatccaaaattggtgaatcggtcgtagcagaagacgctgaaaaacggttggaccaacttttgaacgtggccaacacattgaggaggaggaggagggagacagaagaaagggacgggaaatgatctcatcattttacccattttattgcaa

SEQ ID NO: 57082 - DNA, 524 bp, Heterodera glycines
atgacatgccaaaccggaattcgtggtatgtttatttaaaaaaagaaattgtgaaagtttgacaaattttagccgatgaaaaactgttggactttttcgagcagtgcaaacagtgcaaagtgcgctttggcaaaattgtcattaacaacggttcgtctcatttttcaacattttttagtggaaattccgcccattttccctcctttagagcgtctctgtgtgaatcacaatttgaagccctcaaaagattggcgcaaagattggaaaaaatggtgagcaatttttttcgaatttttctaatatttttttttcagtttgcccgactgtgtagatgcctatgagccttgctttttgcttttccgtttcgactcgagccacgattggattctgatcaggcaatcaaaacggatgactctgaccatttttgaatggtttgtctttctttcagtttttccgacgacaaagcgtccacacgcgacaaaatgatgttggccgccaccaaagcgacgtttaaagtgccacaa

SEQ ID NO: 57083 - DNA, 729 bp, Heterodera glycines
atggagtacacagaccttgcggtctgtgataaaaggcttatggaaggaaacgggcaaggaaaaagcgaaacaaataaaaatataaatcaaaatattgcttcgacaagccaaagtgctaatgaaaaggaaataaaaagaattgcagaaataaatcattgtagagaaatgattagaaaaacaatggcagctttggcaataaaatctgataatgaaaaaatacatgaactgagagaaactgaaaaaagtgatgaaaagaatccaacagaactgattaataatattgactgtccttctagttctggaataggtttgagatgtactgatgctcttgcctgggtaatgattaaaccagaaagcgatgaatatcaaataaaacaaaaaaaggataaaaatagagatgatcagctaaggatgattatttttcagagaatgggtaagtgtgctttggctgtacggctggataaggaggacaaatggccatattttgcattggtttatccaaatgaaaaactaaatcagtatccatgcttaggcagtataacttcagtaccaaaagtggaaaagtttgaatattttagttcttcgaattctgagttatactcacaaaacccaaaagaggaaagtgggactatttataatattataaaaattgaaaggaatgagataaaagcaattgatgttgattttaatgtatatgatgatgagagttatgatagcataaaccagtga

SEQ ID NO: 57084 - DNA, 360 bp, Heterodera glycines
atggaccgacggtaagaaaggatttaaaaaattgcaagttttcatttacccaattttcttatgtttcagttggatttgtggcgacgtgtggatggacattctcccatcttttgaccatgctcaactcggactcaaaatggcattgctttccgaccgtttcgatgttttggtggacaaacatttcgatggaaaaagcgaattgacaatttggagacgtatcaaaataagcgaaactgtctgtggcgatcgatggcaaatttgtgggatttccattgccggaccattcgctgccaaacaaaatccgttttcgtttccttcagattcagtaaatcaaaaactatacagaaaccaattaatatg

SEQ ID NO: 57085 - DNA, 606 bp, Heterodera glycines
atgacggagaccgagctgcgcaaccgacttctgaacgtgagcatcggacgcaacattcgcaacgacaatggcactcaaaacggagacgcaccaaatttggggcaacaaaacggaaacgaatcggtggaaattggacaaaatttggagcacggcggcgacgcacaaatggaatttggacagcaaatgcgtggaggtttgcgtgacttcgaaatttttgaaaattttggtcatgaaagagggggactgcaaaactttggagttgagagagtcagcccgaaccgacaccagcattttggagaaaaccgaatgcaaaatcgacatattagcagcgaaattaggggtcaaacaaatgtccgcgcttcgaataaccgcgaatttgtggagcagcgtccattgttgaaccgaccgccgttagcgcctcaacacagcgtcatccaccgccaatacattcagcatgttgaatcgcttccaccgtctttcccttatgcgaacgaacgcattccaccggctccgagctacgcgcagcctgtttttgaacagcagcgtcatcagccccgacaaaatgcacctaaccccagccaaaatttggatgttttgcacgtctag

SEQ ID NO: 57086 - DNA, 291 bp, Heterodera glycines
atgaagaagtttgactatctcgtcattggcggcggttccggtggcatcgcatcggcacgccgtgccgcggaattcaaagtgaaagtcggactcatcgagtcggagcgccttggtggcacatgcgtaagtgaaatcatatcaatttcaatcactttctcattaattttgtaggtcaaccttggatgtgttcccaagaaagtgatgtacaacaccgccatacatgccgagtttctgcgggaccatgctgactacggcatcgactcaatgaacgtaaaattcaattggaggtag

SEQ ID NO: 57087 - DNA, 65 bp, Heterodera glycines
atgatcaccgagaacgggggacaggcacgcaaagcaaccgctgaggaggaggccaaggtcaagca

SEQ ID NO: 57088 - DNA, 242 bp, Heterodera glycines
atgagccgtaacgaacttgtcggttttctcctgcgacagatcaaattccatcccatcttcgccaataatttcttctcttcctccgattctggcctaatccattgggatgccagtgctttggcccaaggagcgaagtgagttcagccgaccgaaggcaccaccccatttggcataatcttccgtttgcagtttaaatccgccaacaaacggaagagaaatgactggccacgaatctgctgcgg

SEQ ID NO: 57089 - DNA, 2165 bp, Heterodera glycines; identical to SEQ ID NO: 26347

SEQ ID NO: 57090 - DNA, 764 bp, Heterodera glycines
atgcatgcggcgactcgccaccgcgtggcgcgtaatgctgacgcgtgctgcggctgtggcgaatccccgcgtggtccgcccggtcagtgagcctgtcatggcattttctggacagtaactaatgccctccctcgtcttaggccctcccggcccagatggaaatcccggcggcgacggacagcccggcggacctggacagcctggcgcgccggcacaggctccgccgcgtccgaaaccgagcggcacagggtaagcatgccattgagaagcggtggttcatccattcacaaaatgcctaaatatgacagatgtcaaacatgtgctccggccgagaacggacatcccggcccccagggcccacccggccaacctggcgcagcgggagagcccggggcacccggctatcccggcaaaaagggcccacgcggtccgcccggtccagcgggtccggacggaaagcccggcgacgccggagcacccggacagccaggcgcaccaggagaactcaagtaggagaggaggggaggtatatttagttaattaatgcatatttaggcccggacccgtcaaggtgggaccgcccggcccgcctggctatcccggcaaacccggcggacctggccaacctggccaacctggagagcccggacaccctggcggacaaggtccacccggcgatgccggacagcccggcgagccaggcaaccccggcggtgcgggcgagcccggacaacccggagagaagggagagcacggacactgcg

SEQ ID NO: 57091 - DNA, 889 bp, Heterodera glycines
  unsure (1)..(889): unsure at all n locations
atgccaatcttgctcgggcgtgccattgcacctcagtgggccctgcgtaaagcatcggagaaggaaaaatggccaaaacagtctaaaggtgcgaaataacaaccgggccaataaccggctgattctgagttcacaaaaaatgggaaattttgagcaatttataagacttaaaaaatatataatactgcccaaatcctacccaatcagcgtccaaaacattctccttcaacactgcttcgtgttgcgcaattcgaacctcaaacaaaaacaattaaaaaataaattgcccccaaaacatgccttcaatggcacgtcatcgtcctttgtccaaccgccgagggggtgcaacaaaagtacgggattgcgatagcctcgccttaatttgtgaactgaatcatacgttaaaagggggaggggttctggtagattacgaacgagtctggagggggggggggatatggaacaggacaaatgacaaaacacagtcgccgaaacacagccgagacataacagccgggaaaaaattttaaaaaaaattttcaaaaaaatcgctggaagttttttatttttttcccttgaattttctaagaataattttttaagattttttcatgaaaattttttaattttttccaggatgtgttatgtctctgctgtgtttctgcggctgtgttttggggtgaaccgggngggggggatcatcacctaattttatgaaggggataagtcatgtaaatcgccgacaatagcgcactttttccaaaacttttggagacaagggagatctggcgatgccgataggcgccgtcggtgaattagaaagtttgggtgtaatttgttanaggattttcaccaaaaactgctagattttcgcttttgagctaataaa

SEQ ID NO: 57092 - DNA, 1674 bp, Heterodera glycines
  unsure (1)..(1674): unsure at all n locations
agaaatgagaaagttatgggggctcaaaaacccgtaaagtcttatgccagttttgttatttttattaattcccncaactttgcatttggatctgctctatccaatggtatatcttttaagacgttctccgacttacagctgggaatgttaaatcncaatnccatgcgcactttgattccccttttccctttattagctcaaaagcgaaaatctagcagtttttggtgaaaatcctntaacaaattacacccaaactttctaattcaccgacggcgcctatcggcatcgccagatctcccttgtctccaaaagttttggaaaaagtgcgctattgtcggcgatttacatgacttatccccttcataaaattaggtgatgatcccccccncccggttcaccccaaaacacagccgcagaaacacagcagagacataacacatcctggaaaaaattaaaaaattttcatgaaaaaatcttaaaaaattattcttagaaaattcaagggaaaaaaataaaaaacttccagcgatttttttgaaaattttttttaaaattttttcccggctgttatgtctcggctgtgtttcggcgactgtgttttgtcatttgtcctgttccatatccccccccccctccagactcgttcgtaatctaccagaacccctcccccttttaacgtatgattcagttcacaaattaaggcgaggctatcgcaatcccgtacttttgttgcaccccctcggcggttggacaaaggacgatgacgtgccattgaaggcatgttttgggggcaatttattttttaattgtttttgtttgaggttcgaattgcgcaacacgaagcagtgttgaaggagaatgttttggacgctgattgggtaggatttgggcagtattatatattttttaagtcttataaattgctcaaaatttcccattttttgtgaactcagaatcagccggttattggcccggttgttatttcgcacctttagactgttttggccatttttccttctccgatgctttacgcagggcccactgaggtgcaatggcacgcccgagcaagattggcatgtggcgtgaacgcttacattgtcggacgcgatccggcaggcatacaaaatccacgtactggcgattatttgtacgaaccaagccatggcgcaaaagttagtcaaggaaagattgtggcgccaccggcaccgctggatccctccccttccccatagttttaaataaacacccgcaaaaaagtggcctaaaaaggaaaaggcgtctttcccccgtaaatttaggcttctacccctcccccttttttaccactattaacttatgtgtcgaccaacatcgtcaatttttattgcattactattccttaaaggttctctcaatgactaccggtttggtcggcctggagataatcccatttcgtgtcgcagcttacgattcttttgcgggagccatggcattttacgacccaaaccggcacgataatttcatgtttatcagtggaactatgatgagaaagttagcgagggaaggacgacagccaccggagggatttatgcccccaaaggcgtgggaagtatgacgaagaaacttttggtgtttcataacgaattatttgctaaacaggtactttcgaattactatcgtactcaaaatggaaat

SEQ ID NO: 57093 - DNA, 73 bp, Heterodera glycines
gatgatcgactattgccgcaaaaacggtgccacagttgacatgccatcggaagcggagcttttcctacactga

SEQ ID NO: 57094 - DNA, 2125 bp, Heterodera glycines
atggaaagtgaaatcaacatttcacctaacaacggatcggactttgatcccgttcatttcacgcccgaagaaaatgagaaatgggcaaatttacttggtcgaatgcgagcatttgaactggcagtttgtcgccaatttcgaacaatcgagaacgcattttcacaaatctcgagtcaaattcagattcaggacaccgctgaccgagtaagagaattggaaagttcgataaaggaactcgagaactttacagaaatggacacatttgagaccaaagaaaagtttattgaagtggaggaagaaattggaaaggtaagtaatcatatggaacgttatgagacgttcacaaaggttcgatttgggaaaattgttgaaaaaatgaaggatgaggttcggaaaattaccgaaaatttggatgttctaaaaggccgagtacaactgttggaatttgaacaagataatccagagggatttggggaatggtttgatgacggacaatcccaagaacataatcgattgcctgatgacaaaggggcaacggaaggggaagacaacatcccaattggggacggaagttgcgaaattatggttgcagatccatttttagggggaattacccccctcgagggttatgatggaaacccaagtgtatcattctcacggtgggttgcacgtttcgaggatatgctaacactatacccacagtattctgaagtgcaaaaattgagtagattgagaattttgctcagtggacaagcccgagccgagtttgactcaattgaaccctcacctgtctctctttctgatgctctaaaccatttaaaaagaaaatttgaaaacgaaaatactcggtcaattgccaggcaggcaatggcaagttgcagacaagcaccgggcgaacgtgtttatgagtttgcaaaccgattaaatgaggcagtcagaactgctctatcaggagaaaatgaagagacaataagaagaagacttcttgaggaatttcttgaaaaattaacccccgaattacaatttgaggtcaaggcggggaggccaacgagctattcaaacgcttatgaaattgctcaacattttgagcttcttctcgccactaagcggactaaccaagtgtcggtggcggattcagtcgctgaattgtcgcataaagttgaagcattggccatccgccaacattctgtacctaaaagaggaatagaacggcgcgtctgttactattgtcggcgtccaggccatgttgtaaaggattgtagagacaagaaaagggacgaagaaaggagaggacatggtggtcaaagggaccgaccgttctatggggaaagaaaatggaattatgagagaaatgaaagagaacaccggcataggcatttttcaccccacgacaggccgaactatggaggaaatgagggggaacaccgacaacggcacttctcaccccacaacaggccgagccacggcagaaataatcatcggtcaccaatttcttatgaaggaagggaatatgaaaatgaacgaactcagtcgccggggaggcgagttcgatttggtggccaaagaataggagccgcaaggattgctagcccaatttttctagcattaatggttattctctcattgtttggtgcaaattttgcgacaaattcggtggagagcccaatgatttgccatcccgattctcccgcaactttatggtcaatcccaattgacccgatttgtccaagttggacaccaacggaattgcctgtggcaatgaaattgaacgtatacagagtaaatacggtaaagtacaaaacaaaggcaactgcatgtaaatgcatcaagacaaaaatatccagaaggattggattttttgggggaaaatacgaggaattatcaacagaaaacgttgaaatgcctacggcaatgtgccgaaaaatgaaggattttgatgaatcatctgcggggaaaatggttcaaattaatgggacattgagggccacacaaaattcgttagagcccgggtggagaacctggccaatcggccttttctggagaacagttgaaatcgtaaattgctatttgtacgaaaccgtcgtttttgcacgtcacggcaattcgggaccaagcactcggggag

SEQ ID NO: 57095 - DNA, 578 bp, Heterodera glycines
atgaagtactcgttcaatgtccgcgaaattcaatccctcctcaacgggttcatgtgcattttcaagccccgtgatgtgtccatttcggccattgaaaagttgctgatgcgccgcatttgtgagcaggcgaactgcttggacccgtgccgtcctttgcccaccattgaaatgccaattgttgaagcccacccgaagagtggtgcattggttgtggttggaagaaaaaaacaaattgactacaggtcggtaaaattcgatttatatttgtcctgtttttttcggaaatttaaaaaaaaattttttcgtaaacatccaactaatttgatggttgttttccattttttgaatattctcacaaaattcaaaaatttcagcaaacatccgttgatggtaggccagatgttcaggcccgaagacatgcgcattgaagcgctcaattatttggagccttcctgctcgggcgtatgcggtaaattcaatggatattttctttttttattatgacaaattgtttggtctacattttaaaattttttcggaatggaattttagacatttctatggagaatttattgaaa

SEQ ID NO: 57096 - DNA, 317 bp, Heterodera glycines
atgtctccaaatgaatgttctgaccgtccctttcaacaacccgacaatgtacaacagccgcatcgacaaccagatgaagacgccgagttgcgcgcacaaattgaagacgcggaagaggatttgctcttgaattggtggcgtgaagatccgacaattgtaagcttgtttttcaatttagcatttttaatttcttcacgtttcagattcgttttctttttggacatggacgagcccctgccatagaagccgcgcttcttcaacgcgccgaacgtgaggcagaaattttgcgcgaatatgccgagaatcaacaacaatga

SEQ ID NO: 57097 - DNA, 636 bp, Heterodera glycines
atgtccaatgatgcagaaaaagagttcacaccggcaggcaacccgaaggcaccagcgcttcacatggcacttgactggatccaccgatcgtggcaggaaatttccaaagccgtgatcatcaaatcattcgagggtcagtttaaaaataaaaatgcctacgaaagacgccgaaacttttaagtctgcgggttgactacgccattggacggaacaggagacgaaaaaattgcttgcttcaagccggaaggagcaattggaccgattgggatcaaatttttgcgcgactttagagcaaatgagacgatgaaagatggacgaaatgatcacgaagaagccggcctatctgatgatgatgatgtagagttggatgcagtcggagatgttgatgaatttttcgtttgttaagttttttttatttactgttgatttggttttgttttttgaaaaaaattggtgccaaacaatttcttaaaattctatttatatcccatgggggataaatagagactgggggattatttttcgaactcctcagaaagggggggataattggagactgcgaaattaatagagactgggctataattagagcaaatacggtatgcatgaaaaatacataaaacccaaaatatgcaa

SEQ ID NO: 57098 - DNA, 1033 bp, Heterodera glycines
atgaaaagctatggccaatatgccaaatcactgctcaattcgcttaatggccatgaactgacattggtcagcgtatttttgaccgcaacattcattaacacaattacaattaattgcatggaaacaatttaccccaaagaagtaaatagttattgtctaattaatattttttgaataaattaaaatatttgggcgagtaattattctatttttaggccatttctcgaggcattgatcgaggccatattggcctagtgatcggcatataccaattaagcagatttttcatggcaccaattatcggaaattatgtaaatgatataattttttaaaggcacatacatacaataaattccatttttagattgtaaaaattggaacaaaatttacattttacaccgcactttttcttgtgtccgggtcagcaatttgttttgggtgtgttattttttttaattatttattaatttttatttaaatttgtgtttaggtttctcacctttttgcacagcaatttgactttctttttgtgttctttggtcatccgttttttccaagctgttggtcggacattttttgtgctgagtattttcacactttcagctgaactttttcctgaacacgtgtcgttgataggcgtaagaaaattaaatatttaataataaaaatttcactccttaaaatattaatttaaaataataaatttttaaatgctttttaatttgttttagagtattttggaaacatttgaaggcgttggccaaatctcagggccaatttttggcgcctcattgtatgaaattggcggatttatgctgcctaattttgtgatgggcacagcgatggcactgatggcatttgcttttgtcgctttggcaccgtttccaacggcactcgtttatgaagacgaattgcacaaaaaaacgatgcaaaacattgaagagggcaaaatggaggaacagcagaaaagggtgaaacaaacttttaattaataactttttttaattttaaagagaaaatttacgaaaataaa

SEQ ID NO: 57099 - DNA, 525 bp, Heterodera glycines
atggacatggtgttcgagccgttcagtgtggttctcaaaaagcgcgactgtcaggagattgttgatctgattcagatgctcccgaaaagtggtgctgagatacgcggagcaatgggacggagtgagtgcagcaaaaaaaaatggcaatttaaaagaattaattaattttgatcattcgcactcatcaattattaaattagtaatgtgggtcgctccatcctttggagcagaacaaaaggtcacggacgatttaaatttaaaaattaagttcatatgcttttatttaattggaattgattttaaatatgctatttttcattaagctgacttgtctttgctgaaccatttggtcaaaatcgccgggaattatgcgctggacgacatgatgttggcctacaaaaaagtacactttcatttcatgggttcaccgacttcttcacaagaaacttggctaccctaaaattttgtgtttgtttaattggctttatgatcaaattgaattttcgattatttaattctattaaa

SEQ ID NO: 57100 - DNA, 843 bp, Heterodera glycines
atgacgaaagcggcagcagcaacgacatgggattcaagcagtataacaaagccaacgggaacgacgataacatcaacaacaagtgcaattgtttcgatgttattggcaccgccaaaagctcaactggtgatgaacacttctccatcacgtacatccaccatggcagcagacaaagggcatggcatgtctacagtcaatgaacaaattgattggaaaactgggccgaaagccacactgatcagtgtgccgttgagcgtcgatcaaagatgccgccgcactgatcaaatgccatcattggctgcggatgccgcagcggtgcagcgagagagtgcgtacggtgtgcgagagagtgccattgggggtgcttgcgatgatcacgatcagccgccaatgctgctccgtgccgaagaagcgaagcgagagaatgtgagcacgtttgaggaagaggaggaggaggaagagaatggcaccaccagtgatcaaaagacggatgacaacactgatcagcagccacctcaactggtgctgatgattgcagcagagaaggcagcagaatgtgaggacgacgaatgggcgtcagacagttgtggtatgacgtcaagcttatcatcaacagcggcaccatcaaaggcggcatcatcaaaagtggcagcatcggcattagctgatcagaacaataatcataatgatgatgatgctgtgatcactggtgacgaacggcacgagccgcgatcgcctccgcctaccaaggcgagcaaacgtcggcagtcggtgtacagcgacgaacctagcagcagcaaggacggcacgcacgtcaccggtggcgaacggcaccagccaacg

SEQ ID NO: 57101 - DNA, 560 bp, Heterodera glycines
atggcccccactgctgccaacaaacagcggctgccaatgccgatgccaaccgatttcagtgaactgatgggaccaaaaaaagtgccacagcaacaacaacagcagcagaaacaattggtaaggcaaggacggcattgatctcagcatcctcatattttgttttggatagctttagacaatggactaatcactggtttaattatacaagaaaaagggtggggaaggcctaccgaatttttgggaagggtccggggacatgttaatcgacggttttcttttttgcctttcaaaccgcttttttgcggcgcgctttttcaaaaaataataataatacagtgaagcccggcggagccgataggtgccgtaggggaaattttttttgaaattttaaagaattttattagaaatttgttcaaaataatcctgaaacttttgatcactctcttttttgtggtctcgagaattcggctcaactcccgattctctagttcaagttcgagttcgtcctctcttatcatcaattctcggcacaaaatttgattttttttcaaaaaaataaa

SEQ ID NO: 57102 - DNA, 814 bp, Heterodera glycines
atggtcgagctgtacatgaaggagctgctgatgcaacagaaactccaacgcgaatacatgcttcaacaacaacagcagcaacaacaaactgtgagaatggcacgaaaatattaaaaatttatttttgttcgacccctaaaagcgaaaattttcggaaaaatttaggagcatttcagaaaattaaatacccatttgtgcttttcgacaattaaaactcctttctctggtggaggaaatttccaaatgtgtgccatctttttccccccccccctccaaataattataaaaaaattcttatttcaataaacttatttaatagcccccccctaattagtgcctccttataataaaaataattttaaccttttttataatgactcctttcccgttctctaaaaacaatttgtcaaaaattaattaaacaattaatttatttttattaattatgcccctttcccatgccattttcaatcactttcatattttccggacttttggaaaaatttagcgaaattttttgaaaaaatttggtgagggaggtcttggataggttacttaccaatgccattttgttcagcaattccatgccccgctgcttcctctggcgccctcgcccttcccactgttccatgcccttcagcatcaaccggcagtgcttccgccggcttctgccgctaccgccaccacatcgtctccatttccaacaatggcaccgctccaatttggcaccgccccgggtactgccggaccattcgccgccgcgccgttctgtgccgccaaaccgatggcatcgttttcgtcggtgccggatcag

SEQ ID NO: 57103 - DNA, 328 bp, Heterodera glycines
atggaagtcgaagaaacgaaagcgacaaaattggagcaaatgtttgccaatgtatggcaaaattggagtcattttgtgctattaatgggtttggaaggaaatgcaaaatgttttgatcgggcaaatacatttgtcagaagtcggcctttggaagcaaaggcagagtttcggccgatcaattcgatggactttcattccgacgtcggccgaatggtctgatcatcatggccttcgtcccgttgctccttgctaaccccgatcactttagctgtacaccatcgccattctgctgatggtccgtccctccgccgttcgttcgtccgattga

SEQ ID NO: 57104 - DNA, 331 bp, Heterodera glycines
atgtttcctcatcttcagcaccaacttggactaacagttcaacaacaacagcagcagcagcaacaacaacgaactgtcggcggaacaaagcgacgccattgcgaagaggggggaaattcggtgggatcaaagaagaaattaataaaatattttaaaattattaaatttaatttaattgcaggaaaatattgacatcaaatcagtttcaaaacggtttcatccaatggaggcaaaggaaaatgagaacaatggaaaagaaagtagtaaagaggaggaagaggaggaggatggggccgaggaaagtgtggcggaagaggaggaagaagagtga

SEQ ID NO: 57105 - DNA, 330 bp, Heterodera glycines
atggaaaatgggaaagggaaggcacaaacaaacaaaaagaccgaattagggatgtaagttgtgtgggctaaaaatgccaaatatgggcttaaaatatacactaaaaacttcaccaaaccatacgcataaatgttaattttcagctttgcaaaaaaatatgtaagctctaatcggtcggcactttctcgtcctttattcgactcgatgttcgagaagtagcggagggagggcattcatttgatttgacaatttgacaaatattctatcattcgaaagctgttcatgaagcaaaactaattgttgctaccaatttcaccaaaaaaagagaaa

SEQ ID NO: 57106 - DNA, 781 bp, Heterodera glycines
  unsure (1)..(781): unsure at all n locations
atggccaaagcaatcccggatcagaaagcgaatactgtatcagaaatttttgttgaaattgtggtccatcaacattcaactcctgagattgttgtgactgatcagggaagacagttcacttcgggaattttaatgatttggcaaaaatatatggttttgagcatgtcactacaacaccatatcatcagcagtctaatggaatagctgaaggggctatgcgaatcatggctaatattatttctcaaatagtcaatgaaaaagggaataattgggatgaaattctgccgcacgctattttttcatacaatgtttcaatacatgcagctacaaaattttcgccattttttatcattaatttacgacagccaaaattgccaactgatcggttacttaaactcccatcccccgatgagcttgtgtccgatatttcggtctatacaagaattcagactgaaaaagcagctaaagcgtgggaaattgtgcgaaatgaaattttaaaagcgcaggaaaggaacaaagaagagaatgatcgcataaagaaagcgaatgaaagagaatttgaaattggtgatttagtgttgtttaaaaaagaagttttgggccataaatttgatcagcgttggctgggaccaatgcgttgttgntgggggttgaaaaagaaaagaaaaatgttgttttacagtcaattgatggaagcgctaaattaagaaaagtacatcaagaaaaagtgaaacattttaatggaccagcaattcttccntctaggcagtcagacgaacca

SEQ ID NO: 57107 - DNA, 660 bp, Heterodera glycines
aaacaaaaaaatcgattttttcaagtgtccgtttggggtactcaaacatttatggggagcaaaaatccaacgcagaattaaagtacaggctatagggaagctattcccgaaggattcggtctccccataaatctgggcgcatcggttcggggggactgccccgaaaacaaaaaaatcgattttttcaagtgtccgtttggggtactcaaacaattatggggagcaaaaatccaacgcagaattaaagtacaggctatagggaagctattccggaaggattcggtctccccataaatctgggcgcatcggttcggggggactgccccgaaaacaaaaaaatcgattttttcaagtgtccgtttggggtactcaaacaattatggggagcaaaaatccaacgcagaattaaagtacaggctatagggaagctattccggaaggattcggtctccccataaatctgggcgcatcggctcggggggactgccccgaaaacaaaaaaatcgattttttcaagtgtccgtttggggtactcaaacaattatggggagcaaaaatccaacgcagaattaaagtacaggctatagggaagctattcccgaaggattcggtctccccataaatctgggcgcatcggttcggggggactgccccgaaaac

SEQ ID NO: 57108 - DNA, 270 bp, Heterodera glycines
tcgggaatagcttccctatagcctgtactttaattctgcgttggatttttgctccccataattgtttgagtaccccaaacggacacttgaaaaaatcgatttttttgttttcggggcagtccccccgaaccgatgcgcccagatttatggggagaccgaatccttcgggaatagcttccctatagcctgtactttaattctgcgttggatttttgctccccataattgtttgagtaccccaaacggacacttgaaaaaatcgattttttt

SEQ ID NO: 57109 - DNA, 104 bp, Heterodera glycines
atgaccaaccattcattggcattcattagccgccgcctgggacaatggcacaaacgaaacggagtggattttaacgcgaaatgcattcggagaatgctcttaga

SEQ ID NO: 57110 - DNA, 457 bp, Heterodera glycines
atggatccgtccgctccagcgaagaagcgtggccgaccaccgaaggcgggcggcgtagcgaaaacaattgccaagaaaccaccagcgaccacaaaagcggcgcccaagtcgccgtccaagtcaccagccaaatcgcctccgagttcaccaccgcagccggtttaatttttgggatttcaaattttaatgccggaccatcaattacgcatgtccaccaccaaaacatgttttcatccaaaatttgtttaggcaaagggctcgcccgccgcaaagaacgccgtcaagccggcagcagcgactggacgcggccgtggccgcccaaagggcaccggcacatcggcagcagcgaagaagaaggcggccgcaccggcgggcggaggcacgggcaagcgcggacgcccaccgaagaagacagcgcagaaggccaaggagagcgatacggacgagcacgacgagg

SEQ ID NO: 57111 - DNA, 1197 bp, Heterodera glycines
atgccagaaaaatctgtcaaaatttcgaaaactcttaagtatgtttcttcattctataattttaccttaaaaaggcgaaaagcattgattgctaatactaacaagcaccgaaataatacacactcagttactaacttataattagtccgtattttagagtgataagaaccacaagattagctgaaaaatttcagaatgcaatttctgtgctaattaatataaagacctacctgttaatagcgggtaattgcatgagaaaatatattttaaattatttcgataaatacgaattacagaaggaaatttttttacagtttcagcttttgcattccaatcagggctggctgtgattgaatttccaatcacggaaatccgtgagccgtgatcacggggcttttaaaaaaatccgtgacccgtgaaccgtgatcacggcaccccaaaatccccgtgatttccgtgatccgtgagccgtgatccgtgattataaaaaaaatttttctaatgattttttatttaaatttatttaaaaaacggaatttaatcgcgggaaaaattcccaaaaaatgttttaaagaaacaaaacatataaaccgctttttttgcggcgaccatttccaaacaatgactaagtttacgatttttggcaattttttgaagaaaattagagctttttgtagaaatctccaaggaaaaatttttatttttaactaatttattaagaaaatttttcaaatttttcttaaatttaaccaaaaatctatttatgtagagaaaaaaaaatttcctctaatttgtaagctaacttttgatgctgaaaaaaatcttttggaccaacatgctcagtccttcatgacgatctgaacaccccaaaagatactgaaagtcgggaaaattttagaaaaaattcttagagggttgggaaaattttctgaaaattttgattaggcctgtcgttttaaatttaagcgacggagagaaaaaatagggttttagcagtttatatgccaaaaatggtaatttttctgccattttggggtcaaaatttcaaaaatacggtaaaatgggggtccgtctgccggtggtgccgacaggcgccgccgggaaaaattttgaaattttgagtgaatttgttgacagattttgtccaaaatatgtccaatcattggttaatttattggtctaaggacgttttaaaaa

SEQ ID NO: 57112 - DNA, 1368 bp, Heterodera glycines
atgagtgacacaaatgtggtgaccaatttcatcgctggcggcgtcggcggctcatgcgccgtcatcaccggccatccgttcgacacggtcaaagtgcgactgcagacaatgccaaagccggcgcccggacagccgccactgttcaccggtgcgctcgactgtgtgcgccaaaccgtggcacgggagggattttttgtgaggttttttcaaaattaaaaaaaaaaaaatttgattttcgtccgcttcgagcgtaaatggacagtgattcggagtgggattttctctaaaacccacccaacccctaaatcatcgactgtttaatttgaaatacgtagatagacgcaatttggtcggaaaagcccacttttcaaagagtcacgagatttctataacctgaaaagttgcataaattcgggtgtggtgagaattttctgaaaaatcatggaaaagcaatgttttaatgggttttgggtccgaaatcacgaattttacacccattttccgcagtttctattaccaaacgccaattcatggacctatatcatataaagaatttccttttttttttggcatttcattaacgggattgacacatctaatttgccaaaaatttatccaaatttcaaaatcatgtcccttttctcaggcactttacaaaggcatggccgccccgctcgtcggcgtttcaccactctttgccgttttctttggcggcactgcactgggcaaatggctgctgcagaacgagccgggccagcagttggacttcaagcagaatttcacggccggtgccattgccggcgtgttcaccaccgctgtgatggtgccaggttgatcacttttttaagggctttttacttcttccgcttaaaagttaccgtatttgctaaaataaagccctgcggaccttaattttccaaccccccggcactaattttaggggatggcactattttccaattgatgccaattcatcatttttaggcgagcgaatcaaatgcattctccaagtgcagtccatggacggcagtgccggcacaacgcccaaatacaccgggccggtggatgtggtgcgcaagctgtacagagagggtggcattcgcagcatttaccggggcacggccgccacactgctcaggggttggtggattggggtacacggagtaaaattcacacccaaaatgggtcgattcaattttttaagtttttttttttctgggacgggcattgatttagggtccgtaaattttcgccaattttcaactcatttgcagacattccggccagcggcgcctacattgctgtgtacgaattgctcaaagacaaattttcgggcggagaacgaaacgagctgacgcccatggcaac

SEQ ID NO: 57113 - DNA, 870 bp, Heterodera glycines
gaacaaatttgacggcggagcccaatcgattcagtgcgatcaatcaaaaataactaaaacgtggcgaatttatttgacctcggcattttaaattaacaaatttttatgaaatttcattttttcaaaatctaaattggccaatttgaaaaaagtgtgcggaaattgtcagactgaaccgaccgcggccgcttcatgtggcattttatttctagggcttcgatttttaggtttttacatatttttttcctgagctccccgtggcctgaaacgcacgaaaaacatgtttttttgggctgttgttaagctacttttcgagttattagcacctattttctaggtttttatttttagcacctaaaaaacctaaaaaaattttaaaaaacttattttcacctattttggcattttgcccaaaatttgttaacaaaaatgaaataaaaaggaaaaacagacccctaagaatcgaccgaaaatttttttcaaaaaatatacccctaagaatcgactcgaaaattttcaaaaatatacctttatttctgtgtctttttggcattttgtttgcgtattttgtaatttaattttcccccctctctcaacagaaggcatccgtgatgtgttccgcgaaatgttgcgcgaggaggggcaccgtgcgctgttccgcggcttcgtgcccgtcatgttgtgcgcattccacgccaacgcggcctgcttctccgggcttgagctggcgctgtgggcatttcgccaagcgggcatttgaaaaaaccatttttgctttaattcaaattcagtgctaatttaatcttattgtatttactgtattatgtcgaaaaattaaaaatcttttgctcataaatctcttatgtttca

SEQ ID NO: 57114 - DNA, 182 bp, Heterodera glycines
atggagaaggcctgcaaaatttggagagattatatcgattttagtgcgctaggttcgatgaaacttttaaaatataagcctaaactttttggcttatttaaaaagcaattaaaaatttttaaaaattttattcatatcccttttgatagaaaaagcatcagagagccttgattaacttttaa

SEQ ID NO: 57115 - DNA, 65 bp, Heterodera glycines
taacttgttatgagatgtacaaaaataatttcataattttaaatataattttatagaattaggtt

SEQ ID NO: 57116 - DNA, 1782 bp, Heterodera glycines
atgaaattatgggtgcagaagcattcgacaagtgaggatgccaatgaaaataaagacaaaaaattgatttcttatggacaaaaatagcaaaaaaataaataaataaataaataaaataaatttttaaagaattttatgacttggaaaataagtgtctttttagttttaagcattcaattgggctatgacgttactcaaaaaccatcaaaataaaaaatttttttgatataactttgctcaaaagtaaattaaattttaattattaatgttattcgatagcccaaagtgttttctattatcctacaaaatttcaaaaattttgagaaagtttaaagaaagttatgaccaaaaatgttcaagaaaacttgctttagtttcgaaacttcatgaatttttttgaaatttagcaggataatagaaaacacttagggctatcgaataatatctagattctaaaatttgattcattttgggcgaagttatgaataattttctgccaacattttttattttgatggtttttgagtaacgacccggcaccattccattctaccaaaatgcatttagtgttctgtttggaaaataaggattgagtcctgtgccttctgttttcccgttttggattttctaaaaacatttcgtcgttggccgcttaacagagtggtgccaaagtgacagagaccttagggatgtgcgagagtctcggttctcgtctcgggaaatttctcgggtttttcgcttctcggtctcggtctagggtttttcgtctaggaaaaaacccctaaaacttcaaaatttgacccaaaaattaccattttctgtgaaaatctcttaaaaagggtcaaaattccaatgtttcctaccgcagtgcccatcgcggtggggtcaactccgtccagggacggaaggagaggaacagacgccggaagggaaggcaaacggctggggaggacgaacagcagctggaaataaatggcatgacatatgccattagtatggaatgatgaaaacaatttatggcacttttttagttttttgggctccgctgaaaaaaacaaagaggaacctttcatttttaaaatttcacacataactattatgcttactgtttaaaattcaccggctcaactgctggagtacaaacggcgatattaccgaacctttgaagggctctcgaatgggaatttttgagggtttaaaacttaaaatttgacagtttttatccatattttggtccatatttggccatttttgagctttttcgtccatgtgtttggcattttagtccatattttagtaaatttttggggtttttttagtccatatgatttataatcctaattatcattttcagatcactttttgtatgatcaagcgaagacgaactttaagctcgaagatgaagtcaccaaattgctcaatttgttgatgattgacgcgtcatttgatctcgaggcgcgcaaaaagtgcctggagacagcatttcaggtccaattccgcaactttgcagcgatagcgattagccaggagatggatcttaaacagatccagaaatatgtgtgtgctccgttgagtgaggtaatggcttttcgtcaaatggatgggatcagagactattccagtgggtggtgcgccggagggatatacatgcatcgctccctcccgtccaaggcgccaattccgtcccaggcatgtttaaaaaacatcataacttttttctcagttggccaaatttataaatttggcaacattcgaaagctttatatgtttagaagctattga

SEQ ID NO: 57117 - DNA, 340 bp, Heterodera glycines
atgtcaccgatatggccaaatttgtcgccaaaaatggcacaagcattaataaagttagaaaattgaatttgttcattttctattaaaataaataatacatttctttaattattttaaaacaattaaaatattttagaaaatattttttctattttttactttccaccgtccgcgattaagataattttttagcaggaatatcgcaattttcgggggaattcttaaaatttttttttcaggtttttgtgtcttttatttttcttaatgttaatctggacggtatgcttgattaaaaaaaattcagttttacaaatctatttgaatacaaaaaacacatata

SEQ ID NO: 57118 - DNA, 102 bp, Heterodera glycines
taaactaaaagatttttcctcaacacaccggaagctcagtgcgtacaattgtgctcaggaggccaaccattacaattcaggaagatggacgcattcttattg

SEQ ID NO: 57119 - DNA, 73 bp, Heterodera glycines
atgcccaacagatacaacaaacacatggaaacgaatctaatgggtaaagtaattatggttatggagtcagaaa

SEQ ID NO: 57120 - DNA, 965 bp, Heterodera glycines
atgatcagaagaggtacaacagtgattagaagaggtacaacagtgatgagaagagtgattagaagaggtacaacagtgattaaaagaggtacaacagtgattagaagaggtacgacagtgattagtagaggtacaaaagtgataagaagaggtacaaaagtgattagaagaggtacaaaagtgataagaagaggtacaaaagtgattagaagaggtacaacatggtatagtgcaacagtgattaaaaagaggtacaactgtgattaaaagagatacaccagtgattagtagaggtacaaaagtgattaaaagaggtaaaacgtgattaaaagaagtacaacagtgattaaaagacgtcaaaagtgattaaaaaggtacaaaagtgaattaaaaaaggtacaacagtgattagaacaggttcaacagtgattagaagtggtacaaaaggattagaagaggttcaacagtgatcagaagaggtacaacagtgattagaagaggtacaacagtgattagaagaggtacaaaagtgattaaaagaggtaaattgattaaaagaagtacaacagtgattaaaagacgtcaaaagtgattaaaagaggtacaaaagtgaattaaaaaaggttcaacagtgattagaagtggtacaaaaggattagaagaggttcaacagtaaatagaagaggtacaacagagattaagaaaggtaaaacagtgattagtagaggtacaaagtgatcagaagaggtacaacagtgataaaagaggtacaacagcgattagaagagtgattagaagaagtacaacagtgattagaagaggtacaacagtgattagaagaggtacaaaagtgataagaagaggtacaaaagtgattagaagaggtacatcatggtttaaaattaaataaataatgaaaagtttttataaaaatcgattgcattttaatttaaaatttttttata

SEQ ID NO: 57121 - DNA, 403 bp, Heterodera glycines
atgtgggttggagttcatttgagtgtgagcagaaaaagagatagacgttttttcaaaattttcagagccaaactcgcccagaaagaaaatccagaaaaattagggtcgtcgctattattccgaaaatgtggttggagttcatttgagtgttgagcagaaaaagagatagacgttttttcaaaattttcagagccaaactcgcccagaaagaaaatccagaaaaattagggtcgtcgctattattccgaaaatgtggttggagttcatgtgagtgttgagcagaaaaagagatagacgttttttcaaaattttcagagccaaactcgcccagaaagaaaatccagaaaaattagggtcgtcgctactattccgaaaatgtggttggaattcatttgagtgttga

SEQ ID NO: 57122 - DNA, 836 bp, Heterodera glycines
attgagaaacggcgtgaggcggtcagaaaacgaatttgcccgtgctttttgagactcaaatcggcgattgacgaccaatacaacgaaaagaaaaaggttgtcaagcgagagcaaaataactatgaaaataatacgacaaaaaatcatagactgatgaaaccataactttgatgttgtcatatgacaaaactgatagtgtatttttcgctcattatcagcacctttgacaactcatgagtgaaataaaaaatcgtttaaatcgggcattttatattatctctaccattaccccacaaaaataaataaaacgtaaaaaattaacacccccgcctttcacagaaattggacaccgtccgttctctccgtttacgcgcgttggagcgcggtcgggaggccgaattgagtgcagcgcggctgaatttgcatgagttagagacgacggtggtgcggcaccaatgcgaaaaaatggtggaaggtaaaatggagcaactcaaagcggagacggaagcggtggaaggtgtgcaattttatgatttgggacaacacttaccgaaacaccgaacccatgaataatgccttatttcttcgaactaactcgaaacccccttaaatgtcgttttgattaattcgcttttaatttcgaattccctccagttttaccggtgaattgttggttcaaagactacgtactctcaccgcattcttgaatttttacaatttaataaccgtaaaagccttttcagaaatttctacaagaacttttcaactcgaatttgacaaaatgcaatgatgagtacaaatctcaatcgatgaacaaatatttggtggaatgcgaa

SEQ ID NO: 57123 - DNA, 1079 bp, Heterodera glycines
atggcttttagtggtattgcggcaactttattgaaaaatggacgaactgttcacaactgttttaaattaccattagatttgaatagcaattctttgtcatctattgaacttaggtaattctaaggaagcgaatgaaattcgccaaacagatgtttttatttttgacgaagcacctatggcaccaaaatatataattgaaatactaaataaaaaacttaaagaaattcataataatgattatatttttgggggtaaaattatgatattaagtggtgattttcgccaatgattacctattaaaaataaggcaaccaaagccgaaatactagatttattaatacaaaaaagtgaattatggaataattttcaaatttttcatttaactcaaaatatgcgttctgaccctttaaaaataggaaatggtaataacggtgatacgtttttacatcttcccgaaagttgcgatgtcggaaataatgatttaattgacgaaatttttggagaaataataaaaagaaaggtttttttgaaattgtgtaattactgtattttagctccatataacagagaaattaactgttacaacgaaaaagttttgtcaaaatttccaggagaaaattatatatttaaaagtattgatgatgcagagagtaaaggcgctcctattcttcctgaaatactcaataaactcgaaacaagtagtctcccgaatcatgaacttaaactaaaaataaattgtgtaacaaaattaattagaaatttaaatgttagtgcgggtttatgcaatggaacacgtcttcaaatacttgatattgggaaaaatgtattaagagtaatgattttaacaggtgatagaacgggtgagatcgattttattccaagaataagtttaatagaagataaaaaatttccttatgtacttaaaagacatcaatttccattaaggttagcattttgcatgaccattaatggagcccaaggacaaacttttgaaaaaattggtattgatttatcaagagaggttttttcacatgggcaattatatgtagcataatcaagaacacgaaattgggaaagaa

SEQ ID NO: 57124 - DNA, 7556 bp, Heterodera glycines
  unsure (1)..(7556): unsure at all n locations
gcccgcgtattcaatgtaccctacggtgacctgccctccgacacttgcactactacccccaccaccacgccaacccaagggacgcacaccgatgaggataaacaggacttgaagagaaaggcgaaggtagctcttgacttagtggaagctgggttaatggccgatgccatgcaggatggcgcgcgttggaacaaggccaaaacggcaatcaatgtactcggaaatctccttttagcggaatctctggacaaaaaaggtgaccaatagccctgtggaggaagaaaaggtgcaggaagagcccaaagaaaaagaggaaaacaaggaggacattggagacattgacaaaacacttgatgagttcttcaacagtattaaagcatccacctcaaacttgtaattcattttgtccctaaaaatgcttaacacccaatcattcaccaataaagatatttgcttcaaactgccgtttggtctaatcatttcgggtccctcttcatcggggaaaactgaatttttattaaaatttattgctgaatcggaccaattgataatccctaaacccatctccatgctctattgttttggtgaaatgaattcggcggtgccggctctccaaaaggcgggagtcgatgtgtatgcgggagttccatccgaggaattggtcaagcgtttccctaagcctcttttgctcattctcgacgacctgatgctatccattgatgagaagtatttgtccgatttgttcaccaaaaagtcacaccatcaccaatttgcggtggtgttcgtcactcaaaatttgtttgagcggaagatcaaggtggcccgcatgtccgctcagtatctggtactgatgcgggcaccgaattcccagttgtccattcgcaacattggcgttcaactctttccacgacaacttgattttttccttgatgcttaccgcaaagcgactgcccgtccctatggctatttgttgatcgatatgcatgcttcatcggacccatcgttacggcttcgaacaaacatatttaaagatgaacaggaggaagatgaaggaacaattgtgttcatccccaaaaatggagcaacataaacaacaacaacaacaagtaaatattggagagctgataaaaaacaattgcgattggctctgtgccttggccaggacgaaatccgctaaaaaatgtaagaaactgatagggaaagcaaactccgaacagctgctcgcactggtggaaatttgtctgaaccttgtcgcttcacgcttccgactctcaactcgtcagaaaaagcgactgatgccccatgtggatactgtacgccgaatgagcagagcgagaagtgagcggggcgcccggcgtgtgcttgtccagaaaggcgcaggatttggaggattgtttgctgccgtattaacccccgttctaattgaattggcaaagtctatcatgaacaaaaatgcataaatacccatcgacattgttattttgtatgcttccatcattcattcattggcgataaatggcgaataaatttttactcgttcctcaagaaatttatcgtggtctcacctccgtgtatgacacgggcgacctcaatctggatgctgttcgacacgatttgaaccgagccaggggtgagcgaacaaatccctcaacaaaaaatgtccactacaaccaacagctaaggcgctatttgaaaatgaggagggatcttgcggacagaccagccaaagttgagctcaccaaaggaatcagtgtactgatgaggagaggtggtgaagatgaagatggtgaggttgtggacactccacgccgaccccctgctccaccaccaccacctccaccgccagggagacgtcctccgcgtggaccccctcctccaccgactgggagacgccctccctctggaccaactactcctcgtccctccccacccggaagtcctccgccccgtcctgaacgcccccaaagaccaagtagagcttctcggagaggtggtcgtctggagaaatggcggaaaagtcgatacaatatacagcaacggcagccggtggtgcgggaccttcttgcagaagcagctgctgcgccattgcccgaaagtgacgatgatgatgatgagtacatgttggagagtggattcgcgttgccagcgccgtcacaatattatggcgatttgcctgtgctgcccgacaacgcgaacgaaattgaggagatggacactgctcagcacaggagtgccaccagaagaaaattacaaaaggatgaggcaaatgataatgatgatgatgatttacgacgcaaaagatttttggtttatcaccgttcacctccacggctcccatccccgcctcgtttgaaaacaaaaattgaaccaagaccacctccaccgcgtcctaccgccaagagagaaaaacaacaggtaaagctgaattggaagaaaacccaacaccctactccagcgcctcgggcgaaaagagagccagaacttaagctggacccgcggccatccacgtctaggcaagccgggtacttccctcccccgacaaccaaaatagaaccaaaacatgcaccaacaaagaggcccgtaccataccgtatcccggaaagagagccaaaaatcagagaaaaaccattacagcaacaacaacctcctcatcctactgctgtcgtcgaagaaataccctatgttcctccgcctaggagggggaccaaacgcccccaccccgtaaatgatgagaatggtgaggtgcacataagaaaacgggtgaggcaaccgagaagggtaagagtacagtattcgccagagccaggcccttcaacatcagcacaagcttatgaacaacaacggcaacaacgtgaactgtttgccattccgtcaaatcagctgaccatgactcagcggattgaacggctatacatcaaatgcaaccattatgcggatcgtatgggcgttcggggaaatacaattaataccgcaaacggcaagccgttggcgcatagcaatttgcgaatggccatcaagtatataatagaccggagagcgggccgccccaccattaaaccaccaggagcgaacctattggaagagcggcttaggaaggacccaattttgtattcatggacggccccaccaaagagaccgtcacagagcaaaaccacccggacggaacgggcaatcaagaaggaatttcgcccgaaaaaatggagctgatcaacaccactcttgacaaaatgtacaatgatccatcatccccagcggcattcgcaggtgttacagcgctgtggaaagaggcgcgaaagaagattaaacatttacggaaaaaggacgtacagcattatttggatggtcaccgcacctacactctgatgcgccctcgcagggtgcgctttccaagggccaaaactgttgcagcgggattcatgacagatgtccaagtggatttggcggattttcaatctctttcgcgccacaatcggggtcaccgctacctacttgttgcggttgatgtcctctccaaacgcctgtttgttgtaccgctgaaaaataagcgagccgaggagatgctggaggcattcaagcaactcatcgaccaaatgcccatggtgccccaccgtattttctccgacaaaggcaccgagttcaaaaatcgattgatgaaggaattcttcgaggagcgggagattgagaagcatgagcctgtccattcatccgtaaaagcgtcggttgcagaacgagccattcgtaatgtgaagcagcgactgtaccggtatttcgcggagaaggagacgctgaactgggtggatgcagtacagaaaattgtggatggaattaatagttcacactctcgtgttcacggtatgcgacctattgatgttgatttttcaaatgctcagaaggtgtggaaacgaatgtaccgtcccctatcatttttcaaaaaaacgccccgcttccgtaaagatgaatttgtgcgaatgagcagagagaagggacaatttgagaagggatatttaccaaattatggagacgaaattctcgagattgatgaggtgttgaaagcggtgcgcccaattcgatacaaattgcgggatgaacatggtgagaaattcaagggcagcttctatgagcaggagttggcgcgcgtaagaaaggacgcggatacaagctaccgtatcgagaaggtgtacaggaagaggaaaagaacggacgggaccacagagatgcttgtgaaatttattggctatcccaatcgggagtgggttcatgagtcccaacttgtataaaagcgttcacatttttcaacatttatgcagataaacaatcatgtcgaacagtttctttgtgtttttacctagtaatgtgagtgattaccctgacaatcagccgaataaattccgtgttcggcttccaaaacctttacattttaacggctcgtgggtgtgcggactgcacagtatcagttacccctactcatggtcaaccattggcacattggatgagcaatggattgacattcacttcaccgaccgcagagcgaccgatgaggacagacagcgagtgatcagagtgccggtgcctaaggcatcgcatagtcgggttgagcagttgagagaatttttgtctgtcactttgagtaatcatagcggtgcaaaactacaacctctccctcgtgaggtggaagagaatcggaatcgtacaacaacaaagcctctcggctcgccaccgcctttgaaaagacagaaaagagatacggtgtttgacgtgagtagaaaacagattgcccctcctccattgcataatgaaaatgatgacgatgaagaaattattgaggagtcaccacctcatcatgaagaagatgatgaagggccgattgaagagtcaccacctcatcatgaagaagaagatgatgaagggccgattgaggagtctccgccgcattacaatgaagagcaaaatgatacagtaacagctcctgtcacaccaaaagtgccggtaccagcacctgtcacaagccctgcgaaaccaacgacagtaaaaacaccagctactccatctgtaacaacaccagcgcctcccacaactgcaaagccgccagtaaccgtcccttctccaaccacaaaaccaataacaccgacccctcctcctaccacaaccacacctactccaaccacaaagtcaacaaccagccctccacctaccacaaccgtccctccagcaatcacaaagccatcaaccggccctccacctaccacaaccgtccctccaccaatcacaaagccatcaaccggccctccatcaacagaaaagccaataacaacggtgcctgcaccgccaaagacaacaacaacaagtacgccagcaataagtgcagttcctagcccatctgttaagccgacgattccggtaccgccggcgcaactaaaaagctcggcactgtctccaaaatcaaaaaccccaatttctactgttaagccgccacttccagcgtcggtttccgctaaagtgggcactaggcctcaaacgccgccgtctcctaaggcggaatctccaccacattatgatgaagaagaagataaggacaaattaactgtaaagacagcaacgcctgtaaaaccttctgccaaaccgataattacggcgcctccagcgcaactaaaaagtccgacagcatctcaactcaaacctcaacagccttctaagcctcaagctccgccgtcaggctctccaccccgttttgaagaaacagaacatcaacagccaccaccaccaccaacatcagcagctcaaatagacccatcgcgtttgattcacacgctcgacccaccaaaaatattttttagaactcctccagctaatcaaaaccctctgacatatgtgcccaattcagtgtttattctgtatgaaaccaatatggaacgtttcaagctggtgttcaatgaggagatcatcagccatttgtccttctcaccacagctcgggtatgtgcttggctttgaaaaccctcagcatgtggtgtcaaatgaagttgccaaatacgggtttgatctacgaggtggcatatcaagttttgcagtctactcaaaaggactaactgaaaatatgataattggcaattcattgagctccttgctccgggttgtgtctatcagcggtgctatccccggggagtataatgagaagatttacgactcgccaatatttgcgcgagtgttgccacgtgagatcaacgagattgagattgaactgcgcacaatggacaaaggtcgtctcgtgccattcgcctatgggacaacgatggccgtgttgatatttaagaaagtgataaatttttgatttcattcattttatgttttatttgtcatacgttaataaaaatggttcatattgtgtttgacccaagcattgcgcagtacgacgagtatgtgcagtacggtagcggattagaaaaggacgattttgactacttcagggggtcaagcccctttcagagggggtacggtattcaacgaggggcgggcgttggagatgtgtttcgtggactgtggcgctttttcctacccattcttcgccgcgttggcaccacggtagggtcggaggcgctaagcactgggcaacgcgtgctggagcgagtcgggaatgagggggtgccatttaaagaggcgcttgtcagtgagggaaagcgaggaattgataccgtacttgacaaaggaggactaccaaaacagtttggaagcggaaaacggagtataaaaagaaagagaacatatgtacatggtcatcagacactaattggtcgacctattgtaaaacaggcaaaaaagcgtattcgatcggacgcctttggactttactaaataaatgacatttcacaaaatcgacaacgactcagtgaactcaatcaccaatgcattggactttttccgtataccccctacaaatgtgagcgtctcatcttcaaaggtattcgagcttctgcccagcaatccgcttaccgacacaccctaccacttcaaacttcactccagtcaaaattacattgacctctccaaatgctatttgctcaccgagtttcgaatccgtaaggaaaacgttaatggtcaactcgttaacctaggcattgatgacataaatattgcgccaattcaaatgatcggacaaaccttcatccgtaacatcaaaatgagcatcaatgggcgcgaaatttttaatgcaaacgccctgatggcctacaaatcatatttctcacatgaactctcctattcaacgaccgcaaaagactcccatctgaatgcagctgggtacttccgggacacgggcgatacattggagatgggaggcggatgcacagcgcgacgcgatttatttgcgggtagcaacgtagctcaattcattgcaaaaattgacaccgacctgttcaatcagccgttgtatctgatcaatttttgtgaattggacattgaaattttgcccaacgacaacgactttgtgctaatttcaccagtcgtaggtgcacccanaataacattttgaggtcatgggtttgaaaatgtatgtgaagaaag

SEQ ID NO: 57125 - DNA, 390 bp, Heterodera glycines
atggagcggcataaacaacaacaacaacaacaacaagtaaatattggagagctgataaaagacaattgcgattggctctgtgccttggccaggacgaaatccgctaaaaaatgtaagaaactgatagggaaagcaaactccgaacagctgcttgcattggtggaaatttgtctgaaccttgtcgcttcacgcttccgactctcaactcgtcagaaaaagcgactgatgccccatgtggatactgtacgccgaatgagcagagcgagaagtgagcggggcgcccggcgtgtgcttgtccagaaaggcgcaggatttggaggattgtttgctgccgtattaacccccgttctaattgaattggcaaagtctgttatgaccaagaatgcataa

SEQ ID NO: 57126 - DNA, 954 bp, Heterodera glycines
atgcgcgccattctcttcctggccatggtttgcttggtgatggctgttattcttgagacaggtggccaaaattaattaaaaatttaaaaatattttattattttagccaactcaaaggcagtgaaaaaagacaataagaaaggtataaataaattgaaaataaatattaattggaatatgcttttaaaggagcaattacaacgccagcaaaaggaaaagcggcgccgaaaggagcagcgaaaggaggtaaagcagaaaagagagagggactaattaatacaaattaactaattaatcaaataattaattaaggaattaaaaaagacgcaaaatcaaagggaaaaggaaaaaaggacgccaaaggcaaaaagggtaaggattttaatataaagcgaaatttaaacagttaatttttgaattttagacaaaaaagctaagccagccaaaggaaaaggtgcccctaaaaatggtaattattattaattttaaatgctaattaaaatgattgaataaatttagataaaaaatccccagcggcaaaagccaatgacaaaaagagcccaagtaaataattaattatatttaatattgtgccaaaattgccaatttgaagccaaaccaatggcagcagtgaaagccgtgccaaaggcggcggagaatgctcagaagggaccgtcgagtgcggaagtggtggcggaggaaaacaacttggacactgaggcggtcgacgacttgggggcggaagagtcggactttgaccaattggcagaggacgaactgctcgaggacgacgccatggacggcgaggcggacgaatgggaaggcatgggggaggagacggagatggacagccaaatggcactctgatggccaactaattggacaaattacaaacggaacaaaacgggacaatgacacaaaatattatttatcatttttggcatatcattgaaa

SEQ ID NO: 57127 - DNA, 56 bp, Heterodera glycines; identical to SEQ ID NO: 52733

SEQ ID NO: 57128 - DNA, 995 bp, Heterodera glycines
ctgatgaccgatcgcaaagcacgcccgggcccggcacatccaaaattgcggaaggcgtcaaaaaccgaagttcaaaacgtagtcgacgacgtgtcggcggtgggccccatggcggtgccggtgaagacgatgaggactacccatacaagccggacgaacttgccttcaacaaaacgtcatactttaaagtcagtgccggacggacacgattttttgaatccgagaaaaattgcatctcttaactccgaagttttttggaaattattttttaaattttttgtatcacttatttttttattttttgcaatttaaaattccctaacccgaattcgaacaaaaattagatctttttttttccaaaatatgcgtttttaaattcatttacatttttgatcgatttaacgcattaaaaaaaattttttttggtttatataatattatttcccgtcaggttgaaaagctgttggcacaatttggttggggccgttgggctgtgctgaaagcattttctgatttgactgaacatgaactggaacacatcaccaggcaattttcaatttccttttaccccaattgttgatcattgatcagggggtggggattttggtaaatttaaaaaatcacagatttcatgtcttgacattttttctggagaattccacctgtagatcactgatcagagtgccgttgccattctcctaaaattgattcaacaaattattgggtagttatgcccattgattttgacaggacactgttgttgcattgtgttcgcgaatttcgtggcgatgagaagatccgtgaatacgtgtgggcactgatcactccgtcgcatcgcacacaaaaaaaatcggcaacaacaaaaattgatccggatcaaaagcagcagcaggatgaaaaaaagacagcagcggcaactggggactcaaacagccgctaccaccagggatgggccgctttgcctgaatacaatgtatgtcgtctaatgctcatct

SEQ ID NO: 57129 - DNA, 351 bp, Heterodera glycines
atgcctaaagcagccaaatcaaacgctgtgttaaatcgtcactggatttcaaagttcccggaaggaacttattcaactgatggaaaaattaatccgggactttacaaattgattgatatcgccaaaattttgattggaggtcgggcgaaaattgacaaagactgatattaaatatgattttttttttttgagtaaatacatttggtttttccaatttttagcacatatttttgcattttttaacacatatttaggcctttttttttggtttttagcacatattttattacatatttcaggatttttagcacataaaaatcccagccctaattattatatataatcacagca

SEQ ID NO: 57130 - DNA, 405 bp, Heterodera glycines
atgaaaaacacacgaaaaacagtgaaaagtcgtcgacgccggcgggtgttgtccatgagaacaacgaatttggtgtgtcagtcaaccaattatggcattaatcgagcttaaaataaaggcatcgagatcgtcgaacaacagttgccagaggaacgacagaatcttttgcccgcaaattcggccaccgttggcatcggctcggactctgtccgtttggcctacgaactgccggaagcattgccatcgcaaagtgccggcgaaagtgacggggaaaggaccaatggaccgccgaattgcaacacgaaaacgacggaggaacagcaacaacagaccgatgcggtgcttctgaatacgaatgtgaccgccgaactgacagaattaatggccaaattgaaggcattgtaa

SEQ ID NO: 57131 - DNA, 1459 bp, Heterodera glycines
atggcctccaattaccaagggtttggttttacaccattatacgaaaaggaagaacccgcctcgttctatgtagacaaaaagaaaatcgaagaacgggttagtctctctaagccattcgcacacatttcattcattgtcgtcatttctgatccaggctaagctcggcgtcatgctcggcgtgtaccttccgaccatccagcacattcttggcgtcaccatgttcatccgtttggcgtggatcgtcggtgtcgctggcgtatcgcacacttttctgatgctcttcatttgctgcctttgtgtaactttgcgttctttcaattcactttttcacgtgtccttcagacgtttctcacctgtattagtgtgtcagcggtggcgaccaatggcgtcgtggaaggcggaggagcatattttatgatatcacgcaatttgggacctgaatttggaagtgcggttggcattctgttctatctggccaacactgttgcaacttccatgtatttggttggaggaattgaaattcttctggtgattcttccggtcaacccattgacttttcatccgtaaattttcagttgtacctttgtcccgggatgacaattggcggtaaaaatgcgcacacggacactggtgagttacatcagcacacggccaaggggccaaaggaagtggcgacagaaatcagcctgggggagggcgacgcaaattccccccttgaaaagtcgcttattttagtaacacaaatacttaccctcgacaggtttcttggggatgatgtccaacaacatgcgtctgtatgctacttttctgctcattgttcagttcaccatcgttgcaatgggtgttcgttttgtccaacttcttgcacctgtaacttcttcgttttctttcccctaactttgtccccctaatttccctaaggtttcgctcgtctgtgtcattctctccgttttggcttgttacgctggtgccgttgaaaaaacgatttccggaagcggacaacagtatcttttgaggaagctgtacacttcaaatcattgcattcagagtttgcatgatcggtgaccatttgcttcaaactgatgcagttttgaaaggcgtgttcaaaaatcagtccattcccgagggagtgtccgtctgcgattattgcaactcgacttaccttttagacctgtgatatattttttcttttttaaaattttcgacaacctttaagggttatcaaattttctgctaaggacaacaacagtcaccttctgaatgcctcctgtgtcaatggatttcccggttttgccactgacactttttggggtcagtgatggtaaaattttttaattcccatgcatttccctcaattgttacaggcaatttcaatcctaattaccccgactttcatgaatacgccgtaggaaagaaagctgacgtttccaaggaagtcttccaggatgtcaagacgtaa

SEQ ID NO: 57132 - DNA, 304 bp, Heterodera glycines; identical to SEQ ID NO: 51570

SEQ ID NO: 57133 - DNA, 105 bp, Heterodera glycines
aaaattcccctcaaaataaaaggtctattgcgcaccgccctccctatcatgctcgagagcatttgtatgtgtataaaatttatcaaaaaaagagatagcattttt

SEQ ID NO: 57134 - DNA, 805 bp, Heterodera glycines
atggagagggcgtgtgctcaactcgagtctcttggcaaagtgttggacaatgccacgccctcttcggttggtacaaatttctttgccgatcactcttatcaattcctatcgatatctgttccattttcattcccactccatgatttttccctttaggtcaccctctcccatcgtttgtgccttctcttcgcctccaatccaacgcccttttggacggtgctcaaatggcatgccgatgtgctcctttcgctcggctgtgtctctgatgcccttcgcattttcgaacggctccaactttgggaggaaactgtccaatgctttgtgagtcttcgtcagtcggaaaaggccgaggcattggtgcggcgtttgttggaacagcgggaggaaccgttgtacctttgtttgttgggcgatgtgacgggcgacgcggagtgttaccaaaaggcgattcgggtgagacgcgaaaagcccttttttggtgcatttgatttttacattttacaaaaaaaggggggtccggacgatccgtcagtggacaatccgtcagtggataatccgtcagtggacaattcgtcagcaaattttttatgagcaatgatcaaaaattttaaaaatgattgttaaatttaataaatataatttttatagatcttaacatttctagttactttatagtttaattaattgacaatttcgagaaattatcatttaattcttttaaaatggttatttcatatttttataaaataacacaaattattaattcacatttttagcgacttaaattaatttcacatgattttaa

SEQ ID NO: 57135 - DNA, 466 bp, Heterodera glycines
atgggagctcaggaaaatacaggtaaaaacctaaaatggtatgtatccctaatcattatatgcaaatttccacaacaaaaaccataaaattgacacaaaataataaaaaaaaatctcagaaaagataaggatttttatttaaatctcagctaatttttagagttgtaaataaatcagagatcgtatttgtccttatttctaagaattctccttatttcagccaaaaaaaaattttttcaatgtaatcactgaaataaatataaagtcaaattttatcttaattttatctccgaatattcgagacattcctccaacagattgccaatttcacacgacagcgaaaagaattggcagtgcattaattgcaacaaatgaaatttgtagtaattgggaatttagttaatttttctaattatacacgggaaagagagactccatctgctgactgaaccaaagaaaaaataaa

SEQ ID NO: 57136 - DNA, 1315 bp, Heterodera glycines
atggccatcaacagagaggccacccgtttcggcaccgaggcgatgatggcacaacgaccccagcagcaaatgatggcacgtgtcacccttcagaacattgccaaaaatgcgggccacattgacatcaccggcaagctgatcggaatagaggccaaaacggtcggattggtggccacaccgacgccggcgccaggtgagtgggcattgtatcacgacccatgggtttggaattgttttcgttgtttttactagagcatcactcattctttgaggaattgacgactcaccactgatgacctggggagagattgagggcactccgttccgactcgacgcccccgacattcagccgtcgctggaggatgcgcccgcattccgagtgagtggccgactaattgtcagcaaccgacacgaacagaattcggaaccgaaaaatcccaaattttgtgcaaaaattcgattattcctttgtccctaaactttgttccattcatttttcagatccccgaagtgccaattagggagaaaatcgctcaaggaattgccgagcaaattgcgtctcgttaccataacaaacggaagagggcaatggaccaaatccaacaaatggcgccgtaagaggcggaagagatgcctttaattccgttgaattgtagaaagacgccaaaattcaattctgtgcgctcttccggcggtcgtttggccacaatgtctcctgccgcccgcagtcttttgggcgataaacttggcattcgactgggcactgatcggatcaaagtttctccaagtccgagggggtcagttgaatatttgttgtttaaatgtcgtaaaatacaattaaatcctcgaatttaagttcggcttcgagaacggtcttcagcccggcaatttatcagatgatcaaagtgaagaatgagcccaagtcgggcgcaacgacgcccaaacgggcggcagcgacgccgactttcgagcaggttcatcagttacggacgacctcctgagggtaatgacgacaatcgaagcaaaaaagcgggtccattttatttagaattccttcacctggtccttcaacactaatcaaaaacaaagaacaaagagaagcgcagcaaagaaaaggtaaataatgtcaacaaaaatcagaaaaacattcgaatggctttaagtttcggaaacggaagaaacccagcaaaatatgggaaaaaggccatcagctgcggatttcttctgatgtatgaattcaaatctacatgttctcctagcaagtgaaaaagtgacgtattttcaattatgtttttcccatttattttttcaacga

SEQ ID NO: 57137 - DNA, 606 bp, Heterodera glycines
atgtgcgcctacaaagtggtcaccgtcaaattcgattggtggtgcttccagacaatggtggagtcttacatccttaaggtgggtggtgcccatgcggggaataatctttcgattcgtctaatttcagcaattttcccccttttagcagtacgcccgccttttgtgcaagttcaatcgcgaggtgttctgctggatggaccgttggtacgggctgacgctggcgcaaattcgtctgatcgaagaggagacaaagaaggcattggatgaggtgggcttctactctgccaccgtccatccaattccaccgctttacgtaatcgttgtccattttgctcagatgaccggcaggccgcgtggaatgtccggctgaacgctatgatgaaccgcgagtgacgtgccgatgacgctgatctgtttgctcatcatattatatcgtgccgatgacgctcatctatttgctcgtcatattgtatataatatttgtcacaccatttgtcctttcacctccacgcattcatttcggcacttattgtttactgaacacactcccaatttcctcctgattgatatgtatgtattattgtgcttatgttgacagaaaataaa

SEQ ID NO: 57138 - DNA, 1327 bp, Heterodera glycines
atgccgttcgccattgaggagtatcaaattggccaattgttttctgtgaccgaggcatcgcgacaggttggaggaacttgcgcaaatcccgtggagtgagcggcgttttatctgctttttcttccttttacaggagaccggcggtggcgaaggcgttcaaatggtgcgcaacgagcccttcgaaggccaaagtctgttcaatggccgcttcacgtccggacagttcacgcacaaaatcatccacttagatacgtgagttttagagggaggcgcggaaatgtaattaatgctaattggtcgtctttttttctccagaaaagtgcctgctcttctgagggcgattatgccaagaggttcgacgacgctgcatgaacggtcgtggaacgccttcccgtactgcaaaacggaggtgaccaacccggactatatgaaggacaactttctgatccggattgaaacaatgcacttgagcgaccgcggcaccacaaaaaatgtatggatggaatgatcatcatcatcactaattaattgttaattatgccacaatttaattttccgtttttcaggcactcggtctgtcgaaggatgagctgaacgaacgcaaagtggtgcgcattgacatcgccaacgacaacgagtttctgaaagcagccgacatccttgacaacacccgaccgtcgacattccgttccgtgaacacaggccgtggtccgttggagcagcagtggcagaccaactgcgagccggtgatgtgcgcgtacaaagtggtcaccgtcaatttcaaatggttcggcttccaaacaatggtggagtcttcaatgcaaaaggtggcagattcattcattcgtcctgtttccaaacaccacctccaatttgttccctcccccttttagtcattcccacgccttttctgcaagttcaatcgcgaggtgttctgctggatggaccgctggtacggactgacgctggcgcaaattcgtctgatcgaagaggagacaaagaaggcattggatgaggtgggcttctactctgccaccgtccatccaattccaccgctttacgtaatcgttgtccattttgctcagatgcgcgcgactggcaacccgaaggggatgaccgataactgaacggcgctgatgaaccgaatgacgtgccgcgaggacgctgatctatttgctcgtatattgtatataatatttgtcacaccatttgtcctttcacccccacgcattcctttcggcacttattgtatactgaacacactcccaatttcctcctgattgatgtgtgtgtatgtattattgtgcttatgttgacagaaaataaa

SEQ ID NO: 57139 - DNA, 552 bp, Heterodera glycines
aaagccaaaaatcgatgaggaaatcgacgaaaacaacacattctgtgacctgctttgggccgaccccactaacaatgcgcaggagcttcgtctttgcaaggattacgagccggacaaagggttcctcggcgagtacggcaactatcgctttaatacggtggattggtcccgaattttgtcaaccgttttttaatacttttacaatcttttcaggaccgcgaaacttcaattcagttcaacgaccgctttgcgcaggagttcttcaatcgcttcccccacatccgcggcatcttccgggcgcacgaaaaccaaccgaaagggcacagcatcaacgaggcgcgtacaatttgcacggtgttcagctcgcctcgctacacggaagacacggactgtggatctgtgctgcgggtgggtgctgtttttgccatggcatcttttatttcaattttcaaaattcttttttcccctcagctttctgccgacttgaaacacattcacttcgtcacgctgaaaccgaaggctactggagagaaattgagccgggaagaatga

SEQ ID NO: 57140 - DNA, 796 bp, Heterodera glycines
cgattggcaggaaaattttaagggcgacgaagcgaattcggatggaattcgaatgttggcatttttttgcgcccggtttgtatcggctttccctgccggtgagtaacccaaaagaaatgccgccggctgattatttttaataattaacattcatttcatttagtccgcctttattacttcgtcttccgaatggattcaaataaatcccccaaatttggccatacaaattcatcttccggctgtttcggccattttcccattttgccaaaatgccctttccatcagttggactttgtccaattgtccaaaaattattgagttgcttgactttcgcttgcgattattagcaccgtttaacgagctcaatgaagacgaacatatgctctatttggaagtatttattatatctcttttttaaaaatttctttcattgttttaggaatttttgttagtcgtgccaaattcggaggacacttttctgcaaaaatcattcattggccttcaccagaggaatatcccgacaaattttctacgaattccgtgcacaaaagtttgaaatctcctcactgagcccattctttcgtccgtttttgccagttcgacatcattcacgagcagttctgcttcgagttggtctccgtgtccaagcagtcgcagcagcatcagtcgtgggacagaaaatgcattcggacggaggcgcaaaaggcggatggtaagcgaatatccatcgcataatgaatcctacggacattttcatgctgagacgaaatacaaaaagtgcaagtgaccaaataaa

SEQ ID NO: 57141 - DNA, 178 bp, Heterodera glycines
attggctcctggtcctatcaatctgaatatcttcggcttgttgttgatgagcgtgacgtgttccttggtgatttctacgataaccaggaatggctgctggtaaaacatttttatccaagaaaattgtaggcatactttgtaaaaaaaaaaattttaaatttttcatagaaaatttcaa

SEQ ID NO: 57142 - DNA, 167 bp, Heterodera glycines
tgcttgtgacataccatcatgcatttgtcgtattaaataatttctcatcgtcaacagcagcagtgtctcaatccgtctccactgatcgctcccatcgatcgtcggcgatttgcgacagtcaaaaagaaacggcaatggaacagaacggcacaacaatcggaggatga

SEQ ID NO: 57143 - DNA, 399 bp, Heterodera glycines
taatctttggtttcttcaaactttctacgaaagtatttacaattagttcccttccggaccgagactctcgggaattgaccccgagactatcaacaaataaatactcatttctgtgtatcgcacagatagagcagggcgacttggtggaagtgtgggacgcgccgtacgaggaaaacgcgcggcttgccacggtgcaccgtctgcgcattgtgcggtgtcgttttgaccaacgcaaaggctatgtgatcaaaacgaagtgttggcccaattacataatggagaattgggtcagtggagatgaagcggaggaggagggagaagaagaagcacaacaacagcaggaagagggaagggaagacgaagcggaaggaacggcggaggaaaagggcggaagaaaaa

SEQ ID NO: 57144 - DNA, 225 bp, Heterodera glycines
atgaggtacataagtactcaacatttttaaatcaaaatttgcaaagaaaaaaaaattttgggggaaaattttaagaaaattttccaattcttagtggattttttgaaaaaaaattttaggtcgattcttaagggtgtattttttgtttttattgcatttttgttaaggaattttgccaaaaaatgtcgaaaaagtgaaaaaatagtgaaaaaagccaaaaagtga

SEQ ID NO: 57145 - DNA, 1160 bp, Heterodera glycines
atgtcttatggatgttcgaacttccgatttgattccggtttgccattttttatttccatactttttcaactggcattggcttttaaaaatttttcttattatttgaaacatatcatttcgttgcgcactgtataatccaggaacagcagcagaaaacagatcctgcccttggactttcccgattttttcctgacaaaaaatatttgttccttcccattgtaatttcctaaaacattaggtatggatggcatttagcagattttttgctgtaattattttggtcaaatattttttttttgcaaattttaagaaatttttcaggaaaaaaccatcaattttttaaaaatgcacctacatttaaaaaatgaaatttttaaaaatgctccttttttaattaaaaaaaagtaaattttttaaaaaattctcgctcctctaattgcacctgattgctttctctacccataatagatcattgtgggcgcttgtctggccggcctggttgtcattgtgctggtcgcctatctgatcgggcgtgcgcgtgccaagcgtcagggctacacatccgtctgatcaatcaattcttggaaagatggaaggcagactgattcgatcgacttgcaattgctccaattctaattcaacattcacttttcttagcattgacatattttattggcatttttaaatgattttgtttttctcattttatgactttttccgttattaaatatttgcgaaattaattttaatgatttaaaaatgccgtttaaatcagtttttccgccattcattgtagcattgcatttggagacttttgcggtgtgcaaatttcatcaatcgtcgctggtcttctgcccttacaaaaatttttaaaaaatgaagaaattatttaaaagactcaaaatccttttgaaaaacaataaataatgaaaattttttaactaattgaagaaaaggtctattaaatttttcgaattttttagggagaaaatcacttgcttcatgttacgtttatgtgtatcacattcatttagactaaaatgctcgcgaattattttgatattcatggcattttttattttttctgaattctcgagtattccttcagtacattaattatattatctcatttgtgacagcatttgtaatgccgaaataaa

SEQ ID NO: 57146 - DNA, 677 bp, Heterodera glycines
atggattcattctgtttatacgcccgtcgattcgcttgtttttgttggcaatttcctgcacagttattcaattccaatgcaaattcgcatttcacatttggaagatcgcattcaagtgaattatatttgctagtgtcaaataatttaaaaaaattttcattttttatatttatttatgtcttagaaaaaacccattttgtgagttcctatggccccattacaggctaatagagagcaaatttagagctatcgaatgatataagaattaaaaatttgttatttttgaataaagttttatgaatatttttccgccaaaaaatttccactttttggttgttttatttgaataagcgacccaacacttttgacactagcgcctaaattgttatcagtagaaattttgatgatttattttcgtattttcagccagaaaaaaattaccgtttcccgcatttcaaacaaattttttgggctttcattgctcaaattgtgcacaaagccacacacagaatttatcagaaacaattgccagaggaagcacacaatagtcaaggatacagattttctgcgccaaaaaatgatcaaacggcaatgaattttgtcaaaattgatgatcaatggacaagggtcagtgtcaaattgtttaatgcttttatgtttttttaggtaaattatga

SEQ ID NO: 57147 - DNA, 161 bp, Heterodera glycines
attttcttcgttctctcccaccgctggtgatcaatgggcttttcccacttttgagatatgccgaacaattgctgactttgaagtatccggaagtaattgaaggcatcactcgacctcatcacttggtgcaagagtttcgggtgagaaaatgcattttataa

SEQ ID NO: 57148 - DNA, 1095 bp, Heterodera glycines
  unsure (1)..(1095): unsure at all n locations
atgagaagaggtacaaaagtgatcagaagaggtacaacagtgatgagaagaggtacaacagtaaatagaagaggtacaacagtgattagaagaggtacaacagtgattagaagaggtacaacagtgatgagaagaggtacaacagtaaataaaagaggtacaacagtgattagaagaggtacaaaagtgattaaaagaggtacaaaaattgaatgcaatttattataaattttaaaaaataaattaattattccttttattaattaaaaagagaattttgaaatgtacaataattgaatatttaaattaatatgaaattaatttttataaacaattaaaaaaaatatgaaattctttattaaaagataattattattttttacataaattcttttattattaatttacaacaaatctttaaatataaattgatacaacagtgattagtaaattcattaaattaaaatgaaaatatttttaacaaatttaattaaaaaaatacatgaaattctatcaattaaaaaaataattaatttaaacttataaaatttatttatcaaaaaaaaattaaattaaatataattttttatttattaactcaacaaaatattttattaattaaaatcattgaaaataacgtaaaaatgcacaaaaaaataatgttacaccgtccggattcgaacctgcccccccccctcaaaatgatgcctcagaatccccaatcacacagggattctgaggtcttaacgatgtcaaaagtaaaatctgattacgtattcgtgatcagtggcccaattaacccataaagacatgtttttggaagatttttattgaaaaaaatttttcactcaaaaatcctgtccaccccctttggtcccgaatcacaaaatcacttttatttttatatctttttttaaaaatgtgataaaaatgcaaaataaaatttatattatagagaaaaaaattgcggatttttgtagtattttacttttctncaatagcttttcagaaggcagttacgaattttttttctgaaaatctaaaatttccagaaattctggaataccttttttcatattgatgttaaaaacctaa

SEQ ID NO: 57149 - DNA, 1096 bp, Heterodera glycines
atgcactttgtgggcggtgctgccaatgccgtgatgggtatgcgcagtgcgcagcaaatgctcaccgaatcggagccgacagcgaacaaaatggtgatgctaatccaccggcacaaaatcgagtaagttggcaaagtttgggacaacaacgataatggcaattggtgccaaagagcatcattattatgtattaattaggataggacttgccaaaatttaccatgatcaattcgatgatcacattgtgttatgttttagcgttgcgtctcgcgcagaaattgaacaaatcgcacgtgtggacaatttggcactgcttgagctgagctactcccggtggccagtgctggacaaccgccaagcgtattggagtcggcagttgtgcatgttggcggcactgatcgagcggctggaaaacactgtaccggccgacattgacgaaatattcttcggcactgatcgggaggaggaggagggggaggagggcacacggcgcgtaaggcaagtgacgtggtgatcgaatggtggtgatggtgatggctattgattctgatcactgattaaccgctgattgatttgttggtcgacggacatacggcggaccgacagatcgatcattcaaactgatcaaaataacacacacacatttatagggttgtcggaaaatcacaatttgtacatattttgaactaacattttttggcacttttgttgaaaagccggcaattctgatcgatccttccttgctgatcactctctctgtgtctctgtccctgcttttttcctttctgatcagttgatttgttcccccctatttttttctctgtgctccccgtaactttttctgatttgaaccgatgatcactgttttgtttttgtcttttgttttcttgtgttaccttctgtcctttcttttcttttcccttttctttccctctgtttttttcttttacaaattaatttcacagattgttaaatgtgcaacacataaataataatattgtaataatatacaataattaaaataataataatacttaacaaaatggtcatttttaaacaaatgtaaatttcaaaaatgttttcgttggccaataaa

SEQ ID NO: 57150 - DNA, 2305 bp, Heterodera glycines
tgaacggacctggcctgttcagtctgcctttcacgctttgtaattggattttatctgtcattttgaaccaatctgatcagttgttttgaaatctattaccgttcctcatttatttgattcatttgaatatttcttggcattttttggcacctttttacctttccttttgtttcaatttgatcactttatccatccttctgataagtttgctcctcattttctccgatcagttgatcatcttcccttaggtccgcacttggctcgccccgcgtgtgccacaagtgtccatgtcgcctgagcagcgcctggagcgtcggccaagtccggacgaaatggaagtgttctgtgacgcggacggcgtgccacggccacgaattttgtggtggtgggacggacgaccggtggcggacggacaggacgaaatgcggattatcgacagcacagcgctggacgagaaagtgcgcacgcggcaacgcctgttgttccagtccaccacgcggtccggcacgctgaagtgccaggtgagcaaagagagtgccaaaaaacaacgcacgggactgactcgttcattggtctcgagaagtttccactcaaaaaatgattaccgtatatactgctgctgttccgcctgatctaccgtattgccccaacagtaattccctcaccggtcccattccacagtaattccctttaccgtaattccccctgccataattgcttcatcggtcagagatttcaaattcgttttcctctctcattctctaggcaatcaatgagaaaggcactgctgaaaaggagttggaagtgcgtattttgggccccggctcgccaccgtcccagatcagttccagcccggtccaagacgggttcaggttgggccatttgagacccaaaatagcaattttcatcaccccattttcctgtccccgatcagtgttaattggctgcctccgctggtccccaacggcgatgtgatcaattacgtgatctactggaacaaagatgcggaagctgatttggccgattgggtgggactgaattgtccgcttgattttctaattgaaaaaatttacaatatttcagtcccaaaaaactgtgggcgccgagttggacaatgtgctgatcagtgaccagcaggagcagacgccttacgtaagtttaaagccaacaatttccttaggggttaatcaatgatataattaatgatcaaataaatttatcaataaccagttcggaaattatcgaaattgggttaattagtttatcaccaataagccaaggattgctcattagactatcagtggcaatttaaatcggtttgtcaaaaactttaaattgattgcgtgacagtgatactgatcacagaaaccgattaatcaatgctcaagctgatcaacaatgggactgatcactcaataatccctccccctttatccgtacatttgtcaaacctttcccctcccctccctctgaaggtgttccgtgtgcaagccattggctcggccgggcccggcatcatctcgcccagctacgaggtggtcaccggcctacggcacattccgctcgcggtcacaatccgcgtgctgtctccgccgccctccgttgcgccggagggcacactggtggagccgggcggccccattcgcttccaatgcgtggcggtcggacgaccgaagccgctggtctccttctcctgggtgccatttgaggcagccagcgctgagccgggcgaagggccggtccaactaagcacggagccggactcgaatggcgaagcccatcgctatgtgagcgcggagacggagacgcggacgaatacaaagcggagactgttgtgcgaagcgcgcaatgaccaaggccaagtccaggcggaacagctgttccaggcatgttgtgcttggccgactgtgtcgtaatatgacacaaaaatgaatttgacagtgggggtaattagggagggatgataaccgcagggaataatggataaaaagacaaatcttgaaaaattgagactgtgacttgggctcaaggctcggaactatgacttggcctccaatttgggatctatggccacaaaaaagtctagactcttatttcgaaccaacgtttgactttgtcctcccttttcctaaccatttctttataactttcattcacttttggaaaatgccattcttttgccaaattggcaaatgccctcgttattctttctgatcatttgccaattgtcccggtgctcaggtgctgaagccgggcggtgccccgcgcgacgtgtccgctgaggtggatggggacaaccgcgtca

SEQ ID NO: 57151 - DNA, 3953 bp, Heterodera glycines
atggatgacccccgggggcatcaaatggaatcgaaaagtgaaattgaatgggtaattgctgatggggtgcgcacgggaggcaacaaaaacaacaaacgaattccaaccgcgaaaaaatgggcccccggggggacaaaatgtacaaaatgaaaagttattttccatttatgacaaaactatttattgtaaataaatgttgggtgacaaaaaaaacccatttaacacaattataggttaaacgaaaaaaataaatttaaaataggcacaaaaattggtttaatgcttttaatgacccccatcagcagaggtcttaaagtttgaggtttaattttagaaattaaaatgcattttaggagtaatcaaaataaggcgaaagaaacatggcaattagtcgctaattgctcggattttctcgacgcacgaccctcccattttcagggattttactcccgtgtccaacccatcggcaaaagtgccgtttagtcacgaattgactggcccaattcccgattgaatttgtcccgccattcattttaaaagtctctgtctctaattaattttaattttcaaaattcctttgtcaattccttttttaattgctcacttttgcgcgtcattgaatgtgttcacaattgccccttttacccttcacaattatccccaaaattcgccttttctcggtgaccttcaacaacactttttttctgtcaccaatttttcctcttttattcgccaattaattcaaaaaataatttttgtggaagattaattgagtaattaattgaaaataaatgttctttctcagatattttctgtcaccttttcaattgacgtcattttgtcttgcatttttctttcagtgttttttccctattttttgtcatttccaaaaatataagatttaaagttcaacaaaatttttgttcatttttaaattattttgtcaacaattttttggaattttgtggggattttttgatatatttttttaattttttatatccgccatcatttatggcattttatcgccatcatttttgtccgccaccatttgtgccatttgtccgctcacaatatttaatgccattagtccgccactatttatgccatttgtccgtgcccttttgtcccttttcaatttttctctgtgtcttccatttgtctcatccccctacttcatcattcatttcgtcaccactttttcgcccatttgtccctttttcttccatttgtcccttttattcctttttttgcccttctcgattgactaaatgctctgctgtccatcatcatttattttatgatttattttcattgccatcactttttttgctccgttctccgcgccattgccccataaaaaacgccgtcgactttttgtccgtccgtcggtccgtcgcccggggggaggacaaaattttgtttgattgatcgccgctgttcaaaaggctcaacttgcgcactaaaattttcaaattgttttcgcgaattctgcgggaaataattttatatatttcttttaaatttaatttatgaaaaatttttaaattaaaaaatatcatttttaaataaatttctctcattatttattttataatttaattttaagtaaatttcttaaaatttcgattataaattactcaaattattgtttccacttaattacctattcatttaattatttttcatttaattatctctttccctttcgttcgatgcattttcacaaattgtttttgcttttgcctattttgcttctccatctccaacaatcccaagcttgcttttcacgtggcaacagtggcgaaccgtcggatggcaatcccgaggcccaggggctaaaagtgccaaaaattttgaattttaaaattaaaaaattctcaaattttcagtcggaaaacgatgttcggactgttcagttgaagaaggaaaaacaaacggatgaaacggaagaggagaaagacgaggaaagttcggcagaacaaaaattgccatctgaattggacccggaatttgtgaaagtgagagaaattggaaaatttctttttaattaataaatatttaaaaaattaaaattttcttttttaacattatttgatattgtctttatttttgagggttttgaaaaactatttaatatttttatcaatttttaaaaaaatttttgcttggaaatttttgaaaaatcttatttatttgggaacaaaatatttgaatttaaaaatgaatatttctttgaaaaaatattttattgaaaatttaataattttttgaaatttatccaagtttttctattcaaatgattctttttaagacttatctgcgagaatttggtcatctgaagcacaatgagaatggcctttcccatggcgttaagtgcgtttaaataaaatttcaaaaagaaatattttaaaaatcacaaatattttaggcatttccaacgctttttgggctaccggcagacgggcaatgtcgacttgggaacccttcaaaaaatgtcgtggaaacgctgtgccaactctgacgagggctacacagcacaaggtgggggcggatcgatgaattatggcatttgccaggattattttggagtaaagaaaaatgccggaaatttggccctaaaaatcgaaagtcaaactaatttcctggcaaagttaccaaccgagaatggcacttgcattacagggttgttccgggtcgagaaaaatatcgggtcgggtttcgggtcgggtcggccgaaaaatcatcgggtcgggtttcgggtcgagaaaaaggccgggtttcgggtatcgggtttcgggtaacccggaacaaccctggtgcatgggtgcggatggcactgcaatatttgcagcgaattgcgccatttataggacgatggaaataaaaccaaatggaatcaggtttttcagccatttgctttgcttaaattcaagaaattcatacaaaatatctttagaaaaaggataataatgaacaaaaacaaatacaaaattttcgattccattgaacacaatcgtttaaaaaaaattctcaatttccttatctaattttcacccagacccccttcttaccagtgcttatttcgacccgaaacccgacccaaaatcatcgggtcgggtttcgggtttcgggtcgagaaaaaggccgggtttcgggtttcgggtatcgggtttcgggtaacccggaacaaccctgttgcattacacaaagtgtttaatgcaatggcactggctgtgttttaaataaataataatcattattttttaattagtccgataattaattaattacttaattattcgcatttgtttttttcgctttagacccatcgcaactttgggaacgttcgacattgttctggaacctgaacgcgtcgcaccccaagcagttcactcatggcgaaacgaagtcagccaaaatttggcacaatttgccaatttgaattagcactcattaaacatgttttattacatgcttttgcataattaacttaattgcgcttaattttgcagggaattaattgcgcaagcattccgcgcatgggaaattgtgatcaaaatcgactttctggagacgaacaatgcggacaatgcgcagatcattttcacatttgaaagcgacggagcaaaaaaggagaaaagcaaaaatggggaggaggagaaggaaaaggagggcaaaacaggcaaatcactttctgatttgataagcaccgatcggttggtcaaaaagacagagaaggaaattctgatcattttggcaaaaaacaaaatttgatcactttagaatttgttaaaaatttttcaaagtcggaatattcaattcgaaaaacgaatttataaaagtatttgctgaacatcaatttattatttccccatattctgagtaaattaggcgactttttttaatggctcaatgtttaagtttttaattttttactttttaaagagcaa

SEQ ID NO: 57152 - DNA, 957 bp, Heterodera glycines
gcctcgccattgccaaggcgtcgtcgccgcccgttgcgcgaattgttttgaatgccgacgagaattggtccacttttcaaacacaagaagaggtgaaagttaaatattgctaatttaacaatttattttttcagggaaaaatcgacatttttgtggtaaactaaatatatttttcgaaaatttttggcattttttgccaattttgaggttttactccacgaaattggccatgcgcttggccttcgccattcgggagacgaacattcagtgatgttcccaatgtttgagcgttctgttggcgaacatgtaaaattaaattaattaatttaaaaattaaaaaaatatttaaataaaattctctaatttatttcagttgccagtcatttcaaatgatgatgtcgagcatttgagagcactttacggtgattaactgctaacaattcattaattattttcttaacatttgtgtgtgtttgaagtgctaattaaaaaattctaacattattaattaattttactctttgacaatttattatttatgatatttaaattattacatttttaattttttttaaattttttaaacccttctcttatgtcaatttgctaatcctttttttcttcgtttcggcttcatttgtttccgtatgctttttgttttgtttttttgccatcactttttgctttaaatatttttcaccatggcatttccctttgctttttccatttttggcattttttcagtgcttttcggtaataaaaatgatgggcccaaactgcgcgtgaagcgcagtagcagcgtcgccagcagcgcaagtgccgccggtgccatcgctggcggtgccaatgccaattcgaatgccaacaatgcgtttgcatcattttatgccgatgatgacaataccgttttgtgttgtgtgtgccctgcgccgatgacattaggcgatttgaagaaaa

SEQ ID NO: 57153 - DNA, 560 bp, Heterodera glycines
atggcattgagtgaaatgccaaatcaaattgacacaataattagacgaattgaaaaagaaattacgatgaatgagcaggacaaagaacagcaactatttgccaaaatatttgcttatgcaagaacacaaaccaacaatgcattcaataattttttccagttagttagggttataaactcaaaaaatgggaaaactatttttatcagagtcgaaattgaaatttaatttcaaaaaatcacgatgttaaattttcaaatgattttagaagtatttgaagtttttggatataataaaatttaaaaaaatttgtaaatctgaagaaattcttgttaaatttttattaaaaatgcaagggtccacgacgatgccttcgacaccacagacccctcaattccatttttatgaaaccattacctaaaattaactatttgtcgaagacaaataatgaaaatttaacattttggcttttttcgaattaattaatgataacaaaattaaaaaaagagttaaatgttttcagatgacccctaaattaatgcttatcttttgacagaaataaa

SEQ ID NO: 57154 - DNA, 49 bp, Heterodera glycines; identical to SEQ ID NO: 51181

SEQ ID NO: 57155 - DNA, 630 bp, Heterodera glycines
atgacccaacaacatattgggttgatgaaaagttctgaccctctgaaaaaacaaattatgcaaaaaatgatatttaattctaaacagattgaaaaagggaggcaggcaattgggatgaatcagcggacggttggccatcttctggccatttgcatttgttgtatagccattacttttgcaaaatcgaacgattttcaaaaaatggacaaaattcgcctaagacaactgttactttacgaattccgaaaaaattctaccccaacccaagctcttcgaaatatttgtgaaagtgagggcaatgatgcactctctctttctacagttaagcgatggttcacaaaatttcgtgaaggcaatgagcagctcgaagatgaaccccgctccggacggccacatgctctcgattcggacgacttggagcagcacgttcagcagcatccgtgttctagttcgcgccaacctgcagcagagttcggggtccatcagacaacagtgctcaattacctccatcagctcggcttcatcaacaaaaagggtgccgaagttccccatgcactgacccaacaacaaaagcatcagcgagtggtcacctgcactgaacttctcgcccgtttgagtgctggaatgtag

SEQ ID NO: 57156 - DNA, 1432 bp, Heterodera glycines
gatcgggatcttgttcagaaccgagtccattttcctaaaaattttggaagagaaaattctgaggatcggcaccgaattcagaaaagtgttttcaatagatcgccaatcagtccttcacaaactttttccaccgaaaagtcaatcgaatttttccaaaattttccaccgaaccaaattcatttttgtgaggaagaaaagcaattggtggatctatacagagcaacaacgacgcaggaaaatgcaggaaaggatgttatttcgtcccaattgaacccgaattcgcggccccaatttgaaagagtgttgaatgaagagatggtgaaccaacgccggtcaccaatcagcacgatttcgaacgaaataaattcggatatgaaaaaaaggagtccgtttgtctatgaaaaattttttaatggccttgtccaaagaatagttgaagccaaaccaatcccgaagccctcaaagtgtcaaaccattgaaatgaaagtccaaaattggaaggccaagtcaattatcgacccgaattccgaaataaatttcataaaccccgaatttctcttcaaaatgtctgtgagtgacaaaaccgattttctaaaatggagttttcagccaaaatgtgatctgacaggattgccttatgaatttgctacctacaaaggacaaaaaattcctgtttacggattggtcaatgtcccaattgatataggcgattcagaattagaaacatggtgtatggttaccaaaatcccactggaatatgacttcattttaagtggaaatctgctaaaattgttggagaatttgaagagagacgaagaccaagcaaatcacggccacgcaaatcctcaaaatttgcaaacatctcccaagttttcggcaccgcctaaaccacaactccgtcaatacaaaaaagtcggacaatcatcatcaaaaatgtggagacaaaatcgaaattcgtgtccgtttccactgaatttccaaagaatggacaagtcaaaaactgaattcacaaatcaaaaccacttaaaacaattttcgcatttcccaacgaaaattttccattcggatccagcacaattcagtccaaaattgcagccgatccagcctcgaacttttttgaattcaaaattcaaaaaagccaagattgagaaaaaggcatttgctcaacaattgcgtccaccaagcctcctctcaatacgaacccacattccccaaactctccccgtctcgaatatgtccgataattataattggaccattcccgaatttgcccgccattcccatcccgtctcccaaaatttccatttcagtaacagtttgatgtcacagcaatgccgccgctgtccaacaacaacgtcggccaggaggcctccatggttcgtggcggagggaggacaaacgcctaaacgcttcgcaggagctcagctggtcg

SEQ ID NO: 57157 - DNA, 300 bp, Heterodera glycines
atgggcatggatcatgggcaaggcccacaacatcagccatgggaactggacccgcctctgcccgagcagcatttggaaattgggccgcaacttccggcggaatgggcgtatcagccaccaccacaatgggctcaagttgtgcatgtggaacaacaaccgcagcagcagcaacactaccaccaccaccagcaacaacaacaacagcagcagcagcaaggcgcatgggatgagggatgtgagacgatgatgccacatgctcttgaccgaatccaagacaaggagtacggccaatatcagtaa

SEQ ID NO: 57158 - DNA, 941 bp, Heterodera glycines
  unsure (1)..(941): unsure at all n locations
atgagcgaacgacagttggccgggctgtccatgttgggaatcaacaaggtggtatggcatggcatttgccaaatcggcatttcctagtctgatcagaccacgatccaaaattacctcttccgatcagaccatgtaatccaagcaaaaggatttatgtgtccattttaatggatctgatcaatcacgtgttagtgccgactcacaatcagacatggaaggggtacattggtctttataggatcttgtgatccgatcagtttgaaaatatctgtttgaatcaaaatatggtccaaacaacgaatcatctggtttaagacgatcaaactcagtccaatttaaatatcaaaacaaattaatatttttgtgctaatcactattcgaactgatttgattaatcaaaagcatgcatttgttttttttaacttaaaattaaaataaactattaaattttttgagaataatttttaaatattttctttctattttgctttaggcgtacgaattgctcacgaattgcatttatttgtgtgatcggcaaattgaggcatgacaaaagaatatatattttttttataggctaacaactaaaacaaccatttgtcacaggtgttcggtttgaaagtgtacggtgcgccgtggcatccgatggtaggttactgtaacaacaactggtcaatattccattaattggtcaaaaataagtgccggaatcgaaattactgggccaaaaattgggtgtattaaccaattagcgtttaatcgcattaatggngaggggggggggggcagaatcggtaanttggcaattaattaatctgattaattacgcattcagcccggctacgcattttatcgccagaggggccaagcacttgttgcagaagtggaatcagatcccgagaannagctcgacgtgctggtcactcacacaccgccacttg

SEQ ID NO: 57159 - DNA, 922 bp, Heterodera glycines
atggctcggccgcttcgcggcctgggactcaattcttcggcattccaatcacttggaatcactcaatccacctgcattccaatcaccaacaataaatctcgccgattcttctgcataccaatcgctgggactcagttctacgacctttcaatcaccgttactcaatccatcagcactcgaaacacctggactcaatctcaccaattctacataggcaaaacattttaacattctactggcctttttgtttcttgtcatttcttaaacaaccctcggcatttcaatcatcggaactctatctcaccaattctccggcattccagtcactgggaccaacccaccagcattccagtcactgggactcattctcctgcatttcaatcaacggaactcaaccctccagcatttcaatcactgggactcaatcctccggcattccgaacactgggactcaaccctctagcatttcaatcactgggactcattctcctgcatttcaatcaacgggactcaaccctccagcatttcaatcactgggactcaattctccagcatttcgatcactgggactcaatcctccagcattccagtcactgggactcaattctcatgcatttcaatcactgggagtcaatcctccggcatttcaatcactgggagtcaaatctacggcattccgaacactgggactcaattctccagcatttcaatcactgggactcaattctcctgcatttcaatcaacgggactcaaccctccagcatttcaatcactgggactcaattctccagcatttcgatcactgggactcaatcctccagcattccagtcactgggactcaattctcatgcatttcaatcactgggagtcaaccctcatttcaatcactgggagtcaaatctacggcgttccgaacactg

SEQ ID NO: 57160 - DNA, 1182 bp, Heterodera glycines
cgttgcccgaatggcaaaggaggaattcggtttcgagcaggtttcggtttggaatgacacgttcgagaaaatcccctgttgcgccgccggaggaatataaactcggctctccgattgtccccgttgttggggggtataagactcgacgtggctcggccagggtatttccccgacggactttttgaacgtttcagccaagtggcgtgtttttattgcaatctttcagctttgcctcttttaaggtttttgacaacatttattttgccggtgccttcaaaggcgccgacggaatttcccaacaattcgtgcacattgagcgatacatgcaaaatttgcgttcttaccaaaagctttaccatcagaatgaaatggttggcgattgctttagtacgctattttatttgcttaattttccttttagtatttgaaagaccgcttgactgggcttattttgacgggatggcaaaggtattcccacactacgcctttgtgtgaacttctccccgccggcattccatcgttggcacggcaagcgatttttgtttcgcaatggatgaacaaaagagaagaacggaccgaccaattcatgcaggttttattaaattatttaatttatttcgatttattacatttactcatatttaaggagtttctgaactgttccgtacgtcactcgacttcggccaccaaatttgtccgcaaaggattcacttttccattcgtttttgaattcaaattctgcgattgtcaattccccggtgttgaactttacagtgaggtagtgattccggtggaatcctaatgtaattcgtaatatcagattgaagaactgaatttgttgcgatggaaagcggcgattgagcgatatataagcagtaatgaaaccgaaaaagagacacaaaatgaactggaaaaaatggaggaagaattcagaaaactccgaaagacggtagggaaaggggaaggttacgctgcaaaccctccgaaccctgactaaaattaaaaaaagaaccattggatgaaccaatgctccgtgtttatgccattagtttgtttcattcagatcgcttctcttctcggccatttcttttacgaggacacagtcgacgaatggttggctcagcacgaccatttgaatcgctttaatgatgatgacctcggtttgcctcctccaaaccgact

SEQ ID NO: 57161 - DNA, 426 bp, Heterodera glycines
atggcatcggatggacaagccttggcaaaatggcttttcacacatcgtccggacaatgtggcaaaggttgaaatgttctgttcagcgtcaacgtctgtgcttgctaaaaatggcatcgttcaaaatagtgcgtaccaataactgattaattatatttttaaatttccgtattttaggcttttgccaatgtttcatctcccgtcagtttcatcattgtcatcaatctaccgttacaattcgtcgtgccaattgactattttttatgcttctcaacgcaactcacggtcatcagcagaggtgaaagaatggatattaagaagtgatcgaccaatttgaaatgtggagatattttgaagtgctcataaaaattgttctttttgtcgcagtgatcaacgaatgtttctttgtgtgtgcctttagaataaa

SEQ ID NO: 57162 - DNA, 523 bp, Heterodera glycines
atgcaaacgatggaattggcacttctcggagaaaaaccggccgagaaaggacagatcaatttgatgggcacccaatgggtgacgaaggatcagctgcagcagcaaatgcaggagatcctttccgatgacgaagtccctcaccccatccttttgactcgatcagttttttcagtatgcaaattttataattgcgctcgaatacatttcgcaattgccaaattccgcggaggaggaggactttatcatgtcattgcgtcgtgggattggagcaagtgaaaaaaatagacttttccgcgcaaaagtaccggaggtgaattggcatactcacttttgtacgttaaactgttaatgcgtccttttgttgcaggtgacgataaacgaagatggcaggagagaatgctggagaatttgcaagacgagggcttccgccgtgaaaattgtggtcagagacggaggcaccggccttttcacagtcaatgggcaacactattgcacgttccgttcgctcctcgcgaggcaataa

SEQ ID NO: 57163 - DNA, 466 bp, Heterodera glycines
atgcttttcttaaagatgctgaacagcttcctaactcatggctcttcttgggagcacagtgggcactttcctcgcgtcactctttgcgacctgaaggtaaaatttcctaatttgagcaccattactaataaatttccgaattattctgagtgccaattaacgtcatttttccgaatatttaataaatgggaattaatttaccaaaagttatcaactaataagattttttcgaaccgttcagatccgtcaaccaaacgaacgctttcacgagttcactgtccaatgtgtgctggtggcgaattttgtcagttaaatgcacttgaaatatgggtcaatttagtctggtagttttaagtctgctggaatgcctcaaagcgatcttttttttaattttaaggccgtaactgtttgtaaatttacaaattataaattaatgggcatgtttcgaggtagaaacattaataaa

SEQ ID NO: 57164 - DNA, 62 bp, Heterodera glycines
gaaaaacgagctggcgccgaaacgggagcgccgaaacgggagcgccgaaacgcgtgggtccc

SEQ ID NO: 57165 - DNA, 1710 bp, Heterodera glycines
atgagtatagttcaagacgaagaatggaaaactcatttaggacaatgcatgtttaatgtacgagcgcgggttagagttgggggacaaagcgctgcaattggacacggaacgactgagcggacttcgcaacggattggagagggtccgtgggatggtggccgatcggattgacaccattcgcagcaaagcaccgcacgtggacaatcgggtgggaacaagaacgtggttatggttaaataatcacgaaattggtggtaacccccggcctatgagttaccaccaactcatggttaaatgaccacgaaagaagtatttctaaacctttttttaacaaaaataaaaggaataacgaaaataattgtcatcgataatcatgtggcaaatttttgagccaatcagaaattttatttaaaataaactaactgtaaataatttcccactaataaagagagccacatatcccacagctcttcgggtgcctctcttggaatttttttatggttaaggatttgtttaaccatcatcttatagattgggccaaggggttgaatcgtcttctttttttttcttttttaatattatgttgagattagggttggtcgggaccggggattttgggcaaaaccgggaacgggactttttggctgagaaaaccgggaatttcccggtcccggtcaaaaccgggacctaggtactcagttgtccgtgtccaggtctacgacctttttaaaaagtcaaattttttttgttactctctttttggatacacaaattccttccgtctacagcaagcggtggaaaacattcgccattcgctggtcactgccagcgacgccattgccggctcaaccaccgacgccgaactgttctattggctgccggacggtgttcagcttgtggtgatcgaagtaaaataataaaaacatttttttgggttacaatcttctgaaatttgttgaaacaaaatcctccaaaaatattttatttttggtttgcgataatcgcgacaagtcaccaaatttggtctcccatttcttttttttccagggagatcaaacaaatgcaccaactccgccctcctcgctggccatcttcaaattgactaagccggaagaagcgcaaaagacggagaaagcgagcggtgccaccaccgaagcgaaagacgcggccacattaccgttggcgtcctcttcgcccgccgctttcatccaagtcggcccctgggcctacccattggaaccgggcaaaacggcaattctgaagaacgaattgggtgtgtaatttttgccaaaatgctttttatttgcctactattggtttaaactgctcaaaattctctctttaggtgtttacgtgatgccgaacccaagccctgaccatccgaatatgttcgtcggtatcattttacctcgcgggttggcgcccggacttgagtccgaatttgtatatgccttgaagcaatttgcggtgctcaacagcagcgacattgtggacagaatgagcgaggagcaacgcgagaggaccaggtacttacaaagcacaccagcaaagcgaaggaaaattgaaaaatatcgacgaaaatgtttaagcgaacgtatcgctcaatttctcatccgaactggccaatacattgcgttgaacacacaaaacgcggcccaatggaccggcgaatacgtggcaaagatgggcgagcagtacagagccggaatg

SEQ ID NO: 57166 - DNA, 58 bp, Heterodera glycines
ccaaatgtttcattttatatattccaaaatttacaaggaataaaatatttgcttgaaa

SEQ ID NO: 57167 - DNA, 1427 bp, Heterodera glycines
atgtatacaggtaattagtaaattattaaaaatttttaatgattttttaagaagaagatgcagaggaatttgaaaagttaagcattgaaaatcttccgcaaaataaggtcagtgaattgaatatgcaaaatgtcaatgctgcttcaacttcggctgcagctgctggaggctcattcaatggtttgttattatggggatatcatttatacacagtaatacgggcatgcaatattttttacactgttttttagtaaatttataaaataacttcttaaatataaataaaacttggtactgtatctaagcactcgaaataataaaattttgaatttatcggaaaacaaatagaatggtaaatcaaaagttttcgttactgtacaaagccatttgaatcgtagagccgagatgtttcgagactaaaaaatattaggcgtaaatgaggcatagggcgggactgctccattacgagcaagaagtgtgttggcgctatgtcgttatttaaaaaaccaacattatttgactaatttaagttaaaatcaatatttgccgcaattcatctcaaaatgtatttacaatcttttttgtattaatattttttgttgttgtaaagtatgttaatataatgtaggctaaaaaataccaggaatatatatgattataaaagtttattccataaaatcaatgtataattgtgataattcaaaaagtaatgaattttgtgatgggtttcaggaaatattgattttaactataatgatagttttttaaattacgcccattttgatggttttttaaataatgagggccaaaaatgctcgaaaaacaaagtattttagttcctctggccataacttttttaaaacataacgaaattttttgaaattttttagactaatagagaacatttagggctattgaatgataccaagaattaaaaatttgtttgcttttgagctaagttataaataatttttcatcaaatcatattgttggttttttaaataacgactccgcaccagtgtgttgcaaatatagggaggtgcagatgagtgggtaaccattccaacaagaagcccaggataagccagaaataattcgaagaaatccctgtaaacttttataattttgtataaaaattttctattctgatagacaatattaaaagctattgaatgataccaagaattattaatttgattgaatttaagcgaagttatgagtttatatgtcttacattttttttctacctcttggcggctttaagaaacgcccatagtggcggtttttaagaaacgacctagcatccataataacaattcggaatttaaccaaaatttcaaaactttttcaggctacgcgaaaatgcaattatttctttcagtttaattatgattttgttaaaaactggtgaataatattcgaataaa

SEQ ID NO: 57168 - DNA, 1496 bp, Heterodera glycines
aataatgaacttcatattttgcatttctacgagtccaatgtttacccattcgccgttgaaatccatggagactttgctcggcttggtcgtattatttctggaaatgccgtcggtttggtgttaggtggtggcggagcacggtattcataaatattcaaatattttataatattttcatttaagaggtgctgctcacgttggcgttattaagtgagtgtcacaattttttctgtttttttaaattttcatcaattttagagctttacgtcagaatggcattcccattgacatgatcggtggcacttccattggctctttggttgggggagtgttggcgagtgacccatatgaccaagacggacttgagcaaaagacacacttctggtttacggtatgatagttctaacattaaacaatttcgttaattttgttcatttcagggaatgggttcggtttggaaggttcttatggttcgttgctcatttttgtttgtttccattaaaccttttgtcaggacttcacttatgggtacgtggcgcgtttcaccggttcccatttcaacagtttgttgatgggactgttcgatgaaaaacacatcgaggacctttggctgccttatttttgcgtgaccactgatattacgtgagtgattgaaaggaatataactgataaataattcattattccatttttatttagtgattctgaaatgcgtgttcatcgcactggttgtctctttctcactttttaaatcattttatcttttaccgatttctgcttcaattaggtcccctctggcgttatgttcgtgcgtcaatgtctttagccgtttggctgccaccgatctgtgattccgaagacggtcagtggtcggaccaaaacactttgaatggtgtttaatttaaggtcattatttgcttgacgggggctatgttaacaatctcccggcggatgttatgaggtcttgttgaattctcctgtgttatctcctttccctgattttcaggtcatttggtgcacgaactgtcattgcggtggatgtcagttcggctgatgaaaaagattttcacaattacggggattccattagcggtttctgggcacaattgagagcgctaaatccgtggtcaacgaaattgcgcattcttacgggccaggaaattcaggtgtttcgaattcccaaagaaaattccaacttgttttttgaggatcgtttggcttatgtgtccagtgtccgtcaattagaaatggtgaagaaagcgccatattgcaattatcttcgtccgccaattgcttcttttttgaccatggattttgctaaattcgaatctatcagggtgactttgtgaatttcgttgttgttgaagtgtcattcacaatatgtttttgcctttttagcgttcgggttatcgttacgcggcagaaattgttccaaatttggtcatgactaacgcccatctgaagacgcttattagtcatgaaaagatgcatgagcg

SEQ ID NO: 57169 - DNA, 1226 bp, Heterodera glycines
atgggaaaagacgaaacagtgacagcgcagccaacgaagaaaaaacaacggaagtcgtctgaaatggaagggcgaccgtcttctccttcgccagttcagcaacaccgtccttctacgacttcgagcagtacgagcaacactaccaccacaaaatgggtgaaggaaggcaatacgacggcaaaaagtggggcgaacagtaccacggcaaagaaagagtcggcactgccaaatgtgataagtcaaatcacggtcccatttccaaatctcaagaatttcaaggtgacagacttgggttgtattatgaaagagtatttcttttagataccaaaagtgatcgaaaatgctgaccctcctccttctacgagcagtgccccgcatttcgttccaaacaaaggaggaaccaccgaacttcagcaacaaagcagtcaatcgagtttagcatcatcttccaatgagaagggttcgcgcagcaaattcggcccattcaaatcttcggatcatttcgagcaacgtcgcccggggggaggagcaaaacaatcgaaaggagctggacaccaacacacacattaccaatacaacgacaaatatgcgggaggaggtggtgggagctcatcattccaaccacacaacgcgtacagccgacaaagagcaccgaaacagtcgcaagcgggcggtggaggacgacacgggggagggaattcggaacagccgagaaaacagcacggagcagcaccctcgacgacgtaattgacacgaacgaacccatccttttattttccgttcaattttgctttacaggcggccaacgtcctcttcatccaccgctggccatcgtttcactgtccaattccaacagcactctcgcgatggagggtctggtcacaatcagcagcatcctttccctccgttgttgcagcatttccctgcccaacagcagctcagcggcagcgttggttggcaagcagtacaaccaactaccggggagttcttccatcaacagcagaaccacaattatttgcctcaacagcagcagcaaaaactagaatggtttggccaagccaataatgaccaagagcatcgacaaaccgcgagtcattcagcgagtacagtacgaccaaaccaaacacggacaacggaccgacagagtggcaattgcagagaggaagacagaatggacaattcgccttcaacgggaaacggtctccaaatagtagacgacgaataaa

SEQ ID NO: 57170 - DNA, 1278 bp, Heterodera glycines
atgggcgccggtaccgacgacgcggagtcgcagcagtgcgaaacggtgactcgtccgtcttccaaactgaccggacgatgttcaccaaatccgggcaatagtctttcctctttgacacaacaaaacgcattttctacaacttccgaccaaagagtgaggccaatagagcagaaaaatgtggcgggcggaaacaccgactcttcccatttggcacaaatgtcagtggaacaacagcgccaaagatttgggatgaacgtggtgtacagacagcaacagccgaagcagccaattgcaccgatgggagggataaatccgaccaccggcagactaataatggcatcctcacactttgtgaaatgccaacgatgttcattttcaggacagccaacctggccttcgccattcttccagttctgacgtgttcaatttcgtgccggaccattcatttgaggacactccaaattttggcaatatttcaacgactccgtaccaattgccgactggggtagtgcgtcgtcgtggccgagggcgaagagcggggaattttggggaccgacacccgtccacttcctcctcaatcgaacacgaagggacgccagagtcgccgtccgattttgggacgctcagaaaaacgcgtgggattggtaaaaaaattattatcaaatctcacttaaattttcaatttctttataactaaaatcaactgctttttggttttagggaattcgggtcaacgcagaccgagaaagccgcgtaagccagccaatgtgagctttgaacaacgagaaggaattccacggtcgccgttccaacactcagaaagccatccgacaataggcaaaattccgcctcttcccactactccgtccaattatatttcgcgtaaatataaattttttgcttttctttttacccctttttgtttcagcccaaattgaggaagatttccgttccaaaatgatgtcagtttatgaaatgggcatttgcgagtcttcgaccgatgacgaggaaatggtttggcccatcgtttggcatcagaatagtgccttcgttttaaggacccacctcctccgccaaaagaactcatggctcataaccaatccgaaagttcgactactgatcaaaaaacgcctcccgaaatagacgaaagggcggctggaactgttgaaaacagtggaaatgcggcgaagaaaggtggtccgccgttggcaaagtgcagcgtttcttcctctcagtcgagcggcggcgatcagacggccgttgccgaccctcctcaaa

SEQ ID NO: 57171 - DNA, 1067 bp, Heterodera glycines
aaggtggtcttaaagaaagtgaacgtctctgaggattatgtacattattttaataagtttgggaagttgggacagaattatttcatcggaatcaatgaaaatgacgaggcgacgaaatcatatctcccgtacataaactgtcaggtgctttgatttgccaaactgaacaagaccctttcaatccaaattctgtttaacagaaatataataaaaatgactgcgacaagggaagaagtgatgggtgtatgaaaacggtcaaatgcgttgtgactgacccaatccgcggctcacagcaattggtgggtttaatatgaatttgctcacaaacactgaccaaagttcaaagggcactcatttgaccattgtaccgtttaggcttgcatggctaattattacctacgcgacgcatcgccaaacaaaagcttttctgagggcgacatcattgagccctctctgatggactgctggcagcacgaggagaggcaattggcggagtgtaagcagcaggacaaatgtgtggcggacgtgcgcaagacgggccaagccaatcagtcgtcactcttctgctgttgccgtactcacaattgcaatcgacagatggtctacgcggaggagaaatacattggaccatcgaccacgagtaacaaatcggtcatttcatttcccacccaatccttttttgccttaagcgtcctcttcaattgtcgactttccattgtccgttgggtttaacctacttcaattggccatcatcttctttaccgtccttttcatcgccattttcgtcgtcttcatcctttccatgccaaaattacgaaaaaaaatatgcaaacggagcggaactgcgaagttctttttgccgttttacagaaacacaaatgacggaaaggaccagcggaaagaattactcgccacggaatacgacgggcaaatcactttaccagatggagaaaaagtgcacaaagagaaaatcactctgcacgaggttctaacggtcaaaaggctgatttggtcgattttcttttcgagagagtgtccgttggtcgctttggccaagtgtacgaagc

SEQ ID NO: 57172 - DNA, 655 bp, Heterodera glycines
atgcgcacccgtccgatctggcaagttaagcaacgattgctgactagccaaaaggttcggtgccgtgatgaaacgaaccagcactgcttaccccgcggcacccggcacggtcccccgaaggaatggatttaattaaattctctccttcggggatttttttccattaggtcgtccgttagcgttcgattgctctagtcaatttttcaaaatttttgttgaaatatttgtcgtgctctgaagggcgtgggaggggggggggcgaaggcccaccacgaggccgcgaagaggccgagtgagtaccttcggtgcaggaaaattattaaattttaaaattttttaattgctttttaaatatgccaaaaaatgtaggcttaacttttttagtgaaaattcgatcactcatattttttgctaattgagcagaagcgtaccaaactttgcagggatactccccggtaaaggactaacttacactgaaatgagcgccgagctagctggctcaaaaaaatttttcgaaaatctgagtctttcgtttttatttatttgcaaaattaattcataaatattttttcagaaagggttctgaaacgcaccaaattttatttacatgttagtttaggcactctgatgctttttctatcaataatggaggtga

SEQ ID NO: 57173 - DNA, 678 bp, Heterodera glycines
  unsure (1)..(678): unsure at all n locations
gaaaaaaatatttatgaaataaaaaatcgattttttcaagtgtccgtttggggtactcaaccatttatggggagcaaaaatccaacgcagaaataaagtacaggctatagggaagctattccggaaggattcggtctccccataaatctggggcgcatcgctcgggggggactgcccccaaaacaaaaaaatcgattttttcaagtgtccgtntggggntactcaacaatttatggggagcaaaaatccaacgcagaataaagtacaggctatagggaagctattcccgaaggattcggtctccccataaatctgggcgcatcggttcggggggactgccccgaaaacaaaaaaattgattttttcaagtgtccgtttggggtactcaaacaattatggggagcaaaaatccaacgcagaattaaagtacaggctatagggaagctattcccgaaggattcggtctccccataaatctgggcgcatcggttcggggggactgccccgaaaacaaaaataaatcgattttttcaagtgtccgtttggggtactcaaacaattatggggagcaaaaatccaacgcagaattaaagtacaggctatagtgaagctattccggaaggattcggtctccccataaatctgggcgcatcggttcagggggactgccccgaaaac

SEQ ID NO: 57174 - DNA, 780 bp, Heterodera glycines
ctacaagctgatcccgatcaagcttgccaattttgtcaagacgttcggccttgaaattgagggagtggacaacaaaaagtacttcccccacaaattcaataaggtaagggtaatttatgaaattaattaaaaaaaaatcattaaaatttaggcggaaaattacggcactgttttggacactctcccgccaatggaggactactacccgggtggtctcttccctgccgaacgcgcaaaattcgagcaatggtacgacgagaaccgggaaacagggtttgagctgaacgaagtgatcgccgactactgcaaaacaggtaaaagttctggaaaaaacatgcaaaaatattcaaaaaaattttgaagatgttcaaattctggcacatggtctggtaaaaatgcgacagctgttcttatctgagactcggcatgacatcaccgattcggtcaccatcccatccggctgcatgaagtattgggttcaattggcacaccacgacaaagagcgcgtcgccattattccacatcttggctatgagaagcgcggaaaacagagcactattgccagaaaatacttgaaggtgtgccaaaaaaaattaaatttattttaccttttcatttctctctcagtggcgtgccgaagaagagttgcgggagaatggccgagtcctccgccatgtcgaaagccctggaggggagttcaaattcggcaactacagcttggacgggatgatggagcggccggacgaggagaaaaacttggccattgaggtcaatgggtaa

SEQ ID NO: 57175 - DNA, 1153 bp, Heterodera glycines
atgctggaggacaacacagccatgaaggcgtacttcgacaactgcccggactccggaccaattgacttccacgacgccttctttggcggtatttttgggtttaaatttgcaaaataattttgggcacaggtcgaacagggcccgaatatttgggcgcttcggtgatcaaccctgagacgggcgactggaagagccgtacgatcaaagtgaaggactttaacagtctttatccgtcgcggtaagaaatgtcggaaaaaaatgaatagttgaaaaatctttggcactttaaggaatatgttcaccaattatccggttggccacccgaccgtggtgcagtttgacaaggacgtggaatggaggcgtccagaggacgttgttggcgacgacggcatccgccttgagggcatcatcaagtgcttcgtagtgccgccccgccactgccactacgatatcccggtcctgccgtaccggctcaacaaccgcacgctgtttcccctctgccggacgtgttccgaaatgtacccgcgcggcttgatcgaccccgagtacaattgcaatcattttgaggactctgaaaggggtgagtttgaagcttgtaattaagcaaatattttttcttaataggcttttcgacaacagtcacacacattgagctgcaagccgctctccgctcgtggtacaaggtgacgcatgtgtaccgtgcctatatctggcctctggcgtgcgattggagcaatgggctgttccactcgtacctgctgaagtttctcaaaatgaaatttgaaggtaaaatttaaaaaaaaattaaaaaaaattcattaacaaaaatttaagcaagcggatatccagcgtcttgtacggaggcgggcatcagcgaggaggagtcggcacggcggaagcaggaccacatcgacaaagccaaacaaaaggcccaagtccaccttgaggcggatcggatcaagcacaaccccgggctccgctacctgtccaagctgtgcctgaattcgctgtggggccggttcgcacttcggtaaaatttctttaaaaaattatgaaaaaaaaatataaaacgtacaggaatcggctcacaaaaaccgaaatagtcgaatgccattcagagctggccaaactgctcaacgaccaaaagtttgag

SEQ ID NO: 57176 - DNA, 1045 bp, Heterodera glycines
atggttagtgcttagtttttactatttctaaacaagttttcattatgacatatttggtaattggcaacaaatttaaaaaatgagtttgtttgcttttattttgaagcaatttgctcaaaactgtggtgtcccgtaaatataaattttttctgtccggcgatccaccgtcttttttatggtccgtctaacttcttaaatgcatttctattaaaataattcattgtcttttttcagtttttcgtcactgctacatacagaggctattgtcctgcccacgactctttcctgtacaaatcttggcttggcatgctgaatttgacccgtgcccaactgaacgacggagtgccggaccaagaacacccgaaaagggagcatcaatcgccacaaaagcaatatcatttggacgtaccactagaagaattgcctcagcgattaaaaatgtggattgtgccgtccggggccggcgatgtcaatgctgatgggtactttcaggtcaagcgcattgacgcacggatatgggtgagctatttgaatttatacctaaaaagcgtcacttcacagcacgttttggtacattcgtaaatttttgggcaacaaatcgtcgttttttaatttataaattaatcaaaatttcgatatttacccaatttttactgaaagtttcactgcctgtcaggtttccaatgagccggaatccgattcggatagcagcagtgtgaacggagatgccacaagcaacggcaacaacaacaaagtgccattgtcgcattccttcgcggcatggtttcacgaaatggtcaccaccttccaccattccaacatcctgtctgatgaacgaagaacgtccatacagcaatttgttgacgaactgcaacagggctttcgcaccgagaccggcgttgactcgttgcaaattaaactgttcggctccgttctatccgggttcggctccaacgactgtgacattgacttgtgcctgatcaacaccggcatcaccaagcaggaaaaagtgcagcagaacggggtcatctctcaagaggtttga

SEQ ID NO: 57177 - DNA, 318 bp, Heterodera glycines
acaaagaaaacactcaacgaatttggcaacaaagtgatttcggcggaatggaaaaagttggggaaaatgcgaaagctgtattatggcattggcaatttcaagacggaccagcaacgattttacgaattgctcaccgaatgcatttctctgctgactgaaacggacacttccaacgtttagacttttagactttgttttcacataaattgttgagaatttataatgcataaaacagagtcagtgcaataatattttcttattttcttttaattttttaaccatttccaaaaacataaatatttatttacctctgaataa

SEQ ID NO: 57178 - DNA, 1322 bp, Heterodera glycines
cttcgggggaccgtgccgggtgccgcggggtaagcagtgttggttcgtttcatcacggcaccgaaccttttggctagtcagtaatcgttgcttaacttgccagatcggacgggtgcgcatgattccactgttccaagcaccccaccaaaagcaaaacgatataaccaaaatataaggaaaaattttttaaaaaattttttctccatcttcctttttgatactaaagcatcagagtgctaaaattaagttgtaaataaaatttggtgcgctttagagcactttctgaaaaaaatatttatgaaacaaaaaaatcgattttttcaagtgtccgtttggggtactcaaacatttatggggagcaaaaatccaacgcagaattaaagtacaggctatagggaagctattcccgaaggattcggtctccccataaatctgggcgcatcggttcggggggactgccccgaaaacaaaaaaatcgattttttcaagtgtccgtttggggtactcaaacaattatggggagcaaaaatccaacgcagaattaaagtacaggctatagggaagctattcccgaaggattcggtctccccataaatctgggcgcatcggttcggggggactgccccgaaaacaaaaaaatcgattttttcaagtgtccgtttggggtactcaaacaattatggggagcaaaaatccaacgcagaattaaagtacaggctatagggaagctattccggaaggattcggtctccccataaatctgggcgcatcggttcggggggactgccccgaaaacaaaaaaatcgattttttcaagtgtccgtttggggtactcaaacaattatggggagcaaaaatccaacgcagaattaaagtacaggctatagggaagctattccggaaggattcggtctccccattaatctgggcgcatcggttcggggggactgccccgaaaacaaaaaaatcgattttttcaagtgtccgtttggggtactcaaacaattatggggagcaaaaatccaacgcagaattaaagtacaggctatagggaagctattccggaaggattcggtctccccataaatctgggcgcatcggttcggggggactgccccgaaaacaaaaaaatcgattttttcaagtgtccgtttggggtactcaaacaattatggggagcaaaaatccaacgcagaattaaagtacaggctatagggaagctattcccgaaggattcggtctccccataaatctgggcgcatcggttcggggggactgccccgaaaacaaaaaaaaaaatttttttaagtgtccgtttgggg

SEQ ID NO: 57179 - DNA, 3268 bp, Heterodera glycines
  unsure (1)..(3268): unsure at all n locations
atggccatcagagaacggagaaggcgccgagtgatttcggcattcactgaacgaaaggataaaaaggggttttggtgagttatgcgtcccataattattttagagtcccgtgaaattttacacatcaaaacgatttatttatttttttataaaaaaacaagaagctaatagaagatttcatttttaataggacagcgcatttacttcaaaatatttttcaaatatttttgtgtttgaatgataatcggcgaaatgcgtcagacacaaatattacccacgccaggtgtttctggctttgctttagagccctccacaggccaatgcaattaaatccctggtgtgttcagtaattaaatggtaaataaattagaaggctcagacaaaaactaattgaggtttaagggccagacacataaataatttattacaaaacaattctgttaaatcaaatcgaaccgacattttaantaaggtttttataacataaaataatgggacgcataatctgccatgagaattcaaagtgaatgggtgattaattaagagtaattaataataattatcaattggatgggtcatcaattaatgaattgcctgaaatgtccttcttgagtctgaccacaaacgccaagagaacgtaaagcagaaagatcagcgcactcagtaaaacgttgacgagaagcaaaggcagtgccattgggccaaagtaagtgtcgtcgtgagttaagcacagagtgacgctaatcatcggtagccaattaattgccgagtattttactcactgatccggataatcaatggccatcgaaaagaccgaaatgataataaatcccgaatgaagcgaagtgctgaaaatgatcagaaaagcgtagaacgcttggtggcgatgtctgaataaaattaaaaatcattttaacatttttaaaaatgtgtacataaacgaattggcgaacaacgcattgacaaggcgatcaaagccaatccaaaaaagcgaacttaggccaacatttcggcataacaaaggaacggtttggacgacggcacaagggcctaaaaatattgaaaaatagaaaaaatttcgaaaatttgttgggaccttcaaacataaaagggtgtccgctgagggcaaatacccaaccgatggacagcgaaaggccaaaaaggccggaaaagagggcattggcggcgatcaaacagttgcacaactgacgaaatgtccttttaaatggcacaaataaagggaaataattttaaaataattaaattaaattatatttaaaattgagaaaaagcggactttgtcctccaagtgacaaaaacgagggaaaagttgagcagaaagccaagcgaaccgatggcccagcgaatgccaacggtcaaaaggaaagcgaagggcaattggttgttggggaaaacgccgaaaaactgcaaaaatacacaaggaaattttaaaatttttggtttttggtataatttaatcggaaatttaaatgataattttcggttacataattatattaattagatttaaattaatctgcaaattgaatttacctgcatcataaacaattaaaaaggtagcaaataaaagcgaaataatcttttaagaatagagagtcaaatgattctgagtactgtcataagtagagatcgaaccggtcggttatttgcggttttttcggtattttcatttttaggtttcggtttttaaccgaaaaaaaccgaccgagaaatttatgagtttttcgggttttttcggtttcggttttttttcggttttttaaccgaaaccgttcgaccgaaataattaaaaaaccgaaacaatcgaccgacttttttgacaaatcagttggccatttttttaacaaaattcattaaaaattcttaaaattttcctccggcggcgcctatcggcaccgccgaccccccaaaaagctatcttttcttaaaaaattagcccaaaatctcaaaatttggtatttttagacaaaatctgctcacaaatagcattaaaattacaaaaaaaaatttcctggcggcgcttatcagcaccgccggccctaaagttatggctagagctcacaattaaggcaccaaaaagcgcaaaatggcactgaaaaaaggcacaaaaatcccgaaaaggcatgaaaaaaggcatttaaatttttttattaatgatttttagggagcaaaacacgtaaaaactaaccaaaaaactaaattttgctgttactcagaggtgatctttcgctttttctattgataaaaatggtttattgtttttttgggaaaagataaaaaaattcaaaaaaaccgaaaccgaaacggtataccgaaaatttttcttcggttttttcaatttcggtttttttcggttttttaaccgaaaccgttcgaccgagaattttttgagtttttcggtttttttcggtttcggttttttttcggtttttaaccgaaaccgttcgaccgaccctcttgtccggtctctaattaaaattacgaattcacaattaaaagttaaattttttgagtcacattaagtttttatcaaattagaaattattttattttcataataaaataaaatatgttttaaaaattgacggattgtccactgatcaattgatcagtgacgtattgtccactgatcaattgatcagtgacggattctcaatttttaaaattatagggaggtgtaggcgaaaatggcagttatctgaatgaccaatttgataatttttgggtctttatttaaaaaaaaattttgggcagcggtgccgataggcacaccgggagggaaattttggtaaaatataacgaaattcgttaaaaaattttttatgtttctaatcttgcattcttttaaggtgccccaatattacccggaggcattccacgcaattcccaaggcccaattgacgttgtccagaaatttacgcgggcacgtggcaaaaaaaatacggtgagtaaatcagggttgaattttcaagatcagcattttgattttggcttaaaaatcagcatttcaaaattatttttaaatttaattaattgtttaattattaaatgaatttttacaaatgtcgcaggctcaattaaaatttttgtaattttttttattaaaattaattcagaaatttaatttaattattttattaaatttaatttatctcatttttaaacaatttacagctcgacgagtcgtcgaatcaggaggacgaggtgtttgttgaagctcatccgatgcaaccggtcactgctgacg

SEQ ID NO: 57180 - DNA, 786 bp, Heterodera glycines
atgcatcagtgccattgtccgtcaatgtttgcaagtgatcgggtgggatcacatcggccaatgttgtcccatttgacacacggcgagtaattgagcctaattaaagcaaaagctctttttagtttgggacaacaatcaaataaatacatttttttgagagtttaatattataaaaatataaatcaaatgagtcagacgaaattattgtaaaatttggaatgcacgattagagaaataatttaaaattttttttgacaaatttcgtataattggccaaaattgccctcctgatgtgcctatcggcaccactgctctaaatttttgttgtttttaataaggacacaaaaattaacaaaattggtcgtttctgttggataaaaaaatatttaataattgccattttcgtccacacttcccctataatattgcctcggaaaatcccatccctactttgagcgtgcgctttgtcggcactttgaccagcggaagcggcattgttgacagccgcgagccgacgagacttccgttggacagtggcgctgcgcgtccgttgcgcctttggcgtgtctgaaaaagaattaaaaaaatttaaaatcaatttaaaaaaaattaaaaatcaatttttaaatgtaaatttattttgataaaatgaacaactaaaacccagtcctaaacataatccatttttatatttcatttcagaagactctaggaaaatccgtcactgatcaattaatcagtggaaatccatcactgatcagtggacaatcgtcactgatcaattaa

SEQ ID NO: 57181 - DNA, 3099 bp, Heterodera glycines
  unsure (1)..(3099): unsure at all n locations
atggacaacaaaacacttactgtgggtataataattaaattntaatttaattgcttttttaatttatttaaaatttttttaaatttttttcttcatgctagcctgaccaacaacgggcaaagtggagaaaagaatatgcacacagaagtacgggccaccttttctgggaggtaactttttttaaagaattaataaattttatgaggatttaacaaattacttgatgaattttttttagggagcaaaacaccgaaaacgtaaccaaataacttaattttgagtcatttaaatgattttttaatggatttttttgtaaaaacgccaaaaaaggcaccaaaacggcaaaatgccaaaaaaggcaaaatgttaaaaaatttcattttgaaataaatattaaattaattttcccgaatttaagtccgaggacaacacgttggtagaatggcacaatgaaatagacgcgcaaaggtcccgctcgttgtccgcccgacgtgacaaaaggccggaggccccaccaaaacctctggtgggtcaattataatttttggtttttaatgtgcgaaatatgtaacaacatttcatacctttttgaaattttaattacaaataaaacaagtttgatcatcaaaaattctgattttaaaactttctttgaaccaacaaattaagtgatcttgctagccctaattattttctaatttcactgcataatttcattatttaaaaaaagttattttgagcaattaaaaaacttatcagcaccatattagatttccagaaaccttcatgatttttctctccctaaaattgggtttttggcgtttgttcattttttgtgattatttttgcgtcacaaaaattgagctgatcgatttgggtccactttctcgatgaaatacagtaacttttggaccatatgttagtaaagaaatgtcatgaagacaagcggtcttttttgtacttatttgttagaaagttttagatataagcttttttcaaaaacgttccaaaacttttaagaataatttgatgatcaagtcatgcattttgcccaacgatttttcgatcaatgtaaaaatcgtgacttaaccaaattaattccaggaatggagatgcacaaaatgtagtcacgagcctttttatacgcctcgtggactttctacccatatgcaacgagtgcataggtagatcagcattaaatcaattttaaataatataaatttttaattttaatttaaaaaataataatttatttcgaatagtggtgcaacacattcccccgtccgccggccatcgattcgcaccaccattgactttacggcggcatcacctgaaccagaagaggtgggtcatgatgccgtataaaaatatattgtcttgactcaaattaatccgaaaaattgatcaaatattttaaaaatgtgatttttattttgattttttaattaattctttttttgaaactttgatcacatttttctgatcagtttgttggtgagggtcaaaaaaaggtcgagaatttatgatagaattatctccacaaaataaaagtggtttaaaagtgatttgaatttactgtcagaaatattcccttgttagaaaaaaattgattaaatgtttgctcaaaaaagttttgcaaataagtccaaaaaataaaattttaattttatcaattttttaaaaatggctcaatcatttagctatggctcccccccccccccctctccctccttgggatagttggcggtcttatcttggagtcaaaatttaagaattagagtcttttttatgctttacaacaaaaaaaaaatgcaatttttagtaaaaaacaaaaaaatattttacactttttcagcccaaagcagccgagccgcccaccgaagtgcctcaagaacgatgggtggacccattgccagaaaagttgcaatttcagcagcaggagaacaaatttgccgagctcaaatgcaaatactcgcgcgccaatgccaaaggtgattattaaaattaaatttgaaaaattgatcatttttcattatttaaacgactgataaaatcataatcaattacttttttcaatttcaataaaacaccaaaaaataaatgataaaattaaggatatcttcaaatctatttttaggataataaaaatatattaattttaaaaaaaataaattttaaaaatttcttaaatttaatgccaaaatatttcttttcagtgcgctggtataagggccgcaaggagctgttctcggacggtctcaagtacaaaattctgatcgacaagcagtccatcacgctgatcatcaacaacccggacccggatgacagcggcaagtacaaatgcgaagcgaacggagttccgaccaattcatttttcactgtggagggtatgttttggacggggcggaggacaatagcgccaaatcagtttgaaataatgaatcactattttccagtaacaaccaaccaaaattaaatatttttggtggatttgattagtttagccttacgtgttcaatattgtttatttgccagtaaaattttgaaaaattttttattaaccaacaaaaagtttttttaacagattttcattagaaattgttaattcattaaccttgcctcaacttagggttaaggactttccaaggacgggtataattattattttaagtttttatcaaatttattatattttaataaaattttaaataaaaaaattgtttgtttatttttggatgatttcagacacgccaaaggggcaacggacgcgaagcggcactgctccggggaagtcgcgtcggctcgcacctgtcaacaatgccgcttccgctggtcaaagtgccgacaaagcgcacgctcaaagtagggatgggattttccgaggcaatattataggggaagtgtggacgaaaatggcaattattaaatattttttatttatttttgaattgatttgagaaatcgatatttttaacagttgaagccagttttaaatttgaaaaattaatttttgttgacggattgtccactgatcaattgaccagtgatggattgtccactgatcaattggtcatgacggattgtccactgatcaattga

SEQ ID NO: 57182 - DNA, 313 bp, Heterodera glycines
atgtcacaatcattggttgatctgatgaagcatttgttgagcacgggagaagacgcggatgtttattttttggtgggggacggagacggaaaagaggcgagtcttcttcaaatttgaaatttttttattattttttaaattaattttagtgaattgtcctttttttgtttgatttttacttaaattttaatcctcttcagcttttgtcagcacataaactgattttgaagcacacttctgaagtatttgcggcaatgttccgttttgatgctaaaaatgaaaaagcggaattcggtaaaaaatattaattata

SEQ ID NO: 57183 - DNA, 538 bp, Heterodera glycines
acgactccgacccctccatttaataatatttctgttttgaaaaccaagctgtatcgatgaaaaagcgtgtaagaattgccccgatagattattcgaaggttgggaatttcatgggctttgtttgggttggaattaatcgagtggcgggaaaggtcagtgattatttaaattaattgaacacattaattaattatgacaaaaaaggaaacgagcgagccaccagcagttgaattgccaacgattaaattggatatacatatttatatgttgtttaaaacaaactatttcaacagctttctaacccatagaaatctttaatttttccattgaattgtttaagaaacaaaggcaaaaaaataaagaaagtataaaagaatttttggccaaaaagcagccatcaacatttttaaattgcgtataaatctcgcaaaaatgaacaaattgtttataaattagagtccggaggaactctcgactcaaattttaatttagaaaataaaaagtccacaagaaataaccaagtttgtcaggttttttg

SEQ ID NO: 57184 - DNA, 1425 bp, Heterodera glycines
aaacactgccacggcaccagcaacctcctcctgctgccccacaagtgccgcctgttcccccacctaggagagggaccaaacgtcgccaccccccggaaaatggtgatgagagtggtgagctgcgcatacgtaaacgagtgaggcaagcgcgaagagtacgagtgtattactcaccagagccgggtccatcaacatcagcacaaagcgatgaacaacaacaacaacaacgtgaactgtttgccattccgtcaaatcagctgaccatggcacagagaattgagctaatatacatcaaatgcaaccgttatgccgatcgtatgggtgtccggggaaacgcaattatcaacactcaaaatgcacaaccattggtgcgaagcaatttgcgaacggccatcaggtatataattgacagaagagcgggtcgacctaccattagaccaccgggagcggaccaattggaggagcggcttaggcaggacccaattttgtattcattgacggctccaccaaagagaccatcgcagagcacaagcagcaggacgtcaataaagaaggaatttcagccgaaaaaatggaaatgatcaacaccactcttgacaagctgtacaacgatccatcctctcctgctgcgtttgccggtgttagtgcactgtggaaggaggcgcggaaaaagttaaaacaactacggaaaaaggatgtacaacactatttggagggacaccgcacgtacaccctgatgcgcccccggcgggtacgatttccgagagcaaaaactgttgcagcagggttcatgaccgacgtccaagtggatttggctgactttcaagcgctttctcgtcacaatcgcggtcaccgatacctgctggttgcggttgatgttctctcaaaatgcctgtttgttgtcccattcaaaaataagaaggccgaggagatgttggaggtattcaaggagcttattgagcaaatgccaatgatcccacaccgtatcttctccgacaaaggcaccgaattcaaaaacaaattgctcaaggaattctttgaggagcatgagattaagaagcatgagcccgtgcattcgtacttacaccccgcttccgtaaagatgaatttgtgcacatgagcagagagaagggccagttcgagaaggggtatttgccaaactatggagacgaaatcttggaaattgacgaggtgctgaaggcggtgcgccccatcagatacaagctccgggatgatcgtggtgaaaaattccggggcaccttttatgagcaggagttggcccgcgtgagaaaagatgccgacaccagttacagaattgaaaaagtgtacagaaagcgaagaaaaccggatggaaccacagagatgctcgtaaagttcattgggtatcccgaacgagaatggattgacgagtctcagattgtataa

SEQ ID NO: 57185 - DNA, 1099 bp, Heterodera glycines
atgttccccgatgacgatgggtacgaatcggaagatgatgaaattctcttgccacctccgccgatccccccgcaacttggccaccctccaccaaatgttccggtaatttcggtttcgcttttcgttgctttttctcaaatttccgagtgcttttttcaggcagttcgtgttcaaccaatgcatgttgggcagcagcggctgccgctgagagacttgccacaattcgaggaccatccgcaaaatgtgccggtaattttgggtcgattttcgctgcgttttctcaaatttctgcgtgcttttttttcaggctgttcgggtccaactgatgcaacaaccattgccgctgagagacctgccgcaaattttccaccctccaccaaatgtgccggtaattttgggtctttctttcgattgctttttctcaattcccgagtgcatttcaggcaattcgtgttcaaccaatgcagcaacccgtaccaatgagagccgtgccacaattcctccaccctccgccaaatgcgccggtaatcttgagtctcgttttcggttgctttttcaaaatcccgagtgcattgtttttcaggaaatgggtgtgggaccaattcatgatgggcaacaaccactaccactaagagcgttgccacaattcgcccaacctccaccaaatgtgccggtaattttggctcgtttttttttgttgcttttttttaattcccgaatgcttttttcaggccgttcgtgtccaaccagttcaacaaccgataccactgagagacgtgccgctatttgtcaacccaccaccaaatgtgccggtaattttggctcgcttttgttactttttttcaagatcccgaatgcattttttcaggtaattcgtgtccaaccgatgcctcaaccgttgccgctgagagacatgccgcaaattcaccatccaccgcgaaatgtgacttcaattcggatcaaattgtggttgctttttctcagtctctgggtgtttcttcagggaattcatgttcgacaaattcaacgggaatacgcagtaccgcaatttgcccatccgccgccaaacttgccgtatcatccaccagaaaacgttccg

SEQ ID NO: 57186 - DNA, 1017 bp, Heterodera glycines
atgcgaaaactcagatatccaaataacgttggaaaacgaccagagatcgcaggtgaaacaagtaaggcacgaaaagaagtcgcacttgacggaggtgcatttgttggtgttgaaattgacgcagaaaaaatggtcggcaaattgaacttttatgcggccggaatattatacaaagaaaaagatgaaaacgtgcaaccaattgagaaagtgccagatgaaaaagtgccaattgggaaatggcacaaattcgaagggcaagaaattgaactgatgccaagagaaattgatatgacaggtgaataacgaaaatattgatttattatttaattcactatatgatttaaaaataaattaaattaaatataattaaattttgccatttgaaagatgaaaatgacaacatttgcattgaatttttggcattggctgatgctgatgaaatgaaagacgatgcgcactttaaaatggacgataaagaacgaattcaagcaaaattgggcaaatatatttgcaaaaacatgaaagaaaatgaaaaaaacaagcaaaaggatcccaaaaagctaaattgcaaatttgattggacaacggtggacgatgttcaattttatgcggaagaagcaatgggcgaaatgcgggagaaatttggaattacttacaagaaattagcggtaattatccacatatcctaaacacattaatgataaaattcgattgaaactatgaacaattaaaagaccgaaaaaatttattgttttataaatggtaaaaaatatttttaaataaaatttttaggaatcttttctatcggatgacttagctgacctgggtatcaaagggaaaagctcaaacaaaatttatcgtacaaaagacgaaaagtttttgttaaagcaaattcctcaaccctatcaaatggaaacaatggaaagaacgttgaaagattatctgaagcatatgatgcaaatgggcgacaaatcatttatcaacaaaatcttttttgtgtttcgagtggaaattgag

SEQ ID NO: 57187 - DNA, 987 bp, Heterodera glycines
atgggccattgcgcttccaaggaccagaaggaccagaaaaggcacaaccggcgcattgaggaacagttgcgcaaggaggtcagacagaagagtgatgggagacgccaatttgtaccgtatatttccggagagaccggaaaatatactgtactgttggttgggatttgttaactgtagcgctgtgctgcagcagggattattgaatggcatactgtacccggaggaacactgaccgtaatgatagagcacgcgcaccgtaatgggacataaaagacctcctgtgggcataccgtacaaataccgtaccatttatcaattgggatggcactcagtattaatgtcagtgtgatgatataattaggtgccatggtgtggaaacaaattaattaattaatttccaattattttagcaatcgatgaatttgcgcatcatcaaattgcttctgttaggtccgttattccgcgaataaaatataataattattatttaaaatttatttgaattaattaatttaataaatgtaaaaatataataattaattaaaatgtatttttatttaattaattaaacgaataaataaaccaatttttcaaacttttttcggcatgacattttttgtcatgccgaaaatgcattaaaaattcactaagaaatttttaaattaatttaggcgctggcgaaagcggcaaaagcacaattttgaagcagatgaggtgcccaaaaacgggaaaaaacgatttattgaaaaaaaaattaaaaataaattttcaggattttgcacaaagatggcttctcaaagcaggatttgctgctgataaagcctgtggtgttgaggtgcgaaatggcatttgttctgttctttaattgatgtattatagaatttttgggttactgtaaaaaccggtatttaccgtttacccggttttaccgtagaaaattattcacaaaattgcctcaaaataccgccaatttttggtaaaattaaa

SEQ ID NO: 57188 - DNA, 837 bp, Heterodera glycines
atgggtttcggaccatttggagcagttgtaccaaaaagcggttgttgagccggagaaggcgcgcaaggagaagacaatggtcgaaatgcgagacatcaaggaacagattctgcagcgcaaaagtgcggcccagcaaattggtattggggacacggacggacggaatttttgtttttttttgtgaggggtcttcaagtgaaatgcaaggaaaatgctaatttttcgcctatgtcaaaaatcaagttcaaacttaagttttttcaatccctgaaagcctaaacagctttaaataaatatgattgtatgcgataatttgatagtcagcaaatttttgaaaaaaaaataatgaatctttcaaacaacagaattaatgcttctaatgaatcaaaagatcgtgttttcgtaattatgctaccaaggctttaaaaaaaattcaagtctgaatccgaattcgtattccaaatttggacaaaggcacaaatatccggggctcaaatctctgtctggacacgggcatgaaactaatttttgacgaatttttgtgtaattttaatttgattttgcttgaaatatgtgcaattttcgaataatgagaccttttttaatgtgtttttaaaattttaaggtgcgatgcttttcggagcaggaaaaaccgtcgctgacgacagatcgccgccgaaacgtcgtcgccgagacatggccggacaaaatgtcgccgagacaaaacgtcgccgggacagaacgccaccgagacaaaacgtcgccgagacaaagcgtcgccgggacaaaacatcgccgagacaaaatgtcgccgagaaaaaatattccaaaaattaa

SEQ ID NO: 57189 - DNA, 96 bp, Heterodera glycines
cacttggagttgtgcagcaaaaggtaccaagagttgaagaacattgtgatcaaagcggaacgtcgactgcttaatgtgctcggatttgttgtgcac

SEQ ID NO: 57190 - DNA, 101 bp, Heterodera glycines
cgtgacgtgctcaatgtgtacaatcgccttaagcaaatccatcatcggagaaatgcggtcgcatcacaacaacccgaagatttgcaaaagctgagcaaaaa

SEQ ID NO: 57191 - DNA, 1259 bp, Heterodera glycines
atgacatttgggtacaaccctaatgttccggcagaagtcatacttttgccagtgcatttccctggacattggactctaattgtccatgatgttcagtggggtactcattttgccgattctttgcctaccccctatggcaggttggattggcaactgacggataaaattggaaagatcatttctgacattttgccgtcagcagtgttgaccgggatttttaatgcggtaaatcttacggtacaacatgatggaaatagctgcgggtactttgtgtgcctgtatgctgaatcctggcttatgaacaattgcacttttgttctgccggatttgaacatcaattatgagaagaagcgcattttatggcacataaatgagctttacggctctgatattgtgccgtttcatccaagggaaggtgtttcaacatctttcgctgttgtgtctcatcacaatggggatgtagcgcaaacttcctccaaggtcataatgccaatggaagtggatgattcagcagtgcttccttcctcggaagatactgctgttcttgcgcaagcaccagtgatcggcgaaaatcaagctgacacccacggtgttgttgcggacacaattgtccagcaagaaccaatcgcgcaggctgatgatgtaattttcatcagacctaagacgccaccaaggcgatcaatgcgcgttcaaaaaaggctttcagcttctgttagccgttcgccttcaccggcgccgaaacgtcccccgccagcaaattcgctgggagtggcaacgccgatcacacggcgttgctctgcatttcacaaggggtggcaatgcgctgcagcagcagccaaacatttcccggaatattgtgactccgggaaactcggtgacaaaaaatgcgccgattgcggtgcacatctcttctcacatgaagacagtagtatttgctgccggaagggaagagttgtgctgccaatgcttaacccgcatcctgatgagctcaaagagctgattgtggggaataagcaatcccgtgaaggaaaagaatttgtgcgacacatgtcgcgttataacaacctgttccaatttgcgagcgtttccgctggcaacaaaccaagccctgctggcggtccgatggccgttattcttaacggagaattccatcgccgcataagcagcatgcaggctggtacaactcagattcctggctttggccagttgtacattctggacccagtcgaggctatggaacagcgtcgaaacaaccccag

SEQ ID NO: 57192 - DNA, 87 bp, Heterodera glycines
atgggctgcacaatgagtcaggaggaacgggcggcgttggaacggtccaaaatgatcgagaagaatttgaaggaggactttgtgcat

SEQ ID NO: 57193 - DNA, 297 bp, Heterodera glycines
gagggattatgacggatgagttgggaggccggaagcaatggcaaaatgaaaaatgaaacaaacgctgaataaaagtgattatagttgttgctccaaaaaggaggctaaggataaattaatattttaaaatgaatttgtagcaaaaagtgcgaccaaatgggaaatgaatgccaaatcacctcccaacaccctgccaaaccaaagctaaaatgggcaaattcaaatgtgaaagacggcacggcacgcgaataacattggcatttgaatatgaattaaattaataccaaaaataaacaa

SEQ ID NO: 57194 - DNA, 1158 bp, Heterodera glycines
gccaatccatcgctggtgatgttggacttgagtcgcaatgagctgattgacctgtcgccgggcactttcctctcccaactgaaccttctcctcgtcgatttgagcttcaacaaaattgtcagaactccgttcggcgcttttggccgtcggattgctaccgtattacttcaaggtaataaaataataactacagtatacgcaactaataattttgtttagaaaatcctttggtttgtgtggaacaaattcatatgctccaacagggaaacggcgtgttcattccgaacatcgaagacaaaatctgtggaaaggattcgacaacaaaatccacgacagtttcggaaattgaggcaaattaaaagcaattacctaaaataattatgaaatttatttcaaatttaacttcctttttaagtcactctccgccgatcaaatcgaagacaacgcatcggaggagacggaagcagcagaagaatccgcatttgttcagcaacagagcaccacgccgcccaagggatcgaccgaccaatttgctgagacaattgaaacaacgatcaatggccataaaatgggcaaaatgccaaacatacgcccaattcaaatagggcacaaacaacggcaaaaggcggcaacaacacaagtaaatgccgtagttaatttggctgtaataaaaagcaattattgcttttaattattaggtgccatctgccgatggttttgttgctgaatcgtcgccttccgccgaattaactgagcaaaatgccaaattaatgcagcagaatcagaaaaacaacggagctgaattggaccaattttcacttgaaggaaatgaaattaggcaccagcaaagaaaggacagcaaagtaacaaaagtcaattcaattaagctaaattagcgttaattatttattatttgtttaggaaataaattcgggcccaattcctctcaacgaaaaaattgaaaatggcgaaggaatttcaaaggtgagagaccgtaccgctgaaactgagtcacagactgcgaccgatacggtaattggagaactgaccgatgctccctcgtcgactacggtagacccgcgcaacgatccggccgtcatttacccgcacccggtcccatttttggccactgggccgaaacttcacacggcacacagt

SEQ ID NO: 57195 - DNA, 1625 bp, Heterodera glycines
atgtttataattagtaaggattacatttttaggctctaaaaaccgccaaaataggtaggctttaggctctaaaaacccaaaaaataggactaaaaatgcaaaataggcactaaaaaacccatttttaggggtgtaaaattttaaaattttatccaaaaaggtaacaaaattaacccaaatcagtattgagataaatgtttttaaatcacaaattcttgtcaatatataaaaaataaattttgaggtgaatttttgaaaaatttttcttaggggtgcattttttgaaaattttttgggtcgattcttaggggtgtgtttttcgtttttattgcatttttgttaacaaattttcggcaaaacgccaaaataggcaaaaataggttctttcaaaattttttaggctttttaggcgctaaaaataaaagcctagaaaatagtcactaaaaactcgaaaagccgcttaacaacagcccaaaaaaatatgtttttcgtgcgcatcaggccacggggagttcagacaggaaaaaataggcttttgcctaaaaatgtaatccctaataattattgaatttttgtaatttaaaaatggcaaaattcttaacatttaataccataatttatatgcaatgttaaatttgcgtcacatcaaacaaatataaacaaacaagcaaaggagttttaatattttttttcggaaattttttctttatttttcattcatttataaatacttagaacgaaaattgtaatcgattgttttagaatcaaagctaaatcgaaattttaagtccaaattttattttaaatttcttagttcttttatttttttataaattgtactaatagattcaatgaaccaaattactttttttcttaatttactgatttttaagattattttttatttgtttagttgtaattttgaaatttcttaaaacaattctttgaaattgtttatttcctcttttttgcagtgcttgagcaatttatctttatgttaaagttgaatatgaaattgtttgtttcgagaattgttcgttccacgtcgcaatttactttttgaattgtcagatgagttcattatttttaattattgaaatatatgttttctttgtaagtatctgatcgaaagtaaaatattcatcactgtcgatccggaacaataaattcattttaattcagtttatcatttaatttattggtttcctttttgttaggttattgttgagttattataaattttatatttattattattgtagagtgttaaaacccgtaaaaatgaatattatttaatttaaatgataaaaatatcattccagaattatgtgctgcttctaattctttgaaacttcataattttatgctcattatcctttttgtcatttattattttgttgaaaagcagagcaaagccaattttcggccatttcgcaatttgcgattgaataagcgtgccgattccggcctcaaggcctccttgatgttcattagaaccgagagaatataatgaagataaaaataggctttcccttattccttttataatcatttctatcatgaattatttgtaagtctatattctgatttttttcacatttaagttttcggctttaccgaataaa

SEQ ID NO: 57196 - DNA, 1952 bp, Heterodera glycines
acaatgatgatggtattatggtgaataacaaagtttgtggtgctcaccattatcgtcgtcgtgctccgtccataccgaacattaccattgatgactacagtactaccaacaataacaacaacaacaatgatgctggtgttaatgaggcggttaatggcggcaaaatgggtgccgcaattccgttgccggcacccgccattccattgccagcacctgaaggcatgaatgaggataatcaaattgtagaccagcagagctcttctgtaatcgaaaattgggctttccgtgcccaagaatatcggaaatcggcattcgacacatccctggaaccaacagatccggaaaaaagccgtagtttaccgtgtttaggtttttggtcggaggcacgcacggcacacattattccacttaaaaacccgaaaaaatggttgacgaccgatcgataataaaatatcgaaatcatatcgatcgtgacgattaggtgatgttgatcgatgccctcaaaaaaattcggcaataggaaatcagcaattttttaaattgacaagagcttgggccaggacttggtggactcaggcctgggtttttcctggttactggcccagatcatttttcggcgacctggagcagttcatatttttttttcaaaatttcagcagtcgaacaccaatcgcaacatcaaaataacgaagcattgaatcaagcaaataaaaatgttgttgttgtcgttgataatgatcgtaatagtgcatgtgaacgtgctgaacttgatgaacatgtggaggagaagcaacacaattatggcataaaacagacaactgctgacgacattgacctcctacaacttcttgatgaaactgagcacttgactgagcaacttaggtgtttattagcattttagccgatggatgagcgggaagaagactaaaaaattttgaaatcgaaaaacggaggggtatgatacataccctgatcacttttttaaaattttgtactttttattttgatcaaaatactctgactaactttttccagacaaaaaatttcaaacttagataaaaaaaatcttagaaacttttttcgaagattgaacaatttaattcatcctaaaattaaaaaaaatcgcttggaaaatttttcaaaatttccttgaagttatgttcttttaaaatgaaaaaaaaccgctaaaaatttaatccgataattttgtaaaaatttaagagaaaatgcgatcaaattggagcaggagaaggagacaattctggacaaaattaacaacatcaaagcatcatcggcggctggcattaagccgacggcagcgcaattttcgcaaggcaataaatttttttttaaattttaaattctaaaaaatttcccaattttttttcagccgaacgtgacggactgatgttgaacatgcaacgaattttggccaggtgcaatactgtgaacatatcaattgaaacgccacgtgatcagcaccaattcaaggcattggagcaagtgaacaaggtgggtggtgcgattgttggtgccacactttttcaagcagtccaaccggcggggatatatgccagttttgaaagtccagggcgggtaggcatttgtgccaacgccatcaaaaacatttcggaaatcggcatttagacggctcaaaattcggaaaccggattccgattctaaaatgatatttttccgagccatagggatcagatcaggacacaatgtgtttaaagttgcactccaaaaatttggcattatgaaatttaaataaaaattacacaaatattttagaatttttagatccatgagcatacaaaaaattaataaaattcatttttttagatgatacaatcagtgttggaccatacaaatggaaatattgcagaatcgaaacaaaaaattgccgcctttttgaacgcgtgccatccagacgaagttggacgctattg

SEQ ID NO: 57197 - DNA, 118 bp, Heterodera glycines
atgccaatacgaaaaagaaaatgccaaagtgaaaactcagaaaaacgaatgaaaaatgatgtgacaatatgttttattcttgagaaaactgaattggacataagacatttatcagatg

SEQ ID NO: 57198 - DNA, 1041 bp, Heterodera glycines
atgcaaaattcaaaagttgagtgccgtcgtagtgccgacggcgcaaaaagtcgcactcaagagtctcagactcgactcgagaaaagtctcgggtttttttcgtctcggtctcgagtcttggatttttagtctcgagcagcagtcagtgcccttttttatttgttttttcgaaactcgaaatcacggcattttacttgcttaattttgctgaacccaaacccgaaactcttcatgaaaaataaatcaaatgatggcaattaggcacttttaatcaaaatacaatttcatgaaaaacgtattttttgaatggacacgcaattagggaaaagcagcaaattgacaaagtcattaattagtgcacggaacggcaggggaaaaaagtgtcagaaaggcctaatgtactggcaaatgagctccatttgtttaatgaagaacttgttatactgactcaaattggaaaagcaatgggaaaatgggcgaagaaaaaaggaaataaaatataattaataaatttaatttgacaatttcgttattttatgtgagaaatgatttcatatgtgatattatttatatattttaaaatcttttaaataaaacattcgtaaaaaagatatattcaagattaataattttcatttgtaaaatgtttttaaagaaaattttaaaaaatttctgaaaattgatgtgacattaatttttccagctttaaaaatcaaagatagaaaagttttgaggagtttttaacaaaaatttaatttaattttgttttgattttttttctattttttaatttatcttaacattggggaaaaatattttaatttctaaaaaaaattttcttggaaaatcccagtttattcccgatcgtaatataaatcgaaaatttaaaaatggaatatttttcaaaaaatagtaatagagaaaatgattatttaacattaataattttgtttactgaaattaacttcataaaacattataatttagtcgtaaaactgaaaactttttctaaagcaaaaataattttcttgtaaaattaaa

SEQ ID NO: 57199 - DNA, 912 bp, Heterodera glycines
  unsure (1)..(912): unsure at all n locations
atgtcatctnggaaggggatggtggtcgccgtggaacccgtcgctgaacaccagcaacaacaacagacggacgattcgattgcggaagaagtgttttcggaggacatcgtttccaccttcaaaccgtcggagaagtcgctgcactccattctgtcattgcgtagcaattcgatgagcaccagtgcgcgggacagcatgggcaaactgaggagggactcggccagcgaagcgctgctcaaactgagaacgatgaattgcgtgccggagctgagaagtcctcgcgagtccaaaagtccacccaagtaaagccattgcatgctttcagcagtcccaatccaaaatttacagacccctgaggtcgccacgtggcattgaccgttttatggccaaattcccgcacaactcttcccgagaggccagtttcagtgaagagctgagtgtcaagggagaaatgctggaggaattgccgaatgcgagtcaaattgggatggtaatttttgggcaatcggtcccactcactttacccttgaattttttagcttttcgatgtgagtggagcgtctgtggaaggaactttgtccaaattggacagcactgccgactcaaaacgtggacagtcggacatttttttgggcacagatttcgtcgaatccaataaaatggagagaggcaattcgttgggcggttttggtgtgccggaaggtgaagtcttttggggaataaatcaaaaacggttctgtttgagtttgttcggctggtgtcaaggcacgggcagagaagacaagccatgttcagttggatactaacagaattctgttggcacaatttgtctacgaccacctcaacatttggccgactcaggaaatgcttatggagacagacctagaagtcatcaagggcttgcgcatttga

SEQ ID NO: 57200 - DNA, 665 bp, Heterodera glycines
cacctcaaatcccgccgagtccgttcccttagccagtgcccccacttccgccgagtccgttcccgtcattgccttcatttcctctgggttcatttacgccagtaccaccggtcccactgcctccactttcccccgaagtgcctccacttcggccgagtccgtctcccgaagtgcctccacttcggccgagtccgtctcccgaagtgcctccacttcggaggagtccgtccccaaaagtgcctccacttcggaggagtccgtccccaaaagtgcctccacttccgccgagtctgttcccgtcagtgccgccagtaccaccagtcccactgcctctactttcccccgaagtgcctccacttcggccgagtccgtctcccgaagtgcctccacttcggaggagtccgtccccaaaagtgcctccacttccgccgagtatattcccgtcagtgccgccagtaccaccggtcccactgcctccactttcccccgaagtgcctccacttcggccgagtccgtctcccgaagtgcctccacttcggccgagtccgtctcccgaagtgcctccacttcggaggagtccgtccccaaaagtgcctccacttccgccgagtctgttcccgtcagtgccgccagttccaccggttacaatgccaccaacatttcca

SEQ ID NO: 57201 - DNA, 342 bp, Heterodera glycines
gtggaggcacttttggggacggactcctccgaagtggaggcacttcgggagacggactcggccgaagtggaggcacttcgggagacggactcggccgaagtggaggcacttcgggggaaagtggaggcagtgggaccggtggtactggcgtaaatgaacccagaggaaatgaaggcaatgacgggaacggactcggcggaagtgggggcactggctaagggaacggactcggcgggatttgaggtgattagagaacggcgactgatttgatgaaaggaattaaaagagaaattccccttttcatgttaaatcaatgttgatcaacgacaaataaatcttttt

SEQ ID NO: 57202 - DNA, 660 bp, Heterodera glycines
atgactaattcccaaacggttggagcagaagtgcgcggaacacgttctggagaagaaacgtctggagcagaagtgtgcggaacacgttctggagaagaaacggttggagcagctgtgcgcggaacacgttctggagaagaaacgtctggagcagaagtgcgcggaacacgttctggagaagaaacggttggagcagctgtgcgcggaacacgttctggagaagaaacggctggagcagaagtgcgcggaacacgttctggagaagaaacgtctggagcagaagtgcgcggaacacgttctggagaagaaacggttggagcagctgtgcgcggaacacgttctggagaagaaacgtctggagcagaagtgtgcggaacacgttctggagaagaaacggctggagcagaagtgtgcggaacacgttctggagaagaaacgtctggagcagaagtgtgcggaacacgttctggagaagaaacgattggagcagaagtgcgcggaacacgttctggagaagaaacggttggagcagaagtgcgcggaacacgttctggagaagaaacggttggagcagaagtgcgcggaacacgttctggagaagaaacgtctggagcagaagtgcgcggaacacgttctggagaagaaacgattggagcagaa

SEQ ID NO: 57203 - DNA, 979 bp, Heterodera glycines
aagaaacggttggagcagctgtgcgcggaacacgttctggagaagaaacggttggagcagaagtgcgcggaacacgttctggagaagaaacggttggagcagctgtgcgcggaacacgttctggagaagaaacggttggagcagctgtgcgcggaacacgttctggagaagaaacgtctggagcagaagtgtgcggaacacgttctggagaagaaacggttggagcagctgtgcgcggaacacgttctggagaagaaacggttggagcagaagtgcgcggaacacgttctggagaagaaacggttggagcagctgtgcgcggaacacgttctggagaagaaacgtctggagcagaagtgtgcggaacacgttctggagaagaaacggttggagcagctgtgcgcggaacacgttctggagaagaaacgtctggagcagaagtgtgcggaacacgttctggagaagaaacgtctggagcagaagtgtgcggaacacgttctggagaagaaacggttcgagcagaagtgcgcggaacacgttctggagaagaaacggttggagcagaagtgtgcggaactcgttctggagaagaaacggtcccagcaggtaacagacgtgacattaaaaaagtgaagtttgattgttcacttttgcaggtttcgctacctcaacgctttgggaattggcttctttcaatgctccagggaccagcggcacaccaacttttcttcgaactgatgagctccgagaatttctccgttcgcgccgctccgactgatgtgccaccgatgagtgctctggcgccgtccctttgatcatctgttcttttgctgcccattgatcatatactgctgttctgtccataatccctacctgtaattatatcctgtgctaacaccctcatttatgttccatatttaacttataatccgtctgtattaatttctcgcataacctgtacttgtattgtgtaaataaa

SEQ ID NO: 57204 - DNA, 3152 bp, Heterodera glycines
atgacattgagtttgatgcttggcttgaagatattggtctccttcacgcacgtcgtacgtgtccacgatgtggtggagacacatcgattaaggcaaaagaaggccgccgttatggaaactggcgatgcaaaacaaagaattgccgaaaagaaactggctatttggtcgggacatttttcgaaggttctcttgctattttgtacacagttagtggtgttctagggtcaaaattatcaaccaagcaaacttttgaattgacttatttttaggcgcgtaaatatgaaaccattgattacattcagcaggaaactttgtcgattggtttaacttttgccgtgacgtttgtgccgaattctttgtaagacgacccattgccatcggtggttaaggtcctagccaatttttttctggggatttttttgtgtgtaggaagattagtcgaaatagacaaaactctgatccagcaatacgtacttcctggtaaaacgattgtcagtgacgaatggcgatcgtaccgcggaattccgaatctcccgcagaactatgcccatttgaccgtgaatcattcagaaaactgtgaatcccggaaaccgtcttacacacacgcaaatatcgaatcattatggaagaaattgaaaaggaattttaaacaacagttcgggaacaaaactgaaacatatgatacgtattttcccgaatttatctgacgtcggcgttttggtgatcgtgatactgttttttataatttttggttgcatgtatctgagttttatccgtgccaataactgttgcaaggctcactaacacaattgaaccgattttattgaataaatgtgaatttttaggaaactgtattttcgaatttttgttcaagtccgggttcgaggttcgaaatgggtcgaaacggatgtcagattcgaattctacggcctaaaaaccctaaagacaattttatctctgaaaaaatttttgaaattttttttcaaaaaaggggggcaccatcggcagtattaccgacttggctaatgtgtcaaaaaattgcaacttaattaagcccattctcgtcaccagcagcagcagcagcagagaaaagccaaagcaaagaaaatccgactgatcatttcgttggaaaagaattatatttgagaaatggtcgatcagaaatgctctctcacattttcatttgttgattctttcgttttttttggtgttttacctttcacttcttaggtatttcagccgcagcgttatgccttgaccatttacgcacaagatttaccatttgaaatcgtaagtttgaggggggattggattgtaatgctaattggtcatcattttcagcaaagtgccgtctttctgagcatgaactatcgtggaacgccttctcgtactgcaaaacggagctgaccaacccggactacaggaaggacgactttctgattcggattgaaacaatgcacttgagtgaccgcggcaccaccaaaaacgtgactcatcatcatcactaattgattgttaattatgctacaattttcagttccgtctttcaggcactcggtctttcgaagggagtgctgaacgaacgcaaagtggtgtgcattgacatcgccaacgacaaaataagtgaatgccgagaaaagtgcccgccggtgattttcggcggttgccaatcacgaaattttgacatcatttgtctactaatttaacattactgaatttccctcgaccgctggtacggactgacgctggcgcaaattcgtctgatcgaagaggagacgcagcgggcattggatgagggatgaccgcctctgaacgctgatgatgaaacgcgagtgccgtggcgatgaagctgacctatttgcttgttaatgtatataattcactgcttgtcctttcatccccacgcatttttcgccacttattgtatactaaacacaccccaatttcctcttaatttaattggtttgtgttgtgcttatgtggcagcaaataaatgttcgattttaagatttaagcacagttaaagattgaaaaatgccggactcggagaaggacccgaatttgaaattcaaattgtgacttaaaaactgatgaaagtcacgaaaatgtcagaaaagtgcaaaaatgtcttacataaaatcccaaaagtaaaaaaacaaataaaactgcaaaatagagacttcaacttatgcagatgaacatatgttttatttacacaatacaagtacaggttatgcgagaaattaatacagacggattataagttaaatatggaacataaatgagggtgttagcacaggatataattacaggtagggattatggacagaacagcagtatatgatcaatgggcagcaaaagaacagatgatcaaagggacggcgccagagcactcatcggtggcacatcagtcggagcggcgcgaacggagaaattctcggagctcatcagttcgaagaaaagttggtgtgccgctggtccctggagcattgaaagaagccaattcccaaagcgttgaggtagcgaaacctgcaaaagtgaacaatcaaacttcacttttttaatgtcacgtctgttacctgctgggaccgtttcttctccagaacgagttccgcacacttctgctccaaccgtttcttctccagaacgtgttccgcgcacttctgctcgaaccgtttcttctccagaacgtgttccgcacacttctgctccagacgtttcttctccagaacgtgttccgcacacttctgctccagacgtttcttctccagaacgtgttccgcgcacagctgctccaaccgtttcttctccagaacgtgttccgcacacttctgctccagacgtttcttctccagaacgtgttccgcgcacagctgctccaaccgtttcttctccagaacgtgttccgcgcacttctgctccaaccgtttcttctccagaacgtgttccgcgcacagctgctccaaccgtttcttctccagaacgtgttccgcacacttctgctccagacgtttcttctccagaacgtgttccgcgcacagctgctccaaccgtttcttctccagaacgtgttccgcgcacagctgctccaaccgtttcttctccagaacgtgttccgcgcacttctgctccaaccgtttcttctccagaac

SEQ ID NO: 57205 - DNA, 525 bp, Heterodera glycines
atggactggatcaatattaacttaaataaaataaaaacaaagtgtaggtagatgagcagtcaactcatatttaaaattaataataccctttctcatcggaaaccttaattaaattaattataatctttatcaaaaattgtatacaaaatttattaaagttttataataaaaccgaaaattgtaattatttttaaatttttttagtttttcaacgtttgaccggtgaccccccgctcggcttcaaaccgagtttaagtcaaaaaagccggcagtgtacatcgaaaagattgaaaaaagccaatgataaaaatgaagaaataccttatcagaattattactttttatttacttaatttttcaattatcataaaatatccaaatttaaaataatagggacatttaagaacaaaaattgttattgcaatgaaaaaagattgatatttgaatttactcaacgaattgaaaatatagtttaaaaatcgaaaaaaataatatattagtacaaaaataagcaaagcaaactaa

SEQ ID NO: 57206 - DNA, 305 bp, Heterodera glycines
  unsure (1)..(305): unsure at all n locations
aaaattccctcaaaaataaaaggtaaattgcgcaccgccctccnctatcatgctcgagagcatttgtatgtgtataaaatttatcaaaaaaagagatagccatttttctgggataacctctaaatataaaaatcctctgtgaaataaaatggcgattgtgcacagccctccgtctcatacgcaagcgcttttgtgaggtataaaatttctcaaaaaaagagatagccatttttctgggatagagtataaatttaaaaattccctcaaaaataaaaggtctattgcgcaccgccctccctatcatg

SEQ ID NO: 57207 - DNA, 135 bp, Heterodera glycines
aggatttttatatttatactctatcccagaaaaatggctatctctttttttgataaattttatacacatacaaatgctctcgagcatgatagggagggcggtgcgcaatagaccttttatttttgagggaatttt

SEQ ID NO: 57208 - DNA, 119 bp, Heterodera glycines
tcgctgccgctaatcgcaaattgcgcaacgatgtcgccacggaatgtgccaatgtcgccattcatcgccagcaacagcagcagcagaagaacggaagtgccatcatcatgcaaacttaa

SEQ ID NO: 57209 - DNA, 415 bp, Heterodera glycines
agaaaggcgacggcgcagctgcggcggacaagaaggaggagaagcgcaaggacaaacacaaatcaaaggaggggaagagcgacgacagcaaccgccgttccaagaaggacaagcacgggaagaaggacaaaaaggacaagaagaaggacgccgccgagccagcagctaacgccggagaacagagcacagcggagacgacccaagcggacgaatagccagcgatgagaacgacgacggtgcacgacgacctctcccccttcacgatcagtcccccctactgcttgctgttgtttgtgtgaagtccgttccccatattttgtacatattccatgtgatcagagcgaccttcctaatgtgatcaaaatatgtatgtatgtataatatccattaatgtgctgcttcatattcgctattt

SEQ ID NO: 57210 - DNA, 118 bp, Heterodera glycines
tgtccgtttggggtactcaaacaattatggggagcaaaaatcccacgcagaattaagtacaggctatagggaagctattcccgaaggattcgatctccccataaatctgggcgcatcg

SEQ ID NO: 57211 - DNA, 168 bp, Heterodera glycines
agcgctaaatttatcagagtgccaaaaatcgcatgagatctaaccctaaaaaaaatggtctaagtaaaaatcgaaattacgctcaaaaagtttctcaaacaattttagcgcttccaattccttctacaatcgcctttatacatccctttatgagcgctaaaattatca

SEQ ID NO: 57212 - DNA, 438 bp, Heterodera glycines
aaaatggtgtaagtaaaatcgtaattacgctcaaaaagcttctcaaacaattttagcgcttccaattccttctacaatcgcctttatacatcccattatgagcgctaaaattatcagagtgccgaaaatcgcatgtgatctaagcctagcaaaaaatggtgtaagtaaaaatcgtaattacgctcaaaaagcttctcaaacaattttagcgcttccaattccttctacaatcgcctttatacatcccattatgagcgctaaaattatcagagtgccgaaaatcgcatgtgatctaagcctagcaaaaaatggtgtaagtaaaaatcgtaattacgctcaaaaagctcctcaaacaattttagcgcttccaattccttctacaatcgcctttatacatcccattatgagcgctaaaattatcagagtgccgaaaatcgc

SEQ ID NO: 57213 - DNA, 285 bp, Heterodera glycines
atggtacgaattaagcaatcttttccttccgaggatcagtgttcttcatcatcattgcatgataatgattcacgaccctcaaatgatcaaacgggttcaaagctcccgttcaaaaaagcggatgaaccggttcaaagctccggagaaaaaaagcggttaaaaacttttgaaaacgaacatttgaataaaaaaagaaaattgcaagacactgaacaagaaaatgttattaatttggatttgattgacttggaagatataaacatggatatgattgaccttaatgaa

SEQ ID NO: 57214 - DNA, 117 bp, Heterodera glycines; identical to SEQ ID NO: 53938

SEQ ID NO: 57215 - DNA, 1447 bp, Heterodera glycines
atgacgcatttggtgccgaagttaaggtcggaaactgccgaggattttgaacaaattcttctgttcctctgtcaggtgcgcttgaccattacgcagttcaaagattgcgatgacaagaagggaccgagtcgagcaggcctatctatttcagtacttcaaaagagatgccgaagagttggaaatttggattttggaaaagctacatacagcggttagtagccaaaaaataaaaattttagcttaaatctttcgcgaatttgttgcaaaagttcaggtcgaaaactgccgaggattttaatttttgtgttgaaattttcaagaaaatcttatgtaaaaatactttaaaaaactttcatttaaagatttctagtatttgaaaatcagctcgaaaattattttcttatcttggagaattttttattatttaaagttttctcattttaaatgaaagttccataaattttttaatttataaaaataatgttaacattttgcaggccgagaaatttttaaaagttcccctgcaaaaaattgcttccttggcattttgtccacctgctctttcaggcccacagctggacaagtcaggcaatgacatgattcagccaggtatgaaaaaagtttaaataattcaaaaatatgtaaatcaaaaagtcattttgaacagcgacattgctggccaccaacgacttttggcgcgatttgaacactgcactgacgcagcgaaagcataaggggcccgagcgcgatttggccgcattggagtcgaaggtggcacggcaaggggaaatttagcagtaaattattcagacacaaaatgtcctgctttcaaacaatcccttcacaaacaagatcatggctctgctcgataaagctctgccattgagtagttttcgtgtgacaagcacatagcttaattccgaccatagaattgttagtgctgttcgagagacgagaccgagaaaattggattatgaaagagagattgataaaaaatatgaaaaattttcaatatctctctttctgaactggtggttaaatgtaaaagtaagaacagaaccaagaccagttagatgagagctaaaaccacaaaaaagtcagacttttcgcatattttatttataacttttttacatgtcgatttatatttgtgatttttgggatgccaatagagattgtaaagctttcgaatgataccaagtttgttgaatttatgttatgggctaagttcattttttatttaaatataccttagttcgattaaagccacttaaatttaaatgaaaaatctgttaactgaaaatcttatatatttacgttcccctcccccaaggtggacaaactcggcacagagacgaaccaattcgtacaaacggcaccgcttcatgagcgacaaacacgacttggtcgagtgaccatgagcattcaggtgaatgagcacaagaca

SEQ ID NO: 57216 - DNA, 1278 bp, Heterodera glycines
  unsure (1)..(1278): unsure at all n locations
atgtatagaaattctgacttttttcacttttattcaactatggttcctccccatcctcaaaaatacagtaagtattattgtttgggagatttggctttgtgatataccaaagaaacgaggcaattaaaactaatgttcacatggattaattaaatatttcaatattttcattcttaacagataaagtctgcacccactcattcaatacactgtgccgaaaaagtcaacgattgttggacgaagagattaaaaagtcggtacgaaattttcagtgcattcagatgtggttattagctttgtttttaaaatcttaggatcattccataacactattataatttttgattacctaaattattttttataagcatcattattttaatcgatgaaataatttaaaaatttttaatgttgattcggtgtcgaattttaatttgtaagctttcccataatgtggggtttttaatgtttgaaaaataatttgagtcaatttaatgcgaaatattttcatgcatttctcacttttcgattttgtaagaaaagcgccaacacatcagatgacaaaaaaaaacttttttctaaatttcagtcaacgaaacaatttcccatttctgccacccatttcattttttggatttgcgaaattattccccataggaaagactcagatagttcaaggtcatggattccacccatccactgccatcaagtacataattgttaatgttgcaactgactatttttgctaaaaaactccattcagtttgaaaatctttgtcccagttttacaactgtaatcgtaggtcaatcgcacaatcagtcattgtgttttggcaccccattttcgtcatttttccttccaaattttcactcttcagtttttcatccattgcctataacaatttgttcacataaaaataaacttttcttttaaaacccgccatatttttcagtcatcatttgtcattacaaggcggaaagcgtggcccctctgctcacatttggctctcagtttggcattgtgttggctgttctctccgcctattttctcatttggaaaccctccgccgtttgctcactcgtcaaaaggtagtgagtgaccaactttatttataaattacctttcctatataaaattcaaaaacattttgtttagatatgaaaattttctatttatattaatttaattgcgttagcccanaagatggataatgaatagggattccttttttcgtaagaaaaatcgcgaaataagtacaaaaaagctcgaaatcgnta

SEQ ID NO: 57217 - DNA, 1135 bp, Heterodera glycines
atggggagtattgatgcacctgaacacacctctccgtggactgttcttcttatcttcaccactcaatgtccaaccggagaaaaactacaagaccgctgcacgggctttatcgtctcacatgatctaatcctaaccgcgtcacattgcgcgttcatgagttacaatgaaatcgaattgagatgcagatacgaagcagaaactcataaacaatggtgagttctaactaagattgaaacttctcattatgcatgacaaaaattttaatgaatattttaattgttatgccggccgagggcaaacaataatattcaaatttatttgaagacaaaataagttaagaaatagcaaaaaaggggagggatatcattgtgaggaagcacaaatgaaaaatgaaaatacaaatgacagaatgggtaaaatggtagttctaaactcgctagcagtgactgaagtggagtctgtaaattatctgcaagaaaataaacagaaacacgaatactcggtgttcaattcgattcagttgactttctccgtcgaaaaaatttattcggagacaaaataaataacaaggagcaaaatcggagtgtcgattgggaggaagaaccgataaatgaaattaatacaactgatagaatgggtcaaagggcggactatttatgtggaggataatggagagagagagataacagatgagagacaaatacaaatgaatatgggagcggtcatattagtcccaaacctaacatttttgatatatactagggtcagacgggtccaggtaccagaccgggtccaggcctggataccctgctttttcaagacccgtacccggacccagttttttgaaaatccaatacccggtacccgacccggcaggtccgtttccaaccgggtccaaaaacacactgtaacaatcggggtcagagtcaaaatattagcaaagttgaagggaaaaaaaagtaaaaagaataatttaatttattgtaaaatagcaattaatttctcctgtggcctagtggttattctgtttgattcatttctttctttgctcaggttcaattccttcttatatcagttgggtttaacattttttttttaaatttttgtttaaaactgccattttatcattaagtga

SEQ ID NO: 57218 - DNA, 1142 bp, Heterodera glycines
atgaaagcaacaaataaataccttaattaccgcatagtcaaatttaagggcgaggccatccttcaattggtgaggcgaaaattcaattggaataaatatattgttgatgtcttctccttgtagtagttgtgcgttttcgctgggattgttgatgtccaaatatcctatgtaaatggctaactcttctggtgtgtgttgtaacctgaaggatttcattttgcggtaagtcttaggtatttaggtaaaaaccgggtccgggtatttccgggtccagaaaaacagagtccgggtccaagtttttaaactggatccggttactgggtccaaccgggtcctgaaaaatataaaaatcaaattttcctaaattttttcataataaaagcttatattaaaaaagcatgaaaatataatattttacaaataaatgctttaatttttccaattttattgctattcaaaccatttttgcggcgagccttttccgaaaaacttttcacgaacaggggtgggtccggcggtgccgataggtgccgtcgggaaaaattttgaaaatttactttgatttgttaacagattttagtgaataaaatgaccaaactttgtggttttagcacaaaaaatgttcaaattttcaagaaatatagggataaaaatttcaaaatttcttatgggatattgtaaaaattaagaatttttttgtaaattctattaaaacaagatagttattttatttaaaaattttgagctttattcacttaatgataaaatggcagttttaaacaaaaattaaaaaaaaaaaaatgttaaacccaactgatataagaaggaattgaacctgagcaaagaaagaaatgaatcaaacagaataaccactaggccacaggagaaattaattgctattttacaataaattaaattattctttttacttttttttcccttcaactttgccaatattttgactctgaccccgattgttacagtgtgtttttggacccggttggaaacggacctgccgggtcgggtactggattttcaaaaaactgggtccgggtacgggtcttgaaaaagcagggtatccaggcctggacccggtctggtacctggacccgtctgaccctagtatatatcaaaaatgttag

SEQ ID NO: 57219 - DNA, 553 bp, Heterodera glycines
atggcactgttcgaatctcgtggaattgtgttgcaacagtgtgtcgacttcgaccggagaaggcgtcgaacatatcaaaggatgtaaggggaacagctgattagattcgggattcggaatgagaaaaaaagccgggattttgcttgggacagccaaattcaatggatctggatccgggattccggagtaaaaaaaggctcggccgacccgggattcaggcggaggaaccctgttctagacaaccctagtagtagtaatgctcgagaccgaaaatttcccgagactcgagaccgaggcccaaaaaaacacgagacccgtgacttgaatgtaagcggaatattcagttaagttgaacaaaaaaacattaaattttttcgaggcatggatgcttccaacgttggtttgtcaatgggccttgacgtcctttcaaggatcaaaaatgataagtttggttgcaccaaaagatcaaattaagtcgatcagaagtttttaaatatttttggatttcaaaataatacagtaaccattgggctatcgaatcaaaaagaataaa

SEQ ID NO: 57220 - DNA, 66 bp, Heterodera glycines
aatatgtggacaaagtgttgtccaagcagcatcagatgtacgcggatgcgagcgaccacatgctgt

SEQ ID NO: 57221 - DNA, 535 bp, Heterodera glycines
tccaataatcaaaaattgcgttgctgttgtagacctcaaaataccccttgatattgaaaaaatttatttaatatctccatccacaaaatataatccacgtaaaattcatgctgtaattatgaaagtgtataatccaaatgctaccgccataattttctcaactggaaaattcgtatgtacaggagcagctaatgagaaagaatgtaggcaagctgcggagcaagtcaccgaacgaataaggcaatgtgggtactacgaggcacgaatccacgaatttgcggtgaagaatttgattgtgacagcagacgttggttttcatatacgcttaggacctctgtccgactttctacgcgccaaatattgttccttcactcctgaactattccccggtcttgtctatcggaataaaagccccaaagtctccatcattgttttctcgagtggaaaattgaatataaccggaagtaaatcaaagacagaaatagattctgtatttaacaaattttattcattattatgtaattttaaacattaa

SEQ ID NO: 57222 - DNA, 922 bp, Heterodera glycines
atggaccgattagacacaataattgcatctctccttaactgctctgcacgtaatttatgtgatcgtcttaatcacccggatgagattcaaaaagttgaaaaatacctcaaaggaaaaactctacaaacaacatacaaaaatcaactaggtgagtgcaaagattttgagtacggtggaattaccaaagaatgtgcccgtaagcagatggcttacaatggtttcaagaatgtgaccgtcgaccagcatttttatgtacggcaccgcatttgtcttcgctattcaagcaatccttgcgtaatcgaaaaacacaagaatggcaatgaacgtttctacccacttgaacttgtgaaagtgaaggacaatgatataatttatttagggcaaaattttcctaaacctttaattcgtgatgataatatgtttattgatgatcaacaatatttgaattggtaacttaatgtttaaaattacataataatgaataaaatttgttaaatacagaatctatttctgtctttgatttacttccggttatattcaattttccactcgagaaaacaatgatggagactttggggcttttattccgatagacaagaccggggaatagttcaggagtgaaggaacaatatttggcgcgtagaaagtcggacagaggtcctaagcgtatatgaaaaccaacgtctgctgtcacaatcaaattcttcaccgcaaattcgtggattcgtgcctcgtagtacccacattgccttattcgttcggtgacttgctccgcagcttgcctacattctttctcattagctgctcctgtacatacgaattttccagttgagaaaattatggcggtagcatttggattatacactttcataattacagcatgaattttacgtggattatattttgtggatggagatattaa

SEQ ID NO: 57223 - DNA, 4109 bp, Heterodera glycines
ttacggttccgtgagaatgttcaggccctgatgcgatcagatatgtgctagagcggggggacaggtctgatcagagaggatgataaggaaattgatcggagaatggaagagaaagaatattagctgatctgagaaataagacatgattggtcacccccaggcactgatcagagtagtagcaagggaattgattaccgcctcggataactccgatagttctccatgtttggctcattctatttgatcagcagcgtatgatcaatgtatgaaatccctgctcattttagctgcttcactgagtacatcggtcgcaatggcggcttccaggacattatcatcggctcggaatgtgccgaggtttcttgttggtgccaatggcaaaatttaatggttggcacttcctctgaccatgtaggaatatgtggtggcacacgaaacggggcacgccctgggctattggcacacgcagtgagttgatcagtgccgtaaaaaaccaaaatgataattgcttgtttggcacaattcagtcaacggcccgaccgggagaagtacattagcatcaattggaggttggcccggtggaaaagtagagaacggaagagagcggacattttgccaatattttatgaaatttttaatccgatttaagttttacaaggctttcttttttgaatttacccgaatcgaaattgcatttatcaatttataagtccactttggtttatcagcagtgcccgttatattttttaaaatatatttttcgaatattttaccgaatgaaaagcacaaaaaaagcttttaccagtttttcttttcaacagagcgagtttttatcacattaaaaaaatacaaattatatttttggatttttgaggtttttagcaaatatttggggtttttggcaaattacacatttagatatttggcatttttagcaaatataaaccgggccctgtttatcagatagtttaatcaaaactgtgttgtattcattaggctttacttgaccaacaatgccaccaccacaaaactaacctgagggcctttttggcattttttggaatgtcaaaatgtttaaaaattcaaatttcggcatttcgttttgtccgctctctgagaaaggggacggggaattctgtgggggcatgtacaacaacagcttatcaattaacacactctgctgaaggaatgtgctggaagaagcgaccgctgtaagtttttaagtttctccattttatgaattataaaaaataataaataaattgttgaaaacattaaaaaatatattcaatttttgatattgaattccaatttgataataaacatatgagattttgatcaaatattaacacaatttccattcagtccttcatgcccttccggtcaatgcttcaagtaaatatttattattttaaaatatttttcttttataaattaaaataattaaatcaattttgaaattgcattttcatttcaattcattttttgattttttgaattgttttatgatgcaaaatcaattcacaaataactgactcggaaatacatattccaattagctaagaccttatagtaaaataaaatgcttttcccgcatttgcaatttccctctcattagtatgattaattgcgtaattagcaacgctccgccccattcccccaattatcgctaattaattgccctcttccctttcccaggcgttcggcatcaaacaggtgggtggtgttggtgagtgacgcaactgattgtgttatgtgtacgtcctgcccatgcttcgcccattttttccatcatccgaaggtgtccactcgtcgagcaccgtcagtgcctaatgttttttccctttctcccgcggaggggtgcatattctaattaggctaattagtttgatcgcccccgaattttttttcagaattttaacacattttttacatttttccattgttcataacttttttgcattgttaaaattatttgatgttttttggaaaaccaagcttgtccagatgaacatttaaatgttaaattggtgtcatgacaactcgtacaattgcttaggttaagcctatgatttaggcttaggtctaagctttaggctatacctaggctcgtttggacctaggcttaggcttaagcttgggctttattttggaaaatacgaattgccttttgtacgaattgtcattgacccgcaaatgcttaaatgctacggattgcctttccgatcggttcacctgctttttgatcagatacgactacggttcgctgatgcactatcacgcggttgcacatgcgcgccaagtgtccgacttcaccattgtgcccaaggagctcaaatatgtgaccacaatgggcaccgaacggatggcatttttggacgccaaagtgatcaacggttgtttgtacaaacgaatgatgtgccctgggcatacggtaaccgtattttcctcccctttcagacatttactgtccaagtcagtctctcccgatgggatcgctacaaatgaaattatgtaatggcacttccccatcccattccccactgatcagatgcctgctccggtttgggcgagttgggaagacccgtaagtgacgtgggggaaaattgggaggaagattagtgggttttacgggaatttttcgagagtcgagactaaggcacaaagaaaatggcgagaatgatctccgatgacgtatgacaatttttggaacatttggttttaaaaaccgaaccaaatttactgagatttttcatacgaatagaacaatccgagagctaacgtatgatatcaagactgttttatttggctgtgtttgtgaaaatttatcatgagtttttcttgaaaaatctgtaaaattgagagtttttttatgaaacactctgacatcgactcataccaagcccaaaaaacattcttgactttggaatccgaagagttgggaacccaagcagtggacagagttggacatgcttatgctctgatattgatctcatttcgtgttgaaaatggggaacccctcaattttcctaattctccacccctccgttcagttgcgctgccaatcaggcggttacccggacccgaacaattgcaatgtgtgccgatgccctgaaggattgggcggcaccgaatgcgaacggcttcagccctcaagtgggtaattagggggacaaaaagccgggggaagggggggagggataaagccaatggaaaaggaggaaaagccgtggccaaaaagggggaagggaaaatggggacaaaaggaagtgcaaggaaactagggaattgtgttatgccatctcagactgtggtgccgaactgcaggcctccgaccaatggcaaacattgcgaagtccgaacggcaaagacattcagtgctattggaggattacggtgagtgggcactttcattttggtccagacattgtttgccaaatattagtgattctcgagatcgaaaatttcccaagactcgagaccggggcttttttcaaaaaatattcttatgcacttaaaaatcgaaacaaagtctagaacacaatccatttgactaaatatgtggtaatgtatgtatataatccatgaaaaaggttaccaaattatgtatttttttaatgaaataattttttaagtttgaaaagccaaattaagggtgtttgtctggtctcgagatcgagactatcgggcttcactaataattatgccaatttcagtccgaagaaggaagccgagtccgtttccgcctaagcgacggcgaagtgagtctcggcaattagtcgacccttgtaaaaatgctttttttagtttccatgctcctacggctgtcaggtaaaatgacgcttttccgaccactccttaattagcacaccgtttgccccacttttccctccttttcagtcctatgtcgagataaagcacaaattggacgttcggctgaccggctttcggaggtcggtttatatattggccaatctttccgacacacatttcgcagttgttgctatcggcccaaggaggacaccgtgtcggatgggaaccaaatttttgtgatttttcggcccaacgggcgcaccgcgcgcttctcattgcgcttcatccgtcaggcg

SEQ ID NO: 57224 - DNA, 1241 bp, Heterodera glycines
atgctaaaactattaatttctctattgattctaaatgtccaaagtgattttttatccttataaccaaaattgttagcatttacgaatttgatgttttttgtgtgttagagatgtgaaaatagtacgccaaaaagagagaaaaagtaatgcaaaaattttaatcactccataactttctaattcgacctattttaatattaacttgacctattaaccgatgcagaatttttttctctatcgatatgcagaatttaaagaaaatctataaggcgataaaaaagttctatagagcgaagtgaatgttgttttttacatcataaaatggaagagatactacgccaaagtgagagaaattacaaagaaaaagaaaaacgacgagatagtacaggcttttctctgcacagtggagttgacccatagtggggagaggaagaagagaaacagagagagagagataatgtgataatatgacaccaaaaggggagagagagaaagaagttgatagaacgattaaagaaagaggggggaggatgaaaagagtagagaaaaagagaaacagatataagagtgtgagagagagaaagttgttgacaaatgagataatgtgaaaaaacagagagagagagagagaacgcaactcgcgcgctaatgataatgaacatggaaaaaagaaattgccacattcttttgtcagacggtgaccggctgttcgcgtcgggactgaaacggattgacatttctgagtcggactccgaggtggacgacttcttgccgacctgcaaaaagacccggaggagaagccgccaatctgccacataaattaaagaacgagcttttccaatgcttttggaggatctcatttgtccgatattctttaccctataatttaaatgcgcgcctttcccattgtctctctctcttcgccaaatttagctttatttgtcaacatttcacttcaaactcttcagcattttttgccgtcctcatatttggtttagtgtattcaaatcgttgttttttgttgtgtcgcttttttcacccctttcccagtgcttttttgtcgtttttttcattacattgatattatttggatattgtgcaaattacacacaacagcagacatggatgggtgctttcattaaaaaaaccaaaaatttccagccaattccaccgccgataacctccctcgaggtccggacaatccgtcagctaattttaacaaattattctttttcatttaa

SEQ ID NO: 57225 - DNA, 1012 bp, Heterodera glycines
  unsure (1)..(1012): unsure at all n locations
gatctcctcttncggaggaaaaacggtcattttcagcggtgacttcaaacagtcgctgccggtcgtgcctcatgaaggcttaaccgctcaggtgacagcctgttttcaaacgtctccgttgtttggtcaattcaccacgatgaaattgaccatcaaccagagactgggccaaggtcagcaagcgtacttgcaaatgtgccgccaaatcgggctcggagaaaccggagagcacttctggattcctccgcagttcctcgttaagagcaaggaagagctgatagattatgtctatcctaacttccaacaactccttggcaatgacaaagagctgctcaatcgtttgattctcgctccgcacattgacacgtgtgatgaagtaaacgagatcatgatggcgaatgtgccaggtcaagtgcgggaatacttgtccacggataagccccttgacgaccgcccactggacatcgatgagatcgagtccgaagtggctgcgttgaaccggcgcacagactcgggcatgcccccgcacagtctccggcttaaagtcggatgcgtcgtcgtccttcttatcaataaaagtgataaggaaggactgatcaatggcacacgcatagttctggaagaacttggcgatgatcgcctcattggtcgtgttatcaatagcaatgctattggcggccaagtgagattctttcttgaaagaacacgaaatgtctatgaagacaaatcgcctggcggcataaaatatgagcgtttgcagttcccaataaagcctgcattcgctatgaccattcaaaaaggtcagggccaaacaatccgcactgtcggcattgatctggaaaaggaagtattttcccacggtcaattgtatacggccttctctcgggcaacggacggaaacaatgtccgtgttcatgctcccaaccgggaaattgatgccctaggccgagccaaagtgctgattattgtggccacgcatatgctcaaattacagtaaatgagcaatagtcca

SEQ ID NO: 57226 - DNA, 283 bp, Heterodera glycines
atgtctccgtccatttgtccgtgctcagtgccaacaacaaacttttgcttttctcccgcttttcctcccaaatgccatcgccggcggagggcgaaaatgcgcaaacatttcaatacgtaagaaaaaagcaaacaaacgaaaggcgggcaaaaagaaaacatttgcaggtcaactacggcaatgtgctcatttttcagctgagggcgaaatgcgccgacggatcggtgggccaaaaatgcacggaaatttgtgcaccaccgaaggcggggtcagccaaaagaaa

SEQ ID NO: 57227 - DNA, 1179 bp, Heterodera glycines
atggtggccaagactcctctgcaagcgctcctcggcatcttcctccttcgctcgggcgttgcttcttcgctgacggcagcacagacgttggttgaagtgattgtaaaggctcagccaaaattggagctttgcatgtattttggaaagaggggtgatcagatcagttcgggcaaatacccaacggaggaagaccagcgaaaagccctggagaagtgggctgggtcatgttatgtggccagacaggctttggcagccaccggattcaacccgctggaaatggaggagccagaaggagtcaattcccttcctgaatccgaaaagctgaagtggaaagaagtgtttggccaaagcgcttgggccctcgaatgtgtgcgggcgacggttgtgcacaaagcgggccgctttttggcacaccagcgcgttttgctcggagattcatcagctgccgccctttcacaatatatccccaattcattttgcattggacaggaggggtcaatggcagacatcattcgacaatttcagccgaccattttgtcaagtcgagtaaaagcgatgcttataatcacaggccgtgactcgcttgtcgccggagaaactgccgaatccattgccgaacaattcgaaatggtggtggagctgtgccgtcgcttcagtcatgtcaaaatttattggtgcccgcccccgtatgtccacaacaaatccgctgaatatgatcaattgatcgacaaaatgagggccttaataaataatggacccattatttcaatttgcatcacagaaaaaggccgctctgttttggaaattttccgttttggggatcatttcaacaaatatttggtcacggatgacggtaaaatgcgcaatccggggtgcaaaatccttaaagcttggattttttcccaatcgtcattccccggagacattgagctgagtgtgcgcacgctcaagtcagcggtaggagtcccttcgagagatcaggccgatcctcgttcggacacgaccacagctgttccgagagaccgggtcggtcctcgtcgagaccaaaatccgtcgttccgaattctccatggacgccgtggatcggtgcgctatcagccgtaccaaggacatttgcacggacctgcgcgagtccgtgactccgatcgccgaaatgatggccgcccccatcgtcgttga

SEQ ID NO: 57228 - DNA, 245 bp, Heterodera glycines
tgcgcaagaaaatcacggcctccaacgaattggtggtggagcaggacgaaggggtcgcaaaggccaaaccgccgaacgaacaccgctacaaaagagccgccaaagacgaaaatgaaaatgacgcttttggcgaggacgacggggatgaaaatgattacgatggtggtgaagatgagcatggcatttggctaaattggcgcgccaagaaacgggacaaccaaagcaacaaattgggcggtggctaa

SEQ ID NO: 57229 - DNA, 2730 bp, Heterodera glycines
atggaatctctgaatatggatgcaggcctcagtcttaatagctccggtttggcactcacttcagtgcattcaatttatgttttgtttttaggtcactcgactttcgcattagctgagaaggaaaaccaaattgaacagatgcgacgcaaattgcgtgttttggaaagcgacaacgccgaacttcgcaccactttgcctcgactcaaagacgcgcagggcaaagactgcactggcgaggtttgtgctgctttctcaatcctggaatcagttttgtgaattttattcctcattatcagatgatcaaaatgaataaggaattgctttcggcaaaggaacagtgcgagcgatggcgaaccgattacatggagttgaccaagaagtacgacatgtttgagaagtcgaccatcacgcagcttgaccagaaagacaaacagatgacacagcttcgacaccaagccatggaaatggaagaggaaaacggaaaggtacgaattccgtccattcattttgatgagccctcaaaaggatgcaataattcaaatttagttgcgcgaaaagcttgaaaatgagaagtctcgagtgtggcatttgcagcgcggagagtttgaagaccaattggccacgccaaaggccgttcagaacgaaggggcagacgatcagttgtcaacaccaaaggtattctcattattttttcaaatttgccatttctcttttttttaatttaattctgtttttaggctcacaatcagatgctggccaacattatgtcgaaaataccacaaaatgttgacgttgtcgaagacacttacctgtgcaatgtcgatgatgccgaacagctcgctgcacatctgctgatgatcctcgagactttggacaagaatttccataatgcaaacgaacttcaaaatgacatattcacttttctggcatcgcacagcatttgctccaacaatcctgaaaagtttgccttgctcaactcggtttacaagaaagtggtcagtgttttttttgaaactttcaatcacttaatttaaatttcattttttcaaaatgttttagactgacaatcgtttggcgcaaattcgtgccggaaatgagcagtttcgttccaacatgtcggtgggcgacaaagacttcgatgcctgcatgaaacacttggcggtccatgactccatcaccctttcgtccataccttcgtttgccggcttctccaaggaaattgcatttcaacttgaagtggagttgcacttttagaatcaacgcctctctttcattttttagacatcaaccccggaaatggacaacgaccagaatttgacttctggctcatttttcgccggcaatgtgacttgtcgcacctcaactcttctcgaggtgtgcgttcggatgttcgagaaactgcgcgggaccgtcgagtttttccaaaaccttctcaaaattcttggagtgagcgccgaagagttgggcgaggacattgccaagaagttggaagcaatgaagctggatttggacgtttccgtcggagaggcccagtcgatgctttctgaaggaggaggcctggctgcgattgaggattcatttgcacaatgccgagtcgagagggagcagcaggtgaaaagtcggattcatgggaggacaagaacgggaatcccatgataagcaaatcagctttttgtattcaagataaatgacatgaaggtcgagattgagaccatgcgcaaaagtcaacaggacgtggagcagaagcagttcaaacttgagcaatcgttggcggaggaacgcgatcgaatgctgaaagtgacggcggaacgagacgctttcgcgcgcgaattgcgcgatcgggagacggaagttgagcggttgaacagcgaaatgaaggaattgcagaagcagacggaggagttggaccgaatgaagcaaatgctgcagtcggaggtggagaaaatggtgggtcattgccaaaactcaagccaaaagcatattcataattgcacattttttaaagaccaactcggaactgaaggagaaagtgctggtgcacagtcgggaggagttggccaaaattttcgacacgatgtcagtgtgttaaatgcttactaatataaatggaggcattttaattttgaactttgacatttctttttttatacaatcaccgttaagggaatacaccaagtcaagttgcaactctgtggtttcgtcgctccgcaaaaagaagccaaatattgggaagaagcagccgacgcaggacactcaaaaacagtgagccgacgatagccatttgtgatccattttatagaaagacgtgccgatgcctggcgataatctcctgacacatcatttaatttaatcgttttgctgactttaattctttatatttcttccattgttttccttgcactgtgcctactctgatttgtccctcgcttcaatgctttcatttgactcaaaattattgtgcggtaaatttggtgctgactaacttgcgatgggtttcgtttgatctctctgtttacctcgccttcgtttacccttttctctctctctccgttttctttcaactttctctcctcttcatcccattgatctgatcaatagagcaatgcagaaattgcctcaagcaaacttccgctaataatgccaaaaagcagtcactttcccccacaatccttgacggctgtcaatttggtgtcaattatttgctgcagctgtaattgatgctttaattaa

SEQ ID NO: 57230 - DNA, 429 bp, Heterodera glycines
atgaaacttgtccatcctgagcctttgccagtggaacgtaaattgctgatgaaaacgttgaactgcgccaatttgtgtgtgtttccatttgtacgggttgaaccaccgacaaaatcggcggaggaaattttgtgtgtttcaatttcatttattaattcaaaaaaaaatttaattttagaaatagcactaattatattttccactttaaaatgtaaatttaatttaatgtgtttaaatttaaatttcagtctctcaagcagcagcagcagattccatcaacaacatcagcagcaacgttatacctttcgagcccgcgaaatttgcgaggcattgcttcaggacgatgatgacgaagaacaattcggagggccatcatcggtgatggaaagaaattccaaatttggccaaacccaaaatgggtggccaaat

SEQ ID NO: 57231 - DNA, 1041 bp, Heterodera glycines
atggagaggactactgttatattcctgctggtacggtacttttgtcctacaatttacagtcaacgacggcaacaacgactacgaaactgtcctcctcgtcaacatggataacaacggatgttgaggaaactggcactgatgactcatcatcctcatccaactcatcatcatcctcctcacaatcagttgtggttgtgatgccaccggcatcggatcagttgcaatcgtcgccagtgattgtgccgtttctgccgccgatcggcgctctgatcaccattgatcaacaacaacaacaacaacaacaacagttccatccgatcaacaattatgagacgtactgtagcgtgccgggccgtctcacactgttgtccaaccagaagaagtaccgggtgtcagttggggaaatccaacgccggctggcaccaccggagtgcatgaacgcgtccattttgggcggcattttgcgcaaggcgaagaacaaggacggcggacgattgctgcgtgaacagctccatgttcgtgttttggggaattttggcatgtgccgtatttaaattgtcgaaaacccaattttgaaaattttaatcccttttttcctggaatttcggtgaaatttcgagaactggcttaggaaagttcacattttctcaggttttgttcagaaattgagggcatttttttcgctgactgttacacaaatgtttgaaactgatctgagctgatcagatattttataattttggtaattgtgatcataactgagaaattagagttctcggccaagtgatcataggtgtatggtaattaatttaatagatgtacggtgttgagctggcgttaggacgacgaaaacagagcccattgagctgcttctcgagtatggtggagcaggaagcagtgcaggcaagttgatcaaatattcacatttaatcggacttttttatgtacctgaatgggtattaaatttaaaaaagcaaatttgggggccaaaattccccatttttgttttaaaaacattgccaaaatttaattaataataaa

SEQ ID NO: 57232 - DNA, 1019 bp, Heterodera glycines
atgtcaaccgatacgttgaaagtacaattgaacggatgggaatgggtcagaacatttcgggttagttattcttttgcttgccttttaatccattgtttatttcaagctgaatttggaaactgcactgccaaggcgtcctcagaagtcattcgatccatcgctcacatcgaaaatgaaattggcaatttcaacacggcgattgatgagactttgaacacctttaggaaggaggctgagaaggtccaatgccctcagcaaagtttgtcaatatcaaactgattctaacaattgcaggctcaggctaagctccacgcttttgttagctcttgcaataagcgtcttcacagccaacgcggacagatcgaccaattctcagaagcgactttgggccgggttcaaaaaatgaacaatatcatgggagatcaggttggtggtattaactttttgatttaaaatatattttaagaaagagtcgacttcgtctatgcgagtgcatctgaatgccactttgaacgatgctcaatcaatggttgatcggtttgctcacagtgactacaaacgtgttatcgccacgggtaaaaaaatggagtgattattaaaaaagaacatccatccaattataggagttacgcctgtccgtcgcagaaacagttttagcgaggaattggtcgaacttccgccggcccaagaacttatccagtcgcagcagcagttgtgtactccacgtcgcaccagcttttatcggacccgcgactccattttggactcttccgactttctcacctctcttttatcaccaaacacgcttaaagagaacatgaacagcaccaagatggacgaagccggcaaattggagactatcggtgaaagcattgaacggactgcgagttcgaccctcagctgtagcagcagaaccgagaagagagggaaatgatggaaggacaaaagaatgacggcgaaatacaatactattgattttatgtttttctgtataacagtgattagcgtaaattggcgca

SEQ ID NO: 57233 - DNA, 546 bp, Heterodera glycines
atggccaccgcgttcaccgacggcgccaattttgggggcatttccgccgaggaaccgttgctgatcagcgaagtggtgcaaaaggcgttcattgaggtgcgttgatcgctcatgatttgaattcaatttgagatatcgaattttttaaaaaaaaaattcgagaatttggtcccattttttaacatatgaataatttttttgtagttacttatcccatctttggaaaatagttaagcgtaattatcaaaaagaaaaacaacaacgaaatttaggtgaatgaggagggcactgtcgccgcagcagccacagcaaagaatgtgagatattgttcgagcagtccgggcaaagaataccgttttgtcgctgaccatccgttctgtgtgtttctgacccgtgatgacactgtgcttttcagtgcgattttccgcaaatgattccatcccattgatatttaatgcgtttaatttgatgattgattggctgctgttttttatgtaaaaatatttatttgtgtgtgaaatacctcaaatttgtgccaaaaataaa

SEQ ID NO: 57234 - DNA, 621 bp, Heterodera glycines
atgacataagggtagaggctgaccacgtcaatgcacaaaatctcctccccttcggcacacacgtggtggagcttgaacggctccgtacgaccacccctcaacgcgtcgctgcgtgggtcaagcggacggggcacaaacacatgctcataccgccccctcagcgccgggtccctacgcagccgctccttccactcacaggcccacaccgtgtgcagctcacagccgtgttggtgctccagctcccacaaacgccgcaccgtccgctcgtacagatcctccgccgtccgaccggcggccaaccgttgttgccggttggggaagcactcaacacatcctagcaataaatttggatacaaaaaaaatgggggctcccaagtgcgcgaccgtgatagtaacagcccatccactcgatggccatcgggcgaaggggcggctcccgacgccaaaggccgtccacccgatacccgctgtcctcaatgtgcgcctctccgacggaccagctcgcacactgcacctgcgcgcccggatgctctagctcaaagaagcgaatgtagcgcctcgactcggcggaagcacgacgtccacgcaggtagccgccctccggggagtggaccaaccggt

SEQ ID NO: 57235 - DNA, 597 bp, Heterodera glycines
atgcccattcccggcgtactgtcacagcaaattcgaggccgaggagagcattcgaaaggctgcgaaagtgttggggagagaaggtccgtacagagaagtcacaccacaaggggcatcccgtttcgaatttgccctgtttcgaattcgaacattttgatacataattaaatgagtttcaaatgccgtttcaaaaaaactttaccaatatataattggtatcgaaaaacgggggagaatggaaccggatatagccgacatcgcaagaatgtggcatcgattttccggtcatttagcgataaaattacggtttcataaaaaattacaaaaaattttggttattgaattctggatggataaaaaaagacattcaaattggcgacttcctattaggcaaaatcagccatataaactgaatttcatgttttcgcgatattgggtttttccgtcaattccttttttcttttggtaaatccccctttttttctttgtagccatttacagtgtcatcgctcgtgtcggtccgttgtatggggagggtgaccgccgttcgttggtctgtgatgccattttgcttacccatcggttcggcgctgtgcc

SEQ ID NO: 57236 - DNA, 60 bp, Heterodera glycines
atgaaggacagcaaagtgattgtggccatcaacaaggacaaggacgcgcccattttccag

SEQ ID NO: 57237 - DNA, 964 bp, Heterodera glycines
agaaagtggaaaagaaagagcaagaggaaccgattgtggaagagaaagtggaagagaaagaggaagagaacagaaagtggaactgaaagtggaagaggaacagaaagtggaactgaaagtggaagagaaagtggaagaagaacaaaaagtggaagagaaagagaaagtggaagaagaacagaaagtggaagagaaagtggaagagaaagagaaagtggaaaaagagaaagtggaagagaaagaggaagagaacagaaagtggaagagaaagaggaagagaacagaaagtggaagagaaagagaatgtggaaaagaaagcaagaggaaccgaaagtggaagaggaacagaaagtggaagaagaacagaaagtggaagagaaagagaaagtggaaaagaaagaggaagaggaaccgaaagtggaaccgaaagtggaagaaaaagtggaaaagaaagaggaagagaacagaaagtggaagagaaagtgaaagaggaaccgaaagtggaagagaaagtggaagagaaagtggaagaagaacagaaagaggaagagaaagtggaagagaaagagaaagaggaaccgaaagtagaagagaaagtggaagcgaaagaggaagagaacagaaagtggaactgaaagtggaagagaaagtggaagaagaacagaaagtggaagagaaagtggaagagaaagagaaagtggaagaagaacagaaagtggaagagaaagtggaagaggaacagaaagtggaaccgaaagtggaagagaaagagcaagaggaaccgaaagtggaaccgaaagtggaagagaaacagaaagtggaagaagaacagaaactggaagagaaagtggaagagaacagaaaaagtgaaaaaagaaaaagtggaaaagaaagaggaagagaacagaaagtgggagagaaagagaaagaggaaccgaaagaagaagagaaagtggaagagaaa

SEQ ID NO: 57238 - DNA, 562 bp, Heterodera glycines
atgtcaatttatcttcagctgtgcggtctggtcgcccttctgctgacagtccaatgctggccaaatccgcttttccccttctgtttgggccgtgtcgtcgacttctttcagttgttcaacgccgtctgtgtccacggcttcttcctggtcggcactttcttcttggcattggcacatttgttcagtgccccggacgcattttaccattacaatttccaacttttggtagttttttattgaatgttcaatttatctatttattattcatttattaatttctgtatctaattgggcttaggaacaattttactgcgctttggcctccgttatgtatttgatgggctcagtgttcgctgttttgaacatgctcaaggcaatattcgcccctctgtggttttttcatttggtaactttttgaattattatttttttatatttttattttaagtttgtaacttttgccggttttggcctctacgcattcgacttttggacacgttggaaacgggacagtcagttgaggaaggagcaccagcagaaccaatccgtctatatcacttga

SEQ ID NO: 57239 - DNA, 1427 bp, Heterodera glycines
atgatggaaattcccgaccggctgaccaatccgaagaaaacgccgaaacggacacaccactgccgccgcccgacgtatttgacacaccaggagagcacatgcacgcggctaaaatgcgtgccgtgcaagccaaaccaaaaaggacgcgcaatgattcgggaccggatcgcgtcaatgccgcttttcaaaaacgacaaaatttatcttgcaatattggacaacgcacaattcacttattgtaagaaaataacggagcaggtacatttgtcaagtttgtgatgtaatgaaaaataagagaaaagcaagaactgaactaaaggttgctaaatctatgatctttcatcaatgagtgctttcgattggtgtaattaggggacggttaaaggatttcggctgggatagggacaccgcccttgggaaacgagacctttttttgctgttcacatcgtttgcggtgcatttttcaaaaatattattttttccttaaagatttcaattgtggaatgatccatattggtttcctttctaattataagcccaaaacacctaatgatacaatttgcaagatcagaatggaaatggatgggaaggcatccgatgattcgggacttgcggcagttcgtcgccgaggcacaccaccacctggtaaagcatcagaggttaaaactacacctctatacgttgttaaatcgtatcaaatcccatgaattagaaaatccaaaattaattttgagacccctttttaggcaaaaattcatcccttcgaggatgcaaacggcaggaactgccgcttgctcgtcaacttcttgttggcgcgcaaaccatcgaattgcctgaagcattcagggatgcgtatttttaagttttgacggcacagattttctacatcgaccgcccaaattgtttctttgttgaatatttgattggcttttcttatttgcgcatatatagtaattttttctcacctcagtccattcaaaatttaccacacatttgatctggtagaatacgagtgtaaatgagcactttagacgggtttgcaattcttcaggagcctttgcttaacaaattttttctcatccttttcaaaaaaatcaggtcctaaattttgaaagttgatacactgatacaatgccaacatctaaaaaccatttgttagcgccacgtttcgatgccaatgcaacagttgttaacggctacctatcattttgtcactgatcgtttcgtcactgatcatttcgtgactgagaaataatttttaaaaaatgttggcaaaatttcacatatattttaaaatttcaattattctgccccaaatgggagtcgggggcgtttgggccccagtttttgggccccaagcacagaaaaatgaaaaaacacacagtaaaaacaacttttaaaatttcagcataaaaatgtaaaataaa

SEQ ID NO: 57240 - DNA, 197 bp, Heterodera glycines
tttttgggccccggggtcgcttgggccccaacccaaaaatcgaaaaatgtgcttttttaaaaattaagattctaaaaactaagcctgagggatccctcgtcacttgtcataagttaggttcaattaacattcgctcatgttttacaattctacttattccaaatcctattattttttaatagttaaccaatttgatg

SEQ ID NO: 57241 - DNA, 829 bp, Heterodera glycines
atggcggtagcggcacttgatacggagttcggaaatttggcggttttccaaccgctgattgactggtgtgtgaactttttttaaatttaaaccccactgaaattacaggctattaatcaattacgttggacagcccaggcccaatggcacatggtctcaaccaacttttcgccctgaacaatggaacgtctacacacgcacgcttaatgccgatgcacggaccaacaaccactccgaggcggagcatcatcgtctacagggcgccttcaattgccgacacccgtcgatttttcacttcattgacgtgctacgtcgtgagcagaagacaacagacgtcaaatacgcgtcattcattgccggagaggagccaccaccaaaaaagcgaaagtttttggcgacagatgaacgaattcttaatttggtgcgcctttacgtcccgatgaatgcaggcaacatcaaccatgatcacaattaccacaatcgcaatcaatttcacattattttggagtttctccggggaatttctcgcaactatcgaatgaacccgtgaatttctgttaatttttacattttttattgttaaaattattgttgaatttatttttaaactgtttattttacatttttatgctgaaatttaaaaagttgtttttactgtgatttttcatttttctgtacttggggcccaaacgaccctggggcccaaaaacgagggcccaaaaacgggggcccaaacgcgggggcccaaaaactggggcccaaacgcccccgactcgaaagtaccgtataacagattttatctattttttattaaaaatctctagagcaa

SEQ ID NO: 57242 - DNA, 1288 bp, Heterodera glycines
tctcccgttgactttgcttcacaacaaatgaatgagtacaaaagcacaaaaaaggtgccgtttctcattttgttttccgctcttaagcctttcctttcctccgttagaaaatggaagtgctaacgatgtccaacggctcacccattccattcacaataaaaatgccgttttgtccgttggtccccatggtccgatgctaatgcaagacgtcggtgtgttccgtccttttattaatacgttttttaattgtccctattaaattgagtttcattgtttgcatgggattttgggaaatttattttcgaatgattaattagcttcaaaaaaagataaactcaaattgccatcggttcagaatgcattcaattaggccttttgaaaggagggatgttttatttctataattagtaagggaaatgaccgaaagggcaaggcaaaatgaaaagcgaatcctttgccaaagtttccatgagcgggatttgtttccaaagtttatttggacgaaattgcgcacttcgatcgcgagcgcattccggaacgcgttccggaacgcgttgttcatgccaaaggcgccagagcacacggctacttcgaggtgacaagcaaagacatggccgagcactgcaaggccgccatgttcagcgagatctgaaaacggacgccgcttttcatccgtttttcgcgtgtcggtcggtgctttcgttctccttttttaattggtttgacaattatttcaggtggagataaaggtttgttgtgcatgttgtttgtgaattccaccaattcactgctggaaagtcgttttcttttttaaaagacatttttttgtttttggcataatgtaaaatggtggcattcgagtggggggggggtcttacaaagcaaaggcaaatgctgaccgaactctcgaacataaaaggtggagaatcggggagcgcggacaccgcgcgcgacccacgcggttttgccatcaaattttacacggaggagggcaattgggaatttggttgcaaacaacacaccggcaagtcaaattccgtaccaagcaaatgacacccaaaacaatgccttggtattttgtagattttcttcatccgcgacccttttctctttccaaatttcattcattcgcaaaagcggaaccccgccacccatctcaaagacccggaaatggtcagttggaataaccagtggagcaagtggcagagaagggcataatggggatgggttatatgttatggcaagaacccccaaaggaaggactacgacggagtgggcatgagggggg

SEQ ID NO: 57243 - DNA, 86 bp, Heterodera glycines
atgtaaaaattaacagaaattcacgggttcattcgatagttgcgagaaattccccggagaaactccaaaataatgtgaaattgatt

SEQ ID NO: 57244 - DNA, 50 bp, Heterodera glycines
cccatcttttcgaagagcctggcacaatggaagaagttgtacgccttgca

SEQ ID NO: 57245 - DNA, 1046 bp, Heterodera glycines
  unsure (1)..(1046): unsure at all n locations
cgaacgatggaatgccttccattcggnaaacaattctccgggcttcctatttagcttatgactctcgaagaagcgtcccatttccgttggaatccgttcgatgtgaccaaagtttggccccaccgtctcttccctttgcttcccggttcgttcgttctccgtttctttcttcattcttcttcgctgtttgtttcagttggtcgaattgtgctcaaccgaaaccctcaaaattattttgccgaagttgaacagtcggcgtttgccccttcgcgaattgcattgacttttcgtccgataaaatgttgttaggtgtgccgtccgttgcgttgcctttgcattaattgccttttcttgcgccgcagggcgtctcttctcctaccccgacactcagttccatcggctgggcccaaatttcatgaaacttcccattaactgcccgttcagaagccgagtgagcaacacacaaatagatggtttggcatgcccagacgacaacggaggtggcacttttcaatttaagtcatttttgctctttttttccgatggtgcccccgtttatcacccaaattcctacggaaggccgaaggaattggccactgctaatgaaagtgcgttttctgtctccggcgatgtcgcccgattcaattcgggggacgaggacaattattcacagcccaaaatgttctgggagaaagtgagaggggtgaggaagaggggaccaattctcgagatggcttaaggttctcgacgaagatcatcgcaaacggcttgttgccaatatcagtgcctcgttgaaatcgacttctcggccggtccaagaacgcgcggtagcgaattcggcaaagtcagtgccgactttggcagtgccctacaggcggagttggagaaagggtgtcagtcaaggctgacagcacaattaatgaggaacaatgagagagtgatgaggagacgaattgtgaattaaaaataattaattggcataaatgacatcatgcaatcaaaccacccgaaccaattaaataaaattaattgcctatgcaaattac

SEQ ID NO: 57246 - DNA, 1757 bp, Heterodera glycines
  unsure (1)..(1757): unsure at all n locations
ccaacaaaaaagcatcctcaatcaactcgttgaacacctcctttcgtcctcatcatcatcaacaagcagttcaaaggtgaagaaggaaagcatggaaaaataaattaaattaaattaattttaaatgtatttttaataattaaatattttatttttaataattaaatatttaaaaaatgaatatgcataattttgttttacttaaaaatgaataaaatgttattgaaaaatattattcaatcatttttgaatcattttaaataaaatttttcgtttaaaaattaatttaaaaattaaaaatggaataaaataaaaaataaataaaattgaaagaataaaagaaaaataattttaaaaaaagcacggaaaactaatttttaacctaaaaactatcgttttcaattaaattttaataattttacaaaatctcgcacagtttaaagtatttaaaaagaatttaattattcatttttcaataattattaattatttcttcccccccccccccttcagcaggtcccacttttgccatcgatgcgccttctgttggcactgtgcctttgccttgtgtacattaccgtctccgtcagctcgtcaaacattgccgtaaggcaaattttgcccaattaacaatacgcaacgctaattagcgtgacggcgaattgccggctaattaattaattagcagcaaatgtgaacgctaattaggttgcgcgatcactagatggagaaaacaatcaattaacggcggcggcgataaacttagcgtgaccaaagctcattagcacaataattagcgtagcataataaacaaagggagggggggacagagtgattaattagcaaataaatgataattagggcaaaaaattgatgcgatctaatagggctaagtagcggagtgagaaatgccctcatgcccgtgacaggtggcagtgatttgcatgatcaaatgcgaaaggcggcacggctaccacggcacgttggaatgggagacggacaaagaggcaagcagagggacggatagagctggcatattacatatagccgactaattagtgcggcaattagtgccatgaaaccaattagagcgctaattagttttacggtctttggaaaatacgtcaaaacattttggcatcatttggaaaagctctgaatgtgccgtatcagttaaagaaattttaaatttttaattacgaaaattgtggccaaagaaatggcctaaaaatggagtttggcttattgctgtttttaaaattaattttttgcaattatgagaggctatttattaggacatttcagaagagaattttgagtggtgccggagatgttcggtaattttggcactcgtattaaaccgggaaatccgagaattcttttgaggggagggggagaatttcgataattcaaatagaatttttaattgcacattttcagggccttcttcttgcagcacaaaacattggctcacttttcatgttggcgacaggtaaacaaattcaaaaaaaacaaaaaaaaaatttttttttcaaaaattttcgtccaatttaattaaaaaagtattaaatattttatctaaattaaaattccaatacccaaatataaaaattcaaattttaaaacaggcttttttgccgaccgaatcaatggcaaatggatggtcgcggttggcttggcgttgtgtttnggcggcaatttgacactgccatttgtggcatcccaaatcgtttggtacgcatttggcgcccgaattg

SEQ ID NO: 57247 - DNA, 1839 bp, Heterodera glycines
attttcggcagaattggcaactttgtgacaagattttgtcaaaaatataagaaaatttgggctccggcggtgccgttaggcattttcggggaaaacttagggccaaattacctttttttctgaaaaaactaaaattttcattccccctccatggtacgggcctagccataattgtggtttgcattaaaatatgtgaaaacccgtcactttttttatataaaaaaagcattggtccttttgtctcacaacagagaaatgcagccgcttttcgagggtttttaaccgcaatttcattttccgaaattgaaattccattttttcaattcagagagtcaaaatatggacaataaataaacaattgtctgctttttcttcacagaggtatcttgaccacagcatggacaacattcgccgctgcagggaataccgcaaattccaagccatgcaatacgaccaaaggtcgaaaaatttgtgcaaattttttaaagatgactgaccaaaaattactgttttcccgttccaaaaaacaagagttttacatttttaagttttttcttcttaatgaggcatattggaaattaaaaattgaacatcggcacaagctcgtaaaaaaacctttcagcaaatttctccttatgaaaaaaatatttaaatgaattcaagatttttaattgttctttaattggatcaatcacgccgatctctcgactaattttacaatttttctttccgttttttaggtttttgccagatcgactgattttcctgggcgccgacctcgccgcagcccatttcatagtgcacaggcaaaatttggcacaagatttcaaaagaaaaacatgcctttttgtcgcctttttaggcatggttccgtcaaatttgtcggcgacgaccactggtacaagcgcgagggacgggcgggcacttactatttgccgggcaccaaaacggagggcttttacgtggaggcaattgacgcttccggcaccgaactgatgttcgaaggtgggcagaccgaagaaaaaaggggggaaatagaattgatggaattctttaacaaaatacaacttttctcgcttattatgagcaggacgtttccccaccttcgaaaatttgttttttaaattttaaaacggatatttttcagatataggaaattataccaagtttttctagcttttttttaaattctgtgatgttcctgaaaaattttccaaaaatttttttcttggaaattcttatataatttaagtttgtaaataaaaaaaaatgtggggaaaacgacggggcagaggagggaatgaaatgcaccccatttctgagcttggctttaactaataattttattttttacgcgattgtttttgtttttttttctatggcacttatccccttccaaaaaaacatttttacttccctcacacgaaggcttcgacaatttgtacgacttggaattccttcggatgctcagcctgagggactgtcgatggatcgacgattgggtgctgagccgaattggcggaatgttcgccaacactttggaaatgttggacctgagcaactgtcacagaatatcggccaaaggtcagttcgagaataggattttgatccgggaacccggtccgaatgcagcagcaacagttgctgtctgggattgttcaaaacccgggccctcgtgtgtgggtacacccccaaaacgtcgccggcttcgcggggacgtaacgtcgccgcaaaaaaaattaaataaaacttttttcaaaattgccataaaaatttaaaaaaaacctaggtgttactgagaaagtaaaatttgctgcatttcctgagaaaacaaaattt

SEQ ID NO: 57248 - DNA, 1068 bp, Heterodera glycines
atgggtttaaatagtgagcaaggaggaaaagcaaaagcaaaaaggggtaagtaggtaaaagatgtaaggatacgtagaaaattaaagtatttttgtaattaattatttaattgtaatatgatttaaaattataatgttttaggtttattggaagattagggaattatattgaattaggttgaaatagtgaagaaaagggaaagaaaaagtttaaagggatggtaggaaacaaaagtttatggtgaaattggtttaaatagtcgcagagagcgaggaagcaaaagggaaagagcgcgttagtcgtttgaagaaagatttcaaaatttccaaatgaatggaaaaaatgcacttttgctggaaatgacctgctatttatactccaccgagtaggcggggctatttttcagcttggctaaatttggcactttgccaaaagaggcagctgtctcaagcacagaatatctgatgtcgggttttgcatagtcacaactgtcacaattaatcattgactcacaactgaaagtcaaccggcaatagggatattattgacacttccgtgggtattatacaatcaaaatgcgtccaaggggttattaatgaccattccattggttttggctcggtcagaaatgcacaaaaaagaattcccaaggggataattaatgaccactagcttctgttggacagacatgttcacaaaagaatggttaatggcgctcagttggctttggcacaacatactccacatctcgtaaggagatatttataacactttcggaggcattagttagaaatgcactcaaaggaaagattaatgaccctccgtaggcttagcgttggtcaaaatgcacttaaaaggaatgttaatgactctctgtagactttgactactcaataggctttaggtctcagaactgaaatatcccgtgggcactgggagtgaaatggctaaacttaaaaaataactctggggctcaaatggcggcactgtaaaaataactctggggctcaaatggctgcgctgtaaaaataactctggggctcaaatggctgcgctgtaaaaataaa

SEQ ID NO: 57249 - DNA, 423 bp, Heterodera glycines
taaaaatcgtattacgctcaaaaagcttctcaaacattttggcgcttccaattccttctacaatcgcctttatacatcccattatagcgctaaaattatcagagtgccgaaaatcgcatgtgatctaagcctagaaaaaaatggtttaagtaaaaatcgtaattacgctcaaaaagcttctcaaacaattttagcgcttccaattccttctacaatcgcctttatacatcccattatgagcgctaaaattatcagagtgccgaaaatcgcatgtgatctaagcctagcaaaaaatggtgtaagtaaaaatcgtaattacgctcaaaaagcttctcaaacaattttagcgcttccaattccttctacaatcgcctttatacatcccattatgagcgctaaaattatcagagtgccgaaaatcgc

SEQ ID NO: 57250 - DNA, 819 bp, Heterodera glycines
atgcgtctgcttgaccattatgcccaattttttggcttggactctccgcccattgacccgtcaaaaacgctccaacgattggccgcagatatttttgtgtggtacaatcggatggaatcaaaaccgagaagcatcggaggagcaaatgggcaacaatttgcggattttttgtacttttattgccgaatttttaacgattctctgtccaccgaaattgcaagagaagcgagttttatgttcagcagttttgttgacggtaatttaaatttattaatagtaaatattttttaaaaatattttttttcattagaaacatttaaattcgttgaaaaaatggagaaaaagaaattggacgacccaaactttgaaattgcattggcagaaatgattcattccgtccgagaaaagggcaaattgggatggattgaaagcggggacaaattcaatgaaccgatcgaagcgatcaaagcgatgcattttgctgaactgaacaagtttttgacaaataaaaaaaagcaaaaaaatttatatggaaaatttgctgcgattttagcaggttaaatcaaaatgattaattagacacatacgtattataaaaaagtaatttgaatgctaaaagttctgctttatttagacgtggccaaaaacaaaggcaaccaacaaaatttattgcaaattttgacaatgaatgacgcaaaaacattcttagaaatggcgaatattaattttgctaaagacccaaattttgacatgagtttaattgaagtgaaaaaagaagaaaaagcggcgggaggtcggcgtaaaaaagagaaaaataaa

SEQ ID NO: 57251 - DNA, 588 bp, Heterodera glycines
atggacaaccacaacaacaacagtaacaatggcggtggcagcaataacggtggacgaaaaccgcccccatcccggaccggtcggaagcggctgcacgagaacagcagcggcggcggcggcagcaacagcgccaacatttttgtgggcggcgacacttcttcaaccgtgcgcgccgtatcaagccgttctcggcaaccgcagcaacacaacaattacaacgacttggagctgctgttgatcggcggcactgaagacggaaacagtacggcaccgcaaccgcagcatgctcagacggttcagcgaccaactggcacggagaatggacgacaaatgctggtgagttcaaattgggggggggggggactcgttaaaataaaagtcattttggcactctgttaaatatatttttggcattttctgaaatttttggcaaaaaaatttgaataattttcggaaaacaaaattaattttgtcttttaaatcattgggtttaaggcggtcaattcggcgtctcatggcacgcccgtggatggagctttgccaaatgtggacggcggcggcagtggtggtgtcttggctcagcgtaat

SEQ ID NO: 57252 - DNA, 1194 bp, Heterodera glycines
atggtttccgcccactacagcacactcacaaccgcaccgccatttgaatcgacgagcactttgagcaccgcagtcccatcagtaacttcgtcatggtacagcacaataactcgaactgaaacgatgacaaccacgaagacaaatccatggacaacaacaacatgggcaccaatgacgaccaccaagcaaagatggactccaacaatgtcaaacagcgcatcaacttggacgacaagacgaacccgaatccaatacgtcacgaaagcaagaagccaacaaacggatgcaacgacacctcccaacacaattaaatcggcaaaatcagcgaaaagagacttgggaacgaatcgtgacggcgcggacgttttctggtgttccgacagaggcagcacgatctgggagctcaagggccccgagaattcaccattctgtcgtcctccaccatcactcaccgcggaatggcacaatctcgcaattgaactctacgccaaaagcatcaggccagagcagattgattccgcgtggcattgctccgtcaaacgaactacggagaattattataccaatttgttgggcgacaagtttgtgaccatcgtaaaagaattcccaccggtcaacaagcgcatctgcaagcaaatggcactgcaccaggaatgcccatacgccaagtccgaaatgatcaaccacgagggacagctgtggtcaactaatgacgaactgaacgtcaatttcccaggacccatttccggactcttcaagggtgaacagacaagcacagctacgaactgttttgtgcaaccagcaaccatattcgtcaaacggcagactctacaaatgctttcgccagtccaccaagtccaaaactgtcaatactctgcggaattctgtcagttgccagacaacacgactctgatatggaaatcaacgtgctctggagatgaatgcaaaatgtgcgactacgatcgagcggaaatcatcagcggaaaatttaccgcagcttatggagaaacagtagccacgtggatatccgacgatcaccagaaggccttgacattcgccaaaaaggctcccgaactcatcgcctgcgacggcgtacgcatcgtcctatctgaacagaactttgggattgccaaagatcaatacgacgacataacttcatccgttgatcttccacgcatggcaactcgacaatga

SEQ ID NO: 57253 - DNA, 1243 bp, Heterodera glycines
atgtctgggccaatacaaaaagggatcatcaatgcactcaaaactctggacaatgccaaaagcgccacctcactccttcaacaccccgacccggacctgtcaaactgggaaaatgccatcaacttggaggctcaatttgatcgcgtcgtcaaggaaatccgtacaacggaaatgcagatggacagtctacgagacttatccaacgcttggattgaacttctcgcccgcctgaccggagacgacaaagacaacgacgaaaaagaatacatcaaattcgacaaaaatgagaaaatcgccgaacgatacgacgcagcatcaaccaaacttcgggatttgcgagatctcgaagcaacactcagtgccgcagccaaactgcacagaggcagagccgacagggaagcaaaggcggatcaattggccaatccgcagcaacaaccgcccatgccaccagcaatggcagcaccaatgacaatgccaacattcacagcaccgctctaccaattccagccaattcaactggataaatttttcggccaaaagcgaaaatggcccgaattctacgaatccttcaaatcggcaatcggcagtcaatcaatcagtaaagcgcagaagctgaacttactccgcaatctactgggcggagaagcgcgagaactcatagcgggcttccgactggaagacgcaaactacgagacggtccttcagctgttaaaggacacgtacggagctccggaggaacacatcagaagtcttcacttcgaactggccaatctcaagccgtgccgaagcctccgtgagaccaaagactttctgcttcaacttgagcggcttacaagggagctgaacaatgccggagaggacatcgaaggtcctcaagtgttcacttccactgctgctgctgctgctgcccaaatttgacaccggcggatctctgctgtcgcgcatcggcggcgctccgctgacgtgctgttgatggtcggagcgattggtgctgctgctgtcgtgatcagactgatcggtgaacgagggccggcctcgcccaatttgacgccaggcattacactataaatgcaaaaagccatttttgcgcatgtccctattttccaattttgtgaaagcccttccaatataatggcaccatttctctcccccaaagctctagcgcttctcattttctacaagcccccccccccccggccttaatcacatcaaaacacacacacacacacacaaagaaaaatga

SEQ ID NO: 57254 - DNA, 3286 bp, Heterodera glycines
cagttcacttcaacccgatttgttcatcaacagcaaaaagtgcgtcgaccaacaatatggacaaccacaacaacaacagtaacaatggcggtggcagcaataacggtggacgaaaaccgcccccatcccggaccggtcggaagcggctgcacgagaacagcagcggcggcggcggcagcaacagcgccaacatttttgtgggcggcgacacctcttcaaccgtgcgcgccgtatcaagccgttctcggcaaccgcagcaacacaacaattacaacgacttagagctgctgttgatcggcggcactgaagacggaaacagtacggcaccgcaaccgcagcatgctcagacggttcagcgaccaactggcacggagaatggacgacaaatgctggtgagttcaaattggggggggggactcgttaaaataaaagtcattttggcactctgttaaatatatttttggcattttctgaaatttttggcaaaaaaatttgaataattttcggaaaacaaaattaattttgtcttttaaatcattgggtttaaggcggtcaattcggcgtctcatggcacgcccgtggatggagctttgccaaatgtggacggcggcggcagtggtggtgtcttggctcagcgtaatgtaagccgggagtgggggcgggtgtgtgtgagggataataatgggatctctctagccaaaaaaacttggtaaacgggtgaccatattttttaaccgataaatgaagcaccaaatgtcccccttcttatttgagtgcaaaaaaatggtgtttacattttttaatcctttaaggtgcgtaatttgaacaataatggcggcagcggtggtgttgctgatgcaaccggtgctttgcatgccgtcgctctgcccgcacaacagccattggcattgaccgtaagtttgctgggagttggaggaggaaatttattttatgctttttcatgtttttttcaaaacacaggtctcaaattcgttggacaacggcggcggcattgtgcagcaaccgaatggtgctgtttcgggcgcaaatgtgcccatgtggagtttgaacaatgtacgttttttggggaggggggaatgtcaaagggtagcagggcttttactagcatttcgggtggcccttgatttttgccattgtaaaacggcacaaattcgaacaatatatcttatttaatggtttttatttttttattttttgcagtctgctgctacttttgccgctctgatgacggccggcgggggtgacggttcatgtgcagcccgtcccggtggtgggatgccttcgatggtgcgcggtactgttggaggcggacttgaggtggcgtttttttaaaatttttgtgccaatgttgagggaagggaggtggcaataaaaatttaaaatttcaaaattaatttcttttaaaggcgctcccgcccagtgtgcgtgaagcggttgcacttgtgcatgcacggcagcggcagaagatggttaacaacaacattcagcccgaatttgcgtctgttgtgccggcaattggtgagaatggtttctcaaacctgtggtggatttacttggagtggcaaccagatatggtgatgaagtgagtgcttttttaaatttcattttcagcatttccattttcccgcttttcagccgcgtcgtgggccttgtcgtcctggccggcccgttcacaacccaaaccgacatcagcggctacgacgtgcgcatcatcttcgaccaccacgatttggagcacgaaatggcgatgcacggctggcaggagtgtgtgccgcgcatgagcaacatttgtgccggtcaaattgtggaattcacacgcctcaaagtgcgcgcccaaggtcacaatgcgaagggcagctttccgttcaccctgctctacaatgcggagtcgcggcaccgcattgttggacagagctcttcggcggtggccactacaggtggaaaaaaaacattttaatttttaaaaataataattttttccctattttttttttttttgagaaaaacatttttgattttaaaaaataataattttttcccattttaagtgttcaatccgccgtcaacaaacacgccaataattgttgaagcaaatgacagcaacagcaatgccatttccattccaagcggtgtcatcagcggctcgataagccagcagggcggaaacggcttgtttggcggtggcggcagcaatgtgatggcggcacctcatcaaactgatcagcagtccggcatgagtgcaaatggtatgtgaagcgattccccaccccgcaaaaatgatcatctgatcattccccacccccgcttttagcaggaagcgaacagcaccgcctgatcatgcaaagcgatgacgattatgacggcgaggagcagcaggacgaacaaatccgcgggagtggcggcagcgacgggggaccggcagcgaattttgcattgacatctgcgggcactgttgcgccgcgaaccgagaccggcgtttcgtcaacggtgaggaagtgaagaaaaagaaagaaaagaaagacaaaaacagaaagaaaaagcaaagaaagaaaaaacgcgctcgcataccatcatcatacacatacacatatacacacacaaataaatgcacacatacatttgttcattgaatttgaaaatacaatgttgtttgttcttttgttgtgtcgttgtttttgtgttgttacatagtgggggggatttgagtgtctgcgggcgtgttttttgcggaaagtcatgcatttttcggtacaaaaatttaaaaaaatgattccaaattttttagccatggctttccgcaacgcgcccgcccactcctggtccatcgtcatcatcaacaaatgcccacgcgcgccacaacatgcagcagcagcctcgctcttcgccgcctcccgtccgtgtttgttcaatcaccgcacaacgctccatttcggcaattgttcgccaaatgaatacaaacgctgcggcggttgctcgggacgagagccgttcgcgcgaccgtcgccgtcttcgtcaactcaatgcccagccgcgccagggtcgccgactctcgacgccccgctcttcacgcgggcgcaacacgttgtcaccgcgcccgccccacaacgtcatcaccattgagtcggatgccgaagaagaggcgctgggcgtggcgcaacaacagccgcttgcggacgaagaccagcatttctacgacgacgagatgctgttgattgaagaccaaattgcgcaagggctcgtcgaggggcagccaacgaagtggtga

SEQ ID NO: 57255 - DNA, 5398 bp, Heterodera glycines
atggccacgattttcaacccgtcgaggccatgccatagcatgatggcaaccatcttcattgatccgggaagccaccggtcattcatttcaaacacggcagccaaacaacttgaactgaccgtgctcagaacggaagaatgcttccttacgagctttggagaacgcgaaccaaagcgttacgtcagcgaccgagtcgcaatcggctttttatgtcccaacggggaccgactcattttcaacttgaacgcactcaagtttctgctcaacaatttgcctgtcctacaactgaacacattggacaagcagcagcttcaacagaagaagctttttccgccgcatgagtcacgacaaccggacgtcatgctcggaatggacgtctggcatgacttgcacgttcagccaattgaacaattgccgagtggatttacgatttgtcagtcgaaaattggcaaaatcatcagcggcactggacgaattgaactcagtcaaccgtcaaatgtgacattcgtccttacggtcacagacgaaaatgtcttcacagcggaagaagacttgaaggccaacgaagaactcaacaagttctacggcctcaacatcattggcatggacgactcttcaacgctaatcgaccgggatgaagtgatgaaaaatttcaaggaaaacttgtcgttcgtcaacaacaaataccaaatcgcattgccatggaacgacagagtggcacaattgccaacgaattatcatcaagcaaaggcaaggctcataagcctcatcagaaagcttcggacaataaacttggtcgacgaataccaagcaattctggatgaacaacagcagaattccatcatcgaactggtcaattctgatcattcttgtggtccagtccactacctgccacacagggcagtcatccgaaccgacaaatccacaaccaaaatccgcatcgtgatggatgcctctgcaaaacccaaatccactccgtcggcaccatcactcaacgaatgcctgcacacaggcccgctacttttgaaagacctgaccggcattctccttcggttcagacgcatggaaaaagtcatccttgctgacattgaaaaggcattcctacaattgggcgtcagagaacaagaccgcgatgccacacgattcctttggcttgctaacccaaaggaagcaaatctcgaacagctgaaacgagaagacttccgcgttttccgattttgccgagtcagtttcggattaaccgtgtcaccatttctgctcaatgccacaatcagggagcacctggcacttcacgacacggatgttgcacaacgcatcagtgacaatctttatgtggacaacatcatggtggaaatcaaaccaagtgaaaacagcaatcaactggtcacagaagcaaaaatcatttttgaatcagccggaatgcggatccgcgaatttttcgggagtcacatcgacgagctaaaagagcttgactcatccgaattggcccaagacctcgaaaacacaaaggtgttaggcatcgaatggaagccaagacacgatcaactgatcttcaaaatgccaatcttcagcagtccaaccacaaaacggaagattctgtcacacatcgcaaaagtgtatgacccacttggacttatttctccagcactgttgcccgccaagcattttttgcaaatcgtccaaaatttgaatttcaaatgggacgatcctctgccggaaaaaatggcacttgactggatcaaactaatgcatgcgtgggacggattcggcttcaacttcagggtggaattccctcgtcacatcgcgacaagtcccaacgaagaatttcattgcttctgcgatgccagcaaaacgggactcggtgtcgcgctttatcagctcgcggacagttcttacggaaaaaaggaaagcaacttgatttttggcaaaagccttgtcaaaccgctcaaagtggccgaccacgattcaacaattcctaaattggaactgcaagcgttaactttgggagtcaaagtgacaaagttcgtccaaactcaactcaacttcgatgaccaacaagtcatactttggacggacagccaatgctctatcgaacgtctcaaggaggaacggaaatacgacagattcgtcaacaatcggctgaagaaaatcagagaagcacgtttcaaagtcagacacattcgaacggatgaaaatccggcagacatcgcttcacgtggaacagatccacagagtctccaatcatcattgctttggcgatttggcccagtgtggctaaccaaagttagccaatggccagaatcaaacgtcacttacaaccccggcgaagaaataaaggaagtgacggaacctcccattgtcgaatggagtaatgccgtccaacagcgcgaagaattcgttcctgcgatccaatttgagcgcttctcaaattggaatcgtctcagagcaacagctgctcacgtcatccgattcacagtggccatgcttcaaaagagacaaaattccgagccgacgagcagtccgcttctcacacatggacacccattggaaaaagggccattaacagcaaaggaattggaaatggccgacgaatggattctgatcgaaactcaacggcaaaattggccctcagaatccgtcatcactaatttgaaactcttcaagacaaagcctctggaaacattgaagtgccaaggacggctaggaaatgccaacctgcccatccatagcaaaaatccgatatttttgccggctgaggcatggacaaccaaactcatcattgtccacaacgatcggattcacaatcattgtggaccgaggattcttctatccaaaattcgcgagaaattttggattccacgaggcagacaaacggtccaaaatgccctttactcaagtcgaattggatgtttggaatgcaaaagggaaaaactgaaaccatacgcttatcccgaggctcctaatttgccaaaggagcgagtcaacgagacacgaccctttaacaacaccggcattgactactttggtccactaaaagtgaagagaggactcgaaacggtgaaagtgtatgtcgcactttttacctgcctcaccatccgagcaatccacctggaagtggcagaagactattccgccgaagcctttctccgcgtgttccggagatttgccgcacgacgcggcgtaccaagagtcatcttgtccgaccaagggacaaatttcatcgctggagccaaggtcatcaaggaaaattggaccacagacttactcacactcgaagtgcaagaacagctggctcatcaaggaatcacatggaatttcaacacagcccatgcaccatggaaaggcggcacttgggaacgactgatcggcattactaaaaatgccttgaggagaagcattggacgcagacttctcactttcgatgaattcggcacgctcgtcgttgaaatcgaagcaattgtgaaccatcgtccgttgacttttgagtcagaccgcgaaccagacccggtactcagaccggtcaattttttgatcccgtacggatcaacggaaaccaattttccgtcaatggcaacggatccggaagatccagaatatacgccgaatcccaacaagctgaaaacgatgcttcagaaggctgattcaagactgaacagcttttgggaaatttggagatccgactatctcctttcactgcgtgaacgtgcaaaccaacggttaaacaacgaacgacaaactcctaacgaaggagacattgtgcttgtggaagaagaagcaaatccgcgatcagtctggagcttggcccgggtccttaaagtccaaataggacgggataacaaatcccgttctgcattaatttcccacaagggaaaagaaaaatggagagctgtaaatcagctctacaatttggaaattcaacccgaatttccagaaatccactccaccgctttcgtcatgagcaacttggacaacgacatcgacagcgtctctctcgccggcagtgaagatgaaatgccgcagccgaaaaataaattccgcattccgaaacgcaaacgggcatttcttcggccaatcccgcagcagcacagtcctcttcaaggaccgcgtcgcaaaagaagggagttacaagactccggattacgcaagctgttttgcgcaatatcagagccagaaggcgggagcaaggcaactactgaagctgtcaacgaaagccgcgccatggaaaaagcgccgcaaccgatccaaaaagaattcaacgaaaaaatggcgaagaaacagagagagaaggcacggataaaaacatcggatcgattaaagcaaaaactcgccgatttgtcaagtgtatctgcacaaacggaagcggaaaaagatgaacaacagaaggagagagaaatccacgatcagcagcgagctgaaaggcgaaatgaagtaaaagaagcattcgaaaaaccatcgcgcaaagaaagagaagaagcacgctcattttggagtgcgaagaaggccgaatcaatgaaagaaaaaacaaaaggccgaccaatcgaggacatgccaaaaaacaacgaagttttactcacgtactgtcaacggatttacggcaatgataattggcagtttctctggaaaaatggacgcacttccagggagcttcatcagctcgaaacgcaaggatggacacttcatgaccagaaaggaaaaatggtcgaaccatccgaattcctcggtggtactcgaccatccgtgaacgtccgattcaaagaaggccactacaccaatctgacaccggaagaaatggtcttccatggcccaccggttagtgagagcgaacctgaaccggaaatcgtagtcacggaggaagtatcgtcctcagagcttcaagaagaaaacgagcgacgagtccgagagagcgggacacactcccccaccgagcaccgcacgttccgagaaccggaagagttgcgcgattgaatgttaccgaacgagagctggccgaaaggagaacgatacgtcggttgataacgattttaaccgagatgttctggtgaacgacacgagagctgtgccggagtgcacgtatcggcgaaattgcttcgactcgcgaaaagagcgattgagatggattcgaagattgcgagagcaatttctctgatgaacgcgaatgcttttcgacttggtccagcgacttttaaatcttcgcggcgaaacggtcgtcctccacgaagaatacgtaatgccgtccaccttgacaccgaagcagttggctgagaaattttggaaagaacaattcgtcaccaaaaatcggcaactcgttaagcaagaatcgctcattgatctgctgaagcaatggagcacttcgtgtgatcactttggagcattaatgcagctgaaccaatttgagcca

SEQ ID NO: 57256 - DNA, 327 bp, Heterodera glycines
atgatcttggcgcgagaagaagacgaaatcatggaagttgatccgacaccttcaacatcagccgcaagcagcagtggacttatgtccagaaacacaataaacacgctgatggtcatcagcatgttcgcgctgatgttccttcagccaacagcagcggcaccgttacgcattcatcgagcctcattaagccaaaatgcacaaagattcctccaaatggtatctgcacactacagcatactcacaactgcaccgccgtctgaattaacaatcactttgagcaccgcactcccaccagtaacttcgtgtggtacagcacaagcacaataa

SEQ ID NO: 57257 - DNA, 1227 bp, Heterodera glycines
atggccacacaacagcacaatgttcaattgtatttgaactattcatttaatttctttataagctcagacaggacagtttcaacaacaacgaaacggtgtaacgattcgtctaaatttgaatcgattgtttcgttccgccgccaacggcgaccctcaaacaattattgttcaacagcacacaattccttcttttatgcgacgtattgttgcagaagttggttgcactttcacgactttttcttcactctttccatttttaggctattgactcatgcattctcttccttttcaagttgatcatcgtttatttgcttgttgagttcgaattaatgttagtccaaaagaagggatctcttaacattttttccaattccagcgaattggatcaatttgaacgaattctttcaagtgaatcggatgttcagactcttatcgatatcacacaggaattgttttacattgaattggtgtgcaaactcttttctgcgttgattgaggttactatttatttgttattttgttaaaaattttaacaaggtttatttttaggccatttttataacctttggtctctccgggtttcctattggctgtacccctggaaaatatttgttggggcttcgtgtgatttcatgtcttgatgttcaaccaatagttggctcttcggatcgtgtgatggtcacctgcatgccgagtgttggtttcagaaggtgggcttttgtttggtctgttcctacaaaaatccctccactttttctttggctccgattctcattttgtttaacctgccgttcgtgtccaaagactcaccaaaattttaaacaattggatcgcaaaacgtttttttctgttgtttaattttttttttagctcactaactcgcgctgtgatcaaaaacatgctgaccacttttttgttccctctcagtaccgccttttatctgttcaatcataatcgtgctatttatgatttggctgcaaaaacaatggttatttctctggtctaaaagatcttttttgtgcgttgaattattttttatttataaacttatttattactctctacaaattattttatcacttatattttcatttacggattggacacatactttttttggttctttacgttttatttataaatgcatatatatatatatatataaatttcggttagaatggaagagcagcctaaaaaattagaagccagaaaggactctccaataaa

SEQ ID NO: 57258 - DNA, 271 bp, Heterodera glycines
attttctaagaaaaaataggagttttgggggcgcggcggtgccgataggcgccgccggcgaaaaaattggaaattttgatcatttataaacagtttttcactgaaaattagccaatttataggtaaaattttgaaaaattttatgggaatttaatccaattcttaggggtgtaaaagtcgcatttcgcgccaaaaagcgaaatgcgaaaagcgaaacgccaaaaaatgcaaaggcgaaatgcgaaaagcgaaacctcggcccatccctgct

SEQ ID NO: 57259 - DNA, 121 bp, Heterodera glycines
atggctaaaccgaacaataaacacaaactaatcagcaatgatttgatcgcttttggaaataagaaacatttaatgggcggttttatcagatcaaatcagcggagggattcttccgccggtg

SEQ ID NO: 57260 - DNA, 1287 bp, Heterodera glycines
  unsure (1)..(1287): unsure at all n locations
atgcatttatttatccatatttttttgtcaattcacatctgtttntcaaccttttcttatgcatttgaatcactcaattctttgggcacaatcggaaatttgtcgcacaaccaaaaaacggtaaaaattggagaatgaaattagagaccaaaactcattttagcgaaaatcttgttgggattttgcgtaaatccgctccgtatttttcttagctttccgggattttccacgggcgagtaagaatacacgtttaagaattgcatttttttggcaaaaatgaattttcttgaaaacttaataaactccaatccaaaaattttaatattgttttcggcggcgttaacgatttttaagcgactttttggcaactttttttcaaaagattttgatgttttgcaaaatttgcatttattaattatgaccaaaaaatttaaacaaatgaaatgaatggatcggagatttaaaagaaggcaatcccaatattttaagctggttgagctaccaaaaagtcgggaccgtcggcccagaacgaggaaaaataaattttaaaaaaaccaatttttcgccaccctaaaaaaataaaaaaattaagcaataatcaattttgggtattcccaatacatttgataaaattcagaccatatttggcaataaagtgctggctaaacgatcgacgagtggaatttcaattgttagcggaagcggagggaaaaagccgccacataaaggatcattaatcaaaccatcaaaagcatcgccaaaaaagaaaaaagcaaagtcatcgatgttttctaaaattgctaatgcttttaaaattgttaaagacaagaaaaaggacggaggaagttcaagcaaatcgaccaagtcaaaaaagtgagacatgaaaaagcgttgccgaatgatttgataaataatttgacaaaagtcaaatcatttgttgataattctgtcaatttttgggactgataaatgaattgtttgttgatatttgattataaaattattaattaggctgaaagccatagcttttttcattgtttatcaaatccaatcaactcagcacctttcgaaagctcaacaacttttttgctgaaaaaaagcataaagattttgcaaaaaatgcagttttcaatcaaagcatacaattttgattttcttttaaaattgactaaattttctttcggtgaccgatcatttcttcactaattgtttcgtcactgatcatttcttcactgaaaaaatcttaaaaacaaaaattattcctttattttaatactagcaaataaa

SEQ ID NO: 57261 - DNA, 458 bp, Heterodera glycines
atgcgcaaattgcacgcggcgttagacgaagcacgcgacttgctggagttagagcaattagcagaccgattgtgcacatttgtgcgggccaaagaagggatggtcggtgcggaagatttgggaaaagatttggagcattgccaatcactgtcagtgattgggggagcacaaacggacaacagatgaccacccaccccttcaaatccaggctggaccggctggacgaaagccaaggaatcgacgagggcactctggcggaggcgaatcgcctcgggggacgattgatcgggcgaaagtcggccgaatcggactatgtgcgcaaaaggctggcggaagtgaacgaaggctggcaacggctggcgggccgactgagcatctaccgaacacttctcaacgcggcactcgcaggtcagcggagtgaccgtgccaacggaagtgacggacgcggcactatttaa

SEQ ID NO: 57262 - DNA, 289 bp, Heterodera glycines
atgccattcgataacgcattgcactgccatagacaggaaatatgggcaaagaatggccaagggatagaaataacggagtgtgggataattgaaggtaaaagagggacaaaacgacgaaaacggcggaaatattcgttggatcaaaattcgtttgaagcaaatgttgccgattagcattggctaaatgttgcactgggaaaagccaaaaagaaatagattcttcaatgttccagtcggcatcagtctgttaagttaagcgatttaaaagttaataaggcattttaataaa

SEQ ID NO: 57263 - DNA, 160 bp, Heterodera glycines
ggaggaacgggcgcatttccgataccctcagacaattgatgacgccaaaaggcttggccgtgtgcttatccgttacaaagaccaacatttttacaccgttctttcgggcgtcgccgccatttatttgatgtctgttttcattaatgacaatatggtactt

SEQ ID NO: 57264 - DNA, 1092 bp, Heterodera glycines
atgccattggacggagcaatcggacagcatttgaacagttacgggtaccgaagcgatggctcattaggctgcaatggtatcagtcggccgtataaaatgggatttggcaccatgccaatgccattcaacgcggcgattggacaacagagggaccgccgctacgttgggagtgccaattggtcatttccattggaatttgtgcccgtgccaatgccatcggacggcgcattggcattccaatcgccagcattttccaccggagatgtggtcggatgcggcgtttgtttggccactcgacagatctttttgacgaagaatggccgacgaatcggtgggccaaacacaaaacgaaaaaagcaaataatttaaatttcaatttgtcagatgactcctcttttttcactacaactcccatcaattctctgtttccatgcgtttctctgtggactggcgacaaaattgaggcgaactttgggccaagtttcaaattcaatttggccactctttgaagaaagctgaagaaccaacggaaagggcgattaatcatttagttaattaattcattatgcatttttcactttattttttcacatttattttcagttttttatattatttatcatgcgtatttgttaacaaataaattttactgttctttttgtttgtcttcattttttcatgtaaaaatttgatggaaaaaatggaacaggaagaaactcttgaacctgaagagattaaaaacttaaagaaatttttaaaatattaaattactcaaaaaatctctttttttctttcccctcatttatgtcccattgtgttacaatttaaaacgtttttctcaaaccctttgcccaactgtaaaaattaattaaaactaaaaatacatatttctatcatatgaaaatattaaataaaaaaagtctgtaaaatataaaataattataaaatttttattataaaaatgaaaaaagaagaaaaaagcttacaacaccttcgattcccaggacgtctccgttccaagtactaagaaggcccaacgttgcttaacttgccagatcggacgggatggcgtgctttcaacgtggtatggtc

SEQ ID NO: 57265 - DNA, 1017 bp, Heterodera glycines
atggcaattcgccagcacaaggatctcctcttcggaggaaaaacggtcattttcagcggtgacttcaaacagtcgctgccggtcgtgcctcatgaaggcttaaccgctcaggtgacagcctgttttcaaacgtctccgttgtttggtcaattcaccacgatgaaattgaccatcaaccagagactgggccaaggtcagcaagcgtacttgcaaatgtgccgccaaatcgggctcggagaaaccggagagcacttctggattcctccgcagttcctcgttaagagcaaggaagagctgatagactatgtctatcctaacttccaacaactccttggcaatgacaaggagctgctcaatcgtttgattctcgctccgcacattgacacgtgcgacgaagtcaacgagatcatgatggcgaatgtgccaggtcaagtgcgggaatacttgtccacggataagccccttgacgaccgcccactggacatcgatgagatcgagtccgaagtggctgcgttgaaccggcgcacagactcgggcatgcccccgcacagtctccggcttaaagtcggatgcgtcgtcgtccttcttatcaataaaagtgataaggaaggactgatcaatggcacacgcatagttctggaagaacttggcgatgatcgcctcattggtcgtgttatcaatagcaatgctattggcggccaagtgagattctttcttgaaagaacacgaaatgtctatgaagacaaatcgcctggcggcataaaatatgagcgtttgcagttcccaataaagcctgcattcgctatgaccattcaaaaaggtcagggccaaacaatccgcactgtcggcattgatctggaaagggaagtattttcccacggtcaattgtatacggccttctctcgggcaacagacggaaacaatgtccgtgttcatgctcccaaccgggaaatagatgcccaaggccgagccaaagtgctgaatattgtagctactaatatgctcaagttacaataa

SEQ ID NO: 57266 - DNA, 858 bp, Heterodera glycines
atggtggaaaatatagagcaatgggagggacatctcctaaaagagaagcaatcaaaaaatgcaaatggtgaaaaatggcaaaaaagaggagaggagaagaaggcggacgaagaagaagaggaggagggaagacaaaaaggaggagtgagaggaatagaagagaaaggaaagggaaaggaagaagagggagaggaagaaaaagggaaagaagacgagggaaaggcaaaggcggaatattcaagcgaaaaagcggatcaaacggcttcttcaatcaaaataagtgacctgcaacacgacataaaaaacattttcaatagatttgaaaatgagcaacaaaattattgggtaattattgaaagttggattctcatccccgattattcgtgggtcaaaaaaccgggggtttcgagtcgtattgggcgtttgacaaattcaacgtttggtaaattcaaataccaacgaccaacaaaaaatccttatatatatgtagtagggttcgatattttgcaaaaaagcctacagctggacctaagtcgggatttttatgtgggacctggattttctggacaaaacccaggaaatccaggttcaggaaaaacccaatgtcaaggaccggatccgtgcctggatctggattttttaactttatttaaaaaataaataaataaatcgagcttcatatctattaatcttttgttttattttgactaatattacgagtgtattctttcaatttactaaaaaactaaacatttaaagcacgtcgaatgccctgagaaaacaattgaaatcgatcttctgcgagaagaggacagaaaaatattaggaggtaaaaaatcaaatgaaagagataactag

SEQ ID NO: 57267 - DNA, 2020 bp, Heterodera glycines
atgaacaccactggcctaatgcgcattaagcgactgatggcgcatagaagcggcaccgaacggcacaaaaaagagttgttgcgctttatgactgttcaaatgctcatggaaatgcgaatgttgccggacaacttgcaaagccaaatcagcgagagaaaaggccaggcggcggatgaagcgggtttatccgctcgtctccaatcgccgcgtggctttaagttgctgatcgctaaagcgaatacagccgcagcagacgctttgcgcaactttggttcgccattccaactttgtgtgttgataaaaattgccaacttcgcttatgcacctaagcacaataattctattgatgcgataacggaaaaaatggtgaaaaaattgcgaacagacgaatgtgaaaacggaatagtgcaggcgcaaatattgaaaaaggagatggccgcagaactaggcgcaaagatcactgtgataatcgccgaaatagccagtgccgacttaactaagttcagacggctttttagctttcccggcacaaaaacccggcttctgcggttggttggttcgagggaacgaattgaagaattagacaacaaaattggtttgacacaaaaatttgcggaaaatggtggggataatttgtttttgaaataagttaacaatttatttagagcccaaaaatgacgaactcctttggactcattatttatttgtcatgctaactaataacaaaattgaactgcaaagccacaaaattggcgccgacttggtggtatttatgcactttcttggccaaacatttaatgccggaaggcacatgagaaaactttttcggctgatcagcgattatatttccgaccaaatttatgatccaatttttgatagcgacgaagatgaactaaacgaaattgaaaaatttttgagggagaaaatgtttttggagacaaagaaaatggtggaaaaaattagcaaagatgacaatgtaaaggcatcaatccaattcaaaaaatgggaagtaattgtgaaaaaagtagcaaaaaaaggaacggaaaatgggaaagaaatgaaaaaaataggggaatggattggccaattgcatcgggcaaagtttacccagctgataagacgaaataataattggaagacactgaaaaatagtgagtcaaaataactaataaggcatttcatataactataattaaccgctcgataaattgaaatcgaagaaaaaattttttacttaataactagagaccgactaaaaaggcaccaaaaaatcgcgaaaaaggcactaaaataggcaccaaaaaaattgaaaaaaggcatgaaaaggcacgaaaatcccgaaaaaagcatgaaaaaaggcatttaaaattttaaaaaaaatgaaattttgccgatatattttgaaaaaaaaatttcaattcttagtagtgtattttctggattttttttcgggtcatttcttaggggtgtgtttttccgatttattgcatttttgatggaatttttcggaaaaaaatgccaaaaggcaccaaaacgacaaaacgccaaaaaagtatgaaaagttaaaaaagccaaaaaaggcaaaataaaagtcaacggagaaggctcaaaccacgtggaaaatgtgttatttatgcttaatatatcgaaactacttcgcagaaaaaaggcatatgcctcaaaagtcggtctctattaataacattataaaaatgaaaaggttgaggattaatcagaagacatttgaattattttagtcctgcaaagtaaaggcacggcgaatatacgacaaaaactgttgaatttatttgatacgaatgctgtggaatcagtttttgaggaattcgatttcaaaaatattagtgaggcaactggtgacatccgtaattcatttgatattaaatggcaattagagaacagtgacgaatacggagagtttggcatgatgaaagaggaggaggaaagaagtacacggacgaacagagaaagagatgaagagaggatgagggaacggtgccga

SEQ ID NO: 57268 - DNA, 945 bp, Heterodera glycines
atggacgaaaattcgcctcagaatgcaatggcagaaaatttaggtataaaagaaagacaaaaataaataaaagttaaagtgttttaagatgataaagcgactgaactgatcaactttttcaaatcttacattctgcaaatggttgaagctccgctggaaacccatcaaaaatttcaaataaattcggccaaatggaatttggcgcgaaaaattgagggaatgttggcatttctcacggaattgggcacaaaactgaataaaaatgggcttttggatgaaatagaaaggctaaaaagcgattgggacgaaattacggaattggaagagaaaggcgaggaagaaaacaacaaaatgctttgtttaatttaccaaaacggtgcccaaattctcaaaatgatgttaacatatattgaaaatgatgagggaatacgtgagaaatggaaggaatatttggacaaacacagagtgttggacatcattgaggtaggccgagtcttacaagccaaaaacatggtaaacaaacaatcgtaacacggagggcttaaaaattaccaaatttaaactaatttgctgacatttctcggcacgtcttaataatattatataaaaactatatgttaaaaaatagtctatatagaataataaatgataaattttaaaatattgcaatcgcatagccaattaagataattgatccagttgactgcgctgacactgaaattaatgcgcgaattagcatgtgtttgcttaacgagccattacaatggcatataattgggcaaaatttttacgagttgttggaaaatagcgcagagcttcgccattttatgtgcatgtgcaataaaattgcaaattatgcggaaattaaaatagtgctgggcgaaatgatcggtaggaaatatttgacacttttggacgacgaatttccggagattatgcgcgcag

SEQ ID NO: 57269 - DNA, 883 bp, Heterodera glycines
atgaacgttcttctgcggaaatctttatcagagacgttgggactgaaatccccatcatctttgtcacccttagtatgttagaagatattccctctattttaaagcttgtaaatatcatattcattgacgaggcaggtcaggcacctaccaatcaaattattcatattctctctctggccccaaatttggaaaaaatccttgctgctggtgacccaaaacagctacaagttcgctcttctgaacttcctgaggaattgctccaatatggatttaattcatttctttctcatttaatttttattcctaacattcccaacacaaaactcacaatttcctaccgaggacacccaattctcacccaatgtcttgctgattctctttatcatggagatattgttgccggtgtaacggccgaacaacgctccatgattacctcttccaactttccgctacccaatcaaactgcccctcttcttcttgttgatctcccaaatcctgattatagagaattaacctccttttcacgattaaattcggcccaaaaccacattgcccattcaattctctcccttctctctctcattttacctccatctgcatcaattacttgtctctgtctgtactcggcacaggcaaaagctattagatcccttacccccttaaatgtcacggtcttgacagttgattccttccaggctcaagaatctgatgccatagtccttatcaccacccgatccctccccaccactcccgacgagatgaggcaattttcgtattcctatttttcgggcccacaccaacttccctttctctcgttttatatgatgtatgtatgtattggtttcgcataaagtgtaattgcctaatcgcttcaaataataaa

SEQ ID NO: 57270 - DNA, 1071 bp, Heterodera glycines
atgggcgatcaatcgacgacaattaatgcgcctcatttggccacttcatcatctggatatatctgtgaaacattctctgcagaggaggtaaacatataaaataatttttgcatgtgttttatttggaaattttgaaattcgtgcttatgttttgataagaaattttaaattttcccatttttgggcgatatatttttataaaatatcatttgctagtttgattgcatttttgtaatttttggaaaattctaaaagttgataaaaatttcattaatttttttgtcagatatttattgccttaaaagcgtccggaaagaagaattaaaaaagcagttatataaaaataagtaaagattaaagttactttccacttgagaacggacaggattgggatcccgcgggattaaattcaggagcccgacataaggatccattctgagcattttatcgcgattgagctggatcaggatttcatcgggaatccttcccgactatttcgccatcccgcgagatcctgcgggattggaatcccaataactttttcgaataatttccattttcgtataaaggacttgcaacaattaaacacaaaaaattaaagttaaaaaaatcatttattatttactattttttaaataacttccccaccacaaaaattttcaaatttacccaaaagttggccatttttttaaaattctttaaacaaatcccaactaaattttcaaaattaccctggcagatcttaacggcaccacttgacctctcctttcccccggaaatttttcgaaaaagcgcgccgcaaaaaaaagttaaaggttgaaatgctattatttctcaatcgagttgatcaattataaataataaatgcgtttgaataaatctttgcaaaaaaaaaaaaaaattgagttttagctaatcccgataatcctccgtgatcccgaaaaaaagcctcgggatttatcggggtcaagagttggacgcgaacccgactcgggaatcctcctgctggtcgtttttccaaaatcttgcgattctttctaccccagcaattgtacagtctttacttttcac

SEQ ID NO: 57271 - DNA, 215 bp, Heterodera glycines
atgttggcattgagccggcactctccgggttgccaaagtcgggcatgtgagtttttataaattaaatttaaaattatttaaatttttcagccctccatttcggaccacagattttgttgaattctcacgccattacattgcctcatatgggtcccaagaaaaattcttcatcatgcgcattgggcgcggctcgccgatgggctcatgtgaagtga

SEQ ID NO: 57272 - DNA, 179 bp, Heterodera glycines
atggctatctatttttttgagaaattttctatgcaacaaacgctctcgaacatgaaacgaagtgcggtgcgccgtggccattttatttttcaaataatttttaaatttaatacatattccagaaaaatggctctctttttttgagaaattttctatgcaacaaacgctctcgaacatga

SEQ ID NO: 57273 - DNA, 146 bp, Heterodera glycines
atggctatctatttttttgagaaattttctatgcaacaaacgctctcgaacatgaaacgaagtgcggtgcgccgtggccattttatttttcaaataatttttaaatttaatagatattccagaaaaatggctatctatttttttga

SEQ ID NO: 57274 - DNA, 146 bp, Heterodera glycines
atggctatctctttttttgagaaattttctatgcaacaaacgctctcgaacatgaaacgaagtgcggtgcgccgtggccattttatttttcaaataatttttaaatttaatagatattccagaaaaatggctatctctttttttga

SEQ ID NO: 57275 - DNA, 1554 bp, Heterodera glycines
atggacatgagtgtgcaagtgacattcattggagcactcataagtctctttcaatgtgccagtagcagaagagatgctgacgaagaaatggaagaacagataaaaacatttttcgggctgaacataatcggattgagcgacaatcctgaagaagaggacaaggaagaagtgatgagaacgttcagaaagggcttgacattcaaagaaggaagatatgaatgtggcctaccatggaacgaaagagtaaaggatttgccgacaaattttcaacaagcgagggcaagactttgtggcacagtgaagaaattgcgagaattgaatttggtggacgaataccaaaaaattttcaatgagtgggagaggaacgggataatcgaaagagtgccggatccaacacaaacaactggaccggtacattatctcccacatcggcccgtgataaaaatggacaaggccacgacaaaaataagaattgtgatggatgcatccgcgaagccagcaaaccacaaaggagccccatcgttgaacgaatgcttgcacacagggccgttgttgctaaacgaattgaccgggatccttctaagatggagaagaatgaaggatctaatcctggcggacatcgaaaaagccttcctccaattatcagtgagagaggaggacagagacgcgaccagatttctgtggctggaggatccacaaaagacagaaatttcaagcccaacatatgtgagaaccgttgtgtttcggttctgtcgggtttcatttggattgacaacttcaccatttcttttaaatgcaaccatccgcgaacatctttcattctacgacacggttctaccgcaaaccataatggagaatttgtacgtggacaacatactgatcaatgtgaagaagaatgaagacatggcgcaaatttgccacgaatcgatcgagctgttccgtcaagggggaatgaagctgcaggaatttttctgcagtaagccgatcgccatacgaagccttcctgtggaattattggccaaaaaccaaaaggagataaaagttctcggaattccgtggacgaatgaggatgatgaaatttgcttccgatttaaaaaatttgccggaaagcacacgaagaggaacatcttgtcacacattgcaaaaatttatgaccctttggggttagtggcgcctgcagtgctcccagcaaagcattttttgcaaaaacgttttgaagccaaaaacggctgggatgaaggattggaagaagaattgattcatgaatggaatcaaatcatggagacttggcaaacgaaagaggggacagaggtccaaattcgattcgcacgaagagtcgacaacgaagacgaagtggacaaggaaatgcattgcttcgcagatgcgagcggaaaaggcttaggcgttgccatttacatccgggaatcgacagaaaaaatgagcgccaatttggtgtttgcaaagagcctggtgaagccctccaacatatcagatgttgcggcaacaattccaaaaatggaaacaatccataacgctgggagtgaagttgttaaa

SEQ ID NO: 57276 - DNA, 1274 bp, Heterodera glycines
atgggccctttggaccttctgaacggcacttcttcacagttgaggtcgcatctgttttccgctcagcctgcacaacaaatctctgtgaacggaaatggcattggcttggccaatgccgcggcgtccgctcatcaccccgcgactccgtccgttcccaacaatcgcttcagcccgcgttcgacagcagcgaacggtattaactgtccaccgtcatcgtctgccataaatgggacaactgtgaacggatcaccgctgaatttggccactcaaataggaaatcagacggtcggccttgtggagagcatccaccagcagcaacaaagggcgatggccgcagcactgaacagtcgcggagggacagtgaacggaagcggaaacaatgcgctggacgaattaaatcagttgaaccaattgcgcgccatgctgccctttttcaacccgcaccaactgctgccgatgggctcgctcaatgggttggctgcttcgttaatcgggccacaagcactgatcaatgcggtgggcgccaacgccggagggaatgtcgcgggaatgaatggtggaggaagcgggcggaagagggaattggagggaggcggcagcggggacacgagggagtcattgaacaacaaagtgcagagaggtgggggagagaagtgccgaagaaaggcggcggcgaaacgcagcggctaatctgttcgtttaaggggacgcccagacgacgtccacgtcgcccacctccaccaacagccctgaccagtccctgcagcacaacggcttccaccacccgtcctcccatccgccgcctcatcacagctccgaccgtcgtcggtcgctattcctttccaacgccaattccgtgccaacgccttcctcaacggtcgcttcaacaacggcattcgcaatggccgcggctgcccaacacgcggcagcagtggcagcccaacagcgagaaaacaacggcgaacggacgctgaagtgcacggggtgtcaggaacggctggaggatacgcattttgtgcagtgcccttccgtcagcggacacaaattctgcttcccatgttcacgaaaatcgatcctaaaacagtggaaatcgcatgtgagaatcgagaggagaataataagagcataatgccacccacaacaattaaacagatcattagaaaacttaaaggattaattaatcaattaaggaagtgcactgtccctccggggaaaaatgtccattgatcaattccagccaaccgtggacattcatgccgcaggagattcagact

SEQ ID NO: 57277 - DNA, 521 bp, Heterodera glycines
atgaatgggcggggaaggaccccaacaaatggggagacgaacggcggcgcaccgatcggaagcgaaacggcggtgagtcacttcaaccaaacagaagggcacaacggatgccaataccaaactgttcattgtcagatgtgcactcttttgaacagcacaaaatgtgtcaaggaatcgttggaccaccccaacagatctcccggaaccgtaagcggcgactcatccggcggagaaaacgctgtggcactgaacggacaatcgccgtaacaaaactgcgaaacggacctttattacagacttttcctctttccatacacctccattttcgtatctctaatttctgctgtttgactcggctaaattttaaaatgacaaatttacgccatttgcatttaatttcaaaaagtcaaaatttttgttgccattgcgagcaaacattgatgatgcatttaccctcttatttaatatatggatagggatcggatttttaagggcgaaaaaaacgcgaattaaagccgaaa

SEQ ID NO: 57278 - DNA, 833 bp, Heterodera glycines
atgaatattttcggcgtcatagttgcaggacgaatggtcaagactgatttcacaacacataaagaaggcgaatatacaacagagctttttgatattgccaagtgggttttatagaattatgggtaaatagaatatttgtcattcatcaaatggaattggttttatttggtctattactataattttttggaagattttgacgtgacagttattgttttttactagcaaaatacagacgatttattttcattaaaaagatttgaatctaatatttattgaaagaaaaataaacttctaaatgtgttgggaggttgtaatgcacgtcgaattacttattattaaaaatgactggcttttggtctgtaaatgtatttttcagcataaatcacatcgttgtttttctgaccggtcttcaaccattaccaccggacattggcgcatcaagtgacctatcggaaaacgcattgtcaatctaatcatttttaaagtatttatcagttggccttcgatggaaaagggaatgggttcgatggaatggagtaatttgggattcattagcaatgaaaagccaagcgcaattttccgagttgggcaggtaatcctttagattaataactcatctttttcttttcgtattgagcattccgggtcattggataacgaattagtcaattttaattaagtaattacctccttaatcctaacgaaatcgaacattcataatttggactttacagagaacgtataaaatttaattctgattgtttgccttttgctcttttcagtgttttttttaccttgctaattcatttaaaaccaatcggcgaaataaa

SEQ ID NO: 57279 - DNA, 500 bp, Heterodera glycines
atgcctaaaattaaatccaaatctgaattgatgcgcaagtgggtcaacagtgagtttcactgctgaaaaccttgagaaacttttgatttacaattacaaaaacatccgatataatttatgagttgggctataaattatatgcttttgcatattttttctgcgcatactatgaagaaggggctcaaaaatagcatttatacgttaaaattttttgatatgattaaagttttagtgcatataaaagcatatttttggagttttcgagaataaatgcatattttgccattttttgcgtttttacagcatatttcggtcatttttggcaaatttctataagaaaaatgcaataataacaaaaaaatacacccctaaggatcgactttttgggaattaaaaaaatatacgcttggaaatcgaaaaattttgaactttttgcaagaaattttgaaaaaaatttttgatactaaagatataaaaaagggattttgtttgagtataaa

SEQ ID NO: 57280 - DNA, 572 bp, Heterodera glycines
atgccctcccttctgtcatggcctggtgtgcttctgcttggttctcagccgaattgctgctcgattggacggacttttggatttgcgtcaacttccaagcggatcgcacaaatgtgccgttggtcagtttggtgagttcgaaaattcaaatttttcgaatttcagattttgtttaaactttgtttgcatacacgaaaacgaacgaaaatgcattttttttggtgtcgaacccgggtttggagatccgaaattgttcaaaatgtgattgtcacagattcatgttcttcagcgaccgaaaagccttagaaaattattttgagtgactttaaaagttaatttttttttttcaaaaagggtactatcatatctctgaaaatattattaccctacattttccaacttttaggtgctcagcattgtgttggcgtgttcgttcgtcttcgagattttcttcaagaattcgctgctcaaaaagcagttggccacggaatgtgccatcgtgtgaacaatacgcagagacgagacgaatcgggaacgatgctgatgccaacaaaacacaatcaatgcgatga

SEQ ID NO: 57281 - DNA, 784 bp, Heterodera glycines
atgccaagtgaaccaccaagtgaaccatttgaattggtgaacgaacggactaaagaaaagctgacactgaaacagaagagcgaagaactaaacgaattagcggtagtgtataattggcggttggaacggcgtccaattggggagacggcgacggcggcagttcaatggaaagaccgctacaattcggatgtcaaagccaatttgaacaatatcatatttaatctgtggagtttcaataaatccattgggtgagcagcatttgatttgtcgaaaaatttaatttattttaggccattgtagccaccagcggaagaagaagcggatcaaagcatcgaaaatgttgtcgtctgactgcgcagaagtgaattaattaatttagaaatgatcgatctcaacctgatgctcattttctctcagaaatgccttttgttgattttttcgttcgaattatataaacgtattttttttattgttttttgttgggcaatttctttagtatcaattgaaaaaattgttaagagaaatttgttaatattttatgtggtttccggagtaggtcgtttcggcgccgtcgttttggcgccagcctcagtttttggactataacttttttctttgtcaaccaaatttacaatcttgatatcattcgaaagcccttcatgtgctctattagccttacaaaaagcgaaaagattttctagtatgtaaaaaagttattaagaaagaacttcaaaatttaaaaaaaatttaaaaaaaacttaactttcaaaacattttttcaaaa

SEQ ID NO: 57282 - DNA, 144 bp, Heterodera glycines
atgagcgggcactttggcaccttaactccacgtttggttcatcccacatcgccagttctgcttaccaaaaatggcccacttggagctcaaacattcaacgcctgggttcagagtcaagcaaccctggcttcatacccatttaga

SEQ ID NO: 57283 - DNA, 156 bp, Heterodera glycines
taagcctaaactttttggcctgtttaaaaaggaattaaaaatttttaaaatatttattcatctcccttttgatagaaaaagcatcagagagccttatttaactcttaattaacatttggtgcgtttcagagcagtttctgaaaaaatatttatgaa

SEQ ID NO: 57284 - DNA, 436 bp, Heterodera glycines
ggttcgatgaaactttttaaaatataagcctaaactttttggcctgtttaaaaaggaattaaaaatttttaaaatatttattcatctcccttttgatagaaaaagcatcagagagccttatttaacttttaattaacatttggtgcgtttcagagcacgttctaaaaaatatttatgaattaattttgcaaaataataaataagtaatgaaaaagtcagaatttcgaaaaattttaaaaacaacaagcgttggcattttttcaggttaagttagtcctttacaatggagaaggcctgcaaaatttggagagattatatcgattttagtgcgctaggttcgatgaaactttttaaaatataagcctaaactttttggcctgtttaaaaaggaattaaaaatttttaaaatatttattcatctcccttttgatagaaa

SEQ ID NO: 57285 - DNA, 831 bp, Heterodera glycines
atggcatgcgcagtcgctgcagaacgagccacaattcatcaagagctgcaacgattcactctcatcacggagctgatccgagtcgaagaactgcaggagacgcaggtgaacatcacgttcagacaccaactgaactccgtgggcgagatgatggacatgttgcaaatttgggaagaagatacggcaatcagctgccgcgtcgaccaaaatgatgagaccaagccgtgtgctcttggatttgttcgacgcattgaaaagcgcgcacttgacaacggatttgaggtcagagtcgaggtgtttttggcatttcaggatgccaaaggacagaaggtgtgggagcagttcgaattccttcgggaaggggcattggaagccgttgagcttcgtcccatggtttccacgcgtgcactgatggaacgagctgaacttctgaccaaaaatggatgctccatcattgccaaggaccacgcatcgcctgccaatgtgatcatggctattctgctgggacggagggtgccccggaacgtagcattgcaaagtgttgaggaaaaggtgatgaaaaagggtgccgttgggcttttgaaggcaggacagtgcgattccgcggaacgaatgctcgaaggggtgccgagggtcgtctttcaacaggcgggccctggtacaggcaagacctttacggcggcggcaatcatggctgccatcctgcgcgaggacccggcgaggacccgtcgacacgcatcctggcaatggtaccgccgaacattgccgtctgtaagctggtgttggaaatggaggaagcgctgcgcgttgagggccaacccgagccaatga

SEQ ID NO: 57286 - DNA, 581 bp, Heterodera glycines
atgtcggagttcactgcccaaatgttcctggagaccttaaaggtgtaagtcgtaaaaaattcttgaacttttttaattttacaccctcccgctcgcaagaagttattttatacattttacaattttctgcagacatcaaaaagattcgcgacattttttcgccgcgagatggatacaatcctatgataaagctaacattgaaaatcacttattacaacaatgtcacatttattatattccattattattaacattttgaattaattaagtatcattttcccatatttttccaattttcttcatattcattccaacagctcaacgcagaatgccgtggtgccaaaagcctcatttttggcacattttttgaatccttttgggcacattttgaatcgtcctttcatcaccacgttgccattttcgtccgtcagattgcctacgccaactttgcagcttttgctcgattttttcattgccatcgaaacgggctaaacatgaagccaattcaaaaaaaagaagaaattatttgtaatttattagtaaagtatataattttaatttaaaatttcgtttaaaataaa

SEQ ID NO: 57287 - DNA, 164 bp, Heterodera glycines
atggcaatgaaaaaatcgagcaaaagctgcaaagttggcgtaggcaatctgacggacgaaaatggcaacgtggtgatgaaaggacgattcaaaatgtgcccaaaaggattcaaaaaatgtgccaaaaatgaggcttttggcaccacggcattctgcgttgagct

SEQ ID NO: 57288 - DNA, 1361 bp, Heterodera glycines
atggcctctcgcaagcagttgccctccttggccggcattttgctcgagttggagacggacacggcccggcaggtgacggcgatgcttaagctgcaacagttggacaaagcgctgcacaaagccgcacagagtcagcggcccgacttgcgtaagtcgaacgaacggtgaccattttagttccatttttgatcagttcttttggtgattcgccacttgcgcaactctttgaccaaccgcgacatggaattgttactgcgcaaagtgccacaagcgctgagcatttaccaagttccccttttaatttggttgtaaatttcaacattggcaatttcacagagtgaaatccgtgacgaagcgcccgaacgattgttggcactttacgagcaaaacgacgactttgtgcggcaggcgattttccacttgggcagagcggagcaaaaccaagcggaggactttttcgacacgtcgaaagtggcggaacaattgggaagggcggagaaagcattgcggcaaatgcgggagccgacgagcgcacaattagtggccgaatgtgcacaaatgatcgtggacaacacaaaacgggaggaaaaggcacggcacttttgctgggtttggtcccgattttatcacataactcccgctactccaacgttttttttgtcacggtaaaaggaccttttattctcattacggatctgtcaagacattggattagaccccttccatatgttcttctctttcagtacaatacgccgatggctcatttgaccgtccgcgaatcgtttatttgggcggcggcacgggaggaaatggcactgatggaacagttgcgaaagcagcacagactcaacgagaaacagtgggtttttggcaacttcattgtttcatctttttctgaagggttttcctatggacagccgaaggctttgcacgcggcggaaaatggcaacaattcgaacaatacgcaaagtcgaagaagagccccacgggctatttggtgagtgattggcaaaacgttacggtttgtttaaattttcatttttggcttttagtctgtcatccaactttgtgtcacttacggcaacaaaaatttggcttttcgcctcatggaccgactgaatgcgtacgaggagcaagtgaaggcttatctcatcctcgggtcagtttttgaaatttgccctttttacgacacatcgccaacacaattcagagaagtgaaaaaggcagcgacattggcagttgaaagggaagacttgcaaatgttacagagcatcaaatgccgactggcgccatcttctgccaattgggaggaagtgaagaaaatcacggacacattgctgaagaaggcagcacatgcctaa

SEQ ID NO: 57289 - DNA, 658 bp, Heterodera glycines
atgcttggaggatcaaaacagtctgttgtgagtggagaggagaagaagcagcagcagcagcagccaccaaaaactaatgtttccgttggtcgtccattgatgtctccaccggccacggagtcgaaagatgtccttgacattatgcttggaggaccaaaacagtctgttgtgagtggagaggaaaagcaacagcagcagtcatcaaaaactaatgtctccgttgatcagcctttgttgtcttcaacgcagccgaaagatgtcattgatgatctttttggaattgttcccaaaacaggtgaaaaaaatcgtgcacaactgtttctcaacgaaatgcttggtgggtctgatgagaaagaaaagggtccaccactggagctactaatggaatttgaacgtttcaaaattgtttttcacgatccagcaatcagtggtctatcgttctcgcctcaggtcggccgagtgtgctgtccgaactgtcactttgttcttctcactgtatcactgcaaatatttgtgagccactaagctttgattgtccgcgttgtcgtatccccgttccggtacaatagcgagatgcttagacttgagatggttggttttgaagtgtctcatggacgcagcttaatttaacggcattttattataaaatacgaagaaa

SEQ ID NO: 57290 - DNA, 804 bp, Heterodera glycines
atgggtacagtctgggcattctgtgcactgttgtacaatgttcacctgttggctgcccaaaataacggtaaattccacttcaaaaccttaattaagattaaatttcttttaaaccatttcgacccacttgattaaaatggtctaaattttcggatcttatgggcagacttttttgaaaattgataagataaagaataaattaaaattgaaaataattttaattggcagcatttaatgccgaagagatttgccgtcccatcgatggcacaccgttccacgcccaatgccttctctcttctgtagtcaaacagaaaggcttcatcccaaagcatttgcgcccgccatggctcaactcaccgctgtttgaggacaacaagctgagcagcgaggccaaagaatcggaaaatggctgtttttcctgctacagagggacaaaggcgagcaatggcaaaatccaggacgaggattactgtgcatgcgtggtacggtgttgagaatactgtataataaacttatctttaatattatatatcaaggtacaggactagattctgtttatttattaaaatcccggaaaaattgaaattttatacttttcgtaaaaatatgggatagaaaaaaaaacaatttttttaaagtttcggttcctctactattaaggataaagccaacgcagatatatcaatgctctgaatttaagtacaaagatcaagcaccgaatgatggattctcgaaaataattggaacatttgatggcctaaactgtctgcaggatttgtataaaatggccagttggtgaaaaaa

SEQ ID NO: 57291 - DNA, 618 bp, Heterodera glycines
  unsure (1)..(618): unsure at all n locations
atgccaaacggatcatcgattacngtgttggtctacgaggagaaggaaatgacgaacagcaactacacaccaatttgcgatgacaacaaacaacgcgataattcacgatcatcccccaacggcacgcacaaaaagtgagaaataaataaaatgagaattttttcaattgtctaacttaagtttttctatcaaaaaatattaaatttgtttcaacactaaaaaaaatttttttcaattttttattttcaaaaaatccaagaaaatttcaagggaacattgaaaaaattttcagcaattgtttctctggtctgagtgcccatttcttagccggtcttcatgcgttggaacggctctgacaactttccatggatgccaatgccatcggcggaggggcaaaagacaacgcaaagggcggagagacggcagacgccgaggcaaatttgttttaaaacttaaatttaattttttgtttctgcagctgcctctgcgcagtgcttcactcgaaaaattggatctttcatccaatgctccaaattttcttttaaattttttttttcaatttattaaatcacgtgaaatgcgtaccatctgttaaaaaaaattctgcatcaaaataaa

SEQ ID NO: 57292 - DNA, 579 bp, Heterodera glycines
atgaaaggtgttcaaattaacgaaccaattcattcggctaatgatgaacttgatgagccaattaaaaagtgggccaaaacaaagaaattaagcaaaccaaagtggaaaatgccggtaattactagtaatgagaaattacaaattgtgctaaaagattttataataactgtagcacagataagaatggggcttattgtcaatgtgaaaaattattataaaatacttacggaatcaaattaatcaaattttttttattatttttagattgaaactatggctaatcatgatgatgaagcttatgccgacctttatgtttataatgcaggaaactatactaatgcaggcgaagaatgtcaaaattgtttgaatttctcaaaaattgatggcttaattggccaattaacggaatctttgaacgcaaccgaaacaatcattaatgagctagtcaaaaaatttaaacttgtgccaattgatctcgatagcccaatgtcaagtgtcacaatgcttgaccaaagcacaaacagtgaaagaattcatttggcagggaatgtgattaacagcgcaattattggtaattag

SEQ ID NO: 57293 - DNA, 394 bp, Heterodera glycines
atgaaaaatttaaccgatttgccatcatcctcaaaaagagggttaacacatcaaagcagttttgtgatcatggagatcagtgacaatgtcaaaatggatgaacaacattcagatgataaaaatggacaagaaaaaaaggaggccaaaaatttggaaaatgccgaaaaagcgatgaaagaatttaacattcggaaaaagaatgtgaagtgccaaaagtgtaatgagcgtgccaaaatcctcagaatggtccagcaaatccagaaaaacaacaaagaacaaataatcaaacttgtgcaaaattgtaaacattcgaatgaacaagaagagtttacagaacccaacataattggcacaacaatttacggtgaacaaaaataaataaaattaatattta

SEQ ID NO: 57294 - DNA, 1322 bp, Heterodera glycines
  unsure (1)..(1322): unsure at all n locations
atgcaattggcatttaccataatctctactcggactgaattcaacgagaattcgaaattagaagtaacattggctaatgcagatagaattggcaaagctttgcttggcatttctgaaccaattgagcacaaatttttagaatatttaaaaatttcaaaaatatttttgttggccgattcattgggtgctgatgaaacgacattgatcgaagctgaatgcaaaaatttggaggttttgcagttgatattagtaatgtggctgagaattttttaattctttttcaacaattgacctttttgcgcaaaattttaaacaaaaaaacgcacaaaatttcaaaaattttcataaaggctttacgaacataagcgctcataaagaccgacacatttagctttcttgcttagggtntatgaagcgcaatgttctttttatatatatttattaaactaataaataaatttttgagaatattattattttttgatgaccttttacgtcaaaattttaagcataaaaaacgaacaaaatttcagaaattttctgttgggaggctcataaaaattcttttggcaaaaaatgaccgaaagaaaaatctaacaaatttttcttgcttggtattatttattcataatgctctttttaaattttgactgcaaatagagaacattaattcaagcaaatgttttttaatatatttttttaaaaacttgtaaataattttttttttttttgtgggttgcttagattaaattaattaggtttttatttaaatttaagaaattcattaccaattttggtgcaactcgtgcaccatcagccgaagaaaccaataaaattggcaaaaacaatttggaattttacatccatcttttcaaagaaatgcaacagttactggacagcattaagcgcacaatcaaaattgaaataagagaagtgtggaaagacctaattgcatttgtagaaaagtttgaggaaaaattggaaacatttgccaaattaacggaaaattgaaaaagaaaaaagttacgacgcgattgtttgtatttgacaatgatgaaacaatgggagnccttttanaaaaaaaaatttnanttttctnattttnaacattttaccactttntaaaacaatatttctctatnctaacacttttncaattatantaaattnataaaacnttctatcnatttanaaancataatttcnttattaattnnttttactntaaattttaaattatnaaaattttaattnttttttnttttanttttttntncctaaaattcccatccctattaatntaactttnatttnctctataa

SEQ ID NO: 57295 - DNA, 637 bp, Heterodera glycines
atgacatcgaaagccttgacaaatgccaaaaacaaacatatcgtggcatcaaaatttgcatttggaaatattggaatccaaaatgtgcgttggatttttgttcgggcggaggcggtggattatgtattcgacgaatgcatgttttacgatatgtttaaaattttcatactgtatttatgataataaaattatcataatattttttttcaaatatatgctttcatcattttgcgacttctttccgatatcccatgtgaaggctatgttggaaatcgtaaaccggcactttgattatatctttgttcattatattcatttttctgaattttttttttgacaaatataatattcaaaaagaaaatttttagaacttgagaattattgagtttctctaattaatttttaaaattattttccgtattggaaaatgaggaagatatgctttgagtcacagcaacctttattgaaaatgaactgaaaaatgtaattacaaaaattcttgaaacaaatggtcggcaggcactaaaaagatcaatttggtttttttggctagttttaaaaaggaaagaaatattctaattttttattattttgggtggtaggaaaggttacaagtaattactgttaattcacaaaa

SEQ ID NO: 57296 - DNA, 592 bp, Heterodera glycines
atgtccgacaatatgctaaatacaatttttcaaaatggttattatatgaaaaaaaaatcttcgaaatcctgaaaatatgtaaaaaatacaacatatgtaccaaatatatataaactctaataaatacgtaaatataaatacataaaagtatcaacatacgggggaagagtgattcgctcgtcagaagtggattgtgtgtattacgtacaggtttagttactctgagatctcatagatatgcgctagagcactgtacaaaagaagctccacacgcaggggtacgacggtcaaagtaggctcaaaaaatgaactcccataaatattcacaaggggtccccatatggaaatgctaaaattaaattgattttatatttttcaattatataatatatttttattacaaattatatttttacgatttcgaaatgaaagaaaaaataattaactaattttttcagtaaccgagaaagagtttgaaaaagaattaatagtaattgtccatgaaagtgtgatgtttaatggacaatgctctttttttgattagagacaaatgccgtggatttggcattggaaaggcggagtgccaatctaa

SEQ ID NO: 57297 - DNA, 484 bp, Heterodera glycines
atgacaacaacttttaaagcccgaaatacagcagcttttgatggtaattaataattaattagtggagagaatgcatttgaaatattttgtctttttcagaaatttgtcttggaaatttggaagtgcaacagaagagcaaaaagaagaacaaagaagacattgtcaaatttgacgtcgatcgcccgggggaatgcccttctgtaaaaattattatcatttttctgtttgtgactgcccctttcgttctgttctccgttatggtcatttcttattatttcatacaatttcaatgacaatttgacattattacgaatttaaaaaaataatttaattaatttcaatcaaacgtaaatcattctcgcaaagtttaattaattaattttttatataaattaaactttttgcatcgtattatgccgacagaatggttaaaatgtttcaatcatattataaaataatttaatcactcggttactgtaataaa

SEQ ID NO: 57298 - DNA, 272 bp, Heterodera glycines
  unsure (1)..(272): unsure at all n locations
agagttacatgggatcaaactctcgaggaaaaacgggaccagaaaaagggattgggacacgacgccggggtgaaaaaatcgttatcaggattgagttttgtttaggccgaaagccattattatgcncaatgagcgacagttcaattcggagacttagcattctgagcattttgccaactgatatgagtcgtagccaccaccacaaaggcgcgaaaatggatggaagaattgtggttttggtttgtccgaaagcaattaataaagcagattaa

SEQ ID NO: 57299 - DNA, 1230 bp, Heterodera glycines
atgtggaaaaatccgaaaaaagccaagaaggaatggaaagaaatgtgagttattaaatcttattttataaggtttttgaattaaagaaaaatatttttcgtataatttgatatttcccagctctctctgcggcgactgttggctgtcagtgttccaatttatcggcccctatgaactcgggttgaaatttgcgttgctcagtgatcgatttgaccatttggtggacgagcatttcaagacgaaaaagtgggcgatgggtttcctggaaattcgtctctcctcaaggggaaaacgcgcggtgattgtcaacaattttggcgacggacagcgcagtttttatccaattccacaaaagccattgcccagcaatatcgtcggatttgaaagcattcgtataaggtgccaaagacagacacttggcttagggggggggctgaattcaaaaattcaatttttagggtttcatttttttagagtctcgaattaggcggtctatttagcaggaatttgtagctgcttctcgccaaaaatgctattttttgccatttggtctccatttttttaatatggtcaattgggtgtccggtgcgggtgctcattttttcaattctcacatttttaaattggtaataatttgctaaaatgttgggaagggacgaaacacaactaccaggccaactcttaactgctccgacttgtaaactgtttttcggccaaaaaacgtagtactttttcaaagtcaacaaaaaaaaatacaatttgaaattcaatcgaatattttgggtagatttttgtcagatgatttttgggttgaattttaaaacaacatttaaaggaattggttgtccaacagtatagacaagttcgtctgtagaaattgtgaaaattccgataattctagcaaattcggttttaattgtggaatttttttgttttttttccactaaaaatagagttaagctctaatctaaccctaatggccaataaaactatctttttaatcccaccaaacgcgcaaaatttttttgttccaatttgcagttacgtcgaccaacacgtcgtccaatttctccaccgcattcgccgccttttcgactctgtcccgacaaacctttacattgcgaccgccgctttggccgaaactgtctaccgcccgaagcactttgtccgcagttgcgaggcgattcgccaacacattttgccgctgctccgtgccaatgtccgcgccct

SEQ ID NO: 57300 - DNA, 431 bp, Heterodera glycines
atgattattttttcaatgtttttgaaaaataaattatgccaaattttaattggtaaaatatacaaatccatgtttttggcattagttttgtaattttgttaagaaataaatttattcttttttttctattcatttgaagtttcatgttccgtgggttgaatgattttatttggttgataagctgttttttaacaacttactatattttataattaaagttattaaatgattggacacattaacaaataattattttgaaatgatttcttaattaattatataatttaaaataaactgtcatcagaaaagctttttttctcattttaattttaaaaatttgtttattattttccatattttgtagataatacattcctgaaatcaataaacttcaagtttcggaatttataaatacaaaaaaagaaatatta

SEQ ID NO: 57301 - DNA, 880 bp, Heterodera glycines
atggacaagcatttgatcaccgactttgagcaatcaaatcgtctgctgttcaacagcttttcctccacgcctctcccaatgataattcagcgaaaccaaagaactcaatcaacgcaaagtttgactaccgcaaaccaaaaactgcctttggttactgtagcgactgcgaaaattccgcaaatgtttcgtttcaatacccaatttgatcaacgaagattgaacattggcagcgtcatccactttgagtgtaccgtagaaaggtgtgaggaacgaattggaaaaacgccgtcggcgataacgccatgcccacgggtgaaaaacaaaagcaaattgaaagaaataaattaaaaataattaccaaaaaaaaaaaaaaaattcatttttgtttaattttatgtttaaaacgtaaagcattaaattttttaactttccaacaattcattgttgttctttgtagacaaattgtgatcggaaacggatcatcgctgagaaacagcagcaaccggtgatcacaacacaagcggaacagcatcacaatgttgatgatgccgttgatgaagatggcgcgaaagtgacgggcgaggacgaggagttggagctggtcacccaattgttacgggcacaacaactggaggaggagggagaggaggaagcccaatttggcggagtggaaggagaaacggacgaagacgaagcagtgacagaagcggcacagaagaagcagcagaagcaaaatgggacggaaatggcggacgaaaaaggaaaaggaaaagcaaacggaggaaaagcaaagggggaagcggggaggaacagaacggcacaggaggaagaagaagaagcaaaggcaatcagtggaggtgccaacaatagaaaagcataa

SEQ ID NO: 57302 - DNA, 366 bp, Heterodera glycines
attctgcacgcgaattaacaccatttttttcaataaaccacattttcattatccattttctatcaagatcacatgaactttactatttcctatatttgtatcgcgtaaatcttataaaagatttaaataatattaattttttaagattctacaccgcgtctgaaaccttcaaatctgtaagtaaaatattttccacaaagtgctaatttttccgtttctgttgaatccattatcaaatgattttttatcagagcattaataaatttcgatttatcatttatataactaaaatatttttaatgattaaaataatattaatttatttatagatcctgcactcgaattaacaccatttttttcaataaa

SEQ ID NO: 57303 - DNA, 684 bp, Heterodera glycines
  unsure (1)..(684): unsure at all n locations
gttgaacgcatcaaactcacttgtgagcaaacacttgcccaatcagtcgccgatgccgccgagtttgacaaacattcctatgaaatttcgatgctcaacgaaaaattacgggttgaaaaaagagtttttgaaaaaaaaattaaattttaaattattttcagcaagtttgcatcaactattcccatcaaattgaggcattgaatgagcaacaaagacacgaatatcgtcaattagtccgcacaatgtatgccaatgaaaaaagtgtgtaccatggaggaacaaaagcggtaatttttcttattgttagaaaattttttttttaaacttgtaaaaatgatattttcaaaaaaaaatgatgaaatttttttataagaatgtttcaataaaaaatcttcttgaaaaagttttcaacagatttttcgatgacttacaatttagtagttcatataaattttcgaaaaaatcgctgaaattttttcattttttgttgaaaaatttctgtttgaattccccctctttaatagcagcccccccccccccctcagggattccaatttggactgccctatcccctatttcatttatagaaatttccttttcagtttgcttccctggcaggcagttttagctgtgctgacgacacattgtacaactgtccttcaacagccaatgcttttgcaccgn

SEQ ID NO: 57304 - DNA, 471 bp, Heterodera glycines
  unsure (1)..(471): unsure at all n locations
atggcttataatctgttcgctaaattgctgctntgtttgaattgcctgcggcttcttttgaccaaatttgtttttatggttaataaattaaataattattaactttttaaattttttttgtttaggtgttgatgggttgccaaaatgaattcagaaagaagaaaagcaacttgcactgttgcttttgtatgcatcacacaactttggcaaattgaaattgtttaaatgcgattactactgacttatagcgtagaatattttgatattaatcacttatatataagtatttggatatattttattttttaaacttatttggatatttttattttttaaagtcatttatttgtttcacttaaattgtagttcatattgttaaatttatttttttaattcactaaattatccgcaaatgtcggctaaccccgaaaacatgtctagccaacaaaatagtctgcataagagtgtcga

SEQ ID NO: 57305 - DNA, 171 bp, Heterodera glycines
atgcgaaaagcgaaatgcgaaacgccaaaaaatgcgaataatgcgaaaggcgaaatgcgaaaagcgaaacctcggcccatccctgcaccacaccccgttaaatgttgccatcatcattatcttattttttcatccataatataccgtagtgcgacatttgcggataattta

SEQ ID NO: 57306 - DNA, 1497 bp, Heterodera glycines
atgggaacggagacggacgggcggacaattttaggcggaaaatggacaaaaagggacgaacaaaaagtcactcatcagcagataaagtggactaattgtcctccccagatttcctcacatccgtcaattcatttcattcattttgtgagccgaccgacactaaacggaggactgaatgaatgacagagtctcccaaaacgatattgaacaaagataaaatttgttggttggccccccaggggagaaagcgggggaagcgcggattaaaaatatttttgggtgctatggtggccacatagaaaaaagattaatgatggtttgtggcacatcctcaacacagttttagagatagatgagtaaggaagtaagtggtggtggtctctcatcacttaaaagttgtttagccaaagaatgatgggacgaattgggccggccaaattgtgacgctgccctgtggccaatccgaaaatctcccaccccatcttactcaatcaaactctgccgaatttccaaggccaaccaaaatatatttattctttccatcgcacttgaatggaatttaattgaaagaaattaggaaaaattggtggcatttaattttttggtccttttgcttttgtcctggaattcaagtacgcctaagggcaaatgtcccatggcctttgtgggttttaaggattatcattttttggtaatgataaaaaagtgtaataccttgaaagtttttaatcattctgacggttttcctaatttatacctatttaaaaatcaaccaaactaaaatcttatttgtcagcaaatttttttgtgaaattaatcattcatttcagtattagaaaaagagtgatttttgatttttaatcggattactcttaattcaatagaagtgcataaatttggtgtgtgctgcttcagaaatttcatttatcggaaaattttacaataaacctatcaatcaaataaatagtaattatcattactagcataaaaatggaggattgcttctctgacgtaaatgaattgtgaaaatcatttgttataaccaaagagtttttttgttttaataatcatgcaatttttaaaaattattttaaacaaaatcattaagaagaaaataaaattatttcaaataacgaaacattgaataaaattaattaatttattattttgttaaataattttattttacctttaaaaatattttcttattaattaaatttaaaccgtgagtgttttgttagatgatttaatataaaaaagacaatcaaaaaccaaaacttctgtgatatataagcaataaaaaaggataaataaattatttttttagaaaaaataattgtaaattatgtactgtataaaatactaaaagatatacaacctcatacagtaaatgcatatattgtaaaactcacaaatcctacacagccacaaaattgtattaagagctaaaaatacaaccaattacagtatgacggtttaataagcctatcccactga

SEQ ID NO: 57307 - DNA, 2205 bp, Heterodera glycines
ctttaagaaaaattcttacattttccaatatttgttgtaattatttttttaatgttaattttttccgagaaatttcaataatatttttgaaacaaaattttctattaaacttttattgaaattctttaaaattttaatgttttttatgtattttctttttaaatttttttcattaagtccttttttattttcttttttctatttcttaaaatgttaaaaatttcatcctctcctcttccctcgttctttttcttcttctcaccaaacattcgcgtatggtagtagactaaaaatcacacaatcgtgctaaaaaattatataatatttttgtgtaaaaacgggtgggtgtgaatgtttaggaaaaatagaaaaatttcttttattgtattcaatcgtaacaatgctttaaatgattagaaatattttaatcgtttttttgtggtcacttgtcactacgaaaacgacacccattcaaaaaaaaacatttgttttcaagcaatatttgaattttgcgcaattatgctttaatcttaatttcttttaatctgatttgctcctacaaactgagcctatatctaaaacaaaatcctgactatttccttttttcaaatattttaatgcttctttaaattcctgaaaattcaacctcatactttctatgaagttcaagaccgaaaattcctcggggttcaagaccaagaaacttgccccgaggcgctcaaaaaccgagatcatgattaaaaaaaactcaggactcttttctcgagtgagactgactcggggtaccgggaatctcgaacgacttacttattcatgatcacgtgaatcccgttagggttagcatcattttgccatcaatttggccaacaactggctgattgattgagggagagcattttaatgctttttcggctttggtcaaacaaatttttataacatttttttgccgaatcaaattttttctttttataaaaagtttcttttttgttcaattttccccttaacaatgcttactttgttcttgtgcggctttttttctcctatgtgtgctttgttcaaatgcaatcgccgccccgtcttaaaatgcatcacacaaaagcaaaacttttattggtggaaggaggggcgatgggggggggggggaatttgcaaccagagccatagcagacataacgtcgaactgatcaacggatggttaggtaagcgtcacctccaccaatagtgactcgctgtataccgatggcatgctagctttatctgttcggtcaatacgatgcccattgtacttgttgactggtatgatattcgagagcaaaaacgacttatggaattgcgagcttcagtctcactacacggtcgttctgatactctttatgagaaagcgttcccactttacgagcaatgttcaaataaagctcatgaccaatttctaaacgaccttgagagaattctaccgagtaacaccacaccgctcattgtcagtgatgctggctttaaagtgccatggtataaatccgttgagaagctcgggttggtactggtttaagtcgagtaagaggaaaagtacaatatgcagacctaggaggggaaaactggaaacctatcagcaacttacatgatatgtcatctagtcactcaaagactttaggctataagaggatgactaaaagcaatccaatctcatgccaaattctattgtataaatctcgctctaaaggccgaaaaaatcagcgctcgacacggactcattgtcaccacccgtcacctaaaatctactcagcgtcggcaaaggagccatgggttctagcaactaacttacctgttgaaattcgaacacccaaacaacttgtccccgacccgaaaatacggtacgatgatatactggaattaattggtgaaacagtaaggaaaacacagagaaaaagttcgaaaaaccgatggaattccggaaaagtatttactcggaaattttaaccaaaatttgagatggattcaaggaaaatttaaaaaagcggacaaaaaattctgtatttggcatactgtaatcaaacaaccgacacacacacacacacagtgataatacggtagaatttagtggcaaaaaaatgcacctgcgaatcgatgcccaaaaagaggaccatacagaagaaaaggatggaccaaacattggtgtacggtagctggagaatgcctgtaaaataaaca

SEQ ID NO: 57308 - DNA, 928 bp, Heterodera glycines
atgggatttcctcacagaccagtgcaaatgacgataccatattcatccacaaatcccatccccgcagtcgcgcctgttcaagctatgccaatgatcgggggcataccgtacggaatggtttcggctggagggcaacttgcaatttcaccgtcattcggcgctcaattggctccaaatcatggagttgctggttttggcagaggagtgcctgccgggcaacagttcattggacagccgcttgttcttggatatccgcaaaatgctggattcatccaaccgacagttcgttttcacttaccgggtttatcacccaccaaaatactcaaaaatcatcttatagaaatgaaagtttaagaatgtatgatgtcttactagtaacaatttcaacaaaaaactctaaatttttctaaattaacgccgctaggcctttcctattctccaatttattttagaaaaactcacttgaaaaaatgtggtgaaaagcaaaaaatcatgtttacatggctggtactcttcacaaattttaggcgcccccacccttaatcaatctctagccttaaccgcctttttcacgtattttaacaattagatggttcatccgaccggacaaatgatggctccaattgggctttacccatcagttgccggcgtagttggacctccacagatgaaacagcctccaatatcgcaaactgtcatggcaaatatgcctccgcctcagccgttgtatgaaggtgaaatttcgtttgttactgtttctctgaaattccttttagacgttgaaccgttgtctgctgaagagcacaatgccattctttacaattccagtgccgaattccacactgccttggaagccagtcgttggaatgccgttagtgttttgccggatgctaaaaggaaggagctgtacaatatgcttcatgggtag

SEQ ID NO: 57309 - DNA, 901 bp, Heterodera glycines
atgatgacaccacatcaagatttccataattcaagcgtcgcaatgcaacaacaacaaacactttgtcctcctgaatcaaccttgtggatgggcgacttgaaaccggaatgggatgcaaattttgttcgtgaagcgtttggagaaaatgcaggcgatgttactaatgtcaaaatggtattacgagaacgcatacataatagccacgttttatttgaacaaattaagcggtcgacttattgtttcgttgaattccgagacggaccaactgctcgaactgcgatgttgagggttaatgggatgacggtgcgcttggggttttgtctattgaaattaatctgttataattaagttacctaatgatccaagtgggacgtcgcgctttaatttggcctttgcaaattcgccccatcatatgtaagtattatttggttttttctcaccttaaaactctaaggtctattgaatacaatctttttgtgaacaatttggctccagatgttgatgatgtggcactgtttcgagtaaagtttacaattcttagaattaccctttgtttgttttagttgtttggtgaacgctatatgtcttgccgaggtgcaaaagtttacagaaacgaagatggagcatcgaaggaacaaggattgttcggtttacttctgaaactgaccaacaaaaggctttggtattaaacatgtgaaatactaatgaatccgatttgttaaggttgaactgaacaaacacaaatttcatggccgcgatttatttctcaagcttgcaagaccgaaaactcgtggtggacctgccgagaaacgatttccgggtcatggtggcccccccaatatgttaggtcacgggtacggagctgcaggtggattcggtaaaaatgtcataattgaataaa

SEQ ID NO: 57310 - DNA, 724 bp, Heterodera glycines
atgatttatgacttactggaaaagtctgtatgtcggaatcacgactttttttggtgggggaggcataacaaaaagagcgagagagtgcacgtggtataccggaaagaggctagagcactaagaaatagtgttccaacaacagagagtgcacatggtaaatggaaaagaagaggcaaaagatgaatttctcaacttaaataaataattcaatttatatatgttcttttctcagcaaataggggagtaattaatatgagctaacaataattaaggtgtttatcaaggtcccttatcacaaatataacctttttgttctcatcagatatcatctctgacaaagactcaactaaatgaaatgaatttgatcagattttatgcaattcattgcctttatcccctcccgtgactggacaatccgacagtggacaatccgacagtggacaatccgacagaagtggacaatccgacagtaaatttctattttaaaaaatattttcaagtcattagatgcattttactggccaaatgcattttgaggtgtccaatcaaaagtaaacttagttatgccataagtatggatgcgatttacagtaactaaaaccgccaaaatcgttagtttttaggttctaaaaaactataaattgcatccctagtcatagaaatagagggtgatcatggacgccaaaatgctctattggagcgtaaaattcaatgtaaaatgcca

SEQ ID NO: 57311 - DNA, 127 bp, Heterodera glycines
gtcattaaaaatctgttgaaaaataatccccccgtctccattaaaggccctgtctccaattatgtccccctttctaaagaggttgaaaaataatccccccggggccttaattagagaaaatacggta

SEQ ID NO: 57312 - DNA, 858 bp, Heterodera glycines
atgtatgttaaaagtagcccctaaactaaataagtaccgataaatttttggctctaatcctctattaactgcaaaatttcaaaaagtcgtggaattttagaaagttatcgtgactttttttatggtcgtgtaaactgaatagatcccgattatatcatgctttcttaagtttggcaagtacatttcattaattggacggtgcggaagacacttgcacgaactgaaactgaaggggatgtattcacgaaaagtttttgttggcgatcagctgtggtcatatgtccctaatttgcggcatctctgttttgatgacacacgaacttcgtctgacacagtgaaagccatcgcagcgcaactgccaaatttgaaaagtgtggccttctcagacattgtaatgatttgcgaatattaaaacactgcttatttgtttattttaatctcaggattggagttgctcttcaaatttgaacatgtttctttcaaatgcaaaacttatattccttcgttttccggtggacaaattcccggaaaggttaactttttccgcattgccacactcattacgtatccttaacatttgcgctcgtcgaactgagaatttttactcaaatcgaaagacctcgcgaatcattgaaattcttcaattggcggcaatttactgtcccgcactttctgttttgatgttgccaattgagtttcaggcgggtgaacgtattctcgacgaagtgggccgattcaatcggtatttttgattttttgagcatcatcctagctgcgtagacgaaaaaatttaacggttttctgaaaagttcttaggtttacaattcaagtttttcagcggaatgggtttttaataaa

SEQ ID NO: 57313 - DNA, 857 bp, Heterodera glycines
atgaaccgacgtttgtggaaaatgtgaggaatttttaaatgatacgattttcggcacttttgcagtttattgggcccttacgaaaaaccacagggatgagagattttgaggtaaaatcattagtaaaaaccaactcgtactgtgaaaaaaaacaaggtaatactatagatggtggccccctttttgagaaaaatttttttttgttctaaaaactcgtgaaaacatgtttatggtggttttcgaggtcggagaacccgaatccaacattaattttgagcaatttcgaatcccggacccgaattcgaacaaaaagttgaaaaaatttgtctcaaatcgtagcacgagttgggtttccggcttttgattttgtaaattttcaaaatttgctcaccacttttgcgtactgtgaaaaaacagaaatttacctcaaatcgcagtacgagtttgcggtttcaggcttttgatttgtaattttttcaaaattacctactccatacttttgtttttcattgggcccttaaactataaaaagtgccaattttctctttttaagtaattttttacgtttgcatttcagttggatttgtggcgacgtttggatggacattctcccatcttttgaacgtgctgaacttggcctcaaaattgcattgctttcttaccgttacgatgctttgatggacaaacattttgacggaaaaaaagaattgacaatttggaggacaatcaaaatttgcgacggcattggcccagaaccgaaattgtctgtacagatcgaggacaaaagggtggaatttccatttcccgactgtccgttgcccaacaaaatccgctttaagcatctttggattacgtaa

SEQ ID NO: 57314 - DNA, 1430 bp, Heterodera glycines
gtacattgaccattccgtcattgaatttctccgttccaacaagcacatttgggacagaaatggcaccaacttgctcattcaaatagaatcagacacaaatgttatcaagccgatttgggatgtttttaccagtgaaatttggccaatttttgctaccaacattcgccatttgagctttgccggtcactatttggacaatttgcgtcgtctcgtttcaccgacaattctcactgattttgatcaattgaattcaatcgattctggagttctattacccgatggaattgctgacgatggaccggatgcaactgctggccaagcattgttcaaatgggtgcacactccgagcaaaaatggccaaccgaagcaattggtttgtgcggattatgacgaagaagtgaacatcgactgggtcaacagtttcaaggaggtgtgtttgttcacattctcataaaatttgggtatataccgctggtaccactcacttttttgaaaaaattttcaaaatttttaatcagatgggtcaacaatttgaaagtggtgtgtatgtgtgtggtcggtcacataaacgattgactgattgattgcctttgattttcgcttccttttttaggcatttctctgtgccaccgcttcagtcagctataatatccgacttgaactttatgattcgtcgacgccaattgagccatttgaattgatgaacgaacggactaatgagaagctgacattattacttgttggagaagatggctatgaattcacagaaaaactgttgaagcgatgtccaattagtgaaaaggcggcgacggatcaatgggaaaatgaaaaaaattgggacgacaatttgaacaatgtccaattcagtttgttgggtggcaaaagtgggtaagtgaaagataattcacagttcacacctaatttgtgtttaattacaggccttatggccaccagcggatgaagaaaaagaagcgggtcaaagcatcgaaatatcgtcggactgcgcggaagtgaattaattatatttgagaaaagccgatctcacacaattggaatttgatttgatgccatcattttctctcagaaatgcttttgtaatacatttatttgcttgcttttaaatgaatgtttggttatatgacagacacagcaatatgtttcggattacaatgaagagattatccgcaaagtttgtattaagcgagccattcattttttaacgattaaaatagaaagtaaatgtttacctgtttttttctcaaaataagcaacagaaaaatgttaattctaagtagtgatgttcgagagtctcgactcgagaaaagtctcggttttttttggtctcgagtctcgggttttcagtctcggtctttgagactttcgagaccgagacttttttacacccctaatgatcggctttttgtttagaa

SEQ ID NO: 57315 - DNA, 155 bp, Heterodera glycines
atgtccaatttaatttgtgtggtggcaaaagttcgattgggtaagtgtggtaaacgataattcaattcactcaattcaaatttcacttaattttaggccattggccaccagcggaagaagaaaaagcggatcaaagcatagaaaatgtcgtctaa

SEQ ID NO: 57316 - DNA, 488 bp, Heterodera glycines
  unsure (1)..(488): unsure at all n locations
atgaagaggaagagagtgtgccgagaagggaaatgtgtgagtcgagggggggaggacagtggcggttagagccactaattgaaggtcaccggaggggcagcagatggaagcaaagcgacgggaaagagaaaataagggaccatatcttttttagcccaaaaattaacacattttccgagaaaaaatttaaaaattggtatggactaaattatataataacgagggctgggaatttggctctaggaaaatcggacactggaaaatcgacaccaactttaaattttaaaaataattttttgattctttgctttaatatttaaaatacatataaatttagcataaatacacatcacaaattacctataaaaatggacaatttanacaaatctcttgngatagggattatgctttctttacgtaaaaatagcaattggaaaatgcgccagtaatacagtattttgtaaaataatattctgtagcaatatgta

SEQ ID NO: 57317 - DNA, 708 bp, Heterodera glycines
atgctgatcaaagcgttcactgccaccagcatggcatttttcgttctgtttttggtcgcccactcatttgaattggctcttgcttttgctgttgtagacaaagatgaagcacaatcaacaacaacagaagcaaaaaaccaagccacaacatttattccaaactcgaggcaggatgatttggaagcagcagatgctgctgaattgttgggtgtacttcttgaagaccatgacgaaccacaacaacaacatgaatggccatataacagcaacaacaacaacagaagaaaagtggtgtcatcatcttcctcagtgttctcttcttcatcatcatcgtcgtcgtcgtcatcttatgaggataatgatgatcatgaccataatgccgatttaaagccggcatcattgccgagaatggcacggcggataattgtgcagcaacaacagcattacggcaatcggatgccacaacaacggcatcaacgtagattccgcatagatccatcacatcccatccacattctgttcccgttgccagcaagggaggggcgcaagactcaaaaccctttcggcatcaccattctgaaggcacgaccggtggttgatgaggtcggttttattaaaaaaaaatatgagcccattgattattaaaaagaatggatttatattccaatcgtaaattaggtatctaaacagatgttaaaaagttaggta

SEQ ID NO: 57318 - DNA, 146 bp, Heterodera glycines
atgggaaaaggaagggcattcgggcaacggctggtccaaaaggggccacacaatggcaaaggaaagggagggcactcgagcaggtgcggacagggagggcactcgcacagacagagagcagcgaaggccgggtgcagtgaaaggcg

SEQ ID NO: 57319 - DNA, 215 bp, Heterodera glycines
tcgtggcgacaagaaatttgcttcgaactctgcggggtgaaggggacgggaaggggatgaaatgggcgaggcgcgcagagtagccgttcgggggaatgtagggggtcgggaccgatcggagagcgatgagtcgtgccggttttcgtccaggcaaatagaccaagttgggcacaattttaataagagtatgtttattgtgtcgacctcaaacttgg

SEQ ID NO: 57320 - DNA, 979 bp, Heterodera glycines
gtgaatttctgctacgcgcacgacacttgcccggaatgcattgcaaagggcatctgggaccagccactggaccgaagctgtggaatctgtgggctgacgaggaccttcgcatgggcaccgttcgagttctacaacaccgaagtggagaccgcctacgttgtggacgaccccctgacggccttcaccaagtggctcctgcactttgaagctgatgtcctcggccttgaccctgcggagaagcgccgcaaacggaagcgtgcgaatggagacaacaacaacaaggcccggaatcctgctgcaaatgccttcatcgacatggaagcggaagacgacgacagcgatgacaacgatgcagaaaacaactacatgcttggctatgatgaggagggagagaaaccacgctccgtcaccacatatgcctacgcccacgcaggtaaacaaattttaacaaaaataaaaaggaaaatttatcgatttttaagggtcacgttacgatcacgtgctgatctacggcgagatgctgcgcatgggtgtgcgtcccgaactcgtgcgccaggggaatcacctgctggagatgaaggcccgcaagaggggagccatcacaacgacaatcttccgggacaggtaaactgtgttaaaataatataaaataatcgattatttttcagttacaaactgatccccatcaagttggcttcctttgtgaagacgttcggcttggaaatagagggagtggacaacaagaaatacttcccgcacaagttcaacaaagtaaaaaaaatcaataaataaaaccaaaaataatcaataattaaggctgcaaattatggtgttgtgctggacactcttccgccgcttgaggactactaccctggcgggcacttccctgaggagcgcaagaagttggagcagtggtacgaggagaaccgcaacacgccctttgacctccgtgaggtcattgcggactactgtaaagcag

SEQ ID NO: 57321 - DNA, 977 bp, Heterodera glycines; identical to SEQ ID NO: 26589

SEQ ID NO: 57322 - DNA, 2343 bp, Heterodera glycines
cccaaaaaacgctgccctcgtcggatctgagccccgtgttggagcagcggagcggcgccggcggcagtgttctcggcggtgtctcttccgttggcggcgcgtcaactgcggcgacggcgcagtttttctcatccgcctcggcattggcatcggaggccaattcaatgcgtggctccaccatttcgttgaccggtgctgggcttggtggggctggcagtggcactgccgccacttcgacgcacgcaccgccgagccgactctctgcgccgctggacactcagtcgttgacggcgagcagttgtggcgttggaacggcgtcaggtggaggacgaggcgagtgacgacaaattcatcgttttaacattttaattttgccggtgaattgtcctatttggaatttcatattgttatattgaaaatttattccgaaaattgcagtttttacaaaagaagggagcagggaaaaatctgaaaaaattttttttttttttttgcgtcggttatgtccaggcgacgttttggaatgtatccacaaaagaaattcccaaaaatctcttggaaaattctgtgcattaattttttgaactgctttctctgccaaattatttaatttttcacttcagctttgccttccacaacctctgccggtggtggcgctgcttcgtcttccgcctccgtgttgcgttcgagcatcaaagacagcagcggcggtgcggccaacaaaaaggacccgtccgactcgacgcaggcgctgtttctgctggctgaggtcagtagttagccggccggctaatcaaattaacggctacttaaatctgatacctaatactcttccagaatctggctgaacttatcgactcggtctgcaaaagtgaggacaaagaaaaactgttgcccgcactgcaagcagtttggaacaacacattgccctatttgaaagcgaaaaggtacgggtgcacttcgtttccccccccccccggtcgtttcccccccgaaaaattttaaaaaaaaaatttcaaacctagaaatttttcataaaaaaattcttggaaacgacgggggggggggggggggacgacctgctcccaaaaggtacggtttgtcggggacattcgaatggattttttgcccaaagttttattcttaaaaatttgacccgggaaaaattacaaattttgcagatacttgcctaaaatgataaatttgccattgttttggtcattttccgaaaaatttagtcccttttatttgcttttgaatttcattttctgtttttagtgctaagaatgtgcgctttttcttggccagttcacaatttctcgcttcgatgagttcctacaattacatgcgttcggtgtggaagaaaaatgcgatggatttgctgtgggacaattgtatgggaataatgaaaaattcaaaaacaattcggatcatttacctttttttctgcagcattcttcaaaatggacatccacgcgttgcgccaatggctgatcgtaatcgacaatttgatgaccaacgacaaaacatcgttcaaggaattgcttagtcggtttttgcatttttagcaaacataatgaaataaaatttggtttttgaaccgaaaaaaagaaaacatgaacagattttccaacaagacgtataagcagtttaccatgtttcaaaaaaattgattcagaacgattaataattgtaaaaataaacggaaaaattcagcgcggatcaccacctccacgtcgaccactctgtcaacactgatcaccagcaaggagcaggagtacgagatgcgtgcccagtacctgaagcggctggcgttcgtcattctcagctcggagctggaccaatatgcgggccaattaaacgaaatccaaggcatattaagaaaaaaatgttatctagcatggcattttgtcgttgcaaatgaccgtttttactgaattgccaatttgcagaacggctgacagaaaatttacgtctttgccaagtgccggtgatccacacgcaggtgttcacgtgctaccgcgtgctgttggtccgcatgagtcccagttcatttgtgtccatttggccgtcgatggtcaccgaattggtgtgatattaataattaattcctaatttattgccttgccaatttcatagtaaaattgttttaatttaaattttttgtccaggtccatgtgctggcacaaattgaccaccaactcacttcaacaacaccaacaagcagttccggaggcgcttcttcgtccgttgatgaacagaaatcggtgcgtgacgagcagtgcatgcagctgttcttggccgcttgcaaattgcttgagacgctgtgcgcacttccctccg

SEQ ID NO: 57323 - DNA, 1711 bp, Heterodera glycines
atgcaaaaaccgactaagcaattccttgaacgatgttttgtcgttggtcatcaaattgtcgattacgatcagccattggcgcaacgcgtggatgtccattttgaagaatgctgcagaaaaaaaggtaaatgatccgaattgtttttgaatttttcattattcccatacaattgtcccacagcaaatccatcgcatttttcttccacaccgaacgcatgtaattgtaggaactcatcgaagcgagaaattgtgaactggccaagaaaaagcgcacattcttagcactaaaaacagaaaatgaaattcaaaagcaaataaaagggactaaatttttcggaaaatgaccaaaacaatggcaaatttatcattttaggcaagtatctgcaaaatttgtaatttttcccgggtcaaatttttaagaataaaactttgggcaaaaaatccattcgaatgtccccgacaaaccgtaccttttgggagcaggtcgtcccccccccccccccccgtcgtttccaagaatttttttatgaaaaatttctaggtttgaaattttttttttaaaatttttcgggggggaaacgaccggggggggggggaaacgaagtgcacccgtaccttttcgctttcaaatagggcaatgtgttgttccaaactgcttgcagtgcgggcaacagtttttctttgtcctcacttttgcagaccgagtcgataagttcagccagattctggaagagtattaggtatcagatttaagtagccgttaatttgattagccggccggctaactactgacctcagccagcagaaacagcgcctgcgtcgagtcggacgggtcctttttgttggccgcaccgccgctgctgtctttgatgctcgaacgcaacacggaggcggaagacgaagcagcgccaccaccggcagaggttgtggaaggcaaagctgaagtgaaaaattaaataatttggcagagaaagcagttcaaaaaattaatgcacagaattttccaagagatttttgggaatttcttttgtggatacattccaaaacgtcgcctggacataaccgacgcaaaaaaaaaaaaaaaattttttcagatttttccctgctcccttcttttgtaaaaactgcaattttcggaataaattttcaatataacaatatgaaattccaaataggacaattcaccggcaaaattaaaatgttaaaacgatgaatttgtcgtcactcgcctcgtcctccacctgacgccgttccaacgccacaactgctcgccgtcaacgactgagtgtccagcggcgcagagagtcggctcggcggtgcgtgcgtcgaagtggcggcagtgccactgccagccccaccaagcccagcaccggtcaacgaaatggtggagccacgcattgaattggcctccgatgccaatgccgaggcggatgagaaaaactgcgccgtcgccgcagttgacgcgccgccaacggaagagacaccgccgagaacactgccgccggcgccgctccgctgctccaacacggggctcagatccgacgagggcagcgttttttgggctttaatgtaaaaatgggatttgaaaataacaaggagagaatgttaaattgagaccaaatttggattggtatgtttttctctatttgttcaagaaattccattcacgggcacccaatttacaattggttcccgttgtacaaattgaaaa

SEQ ID NO: 57324 - DNA, 2535 bp, Heterodera glycines
gtctgccgacaaacggaaacgtgttgcttcctccgctgcgcgcgactcaacgtatgaccagacaagcctggtcggctcactgctcggacccggtgacgcagcagcggcaatgccccggatcacttcctacgctggcggggacaccatccgacggattcgaacggggcaccggcgccaggactcgctgcaggagtccattttcagcaccggcacacaggagttgcgcttgttcgaccccaccgagttgcccaactcgacatgtcccggcgaccacaagcagccgttgctggacgaaacattctctcacatgctgttctatgccgagagtccgtccattgttgacttgggccgtgccgagaagctgttccgcaccatgggcacactgttgcgcagtggcaacgggttgggccgtcatctggtgaacagcatgctgttcaccaacatgtccgagctggtcaaccggaccggcaccaccagcagcggaaagactggaggcggcaatttgtcaaacattggcaccaactcggtcaacaacagcatggccaccattggcggcgcttccacagcagccactcagcaactgctcgacttcatggcacgccactaccaacacatccagggcgacggcttttggtgtacagaaacggcacatgatcagcagaacttcagtgtacagaagaaagaggatggcattgctggtggtagtggtgggacagcggctgtcacttcaacaagttcggaaagcaaatccgggcaacaacaacggcactcgactctgttcgaaattttctcaacggtatcttttcgggttatatttgctgaaatttggatttatttgccttataaggttgtgctgtatttcttccgctcttactacttgaactcgcccatcaaccatgtttccgagactgacttggtcctttcgtggaagtgtaaggtcgcgctgtttacaaagccttcgattaaaaaaatttgtcaatattttagatggtgaacctttttccttttttttagaaaaaccaagttttttgtcattataaatagttcaggactgacgaatccgattctgaatttgttctatccaattagggttcgggccaaatttagaaacatgaatttcgatgaattttgggggtatgggttcgaatggatgcaaaacgattctaaatctgtaaccaatgaacagcattatttctttaaaagtctgattttccctcgatcgttcacagattgccgccctcgactgtttcacggaattgctgcacattcttgacgacactgtgagggaggccagctccaaggaattggccacatttgtgcagcaaatttatcggcagacaaaaacccaaaaagtcattctcactctgatgttggccgccattccgacaccaccgaaccaaaaagggtggaggtgtgtaatgatggtttggttcggttccgggatgcagattttctcccatttttagcggcatattccattttttgaatttttcccattttaaaatttttcgaatttctttgtaaaaaccttttaattttaataaaatccccattttttgtctggcatttgacgtcgcctatttttgccagattccccataaatttcgtttttattttttcaaattataattaactaattgctttttcccaggatgcctctctcaatggacattgcggagttcaacaacggaccaccacacagcaaacattttcgcgatctgatctttgcctaccatcggtcgctgctcagtttggcctccgcgctggtggtgctcgagtacagtcttcatgttggcactcggcacttctcttctcaggttgaaacatcatatttccatggctttttatgggttctttttttgaaattccatcaaatcaaagttttttctattcattttataaagatatgaaaatttctcccaaagaataatatattttggcctttcagacccatttgttggcccttccgatcaatcgcaacgcttctccatcttctcagatcactgaaaaccagatcaactacaactcctcccaaaatcggtccaccattcgtgaggcgcgctactccgtcgttgagctccgcctgttcctcggcgtaattttgaacgcgttgaaacggtgtccggcaaggcatgaactgtggctccattttcttgtcgggattttgccatatttggacaggttttggatcttttttatacgcatctttctgtttatcgaaaacaatatttcagagccttggccacttttgtggtgcatacggttgagcagatttgtcgaaatctgtacgaatgtgtgttcatcaacggctccaccgcttccgtggcgggattgaacagtgcggcgttggcattggtcagcaacagtcaacagccaatgggtgcctccgtgatggaacatccgaaaaatcccattcaatttgtggactaccgcatcaatcggaccaacgacgtggcaacaacagtcggcgacgatggcacaatgccaaccgttatttacccggccaattacattttgaatgtaagagttctttag

SEQ ID NO: 57325 - DNA, 354 bp, Heterodera glycines
gccttgccggacaccgtttcaacgcgttcaaaattacgccgaggaacaggcggagctcaacgacggagtagcgcgcctcacgaatggtggaccgattttgggaggagttgtagttgatctggttttcagtgatctgagaagatggagaagcgttgcgattgatcggaagggccaacaaatgggtctgaaaggccaaaatatattattctttgggagaaattttcatatctttataaaatgaatagaaaaaactttgatttgatggaatttcaaaaaaagaacccataaaaagccatggaaatatgatgtttcaacctgagaagagaagtgccgagtgccaacatgaagactgta

SEQ ID NO: 57326 - DNA, 563 bp, Heterodera glycines
atgtcgctcgacaacatttctgaggcaaaccaagtgattttgctccgattgttaactgacaaaatgctgaatgatcagccgcccaataacacaattatgctgaaaattttagaaaccattaatggaaaaaaaggtaaacaaaataaaaaaaaatttgtaatttggtttatgatttttcgaattactggaaatatccgaaatccggatttttggattttgacatttttatgtcgatttcgactaaaacaatttgtctttaaattatattttttgtggcaaaagctttgaacttttttagaaaacattgtccgaaaaaataatttcaccgatcagtgatcagaaaaattatcggacccgccaaatggacagaaaaaaaatgtgccaaatttttcaaaatgccaaaaaattgatgcgagttaccaatttaataaattttaaaatttttcgtattcaaatttgaaaatttgtttagattttgaacagctgagtgctcattttttgattaccgatgaatcggtagaagtctacatgaaaaagtatcgagaataaaattaacaaattaa

SEQ ID NO: 57327 - DNA, 173 bp, Heterodera glycines
catttttgatggcatcaaaaattgttccaattgccgtttcgccctctttcaactttttgcgtcgtccattgccttcgttggtctctcttcgttctcttttcaaatcgccattggacgcgccgttctgtggcatttacaggacaaatggcgggatttgccggacggatgacatt

SEQ ID NO: 57328 - DNA, 207 bp, Heterodera glycines
tgtcggctcttctcccaaccgtccctcctcctctccgtcctccgaatccctcgtgcttttcgtctttctcgtgatcgcgtggattgtgctttggcttcatcagtcagtgtgctttatctgttctgcggatggaatgaactgatcagtttgctcgccgagtcgggcttcgtcggtcgtgcgaaggcgaacattttaaagtgtcacggg

SEQ ID NO: 57329 - DNA, 549 bp, Heterodera glycines
ttggccaaggacggtttcgacattgtcatcccgcagtgcagtccgttgagtccgggcgaactgctcggctgtactgcgcccgttctgcccaaagatgtgacggcacttgtgtaaatttaatttaaacgaattttaatttagacataaattactaaaaaataaatgcctttaattcaaaaaaccttcaattttttaatttcttaaaaaataaatttgcactttttcgggtgggcgttctgctctctgcataaaatgttcattaaatgccatttttgttttaatctttcagctatttgggcgacggtcgctttcatctcgagtcggcgatgatccaaaatccgtccgtgcccgcctaccagtacaacccgtactcgcgtgagttcacccgcgagcggtacggcactgagctgatgttggccaaccgtgacgcggcggtcgcagtgacacgcgacgcgcaatgctttggactgatccttggcacactcggacgacagggcaatgccaaaatattcaatgtgagtgagcagcagagggggagaaagagagaga

SEQ ID NO: 57330 - DNA, 134 bp, Heterodera glycines
ttctcggttctcgattcccgagtcgagaaatttctcgggttttttgggtctcggttctcgtatcgtttcccggggtcatttctcggtctcggtttctcggttcccggtaaaaatcacttctcgcacagccctac

SEQ ID NO: 57331 - DNA, 67 bp, Heterodera glycines
tgtccgtttgggtactcaacaattatggggagcaaaatccaacgcagaattaaagtacaggctatag

SEQ ID NO: 57332 - DNA, 443 bp, Heterodera glycines
atgctccaatttgtcggacttcaagttgcggaccagcaaatagatgaagatcacgatggggataacgtggatggtcatcaccacggtcatcgtcgacttggacagcaccgagtcgtggatttggcccgcacatggcggcttctgttcagggagctgttgtcagaaagggcttttcagcatttgacccaccacaatgtcgtcgtcgttgaagaactcgcactcgaagtactgctcgatgctgaagcgccctgctctgttcacctccagaagaacgccgagcaatttgacgagcagaaaacggacggtgtaaatggactcagtgacggtcacgtgaatggtcaatgcttgggtaatgctcaaaatcagagccaacgcgggacagagctgagaagcgcaaaaaataaggaatatatgtaataaataactcatttaaaattcaccaa

SEQ ID NO: 57333 - DNA, 468 bp, Heterodera glycines
atggtttccgccaccattttaatctgtcaaattgccaatacaataattttcgcctcatttgcctacaactttggcaagctgtacatcatgttggacgattacatgcgcaaaacggacgccatgaacatcacaatgccaaactcgacagtgcaattccaatacaagggcataaatgtggacagaatcaccaaaattgacaatgtaattaacaaggcgaaagctgccaaaaacttactgtggaataataaaaattattttaaatggaaataatttttaataattttttcttggtattaaattgccattaattttcagtaccatgaccaattatggaacttattcattgcggaagtgattgagctgattttcccagtaatcaatctgtttatgttcgcttggattgtcaaagacaaacggcggaggtttccgtcccgagtccaaatcatttatttggtgaattttaaatga

SEQ ID NO: 57334 - DNA, 576 bp, Heterodera glycines
  unsure (1)..(576): unsure at all n locations
atgagttcgcaatacaaattttggaaacgattgaagctggacatcaacttcgtaagctttttaatgaattattgtattttacatattcctttataaattatccctttatcatggaggcagactgttcgtcgtcaattatgatgataaggatacctaaaatagaaataattcaccaattgtatttttattctcttttcagttgcgtcacacttttttgactcaattgtgtcggaagtgcccgatgaaaggaccaagcacatccatttcgttgaagaaagccactattcggtaaaaaaccagtcgatgctttaatccttttgaattttggtcagcttgtcggatggtaaagaccgtagtgcacaaagggactacgggcacacattcgtcaattagctgagtccgactgactttgcctgtacgaagtaaatgttgctcaacaaactggatcgtggactgatcacgtggcattgagcagaagtgaaaagagaatgaagcgaaataagtgacaaggaggccattgtngggaagggtgtgattgacggttgaattacgcaattttggtgattatattcgaaa

SEQ ID NO: 57335 - DNA, 642 bp, Heterodera glycines
ctttctctcacagacaccgattccttttggcatcacaaacataaaatgctaatggatcaaataatatcggatactttgtgccctaggcaatataaaaggagggccgaatccacacaaatcagtcagaaaaataaaattaggttgggggaaatgacgcttcacaacgtttgctcttttaaattattcaaaatatgaataaaatttaaaaaatgtaagacttttgtacatttttcttattctccaacaattctcagtaattaaaaatatttgttgttaattattttaaaattttatccaaaggactccatcaccccaatagttgttaaacgatgcttctcaactgctatttttcatcttaattatatgcggaaaagtctccacccgaacattttgaaaaatttaatttttgcatcagaatttgaggattttattatgcgtaaaatttgtttgaaaattttcgtgtgtttttctttcttttcgttcggtttttaattttcgtgaaaaataaatatttcgttccttttgaaaagcatttttttttttggtttttgcacaccatggtacgggttggtgcggttgctggttcgaaacatgccggatttttttggcattagggcagcgaaaaaactataaatttgcaca

SEQ ID NO: 57336 - DNA, 671 bp, Heterodera glycines
atgccaattaatactgccactttggccgatcggattaagctgttgttggacaacgcagctaatgacggcgatgtgcattttttggtcgggaaaggagagcaaaaagaggcgagttaatcatgagaaagcgattaaaattaactggcaaaatgtcagggtttcaaaccaaattaaagaactaaaagccgggaattaatttgtcgagattcacatacatattggctctgaaggcgctacgggaaatttttccattttacataaatttattttttaaatttatttgcttaatttcaatttgattcaggagttatatttaaaaaaaagaatatcggactctaaaaatcagattttgggtgtgtgtttgttaatagattttgacgattaaattgtcaattttgattcatgttttaaaaattttcaaagggattgagtgtcaggcggtgccaaccgacgcggcccagaaacatttgagcaatttttatcagattaggactttccaaatcttaacaaatctgataaatcagactaaaaatgactcttgatttaatgatatttaaatttttaagcttttgtccgctcacaaaatgattctgaaaactgtgtccgatgagtttaattcattgttccaatcagctgaaattgaaaatggggagatcgatggtgcaaaataa

SEQ ID NO: 57337 - DNA, 261 bp, Heterodera glycines
atgctcaaattcatttacacggacaaattggatgagctcagtggagacacagtattcaaagtgctttatacgggtaaaataaaaatggttttaaattaatttaaattttcaatctaattttaatatttagctaaaaaatatggcatcacctcactgatcaaagcgtgcgcagaattacctttgtcagagctggacaatgtgtttgaaatgctactcaaagctcgttccattgaagaacatgtaaatgtgtcaataaaatag

SEQ ID NO: 57338 - DNA, 913 bp, Heterodera glycines
atggatttaattcttgcaaccgattggataaacaacgcttatcccgaaatggatttacaggacaccaacaaagagaacaaagagccaacgaaaaagcaagaggaggaggcggatgatcccagttggatcagcctgattgacgaggagatgaagcgcgagccgctcgctccaattggtgaggaggcgccagcaacaagttttgcttttggttttcatttggacattacaattttaaattaggcactccaaaaaaatgtgcttgcgctgaacgccgtcgccccgtcccgctcgtggaccacctctgcaagcggttcaaatgcagcgcccacgagctgcatgtgcttttcaaaagcttagagaaacgccgggacattgtggagcatttgcgctccgtccaactgcgcaccgcccacctccgcccggccgtgcgcaattttccggtccgttgcaacgatctgtccatcctggacacccactccgccccagcttaccgaggctacctcggcataacggtttttttaaattgttttatttgtctgtaccacaaaatttaaaggttaggatgcactactacataaagcatggcatccgcttgcgccaccctaatttgccttgcgtagttgaatttggaggcggagatcacaaacttttttccctcttgaaattttgtccattgttttgtagatgtgttcaatttccaattgtactgtggtttttaaaataaatgttgaacccttaactcgagagcaatttttggcaattgcgcaacgtggcgcaaacacggagtacaacgcacggcgcttccacgctatcatcatgcgcatccgtacaacaacgggcaaaactgtggccgcactcgtcttccaatcggcgcgtgtggtcctcaccggagtaccccacccaaacagcgcaa

SEQ ID NO: 57339 - DNA, 1924 bp, Heterodera glycines
ttgacgaacctgcacggatgtgaactgcacgtggtttggagctgtcagtggatggagcgtcttcgtcacgacccggagctgaagcgcaggtacgatgccgtgttcgtcccctgcccgctggacccgcgcaacgacgcactcaggggaggccgcacagagccgttcaagctccaccacgtgtgcagcgacgacgaagagattctgtgcatcgacattgtcagcctttacccccacgtcatggtgggttttctgtgaaggtgttcatttcttacggataaaaaaaattcagaaggccaaccgcttccccgtgggcaacccacgggtcgtgacgcgtgaagtattgctccatccaccaacagcaccacttccgtggacatctccggaaaacaacagcttccgagggttgctgcttgtccgagtgcttgcgccacgcaacatccgtgtgcctctgctcggctaccgcacaaaggatgggcgcttcacctttccattgtgtggctggtgtgccgatcgacgacagcagcggccgtgccgacacggagacgacaggcgctcgtgggtgaccgcctacacgcacgtcgaactcaacaaggcactccagctcggctatgtggtcaccgacctatttgaggtagtcactcatttaaaaaaaaaaaaaaatgttgtgcacgaaaacacaaattaggtctgggactacgacgagtgggacggcacgctgttcagcagctacgtcaacacgttcgtcggtctcaaagtgcaggcgactggttggcccgaggggtgtgtcacggaagagcagcgtcaagcctttgtggaggactttgagcgcactgaggacatccggttggactcgtccaaaatggaggtcaaccccggcctgcgcctcattgccaaaaccttggcaaactccttgtggtaaagatttttggcttttaattttgaaaaaaaaaagatacctacagggggaaacttgcgcagcgtgtgggccagacggagattcgctacacacggactccggctgaattccacgcgctcctcgacgacccaacactggacaagttggactttgtccacgtctctgaccacatggaccgctgcgtcgtgcggaagcgacccgagttcgccaaggcgccactgacgaactgcctcccggtcgctgcattcgtcacatcgtacggccggcttcagctgtacagctatatggagcatgttttggccatcgacggtgcggagctgctctactgcggtatgtttgtcacaaaataaaactttctgtggacattactatgttttagacacggactccatttactacgtcaacaagatgggaggcccgtgcgtagcggaaggagaagcgcttggccaaatgaagcgtgagcacagcgaccgccgcatcgtcgaattcattgcgggtgggccgaagaactacggcatccggcacacttcgcgggacggcaccgatgaacgagccaacctcaagatacgcagcttccgcctatcttacgcggccgagcgggtgatcaattttgaggcgatgaaggacctgacgctatccacttacaacatcgacggacccatgtgagttcattaattaaagttatctttgctagtcaaatttttttatagcgatgatgtgttggacaacgatgacccttacgtgtacggcggcggcgaacaccgtgccatccgggtgaatttcccgcaaattgaccgcaatgtgtacgccgacctcttcacacgcgaggcgcacaaagattaccggccctactacgccaagggacgtgtacgccacggaatgcagacgcgtccctttggctatgtggaggatgatggaccaccgaacgatggacaacggacggagcgacgaaagagaaattttgttgatcatgaccccgcccaaccagggcattccgggtggttttga

SEQ ID NO: 57340 - DNA, 106 bp, Heterodera glycines
ctttttcagcagattaattaatatacgatgacaggtgataatacaatattgatacgcaatatgcatcgcagtaatgcgtgaatatatatagaagataaagttttta

SEQ ID NO: 57341 - DNA, 1594 bp, Heterodera glycines
aagcgcaggagcaagcgcaggagcaagcgcaggagcaagcgcaggagcagcaggagcaagcgcagcagcaggagcaagcgcagcagcagcaacaattgcgccagcaggtgggtaaagaaagcatttatgccgcatttttggatcctctacgtttccccccgaaaaattttaaatttctattaatatttaggaatattacgaagctaagaaaattttcaaaaatttaagtcctatccctgagctttcaaaagaaccatacgtgtgcaaggggcgtggggtcagcggcaaaatttattgcgttcgaccatttttttaagtttaattatatgaattatttattaaacaatttattcttgaacaatttcactcatcataagtgaattttaataattttcaataatttttcaatcgttatgaaaacttgaaaaagaaaagatgaaatattaatattttatttaaattattagattcacttatgaagaatatttattgatctacaataattgattcaattaaattaattattagtataattaaatttacaaaattatcaaatgacaaaaattttcacttgaaatatgggagaaaaaagaattttcatttgaccccctttttagctctgcgagagtgtaaatcgtagactcatcattcaaaaagcaatttggtagcaaatctgtgctctttccaatgggattagtcaaaaatttttccttcgccaacttcgagaaaattttatgtttgatcgaaaaatttcaacgcagaaatgcgttttttaagctcctttctttaaaacaattgagtaaaaaaagaagaaacctaaaaattgcgactctattgataaacaaacttttcgggtttttacgctatattttattcagccacactgtttgattatatacatacatatggcgcatactgtaaataaataaaaataagtttatgcaaattggtgatatagcaaaagaacgaagttgatggttaaaaaacgggggttgccgccggtggaagaagggtctgatttttgttatattttcaggagaagcagcggaaagaaaatgcccgaaaaaaggaaaacttccaaatgaagcaacagcagaagcagcagcaattgcgccagcaggtgggtaaagaaaacatttatgccgcatttcgggatgcactatgttactcctcagaaaaaaaataaattaaaaaaaatcacatattgatttttcagaatattacgaagaactaataaatttactcaaaaatttttttaaaaatcgctaaaaaagttttcaaaaatttatttactttttttttgaatatatggattttccatacttttgtacacttctttgagcaccaagacccctgaagatagaatttttggagaaaataccactgttaaatgatttttcttttaatcctatatattagagctgagcgggaccgggaactttgacaaaaaccgggacttctcaggtttaaaaaccgggactagtccagttcaccgggacttcccggtcaaaccgggaataggtactcatttatttatacgttattttcaggggtacatggcaactcgccgacgcacgactcgccgacggactaa

SEQ ID NO: 57342 - DNA, 566 bp, Heterodera glycines
atgacagcggcgggggcaggagtggatggggctgttcaaattttgtccaccctgttcctttttgccaactacgcaatcgtgctgccaatgttcctactgtgttggatgatggttgtacactggctccgccgccccggcctcatgccctcgcctcatcagacaccgtcgacatcccaacacccccaccgccacggtggccttcacaccatatttgagaacaccgttgagcagaaggcaggacaggagaaagacgtacggcaacaacaacaacaacaaccacaacaacaacgccacacatcagctgctgctgctgctgctgctactgtcattacagaggccatggtgcgtgaggcgcaccggatgacctcccaacttgctgccgcaattccggagcctatgcgtagcgctgtgacctcctccgtggccattcctatgcttgtgtcggcacaaagtggcgctggtagaaaagaagcaacgcaacaaaacagtgaagaagaagaaaaggaacgcaattgatatagtgatggaaggaaaaactcaaatgtgtttaccaatggctcagtgaa

SEQ ID NO: 57343 - DNA, 974 bp, Heterodera glycines
cggggttagcgccttcggcgcatccttccaatcactgggactcaatccaccagcattccaatcgctgggactcaatccaccagcattccaatcactgggactcaatccaccagcattccaatcgctgggacacaacctaaagcattccagtcactgggactcaatccaccagcattccaatcactgggactcaatccaccagcattccaatcactgggacacaatccaccagaattccagtcactgggacacaatccaccagaattccagtcactgggactcaatccaccagaattccagtcactgggactcaatccaccagcattccaatcgccgggactccaaaagcattccagtcactgggactcaatccaccagaattccagtcactgggactcaatctccggcattacagtcactgggactcaatccaccagcattccaatcactgggacacaatccaccagaattccagtcactgggacacaatccaccagaattccagtcactgggactcaatccaccagaattccagtcactgggactcaatccaccagcattccaatcgccgggactccaaaagcattccagtcactgggactcaatccaccagaattccagtcactgggactcaatctccggcattacagtcactgggactcaatccaccagaattccagtcactgggactcaatccaccagaattccagtcactgggactcaatccaccagaattccagtcactgggactcaatctccggcattacagtcactgggactcaatccaccagaattccagtcactgggactcaatccaccagaattccagtcactgggacacaatccaccagaattccagtcactgggacacaatccaccagaattccagtcactgggactcaatccaccagaattccagtcactgggactcaatccaccagcattccaatcgccgggactccaaaagcattcca

SEQ ID NO: 57344 - DNA, 394 bp, Heterodera glycines
atggaagataaagtggaagaggaaggaaagaggaagagaacgtggaagaggaacagaaagaggaagataaagtggaagaggaacggaaagtggaagataaagtggaagaggaacagaaagtggaagaggaaggaaagaggaagagaacgagaaataggaagagaacgagaaagaggaagaaaaagaagaagaggaaggaaagtggaagaggaacagaaagtgaaaagtggaagaggaacagaaagtggaagagaaagtggaagaggaacagaaagtggaagagaaagtggaagaggaacagaaagtggaagagaaagtggaagagaaacagaaagtgaaagagaaaatggaagaggaacagaaagtggaagagaaagtggaagaggaacagaaa

SEQ ID NO: 57345 - DNA, 162 bp, Heterodera glycines
aaagaggaacagaaagtggaagagaaagtggaagaggaacagaaagtggaagagaaagtggaagagaaacagaaagaggaagataaagtggaagaggaacggaaagtggaagataaagtggaagaggaacggaaagtggaagataaagtggaagaggaatag

SEQ ID NO: 57346 - DNA, 958 bp, Heterodera glycines
atggccgaatttcgcgccgcagacaatttcgatggacttcgagttggcaatggtcggtgcggtccgcacagtgcttccggcatgcagtgtccgctactgtttttttcatcttgtccgcaacatgaaaagacagatcagaatccttggcctcacacatgtcaattgaatttttcagatgataaatttttttcttagtagtttaggcttacaacactgatcctgctttcgccgagaagtctaagatgatcacttcattggcctttctgcctgtgcaccaccttcaaaatggccttaatgttcttcatggacaaattccaccacaacttaacggcgttttcaattggttaagtccgaaggcgaattttattatttttttatttttctaggtttttggacaactacattggccgaatgcgtttcaatgttccaatgacggcgcctctgttccacccgcacgaatggaatgttcatcagcgcaccttagatgatgctgatcgtaccaacaagttcgccgaggcattccatcgcaaacttcagcggcaatttatctgcactcatccaacaatttggcgcttcattgacacgatcagatgtgagcaaaaggcaattgacgcggacatttcacgttgtgtcatgggagaatccgctccacaaaagaaaaagaagtatcgcgaagccgacgcacggattctccgactcgtccaccgttataacgacatcaataacaatcacctcccccaaaatgatcacaattatgcaaatgtcaatgtgaatccgaaaacgttaacaattttctcactggtgtttcccgaaactatgaaatgcgaccttagtttgttctgaaatttgttattttttgttatactatttatgtgtttttataaattaattattttttccgtttgacgcacacccgaccaaactgacaaattattgtagaagatactagccgcaagaa

SEQ ID NO: 57347 - DNA, 104 bp, Heterodera glycines
aaataaatgtgagttatgaattctcttttatatgcaaccacgcgaaaacggccacgcgacggccacgcgaaaatggccacgcgacaaggaagcacgcgaaaacg

SEQ ID NO: 57348 - DNA, 1411 bp, Heterodera glycines
atggagctcagtctgttcagaaattataaggtaactaatattagaaaatttttaccaagcatacttccccaaaagacccaaaattataagatcaattgataaattttaagaaaataaaattgcgtaatattgccaattgtaccccaattccgaatcccgaacccgattcaaatgaaaagttgaatatttaaattttcgaatttttcacctaaaaataattcacctaattgatcttttattgcagcaagattgatgcctttcaattttaaacgattatgtatgaactttcattttaattcgccaacttattcataatgcggaatctaaaaatagcgcctctctgctttctttactgttaagaaattataggcaaaatgtcacttgaaatcaaatcccattaatgaaagaatatgtaacaaaaactttgtgtatttataatcaatccgttgtttcttatttgttagtgaaacacagaagaatttccggcggaaacatttatttttgctataaaaggagaaaaataacggagaatgtccattctcccagcagtattcttattttccaatcacacgtcacagccgcagcatcgttctgcttcatcggtaatcgtcacgcaccatgaggaagttcgcctacttcaaactgtgccaagccgtgctcacttctgtttttctgtggcaaattctctcaacgcaccaattctgtggcgagtttgacgagcctaagggtgtctttcgcatttgattgtcaacctaattaaagttccattcttttcaggccttcttcaactctgcagtctcctccagccattgcgaacagttcacgctcatcggaatggactccaccactggcgaatacggggccatgcccgacaagcagaagtggcacatgcaactcatggcgagcagcggcagtggccaaccaattgatgaacagcaacagaatcacatggacgagttttcgtcaaaattgccgactgttggccgtcactgtattccgattgcggtcaatgatctctcaatacatatgacactaatcccattatttttttagttttctctcgtcaagccctgggttcgcgacaacaaaagtcatctgcagaaggtcgctgatttgtttgccattcaattgctctgcggattgctgtctctgtttgtcattgccatgcacgttttggaccaaccgcgctcttggggatatgaggtgtgtttaaaaaagaaattagcaccttgatcactatttcgcatactttcagagcatcgactacgaacggaccactttttgtgctgtgctctggtgctgtcctgccctggtttcatctgttttgctgctccactggacgtcctactggcattgcaccaatttccgcgcagattccaccaatgtcccgctgatcactttggtggattga

SEQ ID NO: 57349 - DNA, 112 bp, Heterodera glycines
agggtattggagtccgtcatttttatttgtttgttatttatttgctgacatggctcaattagctgttgcagctcctctgccgccaacgacaaatgcaacagcggccactgct

SEQ ID NO: 57350 - DNA, 724 bp, Heterodera glycines
atgccgattttgttttttcactcgccgaaatggtcgttggatagtcgaatgcaccaaatttggaaggcacaggcaatgccaaccaaattaacaccgactgactttccctttaccattttaggacaattttacgcgatttcaacgccgatctctattggtgatgtgagaggaaagactaaaaattattttcgaatgtggtcgaatttacaaataaaatttgttgtagaaacaaaccgaaagaaaaacgatcgaattgtatgaaaatttttctattttatttcaaatttgttggaattttgaccaaacctttgcgtcacggtaaaaaataatggtgcccataaaaatgctgtgagacgtataaaatagattgggtggggtgtctttggagagtgtttgagtttgtgttcctcctcctacccggtgctgctggtgtctctctctgatgaatgcgtttcgtcccaatgtcccccgtccgcaattggtgctgcaattgcattaagttgaggtcgcgttgacagatgagtgctccccccgtgttggtgtattggtcgccttttgcaagtgcatttccgcagcacgaacatttgaagcagtgcgtgtggaacacgttgaacagtccgctgcggaagacgagttcggccggttcgattggaatggcacagcgggcgcagttaggctggcacgacgaagtgccgaaagatctgtcgggggcggactttggtaa

SEQ ID NO: 57351 - DNA, 196 bp, Heterodera glycines
atctttcggcacttcgtcgtgccagcctaactgcgcccgctgtgccattccaatcgaaccggccgaactcgtcttccgcagcggactgttcaacgtgttccacacgcactgcttcaaatgttcgtgctgcggaaatgcacttgcaaaaggcgaccaatacaccaacacggggggagcactcatctgtcaacgcgac

SEQ ID NO: 57352 - DNA, 514 bp, Heterodera glycines
atgatggctttcggtttgtttttaacccattttcttaaacattgatcaaatttcgaaatttgatttttctgttagaattcgggtccataactccgggtcccgacccgttcccgtgcaactctacttctattttattgtagaaatttcttatcgatcaaatcaacagaaaatgagtgagtgattggatgagagcgcttatccatcggtcaatttgcgctttgtccctttttcttcttccacaataaaatccatggacaatctcactatgtccgcttcactgtcataaaatcctttggtcggatccatcaattccttaatttttgcaattttattaagcacaaaaagctattttgactgtcactcactgtaaaagtaatcattataagtccccagcaagtcgatttgttgttaaaagaatggtcaaattttttagtaaaatcctccgttcctttcttttgtgaaacaattcgaaaagtggcagaacatttgcagctccaatctccatcttaattaa

SEQ ID NO: 57353 - DNA, 2990 bp, Heterodera glycines
ctaaaaacagcggttctgttcaacaagaagccagtcgaattccatctcgacacggggtcggacattgtcgtcattgatcaattgacgcacgaatatgttggacgaccaccgatcgaaaaatgcaacgaaattggcaaggctttcgacggcacaaaaatttcctttattggaaaaggattcggtacattcaaatttggcaaaattgaagtggagcaaacattttttgttgccaaagcaggctcactaaatttgttgagctgcaaaatgatggatttatttgggcttttagacgaattaaagctgaagatcagcaaccctgcagtaaatgcatgccacgcgaatggcaaaaaggctgagaattttatcccgaatgaagcaacgcagattgctgggacaggaaccgaaattcaagccctggaaaaagaatttcacgaaattttcagtgaagaattgggccattgcctaaaggagaaggctcatcttgccctaaaagatgacgcaaggccagtctatcgcaaagcccgaccagtaccctacaattcgttagaggtggttgagagcgaactgagccggttggaaaagatgaacgtcatcaacaaagtcgaacatttggagtgggccgcacctattttgattgttaaaaaggctgacggatccgcccgcctttgcattgattactctacgggcctaaacgatgcccttctcgactgccaatacccacttccaataccggaagacatttttgcgactctaaatggaggaaaaattttctcacaaattgatttgagagacgcctatttccaagtcgaattggacgaaaattctaaaaatttgtgtgggctggcaacccacaagggcaattaccggatggaaagattaccgttcggtgtaaaatcagcccccgccatatttcaatcaattatggataaaatgttggcaggattggaatttgccaccgcctatttggacgacattataatcgtcagcaaaagcattccggaacacaccaatcacttaaaagaagtttttggtcgaattcaggcatacggattccgcgtcaaattggcgaaatgcaaatttttccgtgatcaaatcaaatatctcggacagattatcgataaaaacggacgccgaccggatccagcaaaaatctatgcaattagccaaatgcctgcaccaaacgacattccatctctccgatcattccttggtatggtaaatcattaccaacaatacgtcaaaaacatgcggttcatccgaaaaccgctcgacgatttgcttaaaaaggaaattgattggagttggagtgaaggatgcgaaaatgcatttcgaaaaattaaggaaattttggcatcagatttgctgctaacacattatgatccaaatatggagatcattgttgcagctgacgcttccgaattgggcatcggagcggtcatttatcacaaatttcaggacggaaacatcaaagcaattgcccatgcttcaaaatcactcgcccctgcggaaaaaaattattcgcagattgaaaaagagggcttggcgttaatttttgcagtacaaaaattccataaaatgatttatggacggcatttcactctgcaaactgaccataaaccccttgtcagtatttttggcagcaaaaagggaattcggcagtgcagtgccaatcgtcttcttcgctggtctttaatccttttggcctacgattttacgatcgaatacatcaacacaaaggattttggccaagccgatgcgctctcgcgcctaatcgccaaaggaaatgagaccgaagacgagaaaatcatcgccatgatcaatgccgaaacggattttgaaacaaattttggccaaacaatttcaaaattgccattaaaattttcggacctagtcgctgcttctgagcgcgatgaaaatattattcaagtcaaaattttgtcaaaaatggctggccaaatgaaaaggccatggacaaagaaaaccaaatagtccgtgatttttgtcgaagaaaggaagaactttcaattgaaaaaggatgcctcatgtttggagaaagagtggtaatcccgaaagtcttccattcaaagattttaaaattgctgcacaaaggacatcccggaatgaagaggatgaagcagctggcacgccaatatgtgttctggccaaaaatcgatcaggacattgaagattttgtccgtgaatgtgtgccatgtcaggctgctgcaaaagcgccaattaagacaaatttacagtcatggccaaaaacatcaggcccgtggcaacgcgtgcacctggattttgccggaccgtttttcgggaagcactttctgattgtggtcgactctttttcgaaataccccgaggtattcgaaatgtcaacaatttcaacggcaatgacaattgaaaagctaagatatttggcttcacggcacggaattccagaaacattggtttctgacaacggcacacaattcaagagcacggaattcgccaaatttacagcggccaatggaatcaatcatttgttctcggctccatataatcccatgtccaatggacaagcggagagatttgttgacacgtttaaacgtgccttcagaaaattaaaaggggagggaatgtcatcagtgaaagaaataattgagacatttttggtcacatatcggaccacccccaatgattcgttgccggactcgaaaagtccagccgaaatgctcctgggacggaagccacgaacaactttggacctgctgaagccgcctccaattcagccgatcgaacgtgatcaggcaatggagaagaaattcaatcgccgatttggcacgcgtcctcaaattttcgcttcaaaggacgcagtttgggcccgacatcgcctttcacaaaattggaaagccggaacgatctgtgggtgttccggtgtcatctacaatgtccgatttgaagatggatccagcggtcgctatcatgcgaatcagctgaggttccgaaag

SEQ ID NO: 57354 - DNA, 519 bp, Heterodera glycines
atgggctttttttgcaggtccaatgtgcttttgcatttagacctcaccatcccgctgcgatgtgttgggtgaggattgccaagcaacccgggaattgttactcaaggctgaacaacttcttgagtgctgttcacccgccaaaaaaccttacccatgtacatgcgggcgtcgttcccctcgcgttccattagtgtgtttttacttaattatttaatctcaatcagattaaaaatatgaaaattttaattttcagggtaagtgttctcagtcacactccatggtgaaaattgctttttaaatcagaatcaatagcggacatcagcaaaagaaagggcgacccattggaagctgatgacatattgtacacaaaggaagatgcgcaggaaatggttgacgaatttttcgaaggtgaaaatgagctatgatattacatatctctatattttatgatagatattcttcaaaattggtaccaaattttgaaccctttttatacatatttttggcagtcctaataaa

SEQ ID NO: 57355 - DNA, 83 bp, Heterodera glycines
atgcacagctcccatcaaatccacggcattattatgggaatccgggaaaatgatatgtctggggacgaaaagtctgatagact

SEQ ID NO: 57356 - DNA, 597 bp, Heterodera glycines
atggcactcaacccaccaacatttcaatcactggcactcaacccaccaacatttcaatcactgggactcaacccaccaacatttcaatcactgggcactcaacccaagagcatttcaatcactggactcaacccaccaacatttcaatcactgggactcaacccaagaacatttcaatcactggactcaacccaccaacatttcaatcactgggactcaacccaccaacatttcaatcactgggactcaacccaccagcattccaatcactggactcaacccaccaacatttcaatcactggcactcaacccaccaacatttcaatcactgggactcaacccaccaacatttcaatcactgggactcaacccaccaacatttcaatcactggactcaacccaccaacatttcaatcactggcactcaacccaccaacatttcaatcactggactcaacccaagagcatttcaatcactgggactcaacccaccaacatttcaatcactggcactcaacccaccaacatttcaatcactggactcaacccaccaacatttcaatcactggcactcaacccaccaacattcaatcactg

SEQ ID NO: 57357 - DNA, 1275 bp, Heterodera glycines
gttttgatgcaccgcggaatcgtgccaaaagtggtcagtctcaatttattgggatggagttacgccattcttttatcattggggaataaccaacaaatgtgatcattgatttgaacaaagcaaaaaattaataataatcagttggatgatcaatcatcgggagtctcgagatcaaacaattcttagtataaacaatgattttgattagttatcagtgggggggggcatatttaaattttaaaaaaacgacgaaaaatgtgtatcattttagccaaaaagttgctacgtttttcaggcgttccgttgccctccccccggcgcatttccaacgcggtgcacgtcgaccgcgacttcagccatgccaagttcacacacatggtcatgcagttcggccaactgttggaccacgaactgacccactcgcccatccaccggggaccaaacgacgaaattctgaactgcacgcggtgcgactcgcacgagacaatttcagtgcattgcatgccgatcagagtggagcgcggcgatccggtacggtgcgggggatttgataatttgatttattgaaatttacaaaaaaaaataatcagaattcttattgatgtaaaaaattcgatctaacaaaacttcaacaataatttgactgaatttgatattgcatattctctaattggattaatagcttcaataaagtccattataattagggattggatttttatgttttccctctttttttcttgtaaaaatgttcttttggggcttttcaggatcttattgttagcagttcttttgaacttttccaatattttaagtataaaaatgcaatccatcgttataattatcccatttttcggtatttttatacaaaattcaaaatcattgaaaatttaaaaacctattattgttaaagatcattttccattccctgcagcactttcccacccatttgccaaatggggagccgcgctgtttgcccttcgcgcgctcattgcttggccaactgacgctgggctatcgcaatcagatgaaccaaatcacagcttttattgatggttccgtggtcagcaaatttttttaatgggacccgaaattatacgttaattaaatgttcattttctttcattatttaaattgaccctttcagctgtacggctctacccaatgcgaggccaatcagttgcgtctgttccgccaggggctgctgaacttcaccgaccttggcaattggaatccgatggcattgccccagggcaaccaggagaaggattgccg

SEQ ID NO: 57358 - DNA, 594 bp, Heterodera glycines
atggtgttcgacaaccgtaggccgcacaacacgcaggtgctcgagaagttcattcgccaggagatgggggccgagacaatgttcagcgacctcaaatggccaaggttgcttcggtgttcccaaaatgtgtcagggacatagcatcgccgaaaaaaatctcggaaaaaaatccttggaattttttttttgaaaaatatgtgtcgttgaaagcaaaaaaattttttgtaaaatttcttgaaaatatcttctttttttttaaatttcggggacgttgccgaaaaatatttatatgggaagataaaatttgaaaattgaaattatttcctcatttaaaaaaaaaatttccagacttatgttcaccaccacgcgggccgagttcttcccggttcagctggagctgatgcgcaactacaaactaccgacaaatgacgaggagaatgaggagctcggctaccggacgcccgacgatttgttgctgtggaaagtgttaaggcgttcatcggcgggtaaaaaaaaaattttttttttaagttacaaaaaaattttaagcccctacctactttgccagtgtggacaacaaatacattgatggag

SEQ ID NO: 57359 - DNA, 735 bp, Heterodera glycines
atgatttctacaaacgatgacactgattcaagttggatagccattgacaacggtatgtacctgagtattttccttctgaaattgttttctctgcaccttcacattggccttgcgttctataagccttacaaaatttttgccaatctttgcttgtaactaaaatttaaaattgaaaagaacaaaaaaaattgaatgttaaaaatatatttaaaaagtaaaaaaatcgagttgggtaatatttttgagtttagtttaatatccatttctagatcttcaatttttttacagtcacagtgctcctttatttttgtcttaacataaaatatttaaaaaatgattcggaattcaaaatttacgcgtttaaaatattttggatgaaaaaaattttgccagaaagaaaaccctgaaaatatttgctattaattagaataatttatttcttaattaatctgcgggaagtgctaaagaaaaaataattcaaattcacatttgttcgttttaaataaagaagtaattcctctcaatccgtgcgacacaaatttgtttgatttggtcaaacgcaggaattctccgcccaaaatagatcggttgccgaatccatggcttccgtttttcccgttcttaaatgggttggacgacgaactgcttgaatgggtattgttcgagctatgaaattgagtttgataagttgccgaatttgtttgattggggggctgaactccaaacttgtcacta

SEQ ID NO: 57360 - DNA, 633 bp, Heterodera glycines
cacagctgtccgatctgttccatgcccgagtcatcgccctgtccgtcgccaatttcaagctaaaaagcgtgcgattaaaatcattttagcgcatttggaacttccccccttttttcccctcttttgtccccacttttgtgccgtccccgccggccatcccctgctgttgctgatggaccgaaatggaggcacgccgtgcactgacgccgccctgctttttgaactctttgcggtagtaataggcggcaactgcgggcggaatgttgaatttacgggccgcggcggtggcgccatggcattggacgtaactggcgacagtctgaggagggagagaatatagggagggaacaaagccaacacactctgcacaaccccctaccattaaacccatctgttcaaaaatgccaagaaaatcgccaaaatttgaaatcgcccgagaatggcacagacgggcaaaagcccccccgggcgagcctcatccgttcggccacacctttttctcctccggcgtgcagtatttagagcgtcggccccgcggtgccgattccgcgccgcttccgctcatgtcggcaccgccggcggagaacagactctgctgttgctgagtgccgggcgtcgcgaaggacgacgcgg

SEQ ID NO: 57361 - DNA, 894 bp, Heterodera glycines
atgcctaaacaaaagcctaaaaatgatatcaacgaactcaagcaggaagtgtccatggatgagcataaaattccacttgaggaattgtttcgacgatttggaagctccaaggataaggtaactttaaatgacctagtcttttcaattgttactatttcattcaaatggttactgttgcttatgccagggattgaccaaagcgaaggcgaaggaggtgtacgaccgcgatggtcccaatgcgctttctcccccacgaacaaccccagaatggatcaaattctgcaaaaatttgtttggcggctttgctcttctgctttggattggtgctatcctctgttacattgcgtattctgtcgattgctttaccatggaacgaccaagcaaggacaatgtgagttcatgtccaatttagttttaaccaatacatttccagctttatctgggcattgtgctgatgtctgttgttatcatcactggctgcttccaatattttcaagagcgcaaaagttcgaagattatggaatcattcaaaaatttggtgcccacttacgcattggtcattcgtgatggggagaagacgcaaattccgtcgagtatgttggtggcaggcgacgtcgtggaagtgaagggaggcgaccgcgtgccagcggacattcgaattgtgtcggggcacggcttcaaagtggagtgagtgctgtgtttgtctaattgctaatggttttggtgcttttcacttgaagcaattcttcactgaccggagagtctgagcctcaatcgcgttcggcagagtgcacaaatgagaacccactcgagaccaaaaacattgcatttttctcgactaatgctgttgagggaaccgcgaccggagtggtcatttacactggggacagaacg

SEQ ID NO: 57362 - DNA, 443 bp, Heterodera glycines
  unsure (1)..(443): unsure at all n locations
atgtcggtgccaagatcgatgcaaagaatggtcacagtgcgagagggaagtggaatgccgaacagaacatacatcaggaaaggtaagatctntaaaatggaagtttttaggaaacntaaaaaccacaacctccggaatgttagagctgatcgtataagcaatggacttttttaaattatcgaaaatgagacggccttcctccacgccggtcacaattgactgaatgttcaaagaattaaaaaataacaaacaaataattataataataaatcacagcaaagttgtcgtccagaagaatcatatccgccgcttgttttgacacgtccgacccggcaattcctacaaatttatttcattacgttctccgactttttgcccacccattgccactccgatgtcagcctttttcagtgccggcgaatcgttcactccgtcgccggtga

SEQ ID NO: 57363 - DNA, 1792 bp, Heterodera glycines
  unsure (1)..(1792): unsure at all n locations
atgaccgtcgctcacacttggttcgaccagcaaatcgaaacttgcgacaccactgagaatttcacgggcgacagacacaaggctcgcgagacggagacggcactgttgcgagtcgcctctttgtgcaacagggccgagttcaagcctggacaggtcggaatcggcgttaaacggaggccctggaattgtttgtttaggattcggttccgattctcaaaagggaatgcaccggcgatggttagacttttgccttatgattaaattaatcattgacaatattccgttccaattttagcttcggaagttgctctgctgaaattcacagaaataaccgttgggaatgttgttgaatatcgtcaaaagtatcactttaatagcatttttgtgtaacaatacaaattttagacatcgaaaaattgccgaaattccattcaattcgactaacaaataccaagtttttcttttattacatcgcataactctgtttatttgctttcagttgtccatccatgaaaccgacgacggccaccccggttatttggttgtgatgaaaggcgcacccgaacgcattttgcaacgctgcagtcacatgctgcttaaaggacaggtgggaaatggtaccgacggaacagattgacacatttttaattaaggatgtggagatgacccaccaaatgcgcgaagacttcgaacgtgcctatttggagttgggcggaatgggcgaaagagtgctcgggttttgcgactttcgcttggaccacgacaaatttcccaaggtttttggagtcttaaggttctcccattgctttttatgttttttagggatttgagttcgatgttgaaggccccaactttccgatcgaagggttccgttttgtcggtttgatttcaatgattgacccgcctcgtgctgctgttccggacgccgttgcgaagtgccgtagtgcaggcatcaaagtggtgatggtcaccggggatcatccgaccacggccaaagcaattgccaaatcggtgggcatcatttcggagggcatggaaactgtcgaagatatcgccgttcggaaagaaatttctgtggaccaagtcgacccgaggtcggtgttaacggaaaacggtttgagattcgaaattcagagaagccaaggcgattgtaatccatgggagtgatttgcgcgagatgtaaataattgacccataattgcaattcttccttttttgttttttaggaatgaggaccaattggccgaagtcatcaataaccacgatgaaattgtgttcgccaggacttcgccacagcaaaaactgatgatcgtcgagggatttcagcgtcagggacaaattgtggcagtcaccggcgacggagtgaacgattcgccggcactgaaaaaggctgacatcggagtggcaatgggtgggcaaaaagtcggagaacgtaatgaaataaatttgtaggaattgccgggtcggacgtgtcaaaacaagcggcggatatgattcttctggacgacaactttgctgtgatttattattataattatttgtttgttattttttaattctttgaacattcagtcaattgtgaccggcgtggaggaaggccgtctcattttcgataatttaaaaaagtccattgcttatacgatcagctctaacattccggaggttgtggtttttangtttcctaaaaacttccattttanagatcttacctttcctgatgtatgttctgttcggcattccacttccctctcgcactgtgaccattctttgcatcgatcttggcaccgacatg

SEQ ID NO: 57364 - DNA, 765 bp, Heterodera glycines
atggctgacaacggtttttttccaaaggacctttaccaattgcgtgcgcaatgggattctcgtgggattaacaatctcgtggacagttacggacaagaatgggtagatgattaatgatcaacaaaacttcctttttatccttatcatcaagataatttaagacttacacggaccgaaagattctcgaacacacttgtcaaaccgccttcttcgttagcattggtacgattttttgtgccaaatcaaaaatttaaagaattccttcaaaacgacaaaccgagctatctaattgtattccgtttaagtgattgtccaatgggccgaattggttatttcgaagactcgtcggaattccattgtccagcaaggcatgtccaattgggtgttgaacttcggcttggtctttgagactttgttggctgttttcctctgctactatccgggtttggacacaagtctccgtatgtatggacttcggtaaatcgctttttatcattttgtccacatttttatcacgtttcctaaggttctcttggtggttccctgcactgcccttcgctattctgattttcatttacgatgaaattaggcgctttttaatccgtcgtttccctggcggatgggtggagagagagacgtactactgaagaatgatgacggtttaatgtgaagaagttctgcaaaacataaaccaaagcgttttttcagatcaaatgtaattggtatgtgtgtatgttattgtataatttggctgttattctgtaa

SEQ ID NO: 57365 - DNA, 1595 bp, Heterodera glycines
aaagcgattggatgttttccgaatgcattggcgaattacgcgaaatcagttgaaagtcatcgagaacaaacaggtcatttcattcatccatttccactcggcatgacaaattaaggataattaaaggacccaataggtcgttatcatcgtaaattatggcacatttacgtaaaataaaacggtttcagtcaaagggaaagggcaccggacttggccaagaaggcgcgtggagcaaacggcgacaattgcaagcgtacgctttgattggcacgaacaaagccgaattcattgtgttgcggcagatgaaaagcataagttgggaaaagacggacctgcatttcattttcgaactgaagcggctaaaccacgacaatttggtcaaataaaagagaatttaaaaatcggaccaattcattggctctttataataattgtcattgatagaccacattcatgggcatctcctacaacgaaggggaccgcttttacatgtgccattcgctggtcgaacgcggcactctcgaggtgagcgagagagagaggaagtgagagagagagaagagaaagagagggggcgagagaagagagagagagagtgaggacggcacggaaaagcttctcaattatttgctaggattacatcaacgactttgacttccaattggacaacactttccgctctgcctttctccgcgacattctcaaagtttcaatttgctgatgattctttctccccctcccctccttcacaaaaagggcatccaatatttgcacaaatcctccgtcggataccacggcctgctgaacctgcaaaatgtgctgatcgactccaattgggtgctcaaattgaccaattttggcatttgcaatttgctaaactgctgtattcaacgcgaacagctcaaattagtcgagattattccaatgacaagtttgaaagcatttcactgctcaaaacgatgctttcctttcagcttatttaaccatcgctccggaaaatcttagtgaaattgcctatggcagggaatatccccgcggcacgcccttaggcgacgtgtacaggtccaaattcatttatttaatgcccaattaaatgccactttcagttttggcatggctctttaccacattttgtttcgtctcgccccgtttgatcgcacaactttgagcccgaaagagatcattgaggaggtgaagcgaagaagtctgaagccaatcctggagaacacttcgccagaagagaagccggcaattggagagaaaaacggcaaaaggcgaaatgattgttttttgacagttagtggacgcgatggaacagtgctggcagaggaaccccgaactgaggcccaaactccgtcatttggcccaagtgttttccaacgtgttccaggcaaaaaaatgagagggggtgggggaggaaagacagaacgaactcaaagatgaaaactgctgacaatttaggcatcgcagggcaatttaatcgatcaaatgcgacggatgaacgaaaagcacgcgctgaatttggaaaatttggtggcgcaacgaaacgcggaactcgcggtggcacgagaagagacggaacggctgctgcatga

SEQ ID NO: 57366 - DNA, 833 bp, Heterodera glycines
atgcccttttccgtggtactgctccaacttctccttctcctcccttatgttctgtccttgctcaaagtcggcctcgtagaatctgaccctttgctcgtcgccctctgtctccaggctttgaccgacgcgcgcgcgcagggaaaatgcacgacggaagagattcagtgagtgaatatttggaaaaattgaaaaaataaatggcaaaaaattagggggggggggggggaaacaatgcgaaggcaaaccaacggaggagaaacaacgacagccctcggactgttcaccccccccccccacagaatgatgaatgtctcttgcggctgtggcactttgtccgacttttcgtccatcagtgaaaaccaaaacaaaagcgcctcctttggcactgtccacgttggcgagttgtatttctaccaaaatgtgcaagcttttgtgggcagtcgctgtgcggaggaggcgcgcgagttgggccgacttgcccgtttctggcgaggcaaaaccatctgtctaattgttgaaaatattttaactcattagtgccggtaattaaccgcgtcggcaccagcattgctttacttcgtcgagagcttttccccactgtcgtacaagtcacagacacaaatgtgtacggaatggcccaagcggtggcccaattcattggcgcgatgaaccaaagcgaagttaaatgttttaggccatatttgtttaatcgaattcttccgctcagattgttttggtcggtccgatcaatacggacattgaaaagccgcctttgtggaagagtttgtcacaagtatttgcggaacgctttaacggaatccagcaaagactga

SEQ ID NO: 57367 - DNA, 1319 bp, Heterodera glycines
  unsure (1)..(1319): unsure at all n locations
atgccattatcccctgtcctcattctcttccgcttccttccgcttttccttctcctcctccttcccccagccgttgttccgcttcagtgttttcaaactcagcattcgctttccgcttctctgcagggcaatgccctcagctgtccctcctcctccctctcttgcaccaaatccaccgatttcaacatgcaaatcatcgcgcgcacctgtcaaagcacaaattgcacggtgagaaactaaaaatacaaaaagaaataattaatttctttgcggttggccattgattgattaataattacgtttagttccccaacggcactctctcctccgtgccgttgtgcttcaattcgtcctcaaatacccagtcgtattgctgctgctacggcgacagttgcaacggaatggcgaaggaacacaaaaatggactaatgaccttcttattgttgttcttttgcattttaatgggagcgatggcaatgaaaaacaaaatttgaaggaaaaaggcaaatattaacagagataaaaatgataatagacaattcaaatcagtagggaaaagtaaaactgatcagaaagagaaatgtacatgatcaatcgatccaaactagaattgaatggtcactgatcaaaataaaaatcaccgataagtcttcaaatgaaaatgagctaaattagtaacgacagaaaaggaccgaaaaaagcaaattaattggtggtgccctaatattgtcgtgttatacttcaaccatatatcgggtgctttcatgctcttatctcattttggcactcaataacaagtaatggctctcaagtaataccagacatctcgcccccagcggatggcgaagtgngcgaaggtggaacactttcggaattggacatttgcagactttccaaaatatcattaaaaggaagcaaaagaaaatcaaaaaaataaattatagaagaataacagcagtgaaaggaatgaagaaaaacagtgtttatcattctgcaggcaacaaaatcaacaaaagaacgccgcatccctgtgaagaatcaacgttcacaaattttgcggaattattccatccctctgagccaagcgcagaatgcaatcatccgactcgccctgcgaaaccgaatttttttaatataaatcccttccaattacgaacgactgaccatgaagcgcaactttccacaaatggcgtacttcgtcgttttgccggtaatcattcgcccagtcgcctggtccacctcgacaacctccaattgaatagaagcgtggtctttagccgaaatgattcgagaagacgacgaactgacaagaaagaaaa

SEQ ID NO: 57368 - DNA, 158 bp, Heterodera glycines
atggctgtcaaagacgacccaccggaaattaggggtaagttgtgggcaatcatgaagattatttgtcccacaaaaaaaaaaggaataaaaattcaaaaaacacttttttaggggttatttggtgcgctgagcacgaatttgaccttcttttgacttaa

SEQ ID NO: 57369 - DNA, 1189 bp, Heterodera glycines
atggccgaattggacaaattgatcagtgagacgaaagtgaagtgtaagtcacacaaaagtttcacaaaagcaagttttgtccaaatttagtcgataatgatctgaaagaattggagctggccaaacgccatttttctttggattttgtccaaaggatggaaacggaattcgcgaaaatttttccagaggtaattagacgatgggagtagaaatggtttgccagattgaaaagtctcttcagcttctaaatggaacttcctaaattcaccctttcgaaaacattaggttactaaatttcaggggtaacatcctaactcctctctttatcctggttttaaacaatgaaaatcttacaaagtcccctgatcatgtcccggttttcataccaactgaaaaaagttgccaccaatggcaatgcatcagcaatatttgcaaaaattgaaaatttgaattttttcaaatgttcgaatccgggttcggggttcgaaattaagtcaaaagaaggtcaaattcgtgctcagcgcaccaaataacccctaaaaaagtgttttttgaatttttattccttttttttttgtgggacaaataatcttcatgattgcccacaacttacccctaatttccggtgggtcgtctttgacagccattggttttatttatatttgaatatttggctaaattaggaatggtcattaaaaaatgattaaacgaatatatgaagcgattaaatgaagtggtcgaaataataacaataataccgatggcgcccctcacttttcggcaaaagaaaataggtagttgcataaaatgttagtatgaagaactcaaaaatggtccaccttttatacactagctaaggaaaaaaaaagaattaaaaatttattttcctttattggcattatgtttgtactataaatcaaatacactgatgcacagcttttggaatctgagggttaagtggatgaataacattttcgtctccaatccttttcaattttgaacgtcacttttcatctagagggagaggagtatttctttcactttacttcaattttagatgtttgaatagcgaccgaatatgctcaggaaaaccataaaaacacttcaaccgatatataacgccagaacagcattccgttttcagaccggaggttatgctgcgcctggtactgaagcacaagcacaggaa

SEQ ID NO: 57370 - DNA, 464 bp, Heterodera glycines
atgattgaaacggaaagcatcgacgagttggaggaggctgcatttggggagcatagtgaacgcgcggagggacaacgccctggcggacggtcggacgacgccaatttttacggtccctccgcgcggcgttcgccttcctcaatgaccagcggtggcagaggcacaacaacagtccacacacgcaatttgctcgctttttggtgagttatttgttcttgcattttcaaaatggaaatttagcgattccaccgtcaattttagtgtacaaaaaatcgcattcttcacaaattcgatacaaagcaatgtagaaaaatccaaattttaggctcttaggcctttgcaacaatttcggttacgtggtgatgctcagcgctgcccaaggacattttggaacggtcggcaacgctgcaaaacgacacggttctatgcattataaaacgaatcaaacttttgaatttttataa

SEQ ID NO: 57371 - DNA, 220 bp, Heterodera glycines
atgaaaatgggacgaaagcgacaggtaagtgacttcgccaagtccggcaccaaagctggcaaaaattacgcctaaaattgcaaaaaataaaaaattgaagtttttttgctatttcgaaccaagcaatccgacggagaaagaagtggaaaatgcgacaattatgaagctggttacctgcagaagaatgaagtattaggaaacgaatcgagtggcgaataaa

SEQ ID NO: 57372 - DNA, 862 bp, Heterodera glycines
  unsure (1)..(862): unsure at all n locations
ttgcccttattgtcctcttttcccctccttttccctatttccgttgggcgaatgcttcatttcattcaatttagcagatggctttccatcaataatgttttaggaagatggggacaaactttgcttgggttttgcttatgctcggcgagggaaaaagaatgcatgggaagggagtggaagagcggcagagattgccttgggcatggcaatggaatggccagagggaataatgggcggctcttctcttttgttgggccgtgcctttttgagaatttggtaaaatgccgggaagaaaagagagtgtttaacggaggcaatgagagagttttcatctcaccataaaaacattctatgcccaaaaggatggaattttcatcttagatttctctcccatcaaaattaaatcagaaaaaatctgaaaaagtcgtagtttcttctgttcgaatggatcgtctctcgtggtatcagacgggcgagtcgatggaggaaattctctgccaagcgggcagtgttggcatttacgacggggacctcaaacaggtcgaagcaatggactaccatatgatttatttgaatttanaaacaattgtgcatttaagtcgtcgttcgaacagggcaccgcttcactgacttatcagcgaatcatttgggccgattcgactgatccggtgggaagagagagaccggttttgagtttcgacccccaaattanaggattgtcgccttgttcttcaccattcgatggtccacaaaatagaaaaacagcacaaaacaatgtttggacgtggcggcaaatcattgtgacggtaaacccgtgacgcctggccacgcgcaagggcccatcgcgcgagcggcacaaatt

SEQ ID NO: 57373 - DNA, 1338 bp, Heterodera glycines
atggacgaagaacaatcgacaagcaaaatactagtatgtcacatcaccactatgaatgccacaaaatcaccgtccaaagactctgatgagaaggtgcacggagacgactggtgggacgactattgctacgtgtgctcccagggctgtgatgaaacgacgggctcattgggttgttgtgacacatgccctaaggtgtttcacgccaaatgccatgtgccgatgatcaaaaagactatggaggaattgccgtaattattgtctttcttgtttacatgggttgcacttttcttattttagtaatggttggcaatgcacactttgtttgccatgcgatcctctttcgcaaataagtcaatcgtttggagagcgtgaaaaattggtatacttttaagaatatgtaaataattttgactttgtaagtgcttcttgctcttttagctttgctccaaggtctatttggcatgttttgtggacttttctaatgtcgaacactttctgaacgccgtatcaactgccgaatccgattactattcggttatcaaagaaccgatttggttcaacaaaatagcgacgaaaatttcttcagacgaatacaaaatgatttctgaggtgctttttgaactttagagaatctgatttaacaacaatcaattacagtttgttgaagatatgaatcttttgttccgcaattgttcaacgtttaatctggtgattttttttctacgataattatttacttaaccaaaaaatattttcaaatgaattttataatttttccaacggcacctattgataatatggaaagttatctagttagataaaaacctttttgatggatttggaaattgcaatgaaatgccatttcagtgtgtatttaaactgggcattctcacttacaattagtattgaaacgggtgaccccatagggccctcgacaatgggaaatgagcgaaactgagttgttcgattggttaaaattggtgtggcttcaaatctgtccactgcctgtctgtgcaattatttttccaatccccccacccctgccgattagtcttaaaagcttttatttaagcccacaaatcctttgtcaaactctgggaagaaggtttacacattatatatgaaagcgatgcgcgaatttttgccggcttatgagaaacaaatttggatttatgtgtctttatataacggaagggtttctgttgcgagttcggtgagtctacaaaaattactattttcattcaacttttatgattatttcagaatgacgaagaatctgtgcgaaggcgtggcggcaaacgtggaggtcagaaagcaaagtcacaaacgccgtgttga

SEQ ID NO: 57374 - DNA, 1066 bp, Heterodera glycines
tggctgaacaacaccaacggacacatgaacacatcagcgtcgcgggcatggatcagggtgataagtaggggaattaacaaaaagttttgaaaacatatatttaacagcattgaatagagtttgcaaattctctattccgaaatggacatcttttaaggcttttgaagacatgagcaaactgatggagcaggccagggaaatggtcgtgttgtcgaagaatatcaccgaaagattgcgacaaaaaaagggcgaaataacggaggacgaggcaatcaatgcatttttacttattattatttttcaataatataaatttgacattgtcatctctttaggccgaataataggagcaaactcattaatacctaattgtttttcagactgtccaacttaagtcttatttgctctcgttgggtgttaatgaccccgtcacaaagtcatctttcggctggagttcagtgttcttcgacaaattggcagctgaactcacttccgttttattggagccgataaaagttcgcatttccaatgcaattcaacagtaacaacattaaaacccattcttaggaaagtgggggaacgatgacactccccgaagcattctgccgaatgaatcgggcacgcggaatggaaatgatttcacccgaagatttattgaatgcatgccaaaggctggacaaaatcaattctccgataaggtttttgccagaaaattcaaattgaaaatgtaccttgatgtaacatttctttcttccgttaagtctcttcaactttgacaatggcgtctccgttctccaacttcgctctctcaacgcccttcaaatttccgacgagattctccaaatggtcgagtccgccggtgcaatggatgcttcacaactgtccaaagcatcgggcgtccccttggttttggctgcagaaaggtgtggttgtcttttcaggttgaattggtaattgggttttcgttttatttaggctccgttatgccgaggaacagggaaagctgtgcagggatgacacaatcgaaggattgttcttctacccaaacaaatttcttgacattgat

SEQ ID NO: 57375 - DNA, 2337 bp, Heterodera glycines
atgcacagttcttatcacaaaagaaattacattgtaagcggcggaggtgggggtggttaatcgttaattgcattttaagtgtgaatatcaccccgaccgatacgcggaccttttgaaagtgcaagaaaaaagcgccaagaacaaacagtcgttgcttgagcaagaggccatcgttgacacgttgctggaggccaaaggattgctgtccccagatgtttatgtgctgaacggacgaagtcaagaatgggccttccaaaaactcggtctcagtagcgaaccgcgcaaagatccattcatcgcagaggaagtgacggacaatcacaaaatcgcactttgttatgtgagtggcattaaagttttaaatttttttaaaattccaaggtttgtggtgagacgttcatttcgttttcaaaagaggaggagttccgcgatgcgtggttttcccatttgtcaacgagcattcaccagcgctgcaaagcaatgcaaattttggttcatgaaggttctttttttgggactttattttgtattgtttgttattctcattgtgcagataatctggtggaatgcgaaggggtccccgctgaatgtgaacttcgaacaaactccgaatttcgacgcatcgacgactcgagcgacgatgaagcgaattatggacctacggtcggactcgactatttgatcatctacaacggttggccataatttcgcctataattctgcaacaattttattctcttcgaatgatggttcatcagtttatctccgactacgaaataaatttagtctgcaaaaaaattaatttttaattaaaaataccgctgtgtattgagaaatgcttttgtattattttttactctcatcggtccctttgctttttctattgccacatttgtaattgttaatttttatttgataatgtttttccatttcattgtcattcccttttctgcgtttgtttccccatttccattcgaaaatttaggcaccgattgcttttgcactctttgcttcaccattcttcccaagtcttcaataaccaatcatttctcatctgagtatcacatagagcgtttttttgtatgttttatttctttaattcattatatttcctgttttgattcagaaaagagatgacccgggcaaacttctgaatacgcaatacttaagtgtgtcggaacggcatggaattctcgaattttgctacggagagttaaaattgtcttcgcataaatatttccgctcgacttcacaaattccgattttgttgcaaaaatatgcgcttcaacaaaggaatgctttggtcaaatacaatttggaggaagttgacttcggccacaatttgaaagctgtttggtgtgaggttgtgttaatcaattgttggttcagtaagtgatccacatccaccattctcacaggagtgcaaagagtatgtgaatacggtgggcgatgagaacgcgtggagcattcacattttcgacgacgcgcacttcgagagagcagcgagaagagcactttatcactatggtcacttcgtttccaagcagtgttttctttttttgaaaatggttttgttttagaaaggtcggtcgtgacacggagttgtgatgtgctggacaatttcgcccattcgtaccctccaatttgggacgaacaattctccgtctcactcggcgtgctttccatccaaagtcgatgtgaatttggcttggagttcatcattcgggacacactcagctccaaattgtactgcacctgctgctttgtgcaatgcgatgacaacgacacgcaaatgttttccaaacacgcgcggtcgctcgaacacatcactcgcgcaatggttcttatttcctcttttgcgcttatttatgccttttaagctttttcattactatacttttttgaggcctttaaacgttgttttcattttcagcactcaatgaacaaaagaaatatgatcacattgagctggcgctttccgaatgcaaatgaccgaaaaccgttggtcatggactacttggtgaactgccggaagaaactgcggcaggaaaaacatggcatttctgtgtacaatccagcattggtctacaaaatgaactgctcgtcagccttgccgaaacgattgtttaagttggctaaaatagcgccgaacgaccggatcactttcattgcggaacacaaaaaaaagagacagcctcgcataggtaagtgggatatttagcaacaaatgccgaatattgactcaaatttacagtccctttaaataatgctttgaatgaattctgcagaattgaggtgaagctggagaagaaagaagtgattgtctgccattgtgag

SEQ ID NO: 57376 - DNA, 1145 bp, Heterodera glycines
taattaaatccattccttcgggggaccgtgccgggtgccgcggggtaagcagtgctggttcgtttcatcacggcaccgaaccttttggctagtcagcaatcgttgcttaacttgccagatcggacgggtgcgcatgattccactgttccaagcaccccaccaaaagcaaaacgatataaccaaaatataaggaaaaattttttaaaaaattttttctccatcttcctttttgatactaaagcatcagagtgctaaaattaagttgtaaataaaatttggtgcgctttagagcactttctgaaaaaaatatttatgaaacaaaaaaatcgattttttcaagtgtccgtttggggtactcaaacatttatggggagcaaaaatccaacgcagaattaaagtacaggctatagggaagctactcccgaaggattcggtctccccataaatctgggcgcatcggttcgggggggactgcccccgaaaacaaaaaaaatcgatttttttcaagtgtccgttttggggtactcaaacaaattatgggggagcaaaaatccaacgcagaattaaagtacagactatagggaagctattccggaggattcggtctccccattaatctgggcgcatcggtccggggggactgccccgaaaacaaaaaaatcgattttttcaagtgtccgtttggggtactcaaacaattatggggagcaaaaatccaacgcagaattaaagtacaggctatagggaagctattccggaaggattcggtctccccataaatctgggcgcatcggttcggggggactgccccgaaaagaaaaaaatcgattttttcaagtgtccgtttggggtactcaaacaattatggggagcaaaaatccaacgcagaattaaagtacaggctatagggaagctattcccgaaggattcggtctccccataaatctgggcgcatcggttcggggggactgccccgaaaacaaaaaaatcgattttttcaagtgtccgtttggggtactcaaacaattatggggagcaaaaatccaacgcagaattaaagtacagactatagggaagctattcccgaaggattcggtctccccataaatctgggcgcatcggttcagggggactgccccgaaaac

SEQ ID NO: 57377 - DNA, 1487 bp, Heterodera glycines
atgccaatgggcagtggcatgggcggtgacaatggcggcatgggcggtggaggaatgagcggcggtatgccaggcggaatgaatggtggaatgggtggcatgggcggaggcggcgacatgggaggtaagcaaatccttgttgaatccctgatctgatctataaaattacaaaaaaagatcatcacgcattcatgatttaatcctatgaaattaattttctataaattaaatttaattaaaataattaaaattttaatgatttttatagcaaaaatactttattgagaaattttttcggaagattttttgtggtgagagggtttgatgatgtcagggttagcgccgaaaatttttaagattttttataatattagttagcatcgcctggctaaattttgaaattttttaaaaatcaattcgagaatttttataaattatacatttttaattttggttctcttaattttaattgctagaatgattttttaatttcaaggctacggctccaatcagggcggcggtggtttttcaaacggaggcccaagcggttttggaagcgcaggtggagcctccggtaagacaaacgatccgctgatgggtcccgcaattgttgtgccaaaatttgaagacaaataagaatatttccaccaaaaatgtcattttaggaatgttaattatttatttattattgtaaattttgaacgaaatttatataaaaaaattttttggaaaatttcgaaaaaatttaggcaaagaccgagtcccatcggatctgaagaaggttgaagcttccatttctcgcatttttcctggctattttccttcatatagcggctataattcaccctctgaaaattaattactcttgacaatgcaccaaaattgttaatttattatttaaaataaaattaaaaataagaatttgtatttaaattaaattaaattaaataggacaaacgctgtaaaattcacaaaaaccaaaatttttcttaaaaaatttcccgccaaaaaaattaaaataaaatgaataaatattaggtgtaagaataattttggacttctaaattggtgctaaaagatatatttaaaaaataaaattactaaaaaatttattttttattttatttttttaatttccaaattttagggatgatggaaagcgcgcgctacgtgcaaagcgcgcaaggcttaccacccattcaaattccgccatattcggcggaggaggacgggcctgggtcggctggccacaaaaatgcaatgccgccaattcaaattcctccgtacagtgcggaggagagtgatgataagaatgtgaagtcgatcattaagccgttgttgccgggcaattagtgggactaattagcccttctttaaataggcaacaaaacaatggattggattaacgggttaagtgaaaagatgttttgttaaaagcggttttttgagggtagaataacgaaaatatttaatatatttattaaaaa

SEQ ID NO: 57378 - DNA, 786 bp, Heterodera glycines
atgaaaaaagatgaaaaaagtgagcgatttttggcacaaatcataaaattagcttggaccaaaacccaagtaaaaattcagacaaatttattgaactcagatgaaaaattatttttaaatattctgattgattgggtgtggggtgataagtaagcaagctaacaataagccgtaaatatttaaaacattttaacacagaaaaagtgttgcaataactataattgttagtccatttattttttaattaagttaataaatcttttctgaaattgccatcggattggctttatttgtcacttggaccaatgctctttgaacatcgtttggaagaagctgctttcttaaaaaataaattctcagcagaatttgatgaaaaaattaaacaaatttgtgataaacggaataaatatttggagagttacgaggacatgagcattcttttacccaatgtcgacgaaaaatcggtacaattgcgcatattaatgttaattatgagtaattgcacttaattaaccaaattattacataggattaatcactttttcaaagatggagctgatcattgaacacacattggacgtggcggaagacgggaaaagaaatgacaaaaataaactcaagaccatcattgaatggttcaaaaatggagcatggactttagaaaaggagggggattatgattatggattagcttatagccaagacaaacaaaaagcacttaaacgagttagagtcgtagtttgttgaaaatttttggcatcgcgataatttattaattattcccaa

SEQ ID NO: 57379 - DNA, 146 bp, Heterodera glycines
atggattgtattgtaactttatcaaattcaacatatgttatggcagaaactgtacttatttcaacttttctaaattgaccaaattttttcaaattttccaggcaaatagagaaaagattggctatcgaatgattcctagaatgtaa

SEQ ID NO: 57380 - DNA, 1008 bp, Heterodera glycines
  unsure (1)..(1008): unsure at all n locations
atggtggattttacgaaacgacccagcacgatttcatatcacagaatctgtacaaaaatttataatattttaggctttgtttctgtgtgtgccaaaaagccaattccaaaaagtggcattttctactttgaagtaaatgatctaaatgggtttgcatcattgtaagtaattctgattgaacgtatttatatttgctaaagacgccaaatatgtgaatacatatttgcaaccccccccccccccaaatattcgcaaaaaaattccaaaaaggccaaaatatttgtcagaaattgaacaaaaattgctaaaaaataaattaattaatttctcaaaaaagtctcatttttattcatttcgctagcacaatgctaatcaattcaatgttttttgcagtaaatctttttctcgctctctatgattgactaattttttggaattttcttcgccaaaattccaactttggattaaaaagtgaatagtcatgaaaaaggtcaaaaaaataaaattttgtacaattttgggcattttggccaagaatttgggtgctaaaaagctattttttcaaaaaaaaaccgctaaattattattaaaaacctcataagtccaaaatattttttatatgtgcaaaaaatttgagcttttcatgcgctaaaatgttcgcaaaaaacatttaaaaatatataaatccgttccccgtaaatatcccttaaaagttttggaatgcttaatgtttttcagtgcagccgttggcttggcaccaaaagaattgccattgggcgaacgtgccgtatattttgacggcacaaacactgaccagcaaaacaattcatacgaatacagtctgcacagtgttggttttgcttcatcatttttcccaattttcaaaaatttaccatcgcttgaacctggcgatgtgatcggatgcggcgtgaatttgaacactcgcgagatcatttacacaaagaatggaaaacgcataagtgggaaaatgaagcaaaacaaataana

SEQ ID NO: 57381 - DNA, 856 bp, Heterodera glycines
atgttcatttattactgttgccgaacaactgaaaaatgtacatagcaacttcgcagtcttacaatggaatatcgggcgagcccagtgagttatattttccacttccaaaatccaagacattaaattgtgatggccatggatttgacatttcatgaacctatgaaaaaattcaattggtatgacggtcctgccactacggatgccaatccatggccacagagacccaaaaatgccacaaagttacgaatttttaaacagaatttcctcaaaaaatgtgtcggggatgaatggcatcaaatgttggcacattccttatctttttcaccccattttcccaggttcgtcctctccgccggtcaattggcgttccggcgcattgcgcggtggtcgaaaagtgaccaaagagccggcctacgccttcattttgcccaacttggagcagtacccggccgacttccgccactttttggagcgggacatcatcgaaatcagcacactgagggtcaaacttctgcatttatttgccatttgccctatttttggcgtaaatatgaaatttgagtgccacaattgtcactcttttttccttacagttctccgctgttgctctgttttgatcagtcgcatttcattgcgcttgtcgcaatgcgtcgtcagttaatcaccatcactttgcagggtaaagccatggcggggtcacccgtcaattttccccataattaattgcaccctttttgctttttcagtgattccgatgaccgacaaaaaccgcaatttgccgcccgtccatttctcagtcaattctggcgccgatttcacttggttcaacgcatctaatacggatgattgtcgatga

SEQ ID NO: 57382 - DNA, 1226 bp, Heterodera glycines
atgtacatagcaacttcaaagtcttgcaatggaatatcgggcgagcccagtgagttatattttccacttccaaaatccacgacattaaattgtgatggccatggatttgacatttcatgaacctatgaaaaaattcaattggtatgacggtcctgccactacggatgccaatccatgaccacagagacccaaaaatgccacaaagttatgaatttttaaaacagaatttcctcaaaaaatgtgtcggggatgaatggcatcaaatgttggcacattccttatctttttcaccccattttcccaggttcgtcctctccgccggtcaattggcgttccggcgcattgcgcggtggtcgaaaagtgaccaaagagccggcctacgccttcattttgcccaacttggagcagtacccggccgacttccgccactttttggagcgggacatcatcgaaatcagcacactgaggcgtctggagaattcgggtcagtgtacagttctcagaatgtctgataggagaaagcatattccccatgattatttaaccaaaattttctagaactattgattggcatcattcagttttataccgaccgttaattacgcttttgttttcaaacgattacaaaaattttattttgtttctgaattttggcgatgtttccaccttcgttgcccaataacttttgatttttccgcaattttctccactttttctaatttgttgcatccaaatcgctcaatttcccctttttgcaggacatttgaattggtggtgtcaacatgacagcaaccaacggctgtggcccctggtgacaaccggcgatggcaattgtctgctccatgccgcgtcgcttggttggtggacgggaaacaaaaaggggggggggcaaatagaataatcttcgaccataactggatggatttttcccgattatcaaatttattgacaagactgccaagaaattcccaaatatttttattccttttttggcattatgttaaacaaaattaaggcatttggggtgtccacgaccggcagctgaactggcgcaacacgctgcacgatgtgctgaaattcgggagccgaaaacatgccatctaccggcgttggcgttggcacgagtccaagaacaatttggcgtcgggtttggtgctgtcggaggaggaatggcgccgggaatggaacgccgtgttggagttggcatcgccgacaccgcgcccaaa

SEQ ID NO: 57383 - DNA, 339 bp, Heterodera glycines
atgactataacaattggtcaacggaacaagagaagcatggggaggagaatgggtgaagtgaggtgagatgacgacatttaataatttatctatattaaataaaaattagtgtaggagaagtaataaaaaatgaatatttattttgtaccgaagagtgaatcgatttaaaaaactgaaattatggccaaatgtccgaaaaaagttatatttttgaaattttcaggttttttttttgtaacttagcaaatcaaactgtgacatgatccaattttaaaagtattaattttttttaatttccccaccttttcgaatcactgcaggcgaacactgaaaaataaa

SEQ ID NO: 57384 - DNA, 1033 bp, Heterodera glycines
tacaacagtgattagaagaggtacaacagtgattagaagaggtacaacagtgattagaagaggtacaacagtgattagaagaggtacaacagtgattagaagaggtacaacagtgattagaagaggtacaacagtgattagaagaggtacaacagtgattagaagaggtacaacagtgattagaagaggtacaactgcaattagaagagtgattagaagtggtacaacagtgattagaagaggtacaacagtgattaaaagaggtacaaaagtgattaaaagaggtacaacagtgattaggagaggtacaaaaattgttggaatggtacaacaatggttaaaaagggtacaatcatggtattaaaattaaataattaaggaaatcgtttattaaaaagtaagattaaaaattgaatgtaattaataaatttttaaaaataaaataaatttccttttattaattaaaaagagtgtttgaaaagtacaaggattgaatatttatttaaattgaaattaatattacaaattctaatttaaaaatacaggagttctttaataaaagtaaataaattattattttaatttaaaagatttttcacaaaaaaaataatttaatttaaattaaaaaattttattttttatagattaaacaaaactatttatatttattaaaatgaaaattaataatataatatttatttaatttgaaatgaaattaaacatgtaaaagtaatcaaaaaatgcacagaaaaataatgtacaccggccggattcgaacctgccgccccccccccataagatgactcagaatccccaatcacacagggattctgagggcttaacgatgtaataactgaaatctgatgtcagattagtgatcagcaccctcaaatagccctaatgacatgtttttgaagatttttgtgaaaaaaaatttctcaactcaaaaatcatgtgctcccccctttggtccagaatcccaaaatcacttttatttttataacattttttaaaaatgtgatagaaatgccaa

SEQ ID NO: 57385 - DNA, 319 bp, Heterodera glycines
atgagaaaaaagagatagccattttttggtcaagaattttttttgtttgcgtttcaaatatcgtaagattgtttgatagggccagacaagagaaggcaactgttggtaccaagtttgcggtaaaaaaatgagaaaaaagagatagctattttttggtcaagaattttttttgtttgcgtttcaatatcgtaagattgtttgatagggccagacaagagaaggcatctgttgttaccaagtttgcggtaaaaaaatgagaaaaaagagatagctattttttggtcaagaattttttttgtttgcgtttcaaatatcgtaa

SEQ ID NO: 57386 - DNA, 513 bp, Heterodera glycines
atgtactcaaaattctatttatcccccatgggggataaatggagactgggtgattattttttaaactcctcagaaaggggggataattggagactgcggtattaatagagactgggctataattagagcatatacggtatattaaattacaatttatttttataaaatttagaatatttttaaaataatattatctattattacagttgcttttttatcatatattgagttatgacactttcttaattatataatcgcttgttgtttaattatttaaaaaagtttttaatcataaagaatttaaaattttttcttaaaaaaagataatttctattgtaagaataccgtattttctctaattaaggcccccggggggattatttttcaacctcttcagaaatgtggacataattggagacagggcctttaatggagacggggggattatttttcaacaaatttttaatgactagggccgcgacttttagtgatgaaaaatctcgaaaataatta

SEQ ID NO: 57387 - DNA, 129 bp, Heterodera glycines
gtcattaaaaatttgttgaaaaataatccccccgtctccattaaaggccctgtctccaattatgtccacatttctgaagaggttgaaaaataatccccccgggggccttaattagagaaaatacggtat

SEQ ID NO: 57388 - DNA, 529 bp, Heterodera glycines
ataaatctgggcgcatcggttcggggggactgccccgaaaacaaaaaaatcgattttttcaagtgtccgtttggggtactcaaacaattatggggagcaaaaatccaacgcagaattaaagtacaggctatagggaagctattcccgaatgattcggtctccccataaatctgggcgcatcggttcggggggactgccccgaaaacccaaaaaaaattttttggataaaaattatttaaatgaactgactagataatatttaaaataggttatttctcttcctttcagtatccctgcaaagtttggtgcgcttctgatcagtttctgaaaaaaaagctaagcctaaactttttggcctgtttaaaaaggaattaaaaatttttaacaattttattcatctccctttttgatagaaaaagcatcagagtgcctaaactaacatgtaaataaaatttggtgcgtttcagaaccctttctgaaaaaatatttatgaattaattttgcaaaaaataaataaaaacgaaagact

SEQ ID NO: 57389 - DNA, 512 bp, Heterodera glycines
atgagccccgctgacttttaccaacaacaaaagtcaatacatacgaagcaaatgctgcagcaatcgccgatagcgcagcagtttcacccttcttcaacttcgaattcagtttttccccaactctccgattttgtggaggatgggctcgttgatgatctcgtggtgccaagtatatccaatgaaggtgaattatgtcagagtatttcaaactcttaaaacattgattttaaatggattctttaaattaaatacttaacaagtctttcttgattcacaaaccgattttctggtatataaatggtaaaacggacagacagctatattttgtcttccctcacctgatcatctcactgtcagaaagatagttaaaatgcacctttgttttttaattgtaagactcatatttttcagacgatttcgatttggatttaattgagccaatgcgttgcggggatcaccagcagcaagggtaccaccagcagaatcagcaccagcaacagaatataattgag

SEQ ID NO: 57390 - DNA, 1252 bp, Heterodera glycines
atggcaggccaccattctgacgccgatgtggaagaattgatggcaaaacacaaggccgtccttgagcgtgaacagcgagcgctggctgagcagcagtattggcgagactttgcgttccagccatcaggtaaccggacgaagcaaataactgtttaaatttctaaaatttataggagagtcaatcgcagagcaggctttacacccgacaggactagaaatggagatccagcgctacaattttgagcaccaacaacaggagagaaggcttcaacaggaacggatttggaaggagcagagggaagcagaaatgcttgagaaaaagatgcgccggatccagctcgaacaacaaaaaagccaacaacatcaggcaaaggactcaacacggaagcgcacacaacaacaagcgcaaatttctacaccaacaaaggctgaaacaaaaagtaaaaatgacatataattttttgtgattatttcgtattatttgaagattgtggcaaaaatggaactctgtcgtcaccagggaacgctcggaagcaaccacaacatgcagttagtcggctttactttagcgaagccaatgccggtaaaaaaaaagttataataattaaaaaatactaattgcaataaatcagaacctgagcatgctgcgccagcgtcagctgtgttgacgactgagcaacccatcgccatcatccagcccgaccctgaggcaatccgggcccgagagatcatcgaccagcggctcaacatccaagaggcagattttgtggaagatgtccattgcggcagtgacgataagggtaataaacttaacagaaaatatttatgaaaataaaactttcagcgcctggtccgcaccccaactttaatgctgtgcacatggagatcgtgagcagtaaaaaagaaggaagttggcgagacaacaacgagacgtgcggtgtctgcactgaaccactgcttcgcggagacctcgtcactcagctgccctgtgacgccaatgtcaagcatatcttccacaccatctgcctacgccgttcgttgacaatcaaccggacatgcccgaagtgccgccgtcccgtcaacatcccagacgacatatggtgaaaattataaaaaatataggcataaaaggtttgcttaggccgaccaaagactcgcatagtcagtcttataaagactactttgctgagcaaagtcaaagcgcaacatcagcccgacctccggacgatgactttgtgatccgagcttggta

SEQ ID NO: 57391 - DNA, 1073 bp, Heterodera glycines
atggcaccgaaatgtttgggtgggaagcacaacgaatgtcatgtcgttccatcattggcactttcgccttccttttcagctgggtgtacggtgccgccaattcgaaacggaagactcgaccaattcgagcagggcgaagcggtgccgcacggaacagaggcaaattcaaacaaaaaaaaaattagttaaaaaataaaagtaggccagcattttgtgtgacccgaaacacgactcgaaggcattggcatcggctaggtgtgccaatggcacttggtcccacatgccgcagtgttcgccaagtgaaattgataagtcaaaatttgaaagaacactcttctttttgccgcagttcgttgtgtccattggccggccaaagtgtccaattcgcgaattgtcttcacaaagtcaacacatggctcgagtttgtcatattagaccatttggacaactaattacccattaattagtggccaaattccgctgtctgcacggctttcgtccgtcgtcgccgaacaattccatgaaatgtctctacggcaaatgggtcagagacggaccgccgttccgatgcttagcgagtaaaataaaagcatggcaaaggcactcaaaaaagggtttttgacttaaaagggtcttgtgagcatccgacaaaagcttttggcactttaatcggtggccacattatgctggagggccaaatgggcgcttacgattattccgattacataagccgagtgccggaagggcgatcaatcgcatttcgctgcgaaaagggcaattttctcgttggtcagacaaatcgattaaacattaattaattaatttcattaactcaatttattaatttgtggaagtaatttaggaccacctaaggcaacatgtcaggtgacaacaacaaataaacaaaatactgtggaattatttcaattttttgttttaattttaagcgtggcgattggagtcccggactgaagccggaatgtgtgccgcaagtccatccggcagttgagggccaaattctgtggagtcggccgggccgacggcgccgaagacgccgccatctgctgagtgga

SEQ ID NO: 57392 - DNA, 1369 bp, Heterodera glycines
atgctcgttgtcatcatccatccagaacaatggaacggcggctccgaccgatgcacaatcggtgggccaaatacacctaattaataactaattaattaatatttattcattgatatttaatgattttttcaaagtgacttttgccattcgttgtaaaaatgcaaaattacggcaatgcttattccttttaaggattgctccgacactttgtccaagccggtcataaggtgttctggctgaccacaatgattgacacttattgggcatccgaggatttccacggcgttggcacgttaatttaatgaattgaaaactaattaaaaaatgaatcggaaaatctttcatagaaatcatcggcccatctctgttcgcccatatgcccctccatccgggcgattggttcgcttttactttttttgttatctttttaaatttattccccccgccccaccgttcgtccaggtacacacagaacaccgccttggccctttactatctgttctccaagcgtggcatgggctcgcccgatttggtggtggtcgaccattccgcctcgtgcgtccccctgctcaaatggttcttcccgcgctgccgcgtccttttctactgccatttcccccaacaactcgtaaatttgggattttcaatattatttattttcaaaatacccataaatttcgaaaaaaaatctaaataaaaatgattaattattgcgaattagtcattgttcataagttaaatgtttccggatttgaataaattaaatctttgtcccgcccaaattgagtatttgccaatttccccttatttgttaggtcactccgtcccgctttttcctctaccgttggtacgcttatctgatgggtttggtggagggtcgtctgttcgaatacgtggacattgtgttggtgaacagcgaattcactggtcagcaaaaagagagagcattgcaacgtaaaaagttcccaaaattcaatttaggtcgccaatttcgccaagtaatgccaaccgtttcgaatgccaaaatccgcgtcgtttacccgccgtgcgacgtcgactcgctgcgttgcgggtgggtgcgtccgattagtcgtgcggaccgtccgcccaacgaacgataccttttcctgtcaatgaaccgtttttggcctgagaagcggctggaaattattatagaggcggctggtaataacccacaaacttttttggcatttcatttccattttcagctgagttaaaacgccgcgggctgcggccgcgcattcaaatggccggctctgtgatgccgcacattcccgagtctcgaatatactaccaagagaggcaaagtcactgcaaacagttggagctggacgacctggagaggtga

SEQ ID NO: 57393 - DNA, 758 bp, Heterodera glycines
atgggggtgggagcagatgaaagttgggagtaatgggacaaattgcaaagtcaaaaaaaaaaattttttttttaatttaaaaatttaaaatattttagggcccgaaaacttatgaagtaactgaggaaagtctcaagcaattagtgaattttcaaatgaatatttgtgggagtgttcattcatataaattatgaattatccaggaaataattaattggcataattagttttgctagttaccccgttgatgtgcacgtgcacagtttcattttgctggggacgcctttccgccattatttgcgccatttcctccgtcggcggatggtccaccgaaaataattcggcaattgcttcgtccacgcgtcgtccgaatcccttccaactaaatttttcatcgaagcgaatgcgctaaaagagggcaattagccatttaaattggcttaattaattcgctttgtttgcctgtttcgcgtaaagttcgtccttgtcgagttggggccattctttgcggcccatgtgcgatgccattgcattggccagcaaaacaccgcaagtgtcggcaatctgatcagcaggtgatttgatttttaaattattaatttttagttttgtatcaaaaaccaaacaaagggttcgatcggttttttcaatataaaccctaaaaaatcgagaaatacacattctgttggtttgtaatttgtaataattagttattttagtatccctatgaccccctttaattatttaataataataaa

SEQ ID NO: 57394 - DNA, 710 bp, Heterodera glycines
atggacattgctgcggacactttactgcatcccatcgctctgttactgctccgtctccactcgcgacgcgtgagcgagacgagcagcgaggtggaggacattgtcgtcgcggaactcacttcgtccaataaagtgttgagcggaagtgcggtgcgcaagttccacgacctgtgggtgttctgtcggagtgccgtcattgaggaggtgtacgccggcattctgctcaagccgatgaacaggtgatgccacggagagagtgcgctaagggttttgtgttgttgggacatagtttctaaccccaatgaacacagttaaatatgtagttgaatagaaagccatggtgccgataccgtccagtctgggaaattaaattattatgtcgtctcataattattaacaccccttaaaaagtagcctatttattaaaaaaaacaaaaaaagaaattgaatcgaaaatcgaactatttttcatttttttgttggtcacagtcttgcactttctctggaggctttccaattcaccacctcaattttcttctagggttgtgatggttctgctcagttttatcgccgatgacaagctcagtgcggaacaggtggagctgaaggcgttggcctacgcctggtttttggactgtgcccatcacaacgaactgcacaaaattgttcaaatgctcacgcttatgttgctgaacccagtgacggcacgg

SEQ ID NO: 57395 - DNA, 457 bp, Heterodera glycines
aatcccactttttctattttgctttcgagaatgccgtctgtccaaattatgtgacggagaaattttggaaggcattgcgcaatttggtggtgccaattgtgttgagtcgaaaagtgatggaagaagttggcattccgaatggcactttcattgcggtggacgactttaacagtgtgaaagcattggcagaatatttgaaggaattgcaaagggacaaggacaaatacatgaggtaataggggtaattatggaaattgattgctcaacaaggtgtagttaggaaattgattgccctatagggggtaattagagggaaatgattgtaagtgagggtaattaatggggtgaggaaaattggacaaatggtgctacatcgaccgacgaaaaatgcaaaattgggcaagtgacgaaaacattcaaaaatcatttttaaattttcaatcatttttatttaaaa

SEQ ID NO: 57396 - DNA, 386 bp, Heterodera glycines
atggttagattttgatgaaaaataaattcagttcaggaaatactcagaaatgaaaccgcacatttaatttaaataatatttaattattctgcctcctttcttaaaatgttcacatttgggatcaaaagaccaaaaaatttagcatcagagtttaaatttcttgataaaatagtgacattatgccacaaaatttcaaaattataagtatatttaagaaatcagcacaattttcatcgctactccaaaatcagagcattcttataaataaaaacaaatggaagccctggtttaaaggccagcttctaacgaaatcagattattaaactgacaaaaaggaagatttacgagaatttaaaaagaaaaaatggttttttcattaaaataaa

SEQ ID NO: 57397 - DNA, 304 bp, Heterodera glycines; identical to SEQ ID NO: 51570

SEQ ID NO: 57398 - DNA, 141 bp, Heterodera glycines
aaaattccctcaaaaataaaaggtctattgcgcaccgccctccctatcatgctcgagagcatttgtatgtgtataaaattatcaaaaaagagatagccatttttctgggatacctctaatataaaatcctctgtgaataaa

SEQ ID NO: 57399 - DNA, 512 bp, Heterodera glycines
atgaccatgaaaagaagccaaccaagtggacaaaagccggttgcttcttcttctgatgacgtcttacagcagcaaaacggcggcatcgccaaaagaaaaggtaaagccgcactttaacaaaaaaaaagatgatgatggcaatttggcattatttggcacatttaaaaacggcaaatctttggcattatgtatgtattatggtgacttcataggtgagcataccccggtcggccaccaaggccaaaaattacattccatgcactttttttgaaaataaaaattgccaatcgcctaattttagtattaaaaatggcacaaattttattttaccatattcttgcactaatgatatgcctactgtagcaggtaattaattagtgaaaagaaaacgcatcacgcttaacaaagagtggcgccgcttaattgtttttttttgaaagctatggcctacagtagaacaacctatttaagttcctacgatacttttacgccgtgctgaaaactgataaaca

SEQ ID NO: 57400 - DNA, 840 bp, Heterodera glycines
atgacgcttaccagaattttcagaacaattctgacatttaccagaatttacataaccattctgacgcttaccagaatttttcagaacgattctggtgtttactagaattttcagaaccattctgacgtttaccagaatttttcagaactattctggtgtttaccagaattttcagaaccattctgacgtttaccagaatttttataactattctggtgtttaacagaattttcagaacaattctgatgtttacaagaatttacagaacattctgacgtttaccagaattttcagaacaatgacgcttacatccctattgaaatttattttcacttacaaaactttctaacataaataatacatcgttaaatgatatcccgaacatttttctaaaacattttatttaaatccaaccacttttacatattttctggtttttctatgatgtctatccaatttcattatatatggaaaaactcaattatatgccctattctaaaaatccctaactcgaaaatcaattgactttcgcccaataataagaaatttatttatgttgtttattttcactgggcgaaagcttttgacccaattccgaataatctcctcctcctaagctttcttgtattggtataaataattccttattaatatgatacacaaatttttaagctatatataattattataatttttttttaaatcgaacattctttgttaaaaatgttccaattttccagacgagtatccatgcctaatggcgtaaggctcaggaccattattgtttcttatttacatttatgattaccaaatttcgcgaaatagaaaaggtgaaataaa

SEQ ID NO: 57401 - DNA, 511 bp, Heterodera glycines
atgtcctgggtttttagattcgacctgaattgggtaaaagttactttttggaatttcatttaagaacgcagaaaatttttaacttacaaaattagtatgacatttctcaaaagtaagcctaaaaaaatttgaaaatttcagattttaaagggaggaaatttggcgaaaattttcaatccatctccatttcaggacaagtttctggaaactcttaggaccttcaaattgcctttctccaattcaggacaaatgtatttccatcctgaattcaggaaaaatctaaaaatccagggctttgttttatattgtatttcggaaatgtaaaccgatttattggtcaaaaaattcaagcgatttaaatggtgaagaaaaatcagcgaaatattgaaaatggattataaaaaacacaaaagaaaaaaaaatcattttttaggtgccgggtcgttactcaaaaaactatcaaatggaaaatttttgacagaaaattactcataacttcgcccaaaataaa

SEQ ID NO: 57402 - DNA, 387 bp, Heterodera glycines
atggcgatgaaatgctttacatatatatttcttggagccaaaacaaaagcacgtcaaactaaatgtttctatttatttatccattctctcggcttttttcccttcatcatatatttctcgtcaacatctcttcttcactatcataatccgttcataggtaattccatcctttaattgtccttggtcttcttcttttttaagcttcctctgattttccacataattacagtaattgttgtttctctttccgtgccgtacagtctctctctccatttgttcagagacgacgacgaagaccaataatcggtcggcataattaatgtacgcaacaccaaatgcaaaaatgatcggattctcgattcttgaaaaaatggatccgagaataaa

SEQ ID NO: 57403 - DNA, 863 bp, Heterodera glycines
atgatgattttggcgaacggagcggacccgaacgcgactgacagcgctgccatgtcgccattggcacatgtgttggaggttcgttagcgggcaaaaaacaaattgcccgaggggctaataattaatttgtgtccgttttttgcatttttactgtgaattctttgaatttttgttggggtccggatttagttaggggtgcagaatgactattgagtgaatcgtattcagcaattactaaaaccccttaatgcgtttccatgatttttttgactttttgaaaatcgtggtagagttttcccaattaaaatatcaccaaataagtattatttggtaaaattgagaaagttttaccaaaaattatattttcacacattaaggatgaaacaggcaaattccaaattgccaagttgttgctttgcttccatgcaaagttgaatgtgccggccggaaagagagacaaaatgtattttaattcttatttttgattgttaacattgaatactttagcaatgaaaaggcattggcgaagcttgtggccaaactgaacaaacaaaaggtctcagagatttttgtttcatattttccacttagaaaatttttttttttttgcttaatttatttaaacattttttgtttagaagaaaaagacgggcacaaaatcggaagagtcgaccgttaaaaagccagagtgtgtggatgttgaggaagcaatttggaaggagtggcagcaaatggcactgaaaacgagaagaaatgaacaaaggaaaaccccgagacgcaagggcacgggcgtcctagaaccaagcaagcataagcctaggcctagccgaaagcttaggcctaagcctaagcttaaagcttaa

SEQ ID NO: 57404 - DNA, 3312 bp, Heterodera glycines
atgatgattttggcgaacggagcgggcccgaacgcgactgacagcgctgccatgtcgccattggcacatgtgttggaggttcgttagcgggcaaaaaacaaattgcctgaggggctaataattaatttgtgtccgttttttgcatttttacagtgaattctttgaatttttgttggggtccggatttagttaggggtgcagaatgactaattgagtgaatcgtattcagcaattactaaaaccccttaatgcgtttccatgatttttttgactttttgaaaatcgtggtagagttttcccaattaaaatatcaccaaataagtattatttggtaaaattgagaaagttttaccaaaaattatattttcacacattaaggatgaaacaggcaaattccaaattgccaagttgttgctttgcttccatgcaaagttgaatgtgccggccggaaagagagacaaaatgtattttaattcttatttttgattgttaacattgaatactttagcaatgaaaaggcattggcgaagctcgtggccaaactgaacaaacaaaaggtctcagagatttttgtttcatattttccacttggaaaattctttttttttttttgcttttatttatttaaacattttttgtttagaagaaaaagacgggcacaaaatcggaagagtcgaccgttaaaaagccagagtgtgtggatgttgaggaagcaatttggaaggagtggcagcaaatggcactgaaaacgagaagaaataaacaaaggaaaaccccgagacgcaagggcacgggcgttcgagcactttcactggacggtggcggaattcgaggcattgtattagtgcaggttttgattcgggactttttaattaaaaattaaatttttcgattaacaatttgcgacttaaataattttttcctgcaaatgaaaaattggggtttactttcttgacaaacagttaaaaaaaacttccataaaaaccatattttttaaagaagcatccaaaataaacaccaatatcattcaaaaaagtcattgcccgaaaacctcaaaaaaaaaaattttatctaagcattttgtttataaattttccgaaacagagaatattctttaaaattttgcatcctaatagagttatcgaataatataaagaatgtttaatttgagtgtttctttaaaaagttgtgatttacttcatttgcaaaattatttattggccgtgtcttttttatggtcatgtcaatgcaatagagcggcttaccaccatatttttcgctatgcttatcccttatcgaatttgcagatgttaattgaaatggagtcgctgatgtacggcgagggtttgcaagcgggtggccatgaaaaaaacttcgtacaaaagaacttcaattggattatcgggacgagcaccggagcggtgagagcaaaaattaaaattatcagttttaacttgctaagtatcatatttgtgcaattttgggtctgatttcaaaaaaatgcaaacattggagggggggggggggtggcggtgaagagaaattttcgaaaatttgttaatgcattttccaattaaaaaaattatttgaactgatcaattaaagatgttggacattgcgaatttcagatcgttgcgttggcacttgtctcgggcatctcactgatcgacgcactccgactttacttgcgcctgaaggattcggtgtttggcgcccgggcgcagctgatcggttacaacgcgcaaaatttggaaacattcctccaagcgcagtttggcgaaaacaaaaaaatggccgaattatcgcgtggaaacattaagtgagtttttgggaaatccattttaaaattggatagtcgcagaagagccatttatagttttttgaactttttgaaaaattaattttttttttgtttttgagtgatggtcatcagtgaaatttttaaaatattgatgactcagaacatttgttattggtctctgccaaactgaatattttttcagagggctgaaaattgggtaagcccgtccgtttgttagcctttaaattgggaaaaaattttgctattagaaaattttcaatttttttggttttgctttaatgaattttcaaaaaaaaaattgcagattgtttactaccgcaacatacgttggccaaaaacctccccgactggtcaaatttcgcaacttcatttcggcgctcaacgaatacgacccgtacaaaaccaacatttggctagcggcgcgctattcaactgcggcgccaacgtactttgaaagtcgggacaaattcatggatggaggtaggcaaaaatagaaactattcaattagtataaataattaactatcgatgcatgaaaaatgataaaaatcacaaaatttgatcattttttagtgaaaatctgtcaacaaattttaatcaaattttcaaattttttcccggcgccgcctgccccctcttcccaacaagttttttttgaaaaagcgcgcctcaaaaaagcgttttattgatttttaaatttggaataaaattttaaaaaatgatttttgctttatgattttaattattaaaaagtggtagaaaaaatttcgcattttcgcatattttagcttttcgcatttcgctttttttcatttcgcatttttcagtttcgcaaatttcgctttttatttttcaatttggcccatccctgctaaaaagtaataccgtttttgcacccaaacttcccccctcccattcactattgatagtgaatataaaatatgattttgaggtctgctcgcaaacaatccaagcctggaactgttggatgaaataagcaaggaaaatgcattggcaaaacaacacaatgtatgcagcagttgaccagttttatttagtttttttcaatttttacattttcaggaacctcagtatgagctggagtgttttgtttcgcttggtactggcaaggcaccgactgaaccggttggcacaacatcgttggagattgggattattggagcaattaagaatctggcggggattttgatggatcaggtacacacacacacacactatatatatatgtgtgtgtaaagcaaatcattttaaaagtaatttcaagctggggttgtatatttccccttcctcacaattgtttctgaaataattgtttttttggaattagactcaaaattttcaatcgaaaaaatttaagtgcgtttcaggcctcccacagtccaggaaaaaatatggatttccatataattggaatccctaattatgacccctcgaaaatggtagaactttgggcgccatggtgccgatag

SEQ ID NO: 57405 - DNA, 1030 bp, Heterodera glycines
atgatgattttggcgaacggagcggatccgaacggaactgacagcgctgccatgtcgccattggcacatgtgttggaggttcgttagcgggcaaaaaacaaattgcctgaggggctaataattaatttgtgtccgttttttgcatttttactatgaattctttgaatttttgttggggtccggatttagttaggggtgcagaatgactaattgagtgaatcgtattcagcaattactaaaaccccttaatgcgtttccatgatttttttgactttttgaaaatcgtggtagagttttcccaattaaaatatcaccaaataagtattatttggtaaaattgagaaagttttaccaaaaattatattttcacacattaaggatgaaacaggcaaattccaaattgccaagttgttgctttgcttccatgcaaagttgaatgtgccggccggaaagagagacaaaatgtattttaattcttaattttgattgttaacattgaatactttagcaatgaaaaggcattggcgaagctcgtggccaaactgaacaaacaaaaggtctcagagatttttgtttcatattttccacttggaaaattcttttcgatgccagaaaattttgattttcattgaatttagttaagaaaatgttgcacgcactttgaagtcataaaacgaaattttttgcgatttttcaagaaaaaatttgtttgttttttgaaatttttaaattttttggtagcagttttgcataaaaatggccagattagatcattttaacaatcattctcatacatatgttttccttttttcacataaaattctcttcttatttcggttttgattttagcttacaaattttctacaaaaaattttcatggatttggacgcatttcttcgtttcttcgctggggtttgcaatttattttaatgtttgtcttaaacttttttttgtccagccgcagcagcagccggcaccaatgagtatttacgaacgctttaacaaggaagtttgcgaaaaaaacccttga

SEQ ID NO: 57406 - DNA, 787 bp, Heterodera glycines
atgacaaacttggtatccttccaaattcaacatcggcttgcaaaacatatggacagagagcattttgaaaaagtcttggccttaattttctgggaaaaagcagacccagaaaaagccatgctgccaaaaagacctttggacctgggcccaggaaaacgaggccaagttctaacggtacttgttaattatctgtgggcagatatcaaaaaaatttatcttttggctataacatttctttggcatccacatgcaatttgcgaaaaagtcaaaaattgaaatgttttcctaataaaattttttacaggctctaaatctttttgttttttgtaaagcttatagagcatctgaagagctttcgaatgttaccaacaatgttggatttggaaccaagtttgttgtttttgttgactatcagaaagtttgagggcggcaaaaactctggcaccgagacataatgggtctattacaaatttatgagttcaaatcacaaatgacattcctggctctcgtgaaattggactcataaaatgtaatagtaacccacaattttttgcaagttttggtcataaatgtcgtggacaacaaacttttccatctcaattagtgcgcttttgtttttgaaattgaaataatttttgtttagaacaaattcatttgaacaagcgatgcttcagcaggcgctcaaagcggtcaaggaggaccagtacgacttcgacgcgtggactcggctactcaaaattgtggaaaaagtggtcagtggcaacctacacacacacacacaaataaa

SEQ ID NO: 57407 - DNA, 742 bp, Heterodera glycines
atgcatccatttgtcttacgtaattttctttctgagaatgattggccgccacttcgcctttggacagatgattatttgacagaaaaattagggaaaggacaatgtttaaatgtacgaattggtgaaaagagacattttcgtggaaaggtttggttgaaatttccaaaaactataaaatataaatgaaaacgttaggttctgcacgagcatcaatgtgatcgacatacttttgagaatagtgcttcaatgctcaaatggatgaaaagtgctaatttcggccctgtcaatggaaatgaagagacttcatcggcatacccaaacccgaacacacactgggcctacttggattatcgggacgtacttgaactgttagaacaagacgaagctcaatatgttgattggtcattgttggggatgaaaaacgcaacaggggagggcgaaaactggcgtaattccactgtttggatcggtaagaggcgcagattaccaaagcaattggtaattctgtagcttgtgtctcaaaacaagtttcatgtggttttctgggtcgcgatcattaagtcggcatcaatttcgaccaatcccggacacgaatttaaataaaagatgaaaaaaaataaaaatttaaaaaaagtattcaaaaacttctttctagggctctttggggtcgctggtcgcgaatctgacattcatttctatcaagtccgaaccccagacccgaattcgaacagaaattagaaaa

SEQ ID NO: 57408 - DNA, 617 bp, Heterodera glycines
atggaaggaaaccattggcgacgggagcaacttttccattttgcagaaattgttcgcctcgatttgatgaaaaccgtatgaaaataatatgttttgaaaagaatttattataaattatatcttaacattagaataatttttatctgttttagaccgttattgccacacaatgcgcaaatatttcgtcagctggtaaagctgaaaaaattcagaaagaaatgcacgctattggaattatgctacaagaaatctcttcgcacgtggccacatggattgaaaaaaagcttgtaagaaaacttgtttatctaatttttccctatcacaaataataattctaggaaaatataaaaaagtgacttggactattcaactagggttgcaaccccgaagtcggggttggaaaattcggggttgtcggggttggaatcgtcggggttcgggggtggggttgccaaatcgttcggggtcgggtttttcaatttttgccttaagccatatagccaaaaaactttataaaattttttcttgaacatatttatttttcataataataatttatgtgctttttttaaattattttatcatatgtaaattatttttgtagagaattgattaaa

SEQ ID NO: 57409 - DNA, 839 bp, Heterodera glycines
atgattgaaacacctcaaaagtttacggacaaagtcactgaagaagaagggaatataagcgcagcagagatgaaaaagatgcgaagaaaagcgaacaaagtgaaggcggtcgaagaaaaggcgaagcaaaacggacaaattcaggggaaacaggtgaaacaattgggaaatcacaaaggatggaaacaattggaattggtaatttagaagagacggactgacggtgaattggatgtgatagagcccgaaccattggatccgaaaaagttggccaagcccaaaaatccgctagatgaagcagcaaaattcatccggcccatcttacaaatgccgtgcaaagacgtggatttatgggtggtcgcattccgggtttatttccacaagaacaaagtgaccgacctattttaacattttgaagaagcaattggacttctgttttcagctgctggtcatgttgcaatgccttaacaaaatcgtcactttggatccgtcaaatgagaacacaaaaaagctttttggcaaatatatggaaaaatgtttgttttttgtcgatgattctgtattttaaacccccgggaaaaacttcaaaaattttaatgtcaaaatctgaattgatcggagtgaatgtcacattcgtgacatgttcttccttaaaaaaattaagttccattaatttttttagataaaactgcctctggcgatcgtgcgacggatcagctggtcaaagaattaacccggtctttttccgcaaggattggttttattgccgacagtgaaattgacagataggaaaagcctgctcaccgacatttattatgcttgttttgttttaaatgcaa

SEQ ID NO: 57410 - DNA, 697 bp, Heterodera glycines
attcggggtgacttgtcaaatggtgaccattcaaaaaataatgtgcttttttaaggggcagggcaacagccgagcggtttttaccgtatgtatgagccaaaagaggtgagtgtgtgcaaatcgtaacgaatccgatttgattacaacatggaattgttattgaattggccattgtcaggtgatcggccggggactcgcttcggttgtgaggcgttgtgtggagaaaggtgatttagggagaactgctgaaagcacatcgaaacgatgccatttttattttgaagagtcgaggaaggaatacgcggtcaaaatcgtcgatctgagcaccgaacgacagtccgaaagggaagcgaagcgcctaagcgaagagactttttcggaggttcgcctcctcaaattgttgtcgggccatccgtccataagtacgttcttacgccttcgtaaatttcctctgatttttctgcgtttttcagtttgtttgcatgagttctttataacgacaacatttgtatttgccattttcgagttggcacgctgcgaattgttcgaagcgttgaacaaatcggtgacattcagcgaaaaacggacgcgactcgtcatgcgacaactgtttgtattgttttatatgaagttgaaaatgttattacgtttaggttcgacggtgtccattatttgcactcggttagttatttacaaa

SEQ ID NO: 57411 - DNA, 80 bp, Heterodera glycines; identical to SEQ ID NO: 51817

SEQ ID NO: 57412 - DNA, 838 bp, Heterodera glycines
atggacaaggccggcggattcattggctatatgttcgtgccggtcttaggcgagaaaggaatcatccataaaaacctttccgaactgcttgttgaggctggccttgccagtgtgcatttcactgctgatcggtcttcctattacaatcatttgttggcagcggaaaaaagcgcaaaaggcgcgaaattgggcatttggaagcattttgacgaaacaacgggcggtaacacaacgacaaatcacgaggaggagcgacgaaagcaggacaacgatgcgtcagaacgcaaattgcagtttaagaaagtgctggccaccgaaatataccctggcttccggtttgctgctcagtactttgacgatggttagtttttggggggaggggtaacaaaacatggacatttgtttattcaaggaccaaccattgaaaaactgatgcaagctcttcaaattgagatgaaaggcgtgccgactggccaatttgttcccaaacgacaacagatttgtgccgccaaatacactgacggcgacctttggcaccgagccaaagttgaggctcaaaagggcgacaaaattgacgtgtaagaaatagtctttaaaaatttattttccactgcttttcagttattacattgactttggcaatgtgagttctgagcattgtttcttttactgttcgactgagaattgacttttcagagagaagccctttcactcgaacgaattgcacctcttccaccccaattccattctcagcctccactggtcaaagaatttcaattggctcttattgcaggtgttaattaacataaaaataattaaaaatgatttttggtggata

SEQ ID NO: 57413 - DNA, 943 bp, Heterodera glycines
atgagtgccaacaactacagcgctgtccgtaacaacggtccggcccaagcaaaccgcgggcgcaaaagagcacaacctgctgaccttgagctcgagcgactgcgcgaagaaaagcggcgaaggcggcagcgcagaaaggaagaagaagtacagcgccaacgggcgctaattcggctgcgcactgactaccgtaatgcccgaaacgctgttatggcaggtcaataccggatgtcggtgacagcaacaacaacttttttggcaattccccaaatcgtaagtcaattgtatttttcaccattaaaatataatgcttaaaatcatagacgcaagtgcgtggccaaccgtctgttccattcacatccgtgatcaactatgagccaaatgtaccgattgtggtgccgccgccgcttcttggccaacaaacgattgtgcctcatcttcctgctcctgttcctttgctaccacgctccgacgacgctgtctccaacgttactgctgctctcaactctaatacgcaatttggtactgccgttcgaccatcaacataatcttttttattttttactgatgagctagctatttaggtcctattcttcaccggactcttgccacttcgcctacgaatccgcagccagtcccgctttttcatcgaattgttactcgtcctaccgatccgcgtttgggttttcaagctgctcatcaaccatctgctgttccgccgatggcgttgctgtcgcaaattcctcccccaccactgccgccatttctacaaaagccatcgacctccgcccgaccatgtgctgctacgtcggcaaagtcacgcaaaaaggcttatagttcagacgacagcacatggtcgggcgggagcgaagcctgcactttgccaaaacgtcggcttgtcatttgctcagaggatgacggggaagaaaagaagaaagaatga

SEQ ID NO: 57414 - DNA, 473 bp, Heterodera glycines
atgtattgcgagagttgcgcacatcatgtcaagaaggcaagcatcagtctctacatgaaattagagctccgtgattgtgaagacccggaaataagccaaattgcgactgttttttccgttgtcgcggaacattacatgaaccttaaggtggagcaatttgccaatatggtagatgagcatccagaacagctggaagcgttgctcaaatctaaaattgagcagactgtcattgtcaaactcaatataaaggtatccaaaattctctatatgcttgctaaaaatattgccattttgagtttaaggcaaaaggagagctcgagacacttgactggatcatttcgtccatacagcaggagaacggggaggaggggatgccacaagaaggaaaaaagtccaccgacgcaaataccgaagatggagaaataatcgagatagacggcccgctaaaaaaacgtgtagcaaaaaagaactga

SEQ ID NO: 57415 - DNA, 1005 bp, Heterodera glycines
atggcacactttgaggcaccgaaggcggatgagaaacagcctcagcagcgaacaccattgtttgagcaaaaacagcactatgtgcaccgagtggagcggttcgctctgcagcgtcatgtcaccgagtttgtgctcaatggtcagtacgatgaaccggaagaagcgcttctccgcgcttttgagcatatcattgctcgtgcagtccggaacgcagaagactcccagcagcagacagatggggcaggaatatcagcgggtgacggtgcacgtcgtcaacagcgagtcaccagacttggaattttgcttaacggccgaggtgggaccgatcgggagtgtaatgcgctcttttgttaatggaaaattttctatgcaaacaccagggctaactgacccaattgtgctgcctattcgcccgccggagcaaaacactgcggaagtgcttatggctgagttggacaagcttggccagtcggatggcgatgaggaagtgcatggaggaggaataagcaaacgttcgctgttgctcagcgaaccaatagaagtggtcatcacatgtatagcacctccggttggtgcagcaccacggttctatcagtatcagcattggggctatgacgatcggcaaatgatccgtgtgacaaacctggatgacaacttttgtctattccacgcgctgattgccacccgtgcttacacagaccaagaatttttaaagacgacttcacaacgacaatcggcaaccgatgcagatcatgggcatcaatcgaatgccgtgccagctgagattgcacgaagagtcatgacgagaacggacttttgtgctggatatgaagcactgaaccgtctggtgtccaaccgtgaacggatgaacgctgcagtgacggagctgatgcgtgctgcagacattccagcagaccaagaggcgtatggactggagcatctcgaccaaatacagcaattatgggtcagttgttggtgttggaaatgaagctgaacggaagtgca

SEQ ID NO: 57416 - DNA, 1406 bp, Heterodera glycines
atgtgccatctccagctggacttttggttacgcaggatgcttcaaaactggtactgtttagtcgatgatatgaaaagcaatcacaatcttaaggtaattaaaagggcacggcacgaagtcaatgcaccacctgcggttccacaaagcgttgaccagctgattgttcctcccgcttaccagacgtacgagtcaactgacggcgaagtggagcagtttctgttggctgactctggtgtgtattacgaggccggaaacgaaaacccgcagaggtaatttttttttaaaactataatccattttaactatttttttcaaggattctgctgtttggacgtgaatctttcgggcgatgggctgatcgaatgaaagactgcttcggggacggcacattctcattggcacctccgatgttctatcaaatctacacaattttggccaagtgctgttttaatttgatttcacgtgaaaattgttttaaggcgtgggtcgtgggttatcgtcgtgtgccattgcttgctgacgtccaagtcgcaagcgtcctacgagaggatgtttggacttctccgtcaagcgtggccgacattctcgcctgcctcgttcaacatggacttcgagacagctgcgcgcaacgccgctgttgccacgtttcctgcatgcgaaatcaaattttgcttcttccatttcgtgcggaatttgcaaaaaaaaatcaaggaacaaaatctctggcaggtcagtaagcatattcagtttgtttttgtaattttcgtgtctattcagagatactgtactgacagtgttggctgagaatctgaggatgctcacttctgtcgcgtttctaccgctgagtgacatcaggacagctgtcatcgcattagacacggagtttgggaacgtcgcggcactccgaccgctcattgactggttggtctcatcattatcagaagtgtacttcaatttttgtgcaatttttaggttgctcaacaattacattggacaaccgcggccaaatggaacttggtctcaaccactcttcccaccagaacaatggaacgtctcgaactctgaatggagaagcaaggacgaacaactacgcagaggcagaacaccaccgtcttcaaggcgccttcaattgccgtcatccatcgatctggcacttcattgacgttctccgccgtgagcagaagggcaccgatgggaagtatgcgtcatttattgctggacttgagccaccgaagaaagctaagaaataccaagcggctgacgagcgcatctttaatttggtgcagaattataatccggtgaatccaaactatgacaatgatcacaattaccacataaatcaaaatcatcatatcattttggaatttcttcgtggcatttcgcgcaattatcatatgaacccctga

SEQ ID NO: 57417 - DNA, 828 bp, Heterodera glycines
taattaaatccattccttcgggggaccgtgccgggtgccgcggggtaagcagtgctggttcgtttcatcacggcaccgaaccttttggctagtcagcaatcgttgcttaacttgccagatcggacgggtgcgcatgattccactgttccaagcaccccaccaaaagcaaaacgatataaccaaaatataaggaaaaattttttaaaaaattttttctccatcttcctttttgatactaaagcatcagagtgctaaaattaagttgtaaataaaatttggtgcgctttagagctctttctgaaaaaaatatttatgaaacaaaaaaatcgattttttcaagtgtccgtttggggtactcaaacaattatggggagcaaaaatccaacgcagaattaaagtacaggctatagggaagctattcccgaaggattcggtctccccataaatctgggcgcatcggttcggggggactgccccgaaaacaaaaaaatcgattttttcaagtgtccgtttggggtactcaaacaattatggggagcaaaaatccaacgcagaattaaagtacaggctatagggaagctattcccgaaggattcggtctccccataaatctgggcgcatcggttcggggggactgccccgaaaacaaaaaaatcgattttttcaagtgtccgtttggggtactcaaacaattatggggagcaaaaatccaacgcagaattaaagtacaggctatagggaagctactcccgaaggattcggtctccccataaatctgggcgcatcggttcggggggactgccccgaaaacaaaaaaatcgatttttt

SEQ ID NO: 57418 - DNA, 670 bp, Heterodera glycines
atgttggatttggtttacaaagaaaaaagttatagccaaaaacatgctggcgccgaaacgggagcgccgaaacgcagtggacccggtaagtgaatatcataccatttagcacaaatttaatgctttttggttcaaaaaatttattaaataatatggcatagtgtttattttttaaatttaatttcagtgacgaaaggttcagtgacgaaaagttcggcgctacttgtaaatagtacttttttgaattttatcaaaaacaaaagggggaccctttcgttttgcaaaatttttttgtgataaaaaaccatgaaaatttgttatccggggtcttagaggtcgctgattatgaatctacgcataaactgtacttgagcccttatttcttatccccttttcatttctttcctatcaaaggtatgcgcaccaagcaaaatgtgcgggaaaaagttatcaaatcactccttcatggtgacgggacaccccaaaatacagtgaaaatcgggcaaattttagaagaagaaaaaaaattcccatgggtttttttgaaattaaatagacccattggaaagagcacaaattctctacaggattgccttttgagaatggtggttctatgacttaaacctacaaaacttgcattttctgtggagaatttgtgctcgtttcaata

SEQ ID NO: 57419 - DNA, 140 bp, Heterodera glycines
atggagcgtttcgttcaatggctaaacgagcagctgcagaaacatgacattggcagtggacaaaaaagggactggatggagctggctgcccatgcgcattatgcaatcgtaaggcaaatgactaatttgtatggaatggg

SEQ ID NO: 57420 - DNA, 166 bp, Heterodera glycines
atgatgtaccgtatccgaggaccagtttattatgaagaatttatttttttaaatagtgagctttgttaaaacactttctttgactttaaaagaattccttaaattttcagcccacacaatgcttgactttttataaccttaaaaaattcctttaaagggaaataaa

SEQ ID NO: 57421 - DNA, 522 bp, Heterodera glycines
atgacggttattagttgtgaaatgaagcatataatgacggttattagttgtgaaatgaagcatataatgacggttattagttgtgaaatgaagcatataatgacggttataagttgtatactttttttttctttgcatttaaaaagtgattttttgtgtttaaattatttggtttggttaaagtttttgtccgtataaatccattagagctcgacattttgaaaaaagcctggacctggacctggatttcatgaacaaaaacccagaatatttattattattattattattgtttttaaatatatttaatctttttgataacttgccataaaagtggtactcaaaaaaacaaattcgaaaatattatccaggaaacccagagttggacttgctttttctggataaaaacccaggaaaatccaggcccatgacaaacccagtttgccgaaaaatagcctggacctggaactaagcctaatacaccgcctaagaattgaatttttggaatttttaaaaaataaa

SEQ ID NO: 57422 - DNA, 925 bp, Heterodera glycines
gcgttgtccgctgaatgtttccctgcaaatgttctgatcaccggcggatgcggcttcatcggctccaattttgtgaatttcgcttttgacagatggccccaagcaaagtgtggcccattttattttcctttaatcattttcaaaaataaaggttcgtgaatttggacaaaatggcaccgggcgcctcggaagaacgcatcgaaaagaaatgtcgaaattcggaccgctatttattcgtaaaaggaaatctgacggaagcgacactcgtccgaaacattttaaccagaaaccgggtcagtttcagctgccgatcacaccgaactgatcagagagagagcgcggcacttcactcttttcagatcgacacaattgtccatttcgccgctttgacccacgtggacgaatcgtacgcgaacccaaccgaatacatgcaggaaaatacggtagcgatgaccgtactgctggaagcggcgaaagaccacggacagttggccaaattagtgcacattagcacaggcgcaattacgcaatttgaaatgacaaaaaaacatccattgttttaaaactgcagatgaagtgtatggcgactgtctgaacgccgaagagccgaaaagggagcaaagtccgatggagccgaccaatccgtacgctgtcagcaaagccgcgtgtgaactgctcttgcgcagctattggatttaaccgaccgttcaaaaccacttttgggggatcattgcttccgtttgattaagcattcctacaaagtgccttatgttatggtccgaatgaacaatgtctacgggccaagacagttcaggaacaaattagtgccaaaatttgtccgattggcaatggaaaagcgaccgtttacattggcaggaggcggaacaccaaaaaggtggaatttagaaaattaataatttgaaat

SEQ ID NO: 57423 - DNA, 1005 bp, Heterodera glycines
aatttaattaaattatagaaatgcgaagtgcatgccatgaaaatgcaatttgactgatgccaaattcggaaatgccttaggaaacgagcagtacaatcatcgcctggggcatggcgcacttgctgaacaacccgcagagtttgacgcgagtgtacgacgaattggacaaagtgatgggcgacgaacggcgactgatcaacgcgggggacaaagcgcggctgccttacacaaacgcaacgataaatgtgacggaaatgacaaaaataaataaataaatattacagcaaaaatatttaaaaagggaaaggaagcaaaaataaataattaatttaaaatgaaaaaataaaataattattattttatttgtttaagccaaactgtgccattcccttttaggagtttctgcgcatttccaacatgatcgtgcagaatgcctaccgacgtgtattcgtcgacgtgaccattggcaactttcaaattcccaagggcacttgcattttgccacaaatttcggtggttttggccgatgacgaagtaacagaaagacaaaaatcatttaaaattttaaaaatttaggtatttgataacccgaaaatgttccgacccgaaagatttttggacgaaaatggcaattttgtgacatgcgaaaaactgattccattttcagttggacggcggtaagaaaatttgaaaaattcaatgaataattaaaattacaataattaaaatttaaaaaaatcattaattaattttattgctttgtatggtttggaattttagaaaatgttttgccgaatcaatggccaaaatggaaattttcctgttcactgcaaatattctcaatcagtacagagtgcgtttaacaaccaaagaaaaatattaaaatttaattgcatttattttcagctttcggttggcaaagttttgccctcaatcaaacgcgaaatgggcataacaattcattgtccgaaattcgagtgccgagttgagaaaagaatagggcat

SEQ ID NO: 57424 - DNA, 58 bp, Heterodera glycines; identical to SEQ ID NO: 50987

SEQ ID NO: 57425 - DNA, 1788 bp, Heterodera glycines
atggcatataaaaagagtatatacggtaagcgaatttttacttttttatagtttggaaaattttttcactctaaaattgttttctctctttctgtcagagttatttatcataatttaaaaaaatttccaacccctattacagaattttttctacataaaattgagttatttatgtaaaatgtttggggcattaattttgtacggcaaaaaattggacaaaacagttgactttccaatgggttaatctcttggatatgtatgtgaaaagaagagtcctccgccccggaaaaagaaaaaaattaaagaaatgtcgtgatgccgatggtcggattctgtgtctcattcacgttgtcaatacttgaagttgttaatcttttaaaaatgaggacgctttcgagtaaataaaagcaaaaaattgtttgaaatcgggtttgggattcgaaataggtcgaaatgtatgttcggcacacatccgaccaatttcagtcctaataggcactcacgcgaaaacgtccccaaaacggtcctggcccctataaaaatatatttaaaatgtgtaaattttatttcgaaaaattgaatttgtttaattttcttgaaataattataattttaatcattgtaaattttttacattaaaaattaatttatttacagaaacaaaacataataaaagatataatgatgaagaaagagttcaaataatcgaaaactatgctcaaaccagcaaaataattaacacaaaattcgcaaattattcaaaagaacaacgggcagaaatgatttcgaaaattatcggagttaacattggcacaattacaaaatggaaacgacgcttttcattacaaagttttattttatttaaataattttaatgctatcattttatgggctaaaaaaatattaaatttaaaattttaggaaaacgactaaacgatgtgcaaagagaggaaatcatggccgaatattataaattgaaaaatggagaagaaaaactttcggatgttgcaatagcaaaacaattagatatttcaattaacaatttgaagctattgaaaaagacatgcggtaaaatcaattaaaaaacgagcattaattacagagcattttatctgaagattaaaatatgtttgtggctaggccttggtccaggcttggattttcggaaccggaatttttctgggttttttcctcaaaaaatcaggtccaaatctagcataaaaacaacaccgttgaccagcagcaggcaggcctagggttttcaaaaaatatggattatgttttcatttttagggcatatccaaaatggcactaacaataaaaaggaagaggcaacaaagaaagagaaattaccaaatggtaaaaagaaaaaagaaattataaaaaagaaaaaacaaattaatgacagacaaaacggagaagaattaagcaaaagtagtaatgcatcaacagaagaagaaattccgaagaaaaagaagacacaaaaagaagtcaaaaaagggcaaaaagaaagcaaaagtggagaaaagataattaaaacagagcaaaaagaaaataaaagtggacaaaaagtaatcaaagaggagcaaaaagaaagccaaagtggtgaaaaaataatcaaagagaagcaaaaagaaagccaaagaggtcaaaaaataatcaaagagaagcaaaaagaaagccaaaatgatgaaaagatatttaaagaggagctaaaagaaatcaagacagagccaattgaaattaaacaagaataaatattaattaatttttcaaaatttcaataaa

SEQ ID NO: 57426 - DNA, 1270 bp, Heterodera glycines
atggaaatggaattgaaaatggccaaattggaactcgaaaatgtaagtttttgtttaaaaaatatagtaaaaactattaaaaaacattggccaacatttttttttaatttagaaggaacaaaagttaaagcagcagcaggaactgattggagaacagaacgcattgaaggaaaaattggccaaaattgaacaggaaaagaagaacattggtaaataaataagtaaaggaattagtaaattattttatggaattatttatttgaataatttggtaaaattaataaattaccatttacggacgcaaaatgtttgactgactgatacagtatcacaattgagttgtttgattaatatgatatttagtccatatgaaataaataatttattatattttaagctgttgaggaacaattcacaaaaatgcaaaatgttcagaggattcttttggaaaaaatcagtgaattggagaagcagcaaaaaaaggcaggagaagaaattaaaaataaaaataattttatttaattaaattaattgcctttttaaaattaattttagcaacttcggaccaattctcagaaatgcaaaatgaccggaagattcttttgaaaaaaatcagtcaattgaagaaagaaccgaagcagagaaaggtgaattaatttgtaagggtaaaaacaaaatttttatactattttatttattttaaggcacttttaaatttcaaacaaaattattgggttgccaatgattgtgatgagaaactcgaaatcattggcgacaaaaaactcattgtccattataagggagattataaaggtatttttcataatttacttacaaattaagttatacatatgtatatttctccttaaaaggttggcgttccgtcttcgctcaacatgaaatttggctgggcaataatttttccgacattttttactacgaaatttcaatcgaaaaaatgaatgagtatgcgatttatttattttgttttttattgctattcctttatttttaattttacagttatctcatcagctttggattcgccattatacagcagacagatgaatcgtatcaatcagtgcgacatgaaaaggacacttatgcatatgaaagtaatggctgtgtttggattaacggagaaagaaagggatcaattgccgaatattcctacggtgttggcgataccgtaggaattggtgttaattccatcacgcgacagatctttttcacgaggaatggacttcgtttgggttggcaaataattaaa

SEQ ID NO: 57427 - DNA, 828 bp, Heterodera glycines
atgatcgaaacccagttcaatgcatttctcaacaaagaacagcagcgcgcatttgaatttaaaattaaattgagcggacggacgtgcactttgagtataaatggtgtcaaattgtccaacaatcagtttcggcaacttccagcttgggccacaaattacattcgggtgggtgtgtatgtacagctgttggccaattccaattagatgttttcggaagccaaaaaaaattccgaaatttaagcatccaaattagggtggcaacaacccttgcgcggagggggagggggaaggagacagacggcattctcgaaattttgcccacgtaaacaaagttttacccttttttgccgacccaggtcggttacgaaaaactggtggcactggcgaaattttcaaataaaattttcaccgcttttttccgaatattttttgaaaaaatcgctctaaaatttgaaattattctttcttcgaattttttttttcttggcggtgtttcgggcattttggggttcatcgttatattcattccttattaatttacaatttatttagctcgagggaaatgtgtcaacattggattaccttgaatattattataaagatgaggcacgctataaaactgataagaaaataaattctgttttaaattgttattttaaaacaattaattaataatggctattaaatataattttttttttaaattttaaacatacttaaacatttagctgaaaggcggatggaaacggcacgagaagaaggccaagattgatcctaatgcggtaaaaataatatacaaagcaatgtaaaaaaaaaaaaatgtcaaaa

SEQ ID NO: 57428 - DNA, 733 bp, Heterodera glycines
atgagaaaacacgaaattcagcttttcaagtatataggttatatgcccttgataaatattttttgtgtgcaggaatgattttataattaattattgtcagaatcacataaataaaatggtcaatgaacgacgaattctgtatcaaaaagccaattatttttacaaaattgataaatatgatgaggcggcaaggacgataaatttggtaatttaataaattaaaattttaatcaagaatttgtttgtaaatttaataaacccttatatattatttgccaatttttaattttttttgttatgcttttttcataaatttgaatttaattcgctctttattatcaaaatttattaaaaaaataaaataacaaaagtatgtttaaaattaataaaacaatttaaatagatataaatttctgaataattattttcattattttcagtccattgtccaatcaggtacaaaaaatgaggaaataaataaaatggaggctgacctttttgcaaatgccaacaaaaaagatgtcaagcaacgattggagtttataaagagacttgaagttcttcgcagtcttgaaagattggatgaagaaaaagaaacggtctttaatcaatgtttaaaaaagaataaattgcttattaattatataaatatattttttatatgatttaggcattaaatgaatgcctttggaacctgcaagacgacttattgaagacatgccgtgacgtatgg

SEQ ID NO: 57429 - DNA, 446 bp, Heterodera glycines
  unsure (1)..(446): unsure at all n locations
atggaaattgatcatttgttggttggtgcccacccttnttctgaatgccaatgttttgttcttcgccctcaaaaacactgaaagtgatccctacacaattcttgtccaatcgtcctttggtgacaatgtgaaatgcgtttacgactacaaaaattcatccgcttatgtaaatatattattgtattaaacattgaaaatttaatttattttaatttattatttttgttttagtttttgttttattggccccgattaatttttacttttgttttgccggttacaattattctgattgccaacctggcaattgccttcaaagttcgctctctgaacatcattcaaggtcagtgtgagcaaattgaaacactttgaaactttcaatcaattaatccttattaattaagatttatttttattcactaattgttaatagatgaattaataaa

SEQ ID NO: 57430 - DNA, 849 bp, Heterodera glycines
atgaccaattctggtggtaattacacgccgccggcgcagacacagccaaattactcatgtcaggtgagagaaagagagaacatgagacacgaactgatcagaacattcatctgatcaattgttacatcccagcaaagaaacaaaaaaaagttgagcatttgctcggcaattttttttttatcattaaaattgttcaactgttcacaccgaatccaattaattcgggtctgatcaaattggtcagaacaagcgatctttcacttctatttttggcctcctctgatctgtccattttatcgctctttttaatctgatcagtccatttaacatttgcataataaacttaattcttccagcaccaatcgccctatttggcacactctcagcgcctttccgcccatccgtcgcccgccccttccgtccgccccctctcccaaacgccgtcttccgtccattcgatgaacaacgccaccatccaacaacaacagcagcaacaaacgcaattcaaccaaacagcaacacattcttatgagcaacaccagcgatttttggccgaccaaaggcaaaggttggccaagaaaaccaaacggaggaaaggaggggagaggagggcattctgtgccatttttagcaatttcgaacaagtgaccaatcaaaaacacggattccattgacttttgatttggcatttacatattaatttgtctcttcagaatgctcgacttccaacaacagcagcaattcgtcgcttcccatcagtccgtctccgtttcgacctttcagcagagaaagccccgtgaaatgcattcgattactttccacaaaggctcccatggacttggcatccgc

SEQ ID NO: 57431 - DNA, 324 bp, Heterodera glycines
atgacttatgttttttggtgattaagacgtaatacacggggaatattgtaaatttgcacaaaaatatagttcaagattataaaatttatttcataaagaaggtatagataattttaaattatagtttttatattatccttgcaataaatttatacattttccgtctagtgaatcgtgatcagatagctaaactatggagttattctcaaactaaaatcgaaaattttaatcaaacaatctaatattttgagaataattccagaatttttcagtctgattccgagtcactagaagcataatatatataacaatttgaaggataaa

SEQ ID NO: 57432 - DNA, 131 bp, Heterodera glycines
aattgtatgtttattttatccttcaaattgttatatatattatgcttctagtgactcggaatcagactgaaaaattctggaattattctcaagatattagattgtttgattaaaattttcgattttagttt

SEQ ID NO: 57433 - DNA, 131 bp, Heterodera glycines
aattgtatgtttattttatccttcaaattgttatatatattatgcttctagtgactcggaatcagactgaaaaattctggaattattctcaaaatattagattgtttgattaaaattttcgattttagttt

SEQ ID NO: 57434 - DNA, 886 bp, Heterodera glycines
  unsure (1)..(886): unsure at all n locations
atgctgatgaatggattngagacgggtaaattttatttttttaaaagttattaattgggcataattcccttaattgaggcttattgtccattaacggcgcagttttctgcacttatcctgacttgatttacacatccggatcagttggtttatgtaagaatttttggttaaatttcgatttttaaaaaattaaattcttttttagccctttggtacgcaggtatttaaaaatttaaataataatttttatttcgaaacttattttttgaaaccggagctgaacttttgctggctatcaaccgttgtctggagcttcttgctccaaaataaaaaactttattttaatttttatgaaatatataaacttttggcgaaaatccgtatttttctttcattttaggttttttaattcaacaaatcacacaaaaaatgcaaattgaaaactaaaaatattttgttcaaatgtgtgtcccagagaattcccaatttttatgcatttttgacgacttttttgattaaaaaaaaattattagaataatttagtggtccttataatgaattatttataattattttaatatttttcaaagcttaactttccgtttcaaaacaaaaatgaattaattatcttaattacctaattaattacccattttgaggcaatcgcacttggttgctgtgcattgtgccgaccgtttatgccattattttgtcattgtatacgacgcccattctgttctctgggctgtacatgtcgtggttcttcaacccatacgtcggttacgtggacgattttggcaaaattgtaaagattttcaacatattttccatttatcataccgtatcactttcgcaattacagtaccacagcccaatgcacacgtag

SEQ ID NO: 57435 - DNA, 707 bp, Heterodera glycines
atgttcgtcatcttcggcttgtccgccatttacataacattttccgttttgcttatcatccagacacaatcctacaacaatgtacattaccaggccactctcgcccaaaaattggtcgaatttacgatttaaaaaatatgacaggcatttttagatgcttaaaatcccaaaaaattcaaaatatgcaaaaaccaaaaataccaaactaatattttagaaaatcattaaaactgtttttccacgcaattttcaaataaatttttcatcgattgcattttttaaatattttttaatttcttctaaaattttatagactttcctccaagttgtgctgatcagcttcttcaacggaatggctgctggcatttacatttacatgcagtcagtgcgtatcagcgatgcactgatcatcgccggaacatacgcatggcttttggcacacggtactcaaatggcagcttttcatttcttaaattaatattcaaaatgaaattaattaaataattttaagttaaaggaaggatacaatttttaaaaagaataatttttcctgaaggaatttctattacttcaaaataatttttttgccactatatttcccggttcgtgccaatagctctcactgagaccgaaaatcaaagaataggattagactagtcaaaattagcatatgagtagtgaaatttttttggtctaatttggactaa

SEQ ID NO: 57436 - DNA, 600 bp, Heterodera glycines
atggcattcgttcgctccttccgacggtacaacgattattatcgcattggcatggaccaactgatcggatgggttttggtgtcggaggattcatttgtccgaagggtcgtcctccaagaaaacctcgctgctcaagtaataagttcttaattagtttactaacttttcacatttctattacctcttgcttcagatgtccatcatcttcaaacatgactgtgtgcgtggcttcaattgggtggccgtctcggtgaacgaacgtcgtcaggaagggacggaatgttacagaaaggcgtgacttttcattgatttttcatagaatttcaaattcgtaaatgttgtaacaattttatttgttagcacagatcgatttcgacaattcttaattacaataatttatcttttcgacaattttatttgtttcagcttgagcttttgccccgttttatggacgacaatgcttcaatgcattacaactcccgcgaaaagcaattcgccacacgttaccaattgcaaaatccgctgccttcaatatttgtcgcggaatacggagattgtccgacaatgaaaaaagtagcaaaattgggcaatgtgcactaa

SEQ ID NO: 57437 - DNA, 594 bp, Heterodera glycines
atgagacgccggctgcagaagcgcttcaaatattatgagaagaagcaaaagttggaagagacggcggcacggaaaaaagcgacggcagcagagaaaagagcaagggaaacggaagaggagaagccggacgagacgaaaaaggttggaaaagagagaggaaagggagagtgtgggagagaaaaagaggaaatgggagggaaaaaggaagagggaaaggaaaagaaaaagagtaaatgggaaaaagggagaaaaaacggctaggaaaatgtgagggagggaaacgaaaaactagagggaaaacgaaaaagagagaggaaagggagagaaaaagaggaaatgccagggaaaaaggaagagggaaaggaaaagaaaaagagtaaatgggaaaaagggagaaaaaacggctaggaaaatgtgagggagggaaacgaaaaagagagaggaaaacgaaaaagagagaggaaagggagagaaaaagaggaaatgtcagggaaaaaggaagagggaaaggaaaagaaaaggaggtgaagggaggagatggaaagaagagaaagtaatgggaaataatttggactccaaaaaggagaaaaggaa

SEQ ID NO: 57438 - DNA, 290 bp, Heterodera glycines
gcgcggaaatcctcaaaaattcttcaaattgccaaaagcgtcgcaattccccgccaaaccctctccgagtcgacgtcatcgaaggccaattgccaaagttgttctctgctgcacaacatgcgcatcttcaggtactgctccacaaggcgcggatcagcgacggtttcgcattggcgctgaacaaaaggaaatgtgcgaatggattggcaaggaaaagaagtgaatgttgtttgatgcggttattaatttcatttaatttttagctttttgggactgaaaaacggccgatt

SEQ ID NO: 57439 - DNA, 2109 bp, Heterodera glycines
atgtcatcagacaaccaaaatgaagcagaggcgaagatggcaaacgcgatgtaaaattaaatgccaatttcaatttttaattttgttttcccttttttcagctttatctccgccgattgttggctttgtgtcttcgatttgcttgcgccttctcaacttggcctcggaattgcgctgatcagccaccgttttgacttttacgtcgacgaacatttcaaaacgcgaaaatggacattggcatttattcgaatttggcacaaaattggagaaaatggcacaaagaaaatggaaattgtcaattttaaatggaaagcattgccaattccgcaaattcaaatgtcacgaaaagtcatcggattcaaacggatctacatccagtaaaattgacactaataattagaatttaggcaatatttccattttcacagatacatcgaccaaaatgtcatcgcttttctccaccgttttcgccaacttttcgccgcctgtcaaatcaatttgaacatccaaacggacaatgatcgcatttcggagttcattttgcgcaacatttggccaatgctcgggaaaaacattcatggcattgaaacgtccgcctcatttttccatcttttgcgacaaatggcgccatcaattcttagcgactgtccatcacttcgttttgtcattttttatgctggtgatttgttcgccgaatttccgcccgatgacagtgccgcggcatcggatggacaatctgtggccaaatggcttttcactccacgtccagacgatgtgccaaaagtgttcaaatgctggttgttccccaaaaacttacatttatgcaacaaaactagagctgacaaatgagcgggaccgggacctgaacacggacaactgagtaccaaagtcccgggtttttcccggttttcccagccaacaattcccgggttttcaacccgaaaaggtcccgggtttgcccaaaattcccggtcccgctcaactaaacaaaaccaatataaatgcactacttccctgagtttgtttggcgccaatgctttggtgatcgcaaaaatgttataattttttggtggcatgcataaaaatgaattttgaaaaattgggtattttcgattttccggggttcggaatcatcggatgtcagattcgtgcaacggcgtcgaaaacttttaaaaattgttttattatttttcaaaattccacaaaaaaaaatcagaaaagtacggtattattttgatggacagttgtgatcggcggcaatattttagcctccatttttttcatcaaaaattcgtataaaagacagtgaaaaaaggcaatgaccgtcatttttttgtacaaatattttggccaccattcatactgcggtggccatgcaaatgctttttaatgcccttttggaagccatggtttaaaaaggaatctccggactccataatttgtatttcatttttactaagctattttcaaatccgtcgaaaactatctttaaaatcttgccaccaacaaaatgtcagaccgccgaaaagaagcggaggaaaaaatggaaaaagcaatgtaaaattaaaatttaaaatgccaattttcaatttttaattttgtttccctttttcttcagtttcatctctgccgactgttggctttcggtgttcgatttgctctctccgcgtaaacttggccttggcattgcgatgatcagtcaccgatttgacttttacgtcgatgaacacttcaaaacgcgcaaatgggctctgaaatttattgaaattcgaagcaaaattggaaagaatggcaccaaggaaatggaaattgtcaattacgataaagaaacattgccaattccgcaaattcaaatgccacgcaaagtcatcggattcaaatggatcaacatctagtaaaattggccaatgtcaaaattttttgccaacagttcccatccatttttacagttacatcgaccgaaatgtcatcgcttttctccatcgttttcgtcaacttttcgccgcttgcccaattaatttggacatcgatatgaggagtgatcgcatttcggagttcattttgcacaacatttggccattgctcggaaaaaacattcttgtcttgtaa

SEQ ID NO: 57440 - DNA, 851 bp, Heterodera glycines
atgttcaactgctggttgactttggatgacgggaatttggcgtcgagaattgaacacttcaaagcggtgcttattatttatttagtactcattctgtggttgtcatttactacttaaccaatttttccacattttaggcatttgccaatgcttcatctcctgccaatttcattgccatcatttcgtttccgttgccttttgctgattccgttgtgccatttgcgctgaccaacgaattgactcgcgaacaattggcattgaaagtgattgacaatagccatcgttttctgtttgtccgttgtccaattgcgcgagacgaaagcaaatggaccaaatgggaagaagaagcgatttattggcgaatttgtgatcagtggaaccaaacagaaattcgaatttgcgacgggtaagcgaatgcttgatcacaaattcaaattttttttgttttttctttttttagctttctcgacgaaattcccggcccaattgatcagcaacagaagtgaatgaatgaatgatttgttgagaagtgatcgatcaatttgaattgagaaattggagaatgaatttgagactattttgacgtgctcataaaaatgatcttttttttgttgggaagagatcagtagggccgcgacttttagtgacgaaaaatatcaaaaaagttaactaaaatagtgagtaaaaatgccaaaatagtgactaaataatgacaaaaggccgaaatagtgacataattttcagcaaaaataatttttattcactgattgcagttgcaaatgaggtacatttcttttctaatattttcttagtaaatattgacaatttttaaatcaaaattttgccaagaa

SEQ ID NO: 57441 - DNA, 1549 bp, Heterodera glycines
  unsure (1)..(1549): unsure at all n locations
ttccgttcgcccattcgcgacaatcaaaatgcctttttcctcactttcatggctttgcttattttccgttcgtcccctccctcaaatttgcccattttgctcccatttccttcagttatgcagtgcggcttcgcctttctcgaggcgggcgcagtgcgtgccaaaaatgtgacgaatattttgacgaaagtgcgcactttgccaaaataaaaattaaaattcggcatttcccacttaatttggcccaaagaatgtgctcgactctctgatcaccatcgtctcctattggtctctcggctgggctttggcctacggtgccaaccccgtgaccattctcagccctttctttggcgcttcgcaattctttggccaacaaatctccgactttggccgtttcttcttccaatacgttttcgctgctcgcgcctccacaattatttctggcgctgttgctgagcgtgccgaattcactacctttttcgtgtattcactgctcgtcccaggtgacactttcttttgctaattaatgactaattntcgttccattttgccccccccccctcccccaggctttgctttccccgtccttgcccattggggttggtcttcggttggatggcttcacaaaggaataaccgttggtgaacacaattcattccatacaacttatctggtgatcccatagtaaaccaaccaaaatggcactttcccttaggacctcgccggtgccggcgttgtgcacctttgcggcggcacaatttcgctgatcgccgcttggatgatgggaccgcgaatcggacgcttttcgagtgagggacaaccatgcaaaatggaaggacattcagtaccggtgagcaaagagtgcaaattgacggaaaatgagtgccatggcattgccaatgccaatccaatggttcagttggcttcactcggcggcttcattctgatgctcggctttttggccttcaacggcggttcggtggcggacatttctctgccgggaaatggcctattggtggccaaggcgatgatcaacacgctgctttgtggtgcatttgccgcaatttgcactttgattatccacaaaattcgcaatgggaaatggacagttttgctgacgatgaacgcgtgtttggcggggatggtgggccgggggggggggaaagcatcgaataaatgccaaagccattggtcgaatgaatggcatccaaatgacccggcacttacggtcagaactgacacgaggaaacattgttcagattgccgcatgtgcaggatgcaatcagatggacgcgtggggcacaattgtgacgggggtcggcgccgggcttatttacatggcactttcaggacttatgctaaggcaagtaaatgcaaaaacatcaaaataatgactttttatatctctttgctccgtctctctctctctctctctctctcttttctccctctctctttccctttctctcattatctctcttttttctcttgcttttctctctctcatttttacactttgtctcttttttcattcattgtccgctcagat

SEQ ID NO: 57442 - DNA, 1557 bp, Heterodera glycines
  unsure (1)..(1557): unsure at all n locations
atgcaccaacaaaaacaaagacagaagaaggagaagaaaaagaagcaacaacaacaaaatgtaaaaataataacaacagcagcagcgatgcatttgacgacagctcatttcactgcccgtacattttgacgatggatttcaaatcgctcggttcgtttcagaagaatgccacacaatttttttttttcaaatttgttatgtgtacccttttttcttacaattatttagatccgtcgttggcacttgggtttttgacacgcgacttggcggagtacgaggacctagtgcatcggcttaaggtaatgccgccgccgtcccaattgttaagaaagagggaattggtttcgaacatacatgtgcaaggggtgtctcagcccaagggccatacgacggacgattgggactgggggggggtgtctcgggaccgatttttcatacgaaggtggtccattttttctccggcgattaccttttttcgttgcttaactactttttttttgcggcgcgttttttccaaaaaactttgaaaggggggtggggccggcggtgccgataggcgccgccgggaaattttttgaattttttttatgaaaattgatcaaattttaaatttttcccccgtcgtcgacgacttccccgttcccacgacggccccctccctcttttacagccgcccccttacgacgaacgaagagggggggggggggtgtcgagacaccccttgcacatgtnatggtttcgaatatgcgaatatgactaattctttgtgctggtaccgtgctttgtcggaaattctgtagcccccatttaaagaaatggaatgggcattttcggggtcgccttgatcacgaatctgacaccgaccgattcccaaccttggcccgaattcaaaccaaaaattgaaaaaaaaaaatttttttttcaattaattaggtaatttaaatttctttgagggatcaatttgtggtgccatttctcaaaaaatgcgatttgcaaatttacatcatcctttccttttaagacggtcgttctgccaagctcatccccgccactgttcgagattctcgactcccgtcctaagggttggcctaaattcacaccgtttgagagcgcattttttctcgacaattcactcgacataaaaggtagtttttgctcaagagcatagccaagggaagggctgccaatgagggggctatagcctccaaaaatgaaatttttagtgaaaaatataaatatttttataccgggttttcctatgaaattttaataaaattcccaaaattttcaaaatttgacaccagaaatcgccttttttcgtgaaaaatcagccagaaatccaaaaatgccccttcgtttttttttatttttgaaattttctaattttcaaaaaaaaactagaaagttttttcaagtctggctacacccttggttttactcatttgttttttcgctacatttaaacaaacaaataaaattctgtttagattttaactttttcagactatgacttcaattgtgacagcgatgaaaactttgaaatactcgaatgaatga

SEQ ID NO: 57443 - DNA, 368 bp, Heterodera glycines
cggagtaggacaaaacgtcgtcgaacgaatttttcgaccataacttttttctttctcaaccaaattaaacattcttggtattattcgaaagcattcgaaaaatgctattatcctgcaaattttcaaaaatttttatttatgcacaaaaaaatcagagcaaaaaaagttcgaattactgggtttttgagttccttctggccataacttttttgaaacttaacgaaaatttttgagattttgcaaattaataataaacacatagagctatcgaacaacaccaacaattcttaatttgattgacagtgaacaaagttatggttcaaaaagtcttccgacgacgtttcggccgacgacgttttggggtgcac

SEQ ID NO: 57444 - DNA, 364 bp, Heterodera glycines
atgacgattggcatggtgggaagcgtggcaatgagcccacgggcagccgaagtgcaccggcaaatgctgcaaaagttggggatggacgcgtcgaatgtgccgccgaatcgggcagtaaatacaatggcacggggacttttcaatggatggtaagggaataaataaagaaaattcaatggaaaaataaaagataattaattacaggctcagatttggtgacgcggatgctttggtcgttttcatcgtttcccccgaggacaaattccgattcgatgagcgcgcaattgaaaacgaacttcagcagatttccgatggacaaattgaagttgagcgaatgacgtcagaagaggccttttgtcagtga

SEQ ID NO: 57445 - DNA, 329 bp, Heterodera glycines
atgacttatgttttttggtgattaagacgtaatacacggggaatattgtaaatttgcacaaaaatatagttcaagattataaaatttatttcataaagaaggtatagataattttaaattatagcttttatattatccttgcaataaatttatacattttccgtctagtgaatcgtgatcagatagctaaactatggagttattctcaaactaaaatcgaaaattttaatcaaacaatctaatatcttgagaataattccagaatttttcagtctgattccgagtcactagaagcataatatatataacaatttgaaggataaaataaa

SEQ ID NO: 57446 - DNA, 131 bp, Heterodera glycines; identical to SEQ ID NO: 57432

SEQ ID NO: 57447 - DNA, 578 bp, Heterodera glycines
atggagcactctgtgaaaaatgtgagaaattactaaaacataggcaaaaaaatatctatattatttcaacaaagtttagacaatttcgaatcaatttgttgagttatcccacaaattgctttctatattagtcactctgatccatcggaaagacaaacgcaatttggggcggttcttaaaaataaaagattgaaaaatcactcaagaattatagtaaatttttaaatggtttcaaatatttttttacttaacgcattgtttttattttttgtttaattaatcgtacttctctgagaacaaatagggaaatgtcctaaaattctgataaatatttagatttttatttttgaaaattttacctcgtgtttttaaattgtatgtttattttatccttcaaattgttaaatatattatgcttctagtgactcggaatcagaaataaaaattctggaattattctaaagatattagattgtttgattaaaattatccgattttagtttcagaataactccataatttggctatctgatcacgattcactagacgaaaagtgtataaatttattgcaaggataa

SEQ ID NO: 57448 - DNA, 1648 bp, Heterodera glycines
  unsure (1)..(1648): unsure at all n locations
tttgcgcatccaagtgaacccggaaaacaaggtcgaattccccaacatttctcccgagagggcctttgccgatttcatcttcgcccatgtaattctccatttggtggtcgtcaactttatcggataaaccaatgtgaaaggatgggaatataaaagtcattctaaatttaactgaccgtttattcgtttttctgttaatttattttcgtttaataatgttttgcataaatgggtttcgttggctcttttcttctctgtttttctgttttctttcagtttattttttacccatttctctgcataattctatttttattttatttttttgccatgtgtttgtcacttatttattcattttttcgctcagtttggcgctttttctgcactttaatcaaccgaattttcgccaaccaaaaattggaagacattgtgagttggacaaactttcattttttgaccatactaattttaagttgactgaaaagaagccttccaaggcatctcgcaatcagaaaattgaacaaattctgcgcacttatccgaacgaactcgtccaatcgtttagttgggacaccggtgggtgcattagcaaagggacaggggtttgctcaggcaagtgtacgaggagttgtatcccatcctccaaatgagacaaaccaagaaaaattggatngaagactttcacagcgggtgccccgcaaccacaaatcttaanngcagcaatggaatgaaaggcaaataatattacaacagacaaaggcactccctttttagtgtctattgaacgtgttcatttgttcaggggatgaaactgaggcggcggaggccattttggaggaatcggtcgccgaggacgacaaacgttgggactatcgaagacattggcccattccttgccgcagatcaaaggctatcaaaagctttgtgtgaaggtggaggagcgacggctggagagttactgcgccaactgttcggaacacgagtgggagctgctgagactgtggaagttgctgaagccggaagaggcgctggagggccgaataacggaccaatggcaacagatcggcttccagggggacgacccggcggtaaaagcgcaattccctcactttaaatggtcttcaaaatccattatttatgaaaaccctcgtttttggttcaattttgggacattgccttcaaaatttgaaaattttaatccataaaattcctttttgaggacgatttatacatataattccgaaatgctttatttatttgtgttgttgagaaagacggacttccgtggcatgggtatgctcggccttgaccaattggtattcttcgcccagttcgatttggacaattgtcagcgcgtcctttcgttgtccaaccacccgatcattgggttggttgttcggctgttactcaagtaatgaaaataaattcaaattttaattaatagatttccatttgcaatttgtggcattaccatcacagcgttgtgcaaggtgaaagaagaagaaaaagcaaatattatgagttaaaacatatgtgataaataagcttttacttaggaattacttttcgacgatttgctcaaaaaccatttttacaatgccttggaccaaccgtccctaagtgaggaccatttccatcaagtctactg

SEQ ID NO: 57449 - DNA, 1116 bp, Heterodera glycines
atgaacgccctgtccgcagttttcccagccacaaacatcctttgctgcatgttccactacggacaaaacctctaccgcaaaatgaaggggctcaaactggtgcaaatgtatggggaacagtctgtgcgtggtgaagcggtccgacactcattcaggtaacaattctaaaaattgacccaacatcccaaatttttcagaaatgtcctatctttgccattgttgccaccaacttacgtcagacgagcattcagcgtcattgccggcacagcccctatggagatggcgcagtttcttctttactttgcgaggaactacatcggaatgacgcagcgccagctgcttgacggcgccaacgcgttcggagttcgtcctggtggcatttctccacgtttttcgtgttttttttacatttactctttttattttcttttatttgcatttaagcattcgcggggacatcattttcttctgttgaatccgaccacacatactcacggcagcccttgaaatttggctttgactcgcccgccccctcaacactatcatgccttcaacagtggagcaaaactcgccgttggtgcagtactcattgagtccatcgtcaacgactacatttcagccaggcacaccaaaacacaaaattattcatgtcaaaacattttaagcccgtccttgggaagaacccgtagtccgtcgcgcactatttccaattccattttggaacgtgcactctcatgcggcttccgccctcgcaaggaccaacaacggactcgaagcaacacaccttcatttctctgtatttattacttataaaacccccaatttaaataattttagaagggtctttgtcatcacccagccctttccgatttcatttctgaagtcagcggaagcatcgacagacaagttgacgcagcgaggtcagctcggaacttcatacacaaacgctacgtgctgcaggacgcagtcatcatgagaattttggcggatgcaacatacaacgacgatgccgaaattcacgatgttatgacggctcttggtctgcaggtcgaaggatatgcaggaaaattgaaggactacgaaaacacggaagattcaatcatgaatttcgcttag

SEQ ID NO: 57450 - DNA, 1844 bp, Heterodera glycines
atgggctttggtggacaattcggtgttcaatcggaccgacaggacaaatcggcggccggttgggacgagagggaaaaggcagcaaagcatgagagtcagactggtaatagcaattctctgattgttctttctaattgcttaaaccttccatttcagattacaaaaaaggatttggcggacaattcggcgtccaatcggacagaaaagataaatcggcgctcggatggaacgaagttgagaaggtgaagccacacgaaagccaaacaggtgcaggaaacatcaatgttttactcaaaccattaatttaaattaagactacaaaaagggctttggagggcaatttggggtccaatcggacagacaggacaaatcggcactcggatgggaagaacgagaaaagctacagtcacatgagagtcagacaggtcgaagagaggcatttgtttgtttggtgtgcaattttaaattttagattacaaaaaaggatttggcggacaattcggcatccaatcggaccgaaaagacaaaacggcgcacggatgggaagagcacgaaaaggtggaaaagcatgaaagtcaaacgggtaagtgcttgattgtcgtctcatatgttgttcaatttcaaaaatagacttttctcccgttcattgacagattataaaaagggatttggcggacagttcggagttcaatcagacagacaggacaaagcagcgcacggatggaacgaaaaagcgagggaagaaggagacggagcagccaaaacggcagcagagacgcagaaaaatggggcacaaaggcagcaaaagtccgatgggccgacccacggggcggccaaaagtctgcgcagaaaattcgaacagatggcctcgcaaggggagcaacaggtgacaacaatgggacaatattgtgaaaacaatcaaataattgacagaatttggaccgagttcgtgaggagagagagcgccgaaagcgcgaggatgagcaattgcgagaacgacgaggggaggaggaacgccaacgacagcagagattggaggagcaatgggcgaagcaaagcgaagagggagaaaaaggcgaagagcaacagcagaaagtacaacaacagccgaaacaacggccgaccatcggtcggacagcgaatggggggggggggaattgtgcctaacaatataaatattgaccagaaacatacattccccaatcacacgcatattttgaacaatttcgataattgttttactgttgaaatgtattttactaattctcatcaacttgaaggtgttcgtttgccatacgctgctgccccagtcccagaacaacaacagcagagaaatagtcgcctcgtcgaagaaaattcggccgaaattgcgtcggaacattcggttgccgagactgaagtggaagaaccacaacctccgccggtgaaggtccgtttactggttccactcacaatcaacgcactcaacgaaaaatttatcatttaattcaaaaaatgactgtttaaatgttttactcaatttgaaaagatttttaaaggttttgccatctgtcgctgacattgcgcagcacaaaatgtttatgggcgctgtttctcacgacgaattgaaaaagcacgcgaatttggacaccaaaggcgaggaagagaaactgagagacagcggagaatgggcggatgagccgaagaattcgatgccaaaagaaacggacgaagagcaaaaggaaagggcacagcaacaacaggtggggagggaaaagcaaagagaaaacagcaaaaataaggaaccaaagataaaaccaaagctgtacttaaatggcagatgataacggagtaaagggaaaaaa

SEQ ID NO: 57451 - DNA, 1380 bp, Heterodera glycines
atgtttatgggcgctgtttctcacgacgaattgaaaaagcacgcgaatttggacaccaaaggcgaggaagagaaactgagagacagcggagaatgggcggatgagccgaagaattcgatgccaaaagaaacggacgaagagcaaaaggaaagggcacagcaacaacaggtggggagggaaaagcaaagagaaaacagcaaaaataaggaaccaaagataaaaccaaagctgtacttaaatggcagatgataacggagtaaagggaaaaaatttcaaagtttgaaaaattctaacaataagttttgattttttttaaattttcgaggcgaaatttgtcttgttcccaatggtgttcccccatttaaacaagtatcaccaaaaaaaaaaaaacaaagaagcataaaaggaaaaaaaggtcgtctaccgggaaaggagggatttgaaatgatccaccgaatgaaaaattcattgccgaatgactctttgctaatgcgtatgcctcaaattagcttaattagttttaaactgggaattggaatttgtttcaaccgtttatccatcctaatcatggccaccttcctacagcatcaccagtacgaattgcctccgattgtctacgacgaattgccagatgttgtcacctcttctgctattactcctgctgatgctgcactttccaaccactcggaaaatgatcagaatgtgccgccccccgccgacccgacgccggcggtgaaggaggaaccatcggcgggggaaagcaccgccgcccctttggacacttcggcgggagcaactgcaatcgcactgtttgagtacgagcgacaggacgacgacgaaatcggattcgaagtgaacgacataatcaccgacattgaacaggtaataacattttaattgatgaatttgagtcacaaatagtccgagagtacaagagtggtccaatgactttttccctcgtgccattaaattttccaaaatttgccgtccgttttcagatcgatgttggctggtggcgtggcgtgtgcaaaggtcgctacgggctgttcccggccaattacgtgcagctgaccgagcgaaagtgaagcgaacggaaaaggcaaaagcttgtgcaaaaagacgactaacggaggatatgctttgatgtttaaatcttcgcactttcgcaaattcaccctttttgagtgaatgtttccattttttttatcaaatcagtcacgtaattaattaatgggttataaatggaaatattttttcccctcccttcccatatcagttcagataatgcctttttttattctaattgtccagctttgacaggtgcttatttttcctttttctcctttcgacttacccaaaatatttttttcatattaaata

SEQ ID NO: 57452 - DNA, 396 bp, Heterodera glycines
atgatcagacagggatggtcagttggccaaacggatgcaaatttaaacgaagacattcaaattacagcgcaccgatcgagacgatacatttgctgagagagttcggactccgatcaacggacgaaattcagagggaacggctgatcgaagcgggcaaagggctgaaaatgttggaaattgaggcccgtgaaatagcacgggaagatgagagtgtggaaagggaggaggagggaaaagacgcaagggaagaggagagagtggcagagaaagagagagacattggaagaaaagaaggaaagagggaagagagtgctgcaaaggaggagaaagacgctggcagaaaacagcaacaaaaagccaattgaggctaattacagtgaacttttttatgtgtaa

SEQ ID NO: 57453 - DNA, 613 bp, Heterodera glycines
gtactgtgaccaaactgtgcccgatgagtttctccacctcatttaccccggccccgtcactttgctgttcaatcgcaccgatgccgtcccgtccgacttcaaccccggctgcagcaccgtcggcgtccgtgtgccgcaggcgaagttcgtgcgcgacttgtgccgtcgcatgcccttccgactgctcgcgcagacgagcgccaacgtcagcggaggaccgaatccattgtgcatccgagtgggtgtggtgaggggaaatcactttgaacaacgaatgcacttcattacggtttcccgaaaacttaaaaatttaataagtccaaaaattccaaaattccaaagaatatggaaaaacaggaaaaaattaaaactattcccaaaaaacctataaaaatttagtaaatttttcaaaattgatatttaatgttttcgggcgggaatgagctaaccattaagcaaaactcgcggctctattttcggatcatgcttttgcttgcaaaatttttttcaggattttgaagagatttgggacgacatcgatttgatcgttgacgcgggcgaaatcatcgaaaacaatggggcggacgagggaagcacaggtggacggacataa

SEQ ID NO: 57454 - DNA, 128 bp, Heterodera glycines
atgaaccaattcccgtggggccttcgcatgaccaaatacgaggagcagctgggcgctgatctgatcgagcacggcctggccggacacaacatcgccaaatattccatcgagaagaagctgaacgtgag

SEQ ID NO: 57455 - DNA, 66 bp, Heterodera glycines; identical to SEQ ID NO: 53774

SEQ ID NO: 57456 - DNA, 162 bp, Heterodera glycines
  unsure (1)..(162): unsure at all n locations
gatctcacttgaatatttgctactaccaccaagatctgcactggtggaagctccggccgngcccacgcccaaagccttcaacgcaaccaccacgaccctcctacacgtcatgggcagactacgcgacaagcacgtgtacaagccaatggacgtggagtatag

SEQ ID NO: 57457 - DNA, 828 bp, Heterodera glycines
taattaaatccattccttcgggggaccgtgccgggtgccgcggggtaagcagtgctggttcgtttcatcacggcaccgaaccttttggctagtcagcaatcgttgcttaacttgccagatcggacgggtgcgcatgattccactgttccaagcaccccaccaaaagcaaaacgatataaccaaaatataaggaaaaattttttaaaacattttttctccatcttcctttttgatactaaagcatcagagtgctaaaattaagttgtaaataaaatttggtgcgctttagagcactttctgaaaaaaatatttatgaaacaaaaaaatcgattttttcaagtgtccgtttggggtactcaaacaattatggggagcaaaaatccaacgcagaattaaagtacaggctatagggaagctattcccgaaggattcggtctccccataaatctgggcgcatcggttcggggggactgccccgaaaacaaaaaaatcgattttttcaagtgtccgtttggggtactcaaacaattatggggagcaaaaatccaacgcagaattaaagtacaggctatagggaagctattccggaaggattcggtctccccataaatctgggcgcatcggttcggggggactgccccgaaaacaaaaaaatcgattttttcaagtgtccgtttggggtactcaaacaattatggggagcaaaaatccaacgcagaattaaagtacaggctatagggaagctattcccgaaggattcggtctccccataaatctgggcgcatcggttcggggggactgccccgaaaacaaaaaaatcgatttttt

SEQ ID NO: 57458 - DNA, 703 bp, Heterodera glycines
aatttggtgcgctttagagcactttctgaaaaaaatatttatgaaacaaaaaaatcgattttttcaagtgtccgtttggggtactcaaacatttatggggagcaaaaatccaacgcagaattaaagtacaggctatagggaagctattcccgaaggattcggtctccccataaatctgggcgcatcggttcggggggactgccccgaaaacaaaaaaatcgattttttcaagtgtccgtttggggtactcaaacaattatggggagcaaaaatccaacgcagaattaaagtacaggctatagggaagctattccggaaggattcggtctccccataaatctgggcgcatcggttcggggggactgccccgaaaacaaaaaaatcgattttttcaagtgtccgtttggggtactcaaacaattatggggagcaaaaatccaacgcagaattaaagtacaggctatagggaagctattccggaaggattcggtctccccataaatctgggcgcatcggctcggggggactgccccgaaaacaaaaaaatcgattttttcaagtgtccgtttggggtactcaaacaattatggggagcaaaaatccaacgcagaattaaagtacaggctatagggaagctattccggaaggattcggtctccccataaatctgggcgcatcggctcggggggactgccccgaaaac

SEQ ID NO: 57459 - DNA, 1176 bp, Heterodera glycines
atgcacctttatcgtgggcatgagcaaaaaattgttaagaaatttttggccaacgcaaacagaccaatgtttgactatatgaccgagcgtttatacatatctgataagtacgaacgtcagatcagtgaaattgaactaagctatctcgagcggttgtggacaaataagaatccgacaaattttacgttgctaaagctgaattttgtatgcatgttaccacaggataaaactgatttcataataatagataacaaggtgtatctgattcgatcggaccgtcgtatttacaaatatggaattaatgacggtcaaatcaacccaaaatttgtgtccaacatcagtgacactaaatttaactttttattatttaaagaatatcgcgacgatgtaattaatatacttcaagccagctcgccaacgcctcaaatcaaattattgttatggtctgcttatacatttgacgtactgctggtcgtcatttgcgcatatgtaataagacaaattcgtcgtaccagcagaagcagtaaaacttcatccgaagatgttggcatgtttgaccaaatggaactggaaatgttttcggataatccgaaagatttagtgtacaggccaacaacggtcagagagaggagtatttaaggcgactattctatccatttgacttcattcttacacaaaccgtatatgcagcgagcaataaaatattttattgactattatgcgctaaatgatataactcagctgtacgctctcctaaaatccgaaatagactctgaaccgtccaactattatccaaatcctttgcaatcagttccttgtgtacaccttgtgaacgaagagtacgaaaatcagcctgttgttgtagaaggaacacttgatctgataggcgatctgttcttttcaacatgttatcccaagaagagacaggggatcgattggtaaaaattttaattattatttaaatgttgatttaattctttttatttattcaggagcgaacctctgtatgcggaattgaaggatctgatggtttgtccgggcgatttgcggaaatgtctgtcacacttcggacatcggaaggatcagcgcaacttggtcgtcgacgagctggattggcacgacgacgacgacgacgacataacagaaggagcttggtgaaagagctatgcttgttta

SEQ ID NO: 57460 - DNA, 778 bp, Heterodera glycines
atgcacgcgttttgcgctcgagctatttatcatcgggcttgtcaatccaaagcgaaacaacaaagatgctgttttgaacgaataaagggcataggttattttgaagaagtgtcaaagaacatgcagcaataagcctgcaaaatctaataagtggaaaatacatgagtatagaatttattttcagaaagtgtcaacagacttttggaaaaatatatttgcaatttatcaacaattttgagaagtgagttagaaatgataaacttcacgattcaaaccagttttcggtgctctaattaaccgcgataaaaacatccgaatcaattaaatagcttctgagataataaggtttatcataaaatttcatttaaaaataaaccctcaattattggtatgaacgatactttccaaacatgcacgcgttttgctttagctatttatcatcgggcttgtcaatccaaagcgaaacaacaaagatgctgttttgaacgaataaagggcataggttattttgaagaagtgtcaaagaacatgcagcaataagcctgcaaaatctaataagtggaaaatacatgagtatagaatttattttcagaaagtgtcaacagacttttggaaaaatatatttgcaatttatcaacaattttgagaagtgagttagaaatgataaacttcacgattcaaaccagttttcggtgctctaattaaccgcgataaaaacatccgaatcaattaaatagcttctgagataataaggtttatcataaaatttcatttaaaa

SEQ ID NO: 57461 - DNA, 58 bp, Heterodera glycines
tcgccctaccgggacctggacctgagcttttcaaaatccgggaccgggaaccgggacc

SEQ ID NO: 57462 - DNA, 1718 bp, Heterodera glycines
ctagttcaattgtgactccattgagtgaaactcatgattgtccatacagtaaagggtactgtattttgtccgacaaatcagtcttgatttggcaaatagactttgaaagaaagtgtaattttattccaattggaaataaaaatgggaaaatgatggacaaaatttggttatctgatgatggtgagctgggtctatccttcgggaatcaaacgaatttaattgattgtgggcaaaacataacagtgtctgatcagggtattggctcaatcattttggaagataaaactcgcagaaggaaaaggagtaagaaagaaaccaaaaatcgggtagtggatgggattgtgacttcttctcagttagcttctcaattgacttatttggatgcagaattaactcaaacaatgagttttgcattttctcaatcacttaggacattttgtgagttcattgaggagaatagaagatgggttgaagcctcattcttttcaaatccaacggatttggctagatttactttctctaatccattcatttatgctaaaagagcagcccaaacacttttaaaaatttggccatgcgttcctttggaccaaaaagattatgaatttagaccaaccaaacttcaaaatcaatgtttcgaattcataccaattaatttgaagacgcagggtagggaacattttgctttcattgacccaaagtcaatgataatctctccatcatcaagaaaaggttcctgtgaggaatttagaaaaattataattcaaattgaaggccaaattttagaaattgaccaaatagaaggaaaaattacttcggtaagcccaaataaactgattcatcatgaaataaaatttgggctaaacaatttgcttcctcaaatagaagcacatgcttttcacaaattggttctactaaatctgacagacataaaagatcatgcttttgtgagtaatatggtaaaattgagtcaaatgacttatcagattcatgaaaaggacaccaaaatcacagctacaatttctcaagaatgggaagaggttgaaagccaaatgatcaaagcagtgattggtgattacagaaaaatgtggttaataattatgtctctaattattaccattctgtcaattgacttggcgataagattgacaattggtttaagtgaaatttatgcagggaatgggcgcttaggcaatttattatttggtacaacaattcagaaagctgggagcagagtaagaaaattgagggagactaaaattcaacaaggagaaatttatgaagaaccaattaatcagattaattggccaccaagaattagaagggcaggaaattcatttaaaaaatctttcaccagacctttcaaaagaaataggcatggaccaaatccaacacaaatgagcactcattttgaattaaattctttgatgggacagcttgggtcgttaaataataatacaatgacagggaccacttttgtctctcttaataatttccaaatgaaatgtttagtggaaactggctcaagcacctcagttgcaccaaaagcgttagccgattacttaggtattaaaacatttaaatcagaggcacatttaatgagtgcttccggtcatccagtgcatgtcaaagaagctgctcgtgtgactttaaaaataggaaatgaatatgtggacataattgtcgtcttttcgatgatgaactttcatggacaatga

SEQ ID NO: 57463 - DNA, 91 bp, Heterodera glycines
aaaagagcgcaccccatctgatattcccatttttccgttccacaactggccaaaggcgactgtgctcattgacacgtcgttgtccaataag

SEQ ID NO: 57464 - DNA, 1054 bp, Heterodera glycines
atgaatttgttcgtgaacggcaaaaagacgacggagcatgtgtatggacggcaggaatgggaaaacggcaccgtgtacacttatgccagcctggcattcagaccggggtaaaaaagaaaaaatggaattattaaaaataaaaataaggcaggaataaaaaagaaaattggaattaaaaattaaataagataagggtaaaaaagaataaattaaaaatatcagggtaaaagcgtatgaaaattaattttcagaaaaattcaccataaaaaagtgatttcctgcgaagcgcagcacccggaaacgaacacaaacttacgcgactcgatcactttggatgttttctgtgagtttggcctaattgttatgatgatcggataattggtgattgcaaataaatgaactacaaatgtattttgagggttgcggtataattggatggggcggaaattttaaggatggcgggatgagttttgtgaaaggtcggtcggtcgaacaaggagttcattttcaagtttttacaggctaaaaatattaactgatcaaaaatctgaaattaaaaaaatccaaattaaataaattcgagttctgaattatgaaatcagcgaatatttttagccccggaaagtctgaaaaaatgtcgactccttccttgttcgacttttctcaaaaaacttttcagcagaaaaagaaattcttcgatttttcgaaagagaaaaatttacagttaaatttagatttttgatacatttttttaaaataattttgtaaaataaataaataaattttcggctgccaatcttttcaaatttgctctttttcgtctcttctcttgccgtccaaccatgtttctctgttcaattttacagattcgtctgatcggccaaagatcgacttgatcagtgcgtctgctgccggcacggcgcttaaggcgggccaaaacgtgacacttttgtgcaccgccgaggggggaaatccgccgccgcagctgacatggtccaaccaaaacggacgcatccacgaggaggacgactacagctacgacacgggcactcag

SEQ ID NO: 57465 - DNA, 650 bp, Heterodera glycines
atgttggatttggttcagaatgatgcctcggtttgtcctccactgcatatggaacggctcacttgtgccatggtggtgggcaattgagcagcgcagtgacagatcagagcctggggcaaatagcataattaacgtttacaatagagaaggcaaaataacaataatttgaaaatttacgaatttttttctcaaagggatattttgttattgagtttgttttacaatttagaaaaccgaacaaatctcaaaaattattaaagctaattttgattattttttgagattttgctcgctttctccaagatgtctcggtttaaatttgcgtgtcccttcgcagaaaattttttaagcatatcattttgccttccttttctcttgttagtttcttagttggtattttatgaattgctactaacagtaaaaatttctttcaattttatttttttcaattattttgaattttttcttttttttattttaagttttcaaaaattatggaaatgccacaccaattaggatggattggttcgtcgggtgctccttgaaatgcaatttttcagcaacaacggcacttgtccaaaacaatgacgagagaaggaaaagcagcgaagaaaagtgaaggaaaaagccaccaattcttagcagcgtaa

SEQ ID NO: 57466 - DNA, 218 bp, Heterodera glycines
atgcgttcttcaattacgccatcaacatttttgcaaagtgtgttccggcttaacaaatggaaaagccacaactacagggacaaagaattatgggttatcaatcgcgatgaaagaaatccaaagttgaataaaatgttgacaaattggttgtggaatgatcatttgccgaatgagaacgcattttttatccgtgcaaatcttaaatatggtgcatcgag

SEQ ID NO: 57467 - DNA, 737 bp, Heterodera glycines
atgctgaacttcagtccagacgatgacgaatgtgaggaaggatttgtaatcaaaaaatctttcgggtaaataattaagaacgactagaagcttcacactaggcccatgtttcttaccactgtttaatctcaaaaccaagaaaccttcgaaattatgccgagcttaaaaatttttcaacactttgttaaataaaaatttaataaatacttttcaattttttttttttttgcaaatttttgcccttttttaacaattgctgtgcagcaacatttgaaattctcacatttttgtacatatttgaaagggagaataaatttataaattgtacttaagtagtaattcacatttgttcagtttagaattcccacaaataaatttatgaaaagttgccaaattgggcaatggaaaacattgcaaccgcttttagagaaattcaaattaattgtaataattatcagtgaacggatattatgtgctaaaaattctgcaatatataattaaaaaatatatgctagaaaaccaaaaaatgccaaaataattggaaaatcaagtgtatttatatcaaatacttttcgaggtgttgggactaaaatcagtttattttagggggtgcatttttcatttcttgtattttcaaaaatatgtacaaaaagtggtcctaatatgtacataaatatgtatgaaaaatcccaaatatgtataaaaacccaaaatatgtacgaaaatatgtaaataaa

SEQ ID NO: 57468 - DNA, 221 bp, Heterodera glycines
atggcgttcctctcccgtctctccatccttccaaattcgccaatttcgctgcttgcagtttctttggccgttttggctttcgtcgctttggcatcggccaatccgccgacggcacgcgaaacggcgccaaatgcacagcaaaacaatgccaattcagtggcaactggggaaattgcgaaaaatattgcggaaaagatggagcggatgaatgagttcattaa

SEQ ID NO: 57469 - DNA, 104 bp, Heterodera glycines
ttcgctggcacgggatttgaagtggtcaagcaaaaggtcggcatctttgcgcagcatttggcccgactcactgaagtcctggaaaattggaaaattaaaaaaaa

SEQ ID NO: 57470 - DNA, 1066 bp, Heterodera glycines
atggcaccgacggcacttatggaggatggcggaacgtcaacggtgacaagcgccagttccaggtaaaattaattaaatattaataaatgaaaatttgtttggtttcgttaataaaatacattcatattgaaattttttatttaataaatattatataattaataatattttaattttaaaaatctttcagtaagaagtggaaatttagaaaccaaaaaataataattaaactgaaaatgtttataaatttaggaatttaaaaattaaaaattttgtttattttttatttttttttttctaggagggcgggtggttggatctgtcgttatttgtaaaaatttgtttcaacaaatttctcaactaaattttttttcaggtccacccggtcttccacaggttcttcttctggctcatgctgttcatcatgtggcggggagcactgctcacagtgctgtgacgaaacatcgtcattcatatcatcgacaggtgtcacattcatgtcatattatttctttcaatattttaaatcaattaagcatatgcctttggaccttcgtcaagcagtgcacgacggggaggaccctcgcatggtggtggtgttcagtgcccgggggatgccgaatatgtgcagcaacgaaaaatgccaatcatggggccaaattttggttggtttttcgatgaataaattattttggcaattattataattttttttaaaattttgttggatcatcacaacgcactgctgataccgccaatttccatcaacttcatcatcatcaacaacaacagcagcagcagcaaaggggacaaccttcgtcgtcaagaggcacaacatcgcaaccgtatcaaaaaagtgagctttttaatatgttttctattagagtttggaattttgaagaaaaaaaatatagattcgggttttgtgaatcaggccgagtttaatgtggaatatttaaggaaaatttggcaaaaaaaattttctggcggtgtaaaaatattcgaaaaatgtacaagtgaattgaaaaattatttaaaattcttaagcttttccgttttcagcaaa

SEQ ID NO: 57471 - DNA, 570 bp, Heterodera glycines
atggtaaaaagacgagattcgtttttgtacaattaatttttgaccctgattcgtttctataagcccaattcatttttattgttcaaatttgtttttaaccccattttttattaccacattttttgggttgcaacgcgaaaagcgatgtcatatcgatgaaatttcaaatatttttaaattattttcagcatgtaactaaaataggtaggtcaaggaaaatttttgaaatttcattcgcgtttcaagcataaaaacgaattcgagtaataaaaactgaatcgagacaaaacgaattggccaaaaggcaccgccgggcctctctttccaaaaattcaaaagcaaaaaaacaaaaacaggaatcctggttcttctaacatccaataaattaaataagcatttgacgaattttgtttttttttaaatttttggcattatgtacccatgacacttttacaggcaatgccggtgatccgcgcacagcccggacacattccgctaagcgattcggaagaagatgaacagctgatgaggagatcaacaggaatgatcaaaaatgaaactccacaatga

SEQ ID NO: 57472 - DNA, 676 bp, Heterodera glycines
atggcagaatttaatacagtaatacacggttcgtctgccttcgttggatggcagtgttggtggacatcggctttcgcctcggcacagtctatacgctgctgcactttattggtgtggaattttttaaactaaagttcaaagacttgcttaatgtgaggatcgaacttgtcatttctctctctgtctgtttatcaatctctcttttctctctctctctctctctctctctctctgtctgtctgtctctctttttctctccattcaattagtgtataatgttaattagctggctatctctttctttctactctttcgttttctatctctctcttcatctcactctcttctctgtctattcctttttcgcactctctctctctttctctccctcttcctcattctctcataatttcctttgcatgtctttttgaattatattttttccccatcaaatttctttaaatatttatctttgtttagctctcgcattggtcgtgcaattggaatagagcgtgatcctttcctatacgagttgcagtgtcaaattgttgccgaatttggcgattgcttatctccaagagttatgttcgcgatgttggcactacatcaaaaggtagtgcgcccgataggactcggacccattggcttgtctctgtacccaaattcggcaatttaa

SEQ ID NO: 57473 - DNA, 2059 bp, Heterodera glycines
atggcgagtaaaagtatattcacgaattttttttttcttaaaaaactgcaaaacaaaagggtcccccctatagtttttgataaaattcaaaatttgtcactttttaattagcgtcaaatttcttttaaaaattatttatgcgtaccatatattaaaaaaacaaattctatattaaaataaataaaaaaaaaatcgaccaaaaaaaagtgcaaaaaaaaatttaaaaaggtcctctttttaaatagcgccgcggtcccatattttaccattttttgaaaatttcacccaaatatggcaaatatggtcatttaaaatagtgacaaatagcgactaatatctttcgttgaaaaatattgcaacactagagaaaaatatttggcccaaagagaaaaaaaaatttcggaggccaccttccgattttttttttatatggaaacggatctggtacagtaaaacaaacaaacaaagttcgatcgtttatccatttttcaaaaaaaaaaaaatttcaagtatttggtttttcccacttttatctcaatttctcatcttcattcaaaaaaaaatgtttataattaattattcaaaatgatgaccgaccgcttgtaaccaatcgtcgaaggcaaagccaagtgccgacggacagagatgggcagtgaccaactccagcgagggcgagtggcaacaacagagtgtcaggacgcaaataggcacgcaaatgttgccaacaggaaacctttttagagagggggggggggggagtcatggaaaagacaaagtttacatgtttggaaagcgtccttcttcccatctttctcctctctcagacaacgcatcaaaaaaatctacctctgactacccatacaccgctcttagtgaccaacttgcggcaatttcccaacaaatggacaacaacagtgtcgaccccatcactaaacaacttttgaaaatttgtgtcgaacttttacagcatgtccagcaacaacaggccgtcatctccgaacaagaccttcaactccaacatttcaaacaacagaaaatgatggaagaagccattcaagaccatgagcgtcggcgaagcgtcgtcgtaatgggtctccctgaatcgcagaaacaaaagccgtccgagcgagtcgctgaggaccgaactgccatctcaggcgttctcaatgagcttggcatcgagagcccaatcactgtgtacagaatgggttccccagaccaagcaaaggcaggtcaaaaccgcccgaggttgatgaaagtaattttcgggtgctccaaacatcagaaacaaaccttggcacagtggaacaaagggcgcgcgcaaatcaatcagaaattggggatgagcaacatccgaattcgccctttactcagccaagaggaactcaaggcccgacgtgtgctgcaagaagagtgtagcaggaaaagaaaggaagatggcggcgagtgggtggtgtacgcggacaaagtgatgctgaggtcagacattgcggcatttaaaaataacaccaattgacttgctgttttaccaaatcacactcataaaacatttataaattcgcacttttccggtcttaagcatgttaagcccaataaccccaaaaccaaaataggggaagttaaagcatgcttagttaatattagatcactttacaacaaaattgatgaaatatctttaaatttagtaaataataacatagaaatttgcctgttaactgaaacgtggacaaaggagggaaacccaatcctctttagtccatggataatcgaaaattataaatttgttttttgtcatagaaaatctcaaaaattaacacgtgggggtggttgcggtgttttaattaagaaagaaattgagttttttgttaaattttctgaaacaaaatataattgcgaaatcttggtttttcaattacaaaaactaaaatcaattagatttgtgcttgtttatcgaccacccaagacaacatatagacaaaccaaggaacttttaaaatttttagaaacattctatagccataattgtgttgtgttgggtgattttaattttccgaataaa

SEQ ID NO: 57474 - DNA, 138 bp, Heterodera glycines
aggtttcctgttggcaacatttgcgtgcctatttgcgtcctgacactctgttgttgccactcgccctcgctggagttggtcactgcccatctctgtccgtcggcacttggctttgccttcgacgattggttacaagcg

SEQ ID NO: 57475 - DNA, 503 bp, Heterodera glycines
  unsure (1)..(503): unsure at all n locations
caaaagttttttacaancacatatgnncaatctaatttcttgcagatttaaacctatccatgctgccggggttctcggcacagcaaagcactaatagtgtgtttgactcacttcaaataataattcattacccaaaagttttttacaaccacttattgccaatctaatttcttgcagatttaaagctatccattgcctgccggttctcggcacagcaaagcactaatagggtgtttgactcacttcaaaaaataattccatacccaaaagttttttacaaccacatattgcctatctaatttcttgcagattgaaagccatccattgcctgccggttctcggcacagcaaagcactaatagggtgtttgattcacttcaaaaaataattccttacacaagttttttacaaccaaatattgccaatctaatttcttgcagattgaaagccatccattgcctgccggttctcggcacagcaaagcactaatacggtgtttgactc

SEQ ID NO: 57476 - DNA, 1065 bp, Heterodera glycines
atggcttcttcttcggcttctgctgtcggggataacaatggttggtcgccagaagcgaagaaacggcgcacaattattggcactttgctgcgccggggcgacattttggagacgaacgatggcgacgacaaaaccgtggaacgcaatgatcaaaccgcagcagatgatgacgaaactgatcaaacccattcaaatcgacagtaagaccgggggacgtgacaaattttcgccaaaaaaaaataaataaaataaacttacaattcgaaattttttaagaaattttttttaattttaaaagaaaatttttaaaaaattagaaaaatttttcagccattttttcctgaaatttatgatgaattagtaagttttttatgaaattttttccaaaaatcactaaagaaaatttcaaaaatttttcccttggaattttcatataaaaaaatttctaatatttttttcttgaaatttgaaaaaaaaaattttaatcggcgcaattttggggtgcactcactctcagtccgtggattagggcatttattttttaaaaaacaaaccccccccccccttagcaacggtttttcggtcgaaacgcaacaaagtgtggacttgagttgcatgacgtttgccaatgctggactggaaatggacgaagctgagcagacgatgatgaacaacgaagacgaacaaaattgtagcgatcaacccattgttcaacggacaactcaagacgaatacgtcgtctctgaggattggccaaatgccaacaatgttggcacaaaaaaggcacgaaaaagcgaaacaacaacaacaacaagaaggacaagcgtgaaattgactgctggccaaaaggcattggaggtggtggcgagagttaattgagttatgccatgacaaacagaaattgtctcgagagcagctctcccccgccccgcctatcatttccaccctaaaagcggcttaaaaggggaactgaaattttttataaaaaaatttaatgaaaaaacgagttgaaaatttttcagcgattttttggacaaatttttgaaaaaatttagcatttaatta

SEQ ID NO: 57477 - DNA, 49 bp, Heterodera glycines
ggaagctactcccgaaggattcggtctccccataaatctgggcgcatcg

SEQ ID NO: 57478 - DNA, 728 bp, Heterodera glycines
atgggcgcaaatgtctctctgagcaccaccggtgcgtcgtgcgcaagcccagcgatcaccgtgggcagcacgtaattgcccttcgactcctccaacactttgccaccgcacagaatccgaccgccctaaatacagatggacatgaaacaaatgtgcggagcagctcatccaccccactcccccccccccttctcacaatcactgtgtccccgatcaattctatttatttaaaaccgcaaatttttttcaaaaaacccaaacaaatagtatcaataaaaaatttttaaatttggtttttttttctaaaattaaaattattatgttgttttcttacagtggcaatggcctcggcaatcgccgttttgtatttgagcaccgactcgcgactgtgcaaagggccgatcaaagtgcgctcatccaactgaaagttgtggaaaaggaagataagaaaatgtaaaatttagctgagggaaggcacccataaaatcaaaaaagtgccaaaaaaataataggaaaataagaggtatctcattcaatgtcaaagggttggccaatccgttccccattaaaaccgggtctccgatgcgcgtgtccatcagctgtttgtacgcgctgaccacccgttccaacaccacgtcgtacactttttcgtgaataatcagtcgccgtgtgctcgtacagcgctgccctaaaaagaggaaaaaatgggtaatttcatttgcaaaaga

SEQ ID NO: 57479 - DNA, 1052 bp, Heterodera glycines
atggacgacgccgacttgagtttggttgtgcccgccgtcactttctcttccgttggcactgctggtaatattttttattcttttgcaaatgaaattacccattttttcctctttttagggcagcgctgtacgagcacacggcgactgattattcacgaaaaagtgtacgacgtggtgttggaacgggtggtcagcgcgtacaaacagctgatggacacgcgcatcggagacccggttttaatggggaacggattggccaaccctttgacattgaatgagatacctcttattttcctattatttttttggcacttttttgattttatgggtgccttccctcagctaaattttacattttcttatcttccttttccacaactttcagttggatgagcgcactttgatcggccctttgcacagtcgcgagtcggtgctcaaatacaaaacggcgattgccgaggccattgccactgtaagaaaacaacataataattttaattttagaaaaaaaaaccaaatttaaaaattttttattgatactatttgtttgggttttttgaaaaaaatttgcggttttaaataaatagaattgatcggggacacagtgattgtgagaagggggggggggagtggggtggatgagctgctccgcacatttgtttcatgtccatctgtatttagggcggtcggattctgtgcggtggcaaagtgttggaggagtcgaagggcaattacgtgctgcccacggtgatcgctgggcttgcgcacgacgcaccggtggtgctcagagagacatttgcgcccattgtttacgcagtgaaagtggccgattttgaggtgccacgagaattaaattaccaagatttgctcatttttgcttccatcccgacaattaatttttctcatttctttccccgtgtcaattgtttttcgttttttgttgttgtaaattcgctcttttaggaggccgttgcggtgaacaacgaggccagccagggcttgtccagcagtttgttcacccaaaatgtgtcgcttctgtccgaatggattgg

SEQ ID NO: 57480 - DNA, 936 bp, Heterodera glycines
atgatgctttcattgaccattgtggtgtcatttcatggcacttttgtcacacgttcggaccgtgcctatcgctgcatgtgcttcttccgtaacatcaaaacattgacaaatgcaattgacgtgaacctggcggccaccacggaattgttaggtaggcaattttaaaaaaaaattttaaatttttaaaatggcgcgctttggcattttgcagacactgccaagacaccgtcctgcttgtactccatccatgcccagtcgccggaagggccaccagtacagtaagttttcgggtgctatgccgctcattacggtagccattaagcatacagtatgagaaaaattttaataccgtacttataataaaaaaagttatgaatagtacagtaatttttgtgtcttacgccgctcattacagtatccattaagcatacagcatgagatgtataccgtagttataattaaaatagtctgagttttacgttatttaaaataggcttggcaaggtgggagacaaaattttccatgtgtggcaatgcgatgacccggcctacgaattcctggtccattcctgtgccgtcgatgatggacggggttccaaatttgatttggtaaaaatttaaaaatttccaattaaaacttgaaattttttcaagttggacatcgatgggtgtgccattgaccctgtcattcaaccggatgtggcttacatccgtgaaaagaaacttgtgagtttggtgtttaaaaaatggtaaaaacaaaaaatttataacattgaaattaattgaaattaaatgaaaagcgaaaaaaactttatttctcattacaataggctagaaaattaattttgaaaatctttaactttttttatgttcatataaaatttgattaatttgaaagggaccaatctcaaaatttaaaaaaattttcaaaaataaa

SEQ ID NO: 57481 - DNA, 761 bp, Heterodera glycines
  unsure (1)..(761): unsure at all n locations
atgactttcaaactgatggaaaaggcggggataaatggggaggaaaaaacttttggtctccaacatcttgaaatgatccaaatcttttgggacaaggaattccctgacatgtttcgcattgtggcctttgatatggtaaaaaaactacatactttgaaaaattttttattttccagagaacgggaatcaaaccaattttcaagggagagggaattcgtaaaaacgaagtatgcgtgataaaagaaggagaccactgggatgggatcaaatcagtgacgcagttcttgtgtgttagaaattattgtgccagctgtgaagtgacttgcgaaaggccggagagacatcgattggaatgtaaggaaagatgcaagaagtgctgtagaatggggttcgggtttccatgtgcggatgtgtgtgctgggatttattgcgcggagtgtaatcgcaacttctacaatacggaatgttttgagtctcacaagaagactgcttgtagggagtacaaaaaatgcgaaaagtgtggagagacacacaacacaaggaacaaacacacatgtggggagaaattctgccgaatttgtaaaatttatcatccaaagcggggctgtttcatccagaagttaaaaattcgttcaacgaggaaatacagaattgttgcatatgaccttgagacaacattgtataacggagtccatgcaccgaatctcgtttgcgcggcgttgacatgcagtngagtgcgtggaagagaaaaggaaatgtga

SEQ ID NO: 57482 - DNA, 438 bp, Heterodera glycines
aaaatggtctaagtaaaaatcgtaattacgctcaaaaagcttctcaatcaattttagcgcttccaattccttctacaatcgcctttatacatcccattatgagcgctaaaattatcagagtgccgaaaatcgcatgtgatctaagcctagcaaaaaatggtgtaagtaaaaatcgtaattacgctcaaaaagcttctcaaacaaatttagcgcttccaattccttctacaatcgcctttatacatcccattatgagcgctaaaattatcagagtgccgaaaatcgcatttgatctaagcctagaaaaaatggtctaagtaaaaatcgtaattacgctcaaaaagcttctcaaacaattttagcgcttccaattccttctacaatcgcctttatacatcccattatgagcgctaaaattatcagagtgccgaaaatcgc

SEQ ID NO: 57483 - DNA, 1647 bp, Heterodera glycines
atgggcatgggtcggccgaacaaagtgagtaaattagtggtagaaaaacggtcggctaatttttatgaaaattgaaacgaaagtcgagcggggcccaccccttcctaaggcagaatttgttagtatttttattcttacagaaagtttgtccggctcttcggcttcctccaccggaggagtccatcccatccgaaggcacacgacagtgcccgccgggggccatcacgtggaaagttcggaggaagaggacggagaaatggacaacgaaatccggaaacttccggtgggaatgaaagaggcggatgatccgtttgtctcagaatggcattttatctatttttaaaatacgaaaaattaaaaaatcaaagagtagagagtgcaaaacgaatgttaccgaaagagagtcattaacataatgaatggaaacttattaatttagcaaaaaatgaatccaatctcgagaaaagccgcgactgagatcattcgggacaatgttcggctccgttcgcagaacgaccggctgaagaaggaatcggcactgtaaggacataattgtcaaaaccaatcgaactgacaatggttccactctctcttttcagcaaagacttgcaattggtcagtttacgttcgcgcaaaagtccgtcgggggaaacgcccgaaagattggaatcattgcgacaaaaacaggaggaattacaagcggaaaagaaagcatttctgacagagtgcaagcggagggaagaggaattccgagcgaaatgtgcggggagagagacgaaactgcggacgatggaagacgagctgagggaacgggcggacgaattcgcccggatgagagcggagttggagaaactgaagcgcgaaagagaagcggcggtagaacgaagcgcaaagtaccaaccgaaggaggcggaggacgacccacagacagtgcggacaccgccgacaaaagcgacgacgaacagtccgatgtgtgtggagggagaggggggggggagggttgggattatgggatgggaggattgatgacacccgtgacagaactcatccacccacaatttcaaggcgtatcagcaatacctattgcggcgccggccccatcccgcgcccttctgccgacctgccgcaacagcggcagcaaaactgttccggagccgagtgttccttccgttcgcagatgccccaattggcggagagacgcgcgatcagtcagatggaattgccacgtcatttggtggtgaagacggagacaaaacaggcggataaagtgcgtaagatgagaaagaattaatcgttgcctttcgctgatcatctaccttctttctgtattcccatgatacgataataacacaccggtaccatccgttaatgttttgctgttctttctttctcattctttcattttacttccattccattcgcagtcatttgcctctatttcggattttgatttgctccattcgtcacttttcttcagttcacttaattatttgtgccacatttttattcacattaattttatggatgccatccatttcattttgttcatagtattcgctcacattggcttcgttttttacgctctttctcatcatgcgcaatcaatcaaaaaatacttaaaagtgtaccttacgataagacaataaa

SEQ ID NO: 57484 - DNA, 1482 bp, Heterodera glycines
ctcaaaagttaaccaacaacaacagcaacaacgccatgagaggaaaacgaaaagcaattgtaagcgcaggaactcttccgtgtcaacactttccgcgccatgtgcacattcaattcccacgtcatccaacgttttattgaatttggtcgatcgattcgtcacaaaaaggcaatattccgacagcaacctgctcaagcataatatgaataagtcgacgtttggtgaaaatttctgccggaggagctttaaatggaatttattttggggacggaaagatgagaacagcgataagtgcacggaaaagaatgatttggttgacgaactccaaagttcaaggaggaaaagcgaagaagacaaagatgaagcaatgagagactatcggaaaaagagtgttcagcagagaaagagcttacggctgggcacactaatggaagagatgggggaggacagggacaagaagaagcgacagttcgggaacggagcccagccaaaggcagttttgtctgtgcacgaagaagaaacacacagcaatacgcagacagtgcgaattcggaacaacaattcgctgggatcgggacaagaggccgaaagaagctatcccatcaaaagcccaactgtccccaaaattgtcgcaacacagcgcttttctctgattggagcatgcgatttgaccaagttggaagaggctgcggaaggagagatggccacgtctggtggagtgagaagaacgacatcgctgaaggagaagtacagagtcagggaggaggacagtctgaagttggacatgttcttgaaagaaaaacgaatgtcaaggacagttgaacagcaggaagacggggaacaaagtgacgacgtccaattgcacttgggcaacaatttggatgcgcttcatttcgtatcaatcacaagtggagaaggccctcaaaatcagcagcaaaatttgcataatttatcccaaaactccaaaaaagtgatctcatcgcaattgaatatcataaaaacaacatcaacaacattgactatgcccagaaaaaagaatcattgcaatataccgcgtaaatcttcgattagtttccaaaccaacggaactttaaagcgaaaaaaaggcattggaaaggcacaattagcccggagaagaagctcatatgtgacaaaagctcaaattcttatggcgaaaagcaaaatgcagcaggacggtgagcaaaagaatggaaacacaaaagatgaagcgaaagagaagggagtgacgaagaaaaacggcaatggaaaaagacaatcggacattgccaaaacggaaacggtgacactgagagaaggtgccaaacttttggccaaacagcgtggggcgagtgtgagcagctcatctctaaggcaattgctggttggaagcgaacgcaaggccagtagggggagcaaagtggcaccgaagacgaacgacaacaccgacaacggtccgaaggatgcgaatgccgaaaaggaaag

SEQ ID NO: 57485 - DNA, 1337 bp, Heterodera glycines
tttctgcaagagaatcgacgagtttctcggtcttcgttggatcatttcacggagtatgagcagcaaactttgtttgatttgaaggggagagcgtacacagtcagtggattggaggaaggaaaggaatctgaagagagagaaggtgggaaaggaattgaggagcaaagggaaaaggaaaaccaaagcccagttaaaaaacagacgccaaacattccaacgttctcacaaaacaccgcaccctttttattggaaaatgcatttcttctttgtcgatgaatttatccccaaaccatccatcttttagcactcattaggaaatagatttttgattatagtattcccttataattagtcattcaaattttcgttttttaggcggagaggacaaaatgataatatcgacgagtgacgcggctgaatgtcaaccgaccaaagaacccacaccgagtgacaatacttcgggaaattcgacaccgcgccagcgtagaaaaaggcgatccgccgcagagagacgggaaagtcatcggcgacgatcgagtgccgttgtgaaggacgcggttcatttggccaaagtgttgaacggtgggtcgagagaatgcctgttgatcaacgccttttgattttaactctaatagctttttcaggtttgccacaacaaaaacagaaacatgaaaacgacaaaagcttggacccgtgccttgttcattgtcaacctttttcgcccattcccgactactcggagactgaaaacgacgaggccaatttacacgaacccccagaaccatccgtacatgccccgggcgatgaagacgaagttgacgagtgcgtgggttttccgctcttttgtaataatgtaaaagcattttcagagagtttgattttataagtcggctgaatggggaaacggcggagaaattttatggaagaaggacagaagcgaacttagataaagtcagttcaaccggcaataactgatttgtccatcttttcttcttcagaatgcacttcttcaaaattccttggaacaccgtcgttcaatttcggcggaccatcttttgcatggcattggtttgaggagagaaatgcttttgctggacaccgatcaagcggagtttgccgatgcgattcaaataaaagtgatggataaaaatggagttgtgcatattgtacctgatctgtttgttttaagatgcgtagcccttctccacatgccgttcctgtcgacgacaatacaattggacagcaacggcacattgaggtggagaaagtcgcaggagaggaggaatgggggaagaaaggcggacgggacttaccggacgcgtctcatttggccaaac

SEQ ID NO: 57486 - DNA, 1225 bp, Heterodera glycines
atggacagtgacgacgaatcggaagtgatggcagagactgaaaacggatcaatgtgtgttttgtctggctacaaccctcggttgtagcaaaaatccatcattcttttccaggatcaacatctatgacccgtgtgttaagtcagccatcggtgacagggatactgtaactgaccgtttctctaccgacagtaactctcgtgtcgtcaaaacggtgctcagggtggcaaatcgttaacagttttctttaacactcagttgataattttgaaggacattcctcggttacggaatgctttttcattttttcagagtccgtcttcagtcgaccatcaaattgtgtcttccccttcctcatctctctcttctactgacaatgtcgccgacccacagattcgcgtgtcatcctctgcgtcttatgaatccgccattgaaaacagcgcaaaagacaaatgaacgcattgagataccattttataacaccgaaacgactccgacccgacgaataggcactatgcgaaacttctttgaaatcagagtggaattcctaacagattctgcccaaaaatgagtaaattttgcagcttttgagtcaaacttaggatccagcggagatagtcatccccggaaaaacagtaggcgaaatgtttgtacccagataattcgattttgaatccgaggtaatttgagatccgcaccccgggatttttctgtccgcgaaccagccctggtaccatcggaagtgtcatgacaactcgtacaattgcttaggttgggcctaggctttaggctaggcctaagcttaggcttatgattcagctttattttaaaatacgagttgccttttgtacgggtgccattgacccgggaaccgcctaactcgccgcggccaactcgccgccaaatttaaagagcaatcatgtcgatcattggtcccgaaattttttttttaaattttttctgggaattctttaacaagtttctttgggtattttgaggtgctgagcactagagaccggcgcgggacgggatcccccgcgggattttgcgggatcccagtccgcaatcacacattttttgcaaaatgcgggattaatcccgcgggatcccgtcccgcaaagaattttgagttccaatcccgcagcgggatctgcaaatttgaaatttccggtctctactgagcactccatttcaacctatttataataccggcctgaattcgaataaa

SEQ ID NO: 57487 - DNA, 432 bp, Heterodera glycines
atccgtcttatcctccattacaaaggcattccgtttgaagacgtcactttcagctcaactcttgccgatgagtcatcgcgagaaaaatggctgaagcagaaacaaagtgagtgaaagaagcaaaacattcaataataattaattaaatcatttataatcgacctgattagcttcggtttcagaccattaattaacttcccaatttcaagtacctattatataattacttgttttaattggattattcattcctaattaatttctaaatcaaatcataaaatgtagctcctaatttggaaaccattaattaattaattcctcattcagactatctttacggccaattgcccaacctcgaatgggacgagggaactgagcacaaagttttggcccagtctcaaacaatttgtcgttatttgggcaataaatatg

SEQ ID NO: 57488 - DNA, 743 bp, Heterodera glycines
atggaaatgtgttcgaatttgctcttacgggttccgcaattcctctcgacgaaaaataagtgagtttataattttttgtttccgcgtccatccgtaaatttaaattgtaaaaatttaatgttgaaaaccaaactttaaaaacaaaattgcgaattatatataatgagtgttgtgcattattgaaattatttgatgataaacaaattgcagaacaaacacagcaaaatgagaagtggcgattgattttatgtatttattatttttcgtttttcctctccctttttctcccatccccaaattggataaatgaaatgcataaacaaaaacaaaacgaaaataaaacaacagcagaaatgtgaatttgtacattctgtaaggggcgataataattaataaaaaaattacaaatacaaaatataaattcataaactaaatggtaaatattgatcataggccccaaactcaaaaatgcttaaaaacagtcagaatcgatgtaaaaaggtttgaaatgggttggaaaaatagaattaggggcgcgcttgccctttttcaggatgaaaagtgccgaaaatggagtgccaaactcagctgggactcaagtgaccgtgctatataaagcactcaaaagacattataaataatttttctagggtaaattgtggcgctgaacacgaatatgacctttaatttgcaaaattccgaaccccgaacccaaatttcgaacaaaaactcaaaatttataa

SEQ ID NO: 57489 - DNA, 193 bp, Heterodera glycines
cttttgagtgctttatatagcacggtcacttgagtcccagctgagtttggcactccattttcggcacttttcatcctgaaaaagggcaagcgcgcccctaattctatttttccaacccatttcaaacctttttacatcgattctgactgtttttaagcatttttgagtttggggcctatgatcaatatttacc

SEQ ID NO: 57490 - DNA, 193 bp, Heterodera glycines
gcaacatccaccagtccatctgccttggagacaagacaaaaagccgaagttgaagtaaatgaatatttacgggatccaaaaattaaatccagggccgatccatcattatactgggaagtcaattcacaaaaatggccaatgattggtgacgttgtacggaaatttctttctccacctgcaacaagttcagaaa

SEQ ID NO: 57491 - DNA, 71 bp, Heterodera glycines
cgcagtatccctgtctggcaggttaaacttacacatgcatggcttaatctttgaaatgaacacatcagttc

SEQ ID NO: 57492 - DNA, 457 bp, Heterodera glycines
atggcttaccaattgacgccgatcattatgttgcgttggttgttcgttgggcttgtcctctcctcgcatcaacagatggcacaaatgggtcgaatggaaggggatcaaatgcgcggcatggaaatgggccaaatgcgtggcatggaaatgggccaaatgcgtggcatggaaatgggccaaatgagcggaatggaaatgggccaaatgcgcgggatggaaaggggccaaaagcccggcatggtcatgacacaaaaatcagaaatggatatggcacaaatgcgcggcatggacggcgatgatggccagatgcgtgcttcatgggcagcatcgcaaaaattgttacgcgcagaggaaaaggaaaaagggccgaaatcgcaaaaaaatgaaactgaaaaggtgaagaagacatgcgaaatgagatgagtttggtaaaacggaggacaatttcaattttaaa

SEQ ID NO: 57493 - DNA, 362 bp, Heterodera glycines
ccaaaatcattcattaactaatcaatcaattggtcagtccctctcacaatgctcttctccactccaatgccactctttctcgtctcttctgtctttctcttcgtttttcttctcgtcgccatgtttttggccaatccgtccgatgcgcggcctcaatttggctcatttgccgattcgatgaccagcggaacgattttgagtaatatgtggggaaaaaagcgatgagaagcggccaacagcagacggagaaagaaagaaaattaaagaaaactgaagagaacaattggaaataatcaacaattaataaataattgttaattttgtataatcaatcatcaattataaatggttggtaattaaat

SEQ ID NO: 57494 - DNA, 122 bp, Heterodera glycines
atgctacgcacactcggagtgtggcgcaaggagcaaatgcgaaccggcgacgctggacaggaagaagaaggtgggcacgtgcgactgcggcgtgtgcgggggattccaactgttattgctgt

SEQ ID NO: 57495 - DNA, 87 bp, Heterodera glycines
aaatggctaacccaattgcaaccaaaaaacaaaaagtaaaattgaactctaatgcactttatgagtccaatcaattgacaatccatg

SEQ ID NO: 57496 - DNA, 482 bp, Heterodera glycines
aactgttctcagattaacgacgaaaatgttggagaagctggtgcatacaaggaaaagcataacgaaagttcggatattttctcaaaagtttatggaattgctgtaagtttattttaataaaattaatataatttaattgataaaatttttctttttaaggatcaaaaattcaaggaccttttcaaggacaatgcatttcctactctggaaaaattgttcggagatgcaaaagctttgttcgtcaacacaacgcctttattggattatgacattggcagtttgccaaaacgcgtcaaattcattggtggcattgatctgatgcagcccgatcacaaggatgtaataccattcagtagtaaaacagtatacacagattaagaaaatcccatatgaaacatttgaaaaattgaaatccgagtctattccttatttctcttaaattaaaagcaaataatttttaagaaattgaaaacagtctcata

SEQ ID NO: 57497 - DNA, 518 bp, Heterodera glycines
atgccattggacaaatttgagacggttattcaaggacttggaatgtgtaaagaaaaggaagtgaaaaaatgccacggcatggttgggctaatccaccacggcccaagcaaaattcaaaaatttggaatttaaatttaccatttttattggcaaatttaatgaaaaatttcaaaaaattttccgatgggcttgggccaaccgattctttacgttttttcagtttttagcccccccccccacccccccgtaaaatacagtatggctggcctctgtctacggtatcatattgtaaaagtgtgccaccattttcaggcaatgaaaagacggaattggtgatcagcgaatgcgatattcgtatcgtaatggatgcgttaagcagtggaaaagcattgctttgtctgccgaacagttttatgtgtcggaaaagctgcgacgcatgggcgctgcggttgtgcttgatccgcgcagtgacagtttcaccaaggaggggattttcaaaagtatcggcgaagcattga

SEQ ID NO: 57498 - DNA, 688 bp, Heterodera glycines
ggaaccggagcagaatctgaactgtgctgacttgatggccaaattcaacacgcaaaatcaaaaagtcgaaccgatggatgtggagggcgcaccctcccaggacgaagtcgaagagattttgggggcagcgcggatgaatagcgaaatgttcgttataaaaaaaagccttagagaaaatacggctctattgcacttgaggcgtccagtcaatgaccattttcgtttcttaagttcaacctttttccttgatgaatgtctatcttgatatcaaacgatagctcaaagtctcggaatttgtaaatgcgaaaaatgattaaatattgacattaagaaaaatacaatgagacgaaattctgcttttttgtccaggaacaattttttgtttattatttttagcgcagtatttatattaaaaactatagaccaagctttttaggcatgattaagtatgaaaaaagtttggcttaattgtaaaaatgggatggtcattggatgcctgaagtgcactacggccgaaaatattcaaaagaatttttcaaaaatctcgatttcctattgattccattttcagcttctatctcgtcaagttgaagggcgattccttggctcagttcttctcgtcccgaatcgcctctgaaaaattccccaaattggtcatagatttctacgagcagcgtgctgacatgca

SEQ ID NO: 57499 - DNA, 348 bp, Heterodera glycines
atgttttgttcacatccgaccctcatttatttgcttggcattttaggagtgggtatgtgggagaacaaagttttttcatattatttaaattaattattttaattttgcttgaaacgtaatgcaaatttaatcaattttcagcattttggtttgccgaaagcagtgcaaatatggtaaaaattgttttaattagtaaattattttttgtcgaaagtcagcttttggctattaatcgttgttttgaaacaatttcgcctaatatttgtaaaatgatccaattttggctgttcctggtctgtttgtacagtatctactgggttttcttccagaagccttgtttgttcaacg

SEQ ID NO: 57500 - DNA, 442 bp, Heterodera glycines
atggcaattgcgtcttttgcactgtccatcgcgtgtccaggaccggccctcaccgcacagcagcggattgtccgtacacattttgtgcatgtgttcaggtgaatgcagaaaactaacaaaaattgggcacttgtaaaaaagagcgaaagtcgtcgttttgaaagcattttattttatttattttttttgttttcctatttaattatcattttttgcagtgttttgtggctgagaagtgtcctttgcttcggggtaatcaatggcgaattttaaagtttttacaaaaccaattttccaatttctcagattaggcaatgcgacactttgtgccgatggattggccaacgaagcaattcgtgccctgcaaaattattgccccttttcattatttatttacaactggcaaacaattttttcttaaattttttttcatttattttga

SEQ ID NO: 57501 - DNA, 399 bp, Heterodera glycines
atatttcacagggacctgccggatccgacggacagcccggaaaccccggggagaacggacagccaggatcgcccggacagctcagccagggcccgcccgtcgttggtccacccggcccatcaggaccccctggccagcccggacagcccggcgagaacggacagcccggccagcctggcaaccccggcccgcaaggacagcccggcgacaacggaggccccggacagcccggcagccccggaggcaacggcgagcccggacagcccggcgggcagggagccggcggacagtgcggtcagtggggcttacaattgcgaaaattcattttgaattaaattttgaattttacgcaaaatttcagatcactgcccaccgccccgtaccgcccccggctactga

SEQ ID NO: 57502 - DNA, 98 bp, Heterodera glycines
ttccgagtcccgaaaaaaaatcgaggtcccggtcccggcttctcaggtcccggcaagtcccggtcccggttttgcccaaaattcccggtcccggcttc

SEQ ID NO: 57503 - DNA, 724 bp, Heterodera glycines
ttcgttcagcacttctgctttcgcagtcgcgcacaaaacaagtagaacggttcacatggaagttttttaggtgtggtaatgatccttccgcaggttcacctacggaaaccttgttacgacttcaccttcctctaaatggcgaggttaaaaaaagttcccacgaattcattcgcaatgaagcaaacgagttcacagtcccaatttttcaccgagtcattcaatcggtaggtgcgacgggcggtgtgtacaaagggcagggacgtaatcaatgcaagctgatgacttgcgtttactaggaattcctcgttcaagattgaaaattgcaacaatctatccctagcacgatgcgcattcaaaagattacccagacctatcgatcaaggttgtaaactcgttgaacgcatcagtgtagcgcgcgtgcagccccggacatctaagggcatcacagacctgttattgcctccaacttcctttggtttgattacccaaaagtccctctaagaagtctcaaaacctacaaaaaattgtaagcgagactatttagcacgcggaggtctcgttcgttaacggaattaaccagacaaatcactccaccaactaagaacggccatgcaccaccacccatagaatcaagaaagagctctcaatctgtcaatccttactatgtctggacctggtaagtttccccgtgttgagtcaaattaagccgcaggctccactcctg

SEQ ID NO: 57504 - DNA, 743 bp, Heterodera glycines
atgccttttaagacggtcgccgagcgagaggccaacacaacatataattttacaaatgtgacgctgcgaccgtttctcccacggaatcgtactcatcacgatttgggcgctttatttgcctcattcatttttggcggattcagcccgaatttgtttttcggtacggacgtcgacgatggaaggatttgcgtggtctcgttaagagttgatgaccagatgcaggtgaatacgtaaaaaataagagatttttacatcttactgagaacatttttgtcatatttgcttaaaaaatgggcgaaaaaattaaaacccatgcaaaaatatgttttaaaaaggttgggtaatttgaaattcaatttactttttattgcccatgacaagagaatccccaaatccttgttttttgatcatcaaatgacaatttattatttcagcgactcagtgttcgtcaattcttcgccgttaattcagtgaagtttaatcagaagtatttgtgtgagatccaactccttccaataaacgcattggtaaagaaaattttgaatgattaaaaataaaatgaaagaatctttcggggtttacaattttcataaaatcggaaaaccgaatttcgtggggtaatgaattgcttattcaactaaacaacacttaaggaatgggatgttgtcaagattaaaatcttcgctaattccatgaacaaatggcgcggaatgatgtccagaattgagcggattcttttaagg

SEQ ID NO: 57505 - DNA, 1243 bp, Heterodera glycines
atgttcgaggagggccggaccaagatcaagcaggtcaacgacgagtccgccaccgtttgctacgccttcaaacacttcctggagttgccgcgcgtggacgacgcgacggcacggcgccaacgcattgaccgactcgtcaaatttttcattgacgaagcgctggagaagaagcgcatggaggtaaaaattgaattcaaatttgatggaaaatgtctgaattcgtgtaatcaacaaaatttttctaaaaaatatgcgtattttctgcgagcaaaaattcaaaggaattttttaaaaaattttttggtctgttttaaaactaaaaattgaatctttcttaaaaaatcttgaattttccactaggaaatttcaaacacatgcaacggtaaaaaatggcaaaaattagacctattttttgggaaaaaccgctacaaattccttcttttactctccctgggggctgaaaatttataaaaccattgagaaaatttttttttttttgtaattttgctccgaacagtaaacaggaaaaggccttcgggttccgctaatccgaaagtttctggctacaagtttgttctgaatttgatttattccggccaagataaactttttgaaaatcactactttttgtcgtctgtccattttttttatcttttcagcagggcaaacagcagcaggtgtccgtgtccaacaattggtcaacaaatggacaaccacaaaacaaaaagagtccgatcaaggtttgtttgtttaaacaaaaaaaaaaaatttttttttttggggggggggtcagtttttcccagagggggagccctaattaaatggggctaatagcctccggccgggtcacaaaattgtatgaattttgtaaaataagttttgattggcaaccaagcaatgtaatggacagcccatccatttaccggaaattttttaaacataaaaattaatcgaaaacttttagaaattaaaaaaaaatgttttttttttttgttttttttggtttttattttcaaattcggatttttttcagaaaaacgggaatatggtgttcatcgggagagggatttaggcccaacaaaaccatgcgaaatgcaaaataattagcctaacaaatgtgaaatattttcagcgaaaattgccggcaaactcgcgcaaggcactccgcaagttgccgaccatgggcctgaactttgacgacgtaattgaggaggatcagcaacggttgcgcgacatgcacccg

SEQ ID NO: 57506 - DNA, 775 bp, Heterodera glycines
  unsure (1)..(775): unsure at all n locations
atgcattcaaaatttggcgtttgctttatcctcctttttgtcatcgcttgggcaattgctgctccgaaaaagggctcacaagttgaaaacacatggcgtagaggtgtaactgcaaagaaaacatcagcaaaaagtgccagcgaaatgtccgaccgacgacgggcggcgaatgcgccagcagaaacgtctcgtaggccaacagaaaatgatgacaccgcttcaaagcagcggctggcgggcaaaagtgccagtcagcgagcagcggctaacagttttatgagtttatccgaggaaagggatgaagccgaacagagtgggcaccaatcgcagacgccgagcaaaaggcaacgcttggtcaaagcggtgaataagcagcagaaacaaccgaagaagccggagacgccacgccggaagctgatactttacagcagcgatgaggaggacgagcagatgccgcagaggacactttctgctacagggagcacaccaaacaatttgtcatccgccgccaatgcttcggtgccgttgtcttcccgtcgcatggacaactcatcgtcggcacaaaaggaggaccagcagcaaatgggagatgatcatattaggttgttgaatatgttctgtggtagtgactaaaaactttacatataaaatcataactattaaagtaataataatcattattaataataataataataatttaatttgtcagattatttttaaaaatatttctctatcttttcgcanagttaccagtttcttctcatagttgcca

SEQ ID NO: 57507 - DNA, 337 bp, Heterodera glycines
atgcatcgcgacgtgaagccgtccaacattctgttggactggctgggaaacgtcaaactgtgcgactttggcatcagtggcaaactgatcgagtcaaaaggtagggaacatttttgttcgtcattccccgccatcacttttctccaaattctttctttagcatctacaaagacaggctgtaccggctatttggcggtgcgtttattttttttaatttaaaaaatcatctaatttaagcccgaacgtgtgaacatctacagcgactcgtccggccaatacgatgtgcgggccgatgtttggtcagttggttgattgaaacaacagaattatgctccta

SEQ ID NO: 57508 - DNA, 53 bp, Heterodera glycines
cagttgactaacgtggtcaccttcgccatcggcgccttaacaccaacccccgg

SEQ ID NO: 57509 - DNA, 968 bp, Heterodera glycines
atggacactttcattggactgatcgacgcagtggcaagcgtaaaacggcacattgagaacgagacgaagcagcaacagcaacaacagcagcacaaacagaagcaatcggtggtcaccaaatccaattcgaacgcatccaaagagagcagcagcttaagcgtggtaaaagcggcgcaaaatttaattaaaaaatatttaaatttttattttaaaaaactttaaaaattatttaatttaaaagatttattttaaagtaattagaaatgcacagtaaaaacattttattttcaactgataataataaaaagatgaattttttttttctcgaattttagactttaaatatttttttttggtttttactttttatcaacaaattttcgactttcgactaattgtatattttttcaagttttaatcgctcaatatctttagactaaacatacatacataagagatacgaaaaaaagacaataaaaactaaagccaaataaattttactcccatttgagaattttttgtaattttgtttaaatttgccaaaaaaatattagtaaaataatcgaatcttttcctcttgcatattatcttatctatcctattgtttagtgtgcttatgttcactttaaaaagaattattgtattttatatacagatacatattttggtgattaaaatttgttaaaaaataaacaaaaatatttaattaatgtaggaaaaatttaaaaaattaaaaatggcaattttcaaaaacagttaaaaatgtttcagtccagcgacacttcaaaaagggatcggacacaatcggcgaacagtgaaaatgggtggacaaagaaattgcgatttgaatcgcacaacaacaacgagaacaacaacaaggaacagaaacaacaacagcgccagtcctccgcctcttcttcatgttcatcgacggaagggtgggaaaaatgaatggaaattattgaaaa

SEQ ID NO: 57510 - DNA, 872 bp, Heterodera glycines
cgctgcgctggacgggcgtgacctgaagtggatcaaagtggccgagaccaggggatgccatttgctttgttggggtgggtgttgtttattgccaagaaaattgatttaaaatcatttaattgtaagccacattggaaagtgatgctttgatttgataaatatttcggtttatccagatccctccatgtcttggttccctcccccctctcaaaaatgatcggtccacggggacccggtatcgtcgtccatgggcggagcaggacgttccttcccccacccccacccccacatcgttttcctctgagaattcattataaaaacaccaaaactaatgaatttttcagaaaaggggacttaaggattttttatctaacccaaaaaatctaaaatttttcaaaaactcagaaaaaccctagaaattattaaaaaacagtaaaatcactattttctcttcatatgatttcaaatcttataattcttttaaaatctttaaaaaaatatttattattttcttctatgttcgcgggaccttgtcacaaactttgaaagtctcgcgtttttcgcgtaattagcaaatttaattttttaaattaaattatgccaattcgcgcaggacgcggccattcgccgagcaccgcgccgcatggagcacagcttggccaacactactttgcctgtgccatcctcaaaagtgtgatggtgttccaaatcaatcggaaagagcgacgtcacaaaccgctgcgcgagatggcaatgccgggccaaccgcaatgcttgaagattgccggcgggcgtctgtttgtcggctacccgagcagctttcgggtgtgggacaagcgggacaacagccaaatctgtacgttactgttgcg

SEQ ID NO: 57511 - DNA, 149 bp, Heterodera glycines
gtttcgcatttcgctttttggcgcgaaacgcgacttttacacccctaagaattggattaaattcccataaaatttttcaaaatcttacctataaattgactaattttcagtgaaaacctgtttataaatgatcaaaatttccaattttt

SEQ ID NO: 57512 - DNA, 4516 bp, Heterodera glycines
atgcttcgcaaccaaattttctggattgctttactgttgtcacttcttcgggtggcacaattagctccatctcacggtggcgccgcctacaatggttacaacgaaagcgaaaccgagggggacgaaggtcattagtcattcaaattagtgcttgaacggttttattgcgctaccatggcaattttttggcacaagatttgttataactttcttcagggatttaagtaaaaatatgtaaataaaactcacccctggcactttttttttgttggcacatgccaaaacctgaccgtacaattttaccaactcgaaatcctacccaaactttttttttcggttgaccgtcctgaactccctatccgagttttttcggcccgcaattttcttgggatacagaaagaaaacttcgttaatttttgtataataagtaattttttggttatgccaaatcattgttccgcgccttttggaaatatgttctctatttcaacgcctcaatcaactaatggaggtattttaattagcaaattttacatggaaattttgattttcaagcattcaaattaactctcatgttttaatacctatgactcgaaatccttgtttgtttgtttttatcttcatcagaaattcggctcgtcttttttctgtcgacacgccccgaaacccggtccgactttgttttcaacccgaaaccagacaataacactttagtcttttccattttttcttaatattgagctaaattccttaaaaaacatgattttttggaccaaaaactgttagcgaactgtgctaaaatttacaacagtccccccacccccccccctaccgccgtcccattcaaacatttttagacccgaaagccgaagcccggttttgtgggctcgaaaactgtcccgaacttttttaggcgtcacgaagcctataacccgaccctacatttttcccaaactcgaaatcctatccgaaatttttaatttatggacctgccaactcatggtttcatgatttaacaggaaatattttctctggttcaacacatcaaccaactgatgaagaaggtatcttaattaggaaattctaatcaaaattttgatttttaattatgcaaagaatttaagtacttattttaattttttttttaataaaaatgatttcgttattaaaaaattaaaataattatatttaaacaaaaatattacacagtttttcataatgatgatgatgatgaggagttaaagcaactcaaagatcgcacacgtgccgaatatgatcagcaacaaattgcgaaagccatggaaaagtctatggaagaaattggaaatgatccatatcgtcaagagatggaagcaatcaaacaactgtcattaaaagaacagaaaaaaagggagaaagaactgattaaattggccatacaacaatctatagaggtactgtaataccgtattaccgaaatttcttttttgtttatctttgtatttgtctcggagcgcagagttggggtttttctcctattttcaaggtgttatgcgaagggctcaaaattatatgggtttatagcaggggtgcgatcgaaaatttttcaaaatcagaacatcgggctcaaaaaatcagattttggggtcaaaaatcagaacattttgcaaaattgcttcaaatcagttatttttataatttatttaatcaaaaatgtattaaaaaattatatttttcgcctccgattatcatctttaaaaattttggtgaggaaattagcaaattgaaaatttcagtgcactcgggatgaaaaattagactttttagaattttttttcggcggattttccaaaacttttgggaaatgggcgaggggagagggtccggcggtgccgataggcgccgccggaaaattttttttataatttcgttttgatttgttaacagattttcaccaaaaaaaccgctttttgcaattaaaagctaagcgacgacttttccttgcgttccaaatgttgccacaaatcttatattttcttgacaaaaaagtaacattatgccacaaaatttcaaaaatatgagtttatctaagaaatcagaatcagaacaaattttggtcgctaccccaaaatcagaacatttctgacaaatcagaacatttttattttatcagatttggaccctccaaatcagaacatttctgacaaatcagaacatttttattttatcagatttggaccctccaaatcagaacatttctgacaaatcagaacatttttattttatcagatttggaccctccaaatcagaacatttctgacaaatcagaacagatcgcacccctggtttatacatatttttctgggcatacatatgctatgaagaaaggggctcaaaaaaacgcatttctgcgttaaaattttcttttttggtgaatgtttttaatgtgtagaaatgtatttttttttggggggggggttccgagaataaatgcatatttcgccatttttgcgtttttagtccctatttatgcaaaattttcacaagaaaaatgcaaaaaaaaaaaagaagcgaaaaataacatcactaaggatcgagtttagaaataaaaaaaatacaccccccaaaaaggagaatttttttgaatattggcaaatttttggggtactttgttagtgtccgaaaatgtttgctgacatcaaaatgaaattattacaaaaaatttttttgagatgtattagatttgaatgtgataacatttggcattcttaaggtttaaatccatttttaatagtttattttttaagtttatttgagcaattttgaatatatacacatttttgtaacttttgtgggttttaaactatatatatatattggcagtttttagtccgtattttggtacatatttggtcatttttgagcttttagtccatatttcgaattttagtcctatttgatacgctcataagcaactaaatttttaatttttgatgtctttcgcgagccctagatattctctattagccagtaaaatttcaagaaatttcgttgagtttcaaaaaaaattatgatcaaaagtttcaaaatttttatttgggtcttggtcatgaaatttttttaccccattcttttttttttagtccaataatttgtaattttttaattcaacagcaaaagccaagacaacaggcaattgaagaaaaatctgaacatgaaaaactgtttcatgatcttaatgccgtggaatcagaagcgctgcaactttatatgctcggcttggtaggccaagcgaaggcactgcttagtgaaagtgcgcaaagtagaagagctaaagtgaaagaaagatataaattatgggaaatgcaaaacgctggtggtggtaatggtggtagtgttggcaccggtaacactggtgccgttattggtagtgccggatacggtggtgccgaaactgatagaccgtatctaaacagcaggccggagagcagtaaagcagcggcgcagcgtggaaaagctgtggatcaaccaaatgaagtaaaagcaaaaatttatcatttttgtgatttctcaatatttttgaaaattttatgaaaaattttgaaatttcgtaattttcgaaaattcatgaaaattttacaaaatatttgttttggtaaaatccgttatcggttaatgtccaaattggtcaccgagaaaattttttaaaagaaattaaaaattcaaattttccttaaccgacctattgataattagggtgatggtttatacgggctaaaatattgcataaataactatgatttttgcaataggctttttccaaaaaaaaacagaacttaatttgattacaaaagcttaggacagacttataaaaaccaatttgttctctctacattcaattttaaatccacaaaaaacgcttgccctactgaaaacttttaatagtttaagctaattaaaaaataatttttaattagatttattcgaaagctaattaaaaaaaaaaaaatttaaggcatcggctggtgatgaaggattgaatgaagctgaaaaaactgtttttaagaatggacttaacatgggaacaaatgaacgcgaactatccctttttcagctttctgataatgaaagcaaagataaagtgttcaatgcttggcttaagcaagatataaaggaacaaaaataccgtaaattgttggacaaggacaacgatactagaagggaagtgaagagatagagagagcgagagagtgtagggggatgagtttagtaatgatgtacaaaacggaaattttgccgagaactcaagaccacgactaaaaaaataccccaacttttgtcgagaccaaactctcggaagtgttacttactaatacaggagtgttcttgactggaaagcgagaattgaaaattgaccaagagggctgagactgtgagcagccaaaagatttctcgaaaccctaacatatttcagacccgcagaggtggtccaggtggagcagttcacgcagttttcgcacaatgggatgtcgactga

SEQ ID NO: 57513 - DNA, 474 bp, Heterodera glycines
atgaaagaaaataaaaaagaaattgaaaataattcttgttttgctggatttcatttgaagattttggtggtttgttaaaaatacgacagatcgaataatcaaggacgacatttaaatgattaaaggacccataaagatctatgttcaaacaaattcactgctataatttaatatcaggaagaagatgatgatgatactgtatcgcatatagggcacaatacagatgaagaagaggacgatgctaccgtattgcatacgaggcgtaaccgcgaccgggaagaggatgttgctacagtattgcatacggggcgtaaccgtgatcgagaagagggtgttgctactgtattgaacacaaggcataatactgatcacaatgcttacagtgacattgtatcgcattcggagcaaagtgatagtaatagtgaccagtacgaggtacagtaccatgataaaattgatttaggcaatgtagag

SEQ ID NO: 57514 - DNA, 641 bp, Heterodera glycines
  unsure (1)..(641): unsure at all n locations
cgctgagcgtcgttctcctcncggcggagccagccgcgctcgcactgtctcgaagacatctgccagcgtgaaaataaaatgcttaatttacatattaaactggagtttaagcccgctgagcgtcgttctcctcccggcggagccagccgcgctcgcactgtctcggagaaatccgccagcgtgaaaataaaatgcttaatttacgtatgtaaactggagtttaagcccgctgagcgtcgttctcctcccggcggagccagccgcgctcgcactgtctcgaagaaatctgctggcgtaaaaataaaatgcttaatttacgtatgtaaactggagtttaagcccgccgcacgtcgttcttctcccggcgataccagccgcgctcgcactgtctcgaagacatctgccgtcgtaaacaacaaaaaattttaattttgcaaatataaattgaagtttaagaccgccgaaagcagtacttctcgcttctcgctgcctcagttatttggaaagaaaaagaaaagcggcaagggaaaaccgaaaccgcaatagaaagtggacgggtcaaaagatggaagcaaaaagaacaaattggaaaaaatttgatggaaaattgtttttttagcttatatacacaataaagactt

SEQ ID NO: 57515 - DNA, 576 bp, Heterodera glycines
tgccaattgcttttgcggtccatttctcatcgcggacaaagtgcgcgcgctccccgccttttacgcgtcctctccgttgccgcatgcgatcagtacgctggtcaaggacttgctcgcgtgcgcggccggcctcggcacgcgtggcgtccgcgagttgatcaacctgttggtgggcgccgatcggaacagcaaagtgccgctgcagatgctgctcaaattcaaatataccaaccgacgggtgcgcttcagtgtggaggcatgcgaacgtgccgcgcaattcccaggatggctgagaacggtgcggcacagaaaattaaaaaatattaaatgttttcaacaaatttgcttttagaaagggtctcacatagcattattatacagcagattgttgacaattgaaaagcatcatttcagttgcttattcggctggacgcgtgtccaaatttgctgtcactggagaagcgggacaaatgcccgttggactgctcggccagcctcgcctcgtcgctttatttgtgccatggcggacatgtgaacaccgccagtgcacagtcgtcacaacagcagacgaacaag

SEQ ID NO: 57516 - DNA, 789 bp, Heterodera glycines
atgttgatgaatccggttgcagccacaagcagtgaaaatagcaaaactgcggttggcttcaaacggaatcaaaaaaccacacaaatttcaaggcattgtcaaaaggatgcaaaacaacgaaatttaacgctgatgagaataaatgtaatgacaaagatggagagcaaaacaacgattacggtagtgaagcggaaaaaggcggtgatactgtagaggaaaatcaaatcgaaacggaacaacaaattgaaaatgacgatgacaaacagcagcaaatggaagcagtaaatggagaacatattgcaacacaagtgtgtgttgaatgcgttgggaaaatcctaaattatttttgtcttaccatgtaaatttgttcgaaaaatatttaagaaaaaattttgtttgcaagcattatgatgggatgaaaattgaaaaagctttgacattaacgaaaaaaaatcttacagagtcctcctcctcctcctcctcctggtgttgatgaaaatacacccgaacctccacaaatcgacccaagtgattgtgccaaaaattatgatggcatttcactctcagaacaatttggggagcagaatggtggacaaatggaaaaggaaaatggtgagtgagctttaacatttataaccaaacaaaaaatatttatgttttaaattctaattacaattattatatttaatagtccagtcaacgtcgtcacctacaactagcagccatccacaacgtacaaatgaagttgattcattaacaataatcgatgatggacaatttattgcattg

SEQ ID NO: 57517 - DNA, 337 bp, Heterodera glycines
atgacaacgaacctttggctgtgcaacagagacgagtacactttgggccccaccaacaatgaactgcatatcggtaagggcatcctaaaaaagcaatctgtgcttattttcagtgtggccaaatctaacagcagcggacctggagcaatgtgtgtgcatcttcgacaatgtcttccggtttatggtgaatgaacaccactttaaagtcgcatccgatctcagcccaatcatccgccatcagcgtaagaaagtcgcttgattacaactcgcagcaacaaaacaaatccgatgttaacactaaaagcaattgctttctttcaatcaaaaaaaaaataaa

SEQ ID NO: 57518 - DNA, 1168 bp, Heterodera glycines
atggcggatgattgggctgagatcggatgcgactttaaagtggtgttcattcaccataaaccggaagacattgtcgaagatgcacacacattgctccaggtccgctgctgttagatttggccacactgaaaataagcacagattgcttttttaggatgcccttaccgatatgcagttcattgttggtggggcccaaagtgtactcgtctctgttgcacagccaaaggttcgttgtcattttcgatggcaatcttaaaactgatttcgtttagtctttcaactccatggataacggaacggacgtggaagagttggagccgcgcattgagttttacattggactcatcgagaagttcaaatccgtcggatgtattttcgtgttggatcatttgatgcaatgtttgcgccattaccaaatgcaaaaccgtcgtctgctttacttgcgctatcgtgtggaattccgtccaccgattggcattgatttgccgcccttcaaaaggcacttgagcgccgcggactcggcacaattgggccgcattttgctaggcaatgttatctggcacaatcagttgtacgtgcgtagagtggtcaagccgaacaggaagaagatggaggagatattgggcaaagacattcggcacgtacagataccaaagtctgtttggaattagccacacttaattagcccaaataaataacgttttaaagtgtgccattgaatcaacaacggaaaggcagcataaacagcggaggacggggcatcgatggccaagtactaagtggagagacgccattggaaaagtcggacagaattgtgaattccgctaaatcgtcgattgaaagtgacaaattctcgatggagaatggacaaagtccgaatgacagaaagcgaaaccatgaggaccgcaaaaagtcattggcaacagacagaacaactacaccggaagagaatggattgacagaaaaagcgcctccccaaatgggacaacaccaaggggtaagtcaataaacatttaattattcattttgtcatcctcctttggatttaaattgcatttattttttcttattacttgcagcgtggtcttaatcgcaacggagacagcggggtggagttagtgaacggaaatgcgcgcgatttcgacgagattgacggcattgtgccctg

SEQ ID NO: 57519 - DNA, 917 bp, Heterodera glycines
atggtggagcacgaatttgtggagcccgattctgcagtggacaaccggaggaaaagggcgttggatgccgccagaaagattgtgtgtgttgagaagggcggtgtggcgtggaaaatggtagatgaaggcaaggaagagagtgaggagaaggaagaggaaaagcagcagcaggaaaaggatgagaatggatggccaactgaaaacaggacatgggagcagcagcatgccgtgttgggtaaagtgtcaatctggcgcgactacttccgcaacggcacgaacagcacgtccgccttcgtctatggtgccggacagcaaatcaaccaacaagatgggtcccttcgcagcagaatggccaaatttttgatgcgagacaaccaaagttggggcagtgatggtgcttttgaccgcgaaggacgtgatgcccacggcaggagacgcacacacctgcgccgcaaaaacgttgttagcacacttgagcgtcgatttgacaaaggggtgagcaatctatggcgttgaaaaaattgcatttgataaaaaaacaaaaactgaaaataaactggatgaaaaatccgaaaaattgtcctaagattttcatactatcaaaaaatgtaagtttttaaaaattcagtgaaaacagcgacttttcatctaaattttgatttaagcaaaaaataaatgtaaaataaccgttaaaaaatgcaattaaacactggaaatgagaggactaattgaatgtctaattttagagttggtcaagcaatatggaaaaagggaggcgattagagacactgtggacgagctcaagtaactgttttgcagagtttttggcaaagtcctatgaggaggacccagtacttctacagcgggtattggaagaaaatgaggaggacgaagaggaagcaattgagggaatttga

SEQ ID NO: 57520 - DNA, 172 bp, Heterodera glycines
gtgagtctcgcgacgatgaagacgaattgttggttgacaatgaagaaacggaggatgagcctgagaagtgcttttgttgtgatctgtcgaacaatttaccttaaaaagaatattatttttttttatttaatattttatacaaaaatttgtttaattatttttaggtgaaata

SEQ ID NO: 57521 - DNA, 192 bp, Heterodera glycines
atgaatttggcaacgggtcgctgtgcaatcggtgtgattgtcccgggttggacctgcacttttggcggttggaaaaacaattttttacaaattatgccttaaaattgttttttagaaaaatttgtaaaaattgttcatgtcggcttgatgaacatgacatacttctaccaaatgagcaagaccatggcataa

SEQ ID NO: 57522 - DNA, 1195 bp, Heterodera glycines
  unsure (1)..(1195): unsure at all n locations
atgaacaggtaagcaacattgagcgagtaatcacccaagagtggtcatagtttatcgtgttcatcaatgcgatggtaaacttaaaaatgaaataatttaaaatatttttaacaatttaaaaaggtacggttcatttcaatagggcttttgactcaaagcttctaaagcattggtccattctaatgtgaattgtattttcaaatttttttcttttgaattttgcgccgcatttagtgactaccgtaactcaatttgtgtttgcgagcaaaaatcgggacttttatggggtttttctacatatttacatatttcgagatttttttacatatttgtacatattttggacttttttcttgtatattttcatttttttttacatattttgaggattttttactatttttggaaatcctcaaaaaaaattcaaaatttcagcaaattttttgttcatattttcattttttttacatatttgagaagtgaaaaaataatttttttttttgtttgaaaatgtacccctgaaaaatagcaaaaagtaattttttaaatactaaagggtgggtgacctatttaagtcactttttaaggcattttgttccctatttcactttacgaggaatttttttttccaaaaaataaccatttttaaaaattttatttacatatttggggttttttgtacatatttatgtacatattttgaccacattttgtacatatttttggcagccctatttatatgaatttgacaccgttttatattagttaagtttagtcaaacaataacggaacctaccgtaatgccaaaccaagataaattgaaaaacacagagaaatttccatgtgaatttttgcgtactgtcgcaataaatcgttcgatgatcagcgcatgtccaagcaatcgacgaaatattgcagaaaaaagaacagtagactatgagtgaaaaaattcatattgccttgggcaaatatgtccttggaaaagaatttctggacaagcatcactgatcggactactaaataaagcacaaagagcatactttgagtgatcagaatgcttttcaggttggcatgcagcagtttggtgggcacaattatggccaaattcagaaaagtaatgaacaaagcagttaaatcggagatcagttcgaacgaagagaagatatgtgagcaaaaangggggacaantgtctga

SEQ ID NO: 57523 - DNA, 840 bp, Heterodera glycines
cattcaatcactgggactcaattcttctgcatttcaatcactgggactcaattctcctgcgtttcaatcactgggactcaaccctcaagcatttcaatcaacgggactcaatccaccagcattcaatcactgggactcaattcttctgcatttcaattactgggactcaattctccgacatttcaatcaccggaactcaacctcagcaacggaatacagaactatttaaaaggaatccagaaattgaaatataacccataaatcaaaacactatggtgtataattaatgcccccaccccataaattcaaattaaaactgacctgtttaaaactttccacctaaatttgatcccgcaagtggcacgtcaatatcccaattgcatataaatattccactcgaacacaggcaaaacatgagatgtagcatttatattgctttttctatccatcaaaggctttttctttcattttttattactatcataacatgctttttattcaaaacaaatatcaaaaaccaaatcagattcttttcatattataagcaaggaaaagtacaaaaaacttttttaaataacaaacctttttcattcaaacaaattctaatgcatttttttaaccaaacaattctccattatcgtttacataagcaaaacaaaagcttccacatcaaaatcaaatcaattaacaaaaacaaaatttagacaaaaaaataatgataaacagcaaaaccacaaattttttcttacacacaaaaacagaaccttcatataccggattttccactcaaacaaacacaaaaatgtgctcattcttttgttaaatattttatacaataaa

SEQ ID NO: 57524 - DNA, 733 bp, Heterodera glycines
aaggaacatgccgcagtgccagccgaatcggtacaactgcttgacggcaatgtggttgttgtgctgctgctagtgctggtcagtgttgtctcagttgtactttctgtagttggagttgtggatgtacttgttgaacttgttgtggtggatggcgttgtagacgtacttgttgaacttgttgtggtggttggagttgtggaagtagttgtcgaagttgtgctcgtcgacgaactgcttgagcttgttgtcggtgttgtggaagtacttgttgaacttgtcgtcgtcggagtcgtagtgcttgagcttgttgtcggtgttgtacttgttgagcttgtcatggtaggagtcgtagtgcttgagcttgttgtcggtgctgtggcagtactggttgaacttgttgtagagctggatgtagtaggtgttaaagttgtgcttgttgatgtactgcttgaacttgatgtggttggtgttgttgatgtactgcttgaacttgatgtggttggtgttgttgatgtacttgttgaagttgtcgtggagcttgtactagtagatgttgaagttgtgcctgtcggtgtactagttgaacttgtcgtagtcgaagttgtggatgtactcgatgacgatgtggacgaagtgctcgtcgtttcttcttccgatgaatgagaagagaaccagtgggatgaaaccagtgttgtacccaaagacagcaacaaaactaacacggttttacaaa

SEQ ID NO: 57525 - DNA, 996 bp, Heterodera glycines
  unsure (1)..(996): unsure at all n locations
atggattcccaccataaatacagtaccatattttttantatgctttgtgatgacgaaatgagattggtacgaaattaattgagtgtggtggtacacgccgtcattaatgtttttaatttcgtgatatttctataatgagttttttttgtagaggttttagctcctccctttatttatttaaatgccatggaatgccgaatttttcattttatatttccttgatttaattttttgacataatttttcttaactgaaagacttctgtcacgctttttcgtgacaaagtgcacaatgttgtgctttgttgtccgatcggtgattggggaggagtgcgctgggattggagtttcccggaaacgatcaaagaacaaataaaattatttattcaccgcacaattggacaaatcactgatggggaaatgcaattggaaaatggaaatggaaatgcgaatttgggttcatttggggccatttaaatattaacaaaattacataaaaaattgaaaaagtggacagaaattgggcgaaaaatgagctgatcgaacggggggcaataattggagaaatggtgaaaaaatgggaaatttcgatcacaaatgtgggggaggtaaacggagtactttgatcactcaaatttcggtttttaccgcacaaatgaacgaaggagggcaattagtgacaaacaattttacggcggttggacgggaggaacggggcaaaaatagtaatgaaattgggtgaagaaaagttgcgatttgatgaattgtcgcttaatttgtgcgcggggaggggaaaggaacacaaaaacaattgacaatttggaggaaaaggggggcagcgggctgaaacggcgaaaacatgttgtccggggggggggaggaggcccctcccgatcgtagccgatcaatttgatcggctgtcggaacacagcaaagttccgacacttcgcataaacaaaaaaaaatagaatcatttcaatggtcttgagaaaaaata

SEQ ID NO: 57526 - DNA, 473 bp, Heterodera glycines
atggccaaactccgttccgagttggacattgtgcaggtcaatttgacggtgctgcgtgaattggtggcgcaaatgaaaccgacgaacgacggcggcgtcactgaagcgccggaggactttcattttgtcagagtaaggagaaaaccgcggacatttcccaccgatggccaaccgacaaatttatttatccatttatagggatgagtagcaaagaaacaaaagggtaattaatcaaaatacacaaaggcccctataaatttagtattatccattttagtaaacttttgccatccaactaaacccaacttcattaataataaatgcttagatttgataatctaaataaaaacaacgacaatttgagcatgaaattctaacggtggtggcatttcaggaattgcactcgacttgcaaagagatgcaaaagcgcattttggagctgattccgtccgtctccaacgaggaagtgactt

SEQ ID NO: 57527 - DNA, 805 bp, Heterodera glycines
atgctgtgcgcattggttccgaatttggtggccatttgtcgtcattgtcgtacaatgccaacaataaacccattgaatttgtggcattccgtagcccggacaacaagcagcttgtcatggtgttgttctcgtccgtcactcagacaaccaaagtgaaaatccatgacgggaagcggacaattccgctgacaataccagcccaaggcattgtcacggtgttgtgggacaaataatttgaattaaaccatgccaagaaaataatttttttttctttttttgtaaaaaattggtgtcagataattaattaataattcaataatgtaatttgcaaatcaatgcgaatatggttttattgtttaaaaatgttttttttcatcttggataaatgtcaataaatgatttgaatattttacataatgcgattttcttgattaattcatacatttaaatggagttagcattttgttaaaaaataacgtaaataaatgctgaaaaaactaataaaaaagtatcaaacaaatcaaagtctttgatcaccaaaatcataaataaacattaaaaaaattatgatggaaatattaaaatgattttgtaattgtcaggagtaaaatttacagggccctaaacttatgaaaattccgttctccaccttttcagtgttgcagtttcgattcacaatttcttagcaattattttattgttaatttttggatttccttctttaattttgaaatattgtttcagctttgctaatttttcatcattggaatatttattttgtgtttaaatataaaatgtaaataaa

SEQ ID NO: 57528 - DNA, 474 bp, Heterodera glycines
atgcctttaggcgttaattttaatttcaacgtgtcacaggtgatgataggaggcgacagaaaaattttgaacatttattagcattttgcatgaatttgaaagccaaaaaggaactttcaaaaaaattttttttaatcgccaagtagtgacaaaaactgccaaaacccaaaatatttttatgagctaaaaaatcgctctgattgaaaagcaaaacaggtaaaaatgctatttgtgagcttttcatgtgataatctattcgcaacaaataatttaaaacataaaatttcgttcctgacgataataaaatataaaattatttaaaacatatacataataaatcaaaattttcagttttatcaacaaaccgagaacagagaaaaaacattttgcaatttttgacattggaccatgtcaaaattttgttcaagaagcttgacattaaattttataacaaagattttttagaaaaaaata

SEQ ID NO: 57529 - DNA, 644 bp, Heterodera glycines
atgtacgcgacggcgcatttagcgccccaattactcattcgccatttgtcattttgtctttgcgcaacggtggcttctgcctttgtgtacggtagtagaggtggtggcgcatatggtgacggactaagaggatacggtggtgagtttactcacatagtataaaaaatgttcacgtacaatccttttgtaattatacatacaagtacccaataggtgccgtatacggtagcggtggacactacggcgactgggatgaggacggtgacttattaatttgaattttgtgctgtttttgttctacatttaccttgcacagcacaggtccctaccgaccgcccgtctaccgtagaccgatgtacaaaccagtgcccggcccgctgtacggctacaataagcgtcccccagtatatggcggtggcagtggcaacaattactactacccggcacccgcaccaaaaccgccaactccgtgcccaccggcggaaaaggtgcgtgaccgaaaaatgcgtcagtgatagatagttttcataatatggggtcgtatgtagggctgctcaagttctcgactcgaaaaaaggtcggatgggttgtgctctagattttatgcctcgtttttgtgttggttcagttccgctccaaataaa

SEQ ID NO: 57530 - DNA, 697 bp, Heterodera glycines
ttacattgatcaaattgtcattggcttctttcacaacattcgtcatctcttacaaaaagtggaaattactgtgcttttttgcaacaatcgtcggtcttacgatgttttacaacaaatcgcaaagcatttttggccattcctttcggaaggaattgttgcaattgtccatctgaatggaaatgaattgagtcaactgatgaagctgacatccccatccgtttttcgggagtgtgccaaactccgatgcatttattgttcccaagtttttcccgagagtccctcctacgacggcaccggcgcatccgtaggccaagcactgtccaagtggcttcacactccacgcgctgacggacgcccaaaagttctcaaatgcgtgggcctttcacacattgaaaagcatttggaagacttaaaaatggtgtttaaataagccaaattttgaattttcttttttgcctttaggcgttcatcagtgctgaatcgcccgtcagttatgtcatttgtctgaattttggaattggttttaaatacggtggacaaccatttgaatgggacaatgcgcggacacgagaacggatgacttttcgttatataaaatatatttgctttggcggagtgtggctattgcgaaggggcccaattggttgggatgaaagcgaatggtcggagagtgaaaaaagagctcaaagaggcggag

SEQ ID NO: 57531 - DNA, 403 bp, Heterodera glycines
atgcgccggtgccgtcgtaggagggactctcgggaaaaacttgggaacaataaatgcatcggagtttggcacactcccgaaaaacggatggggatgtcagcttcatcagttgactcaattcatttccattcagatggacaattgcaacaattccttccgaaaggaatggccaaaaatgctttgcgatttgttgtaaaacatcgtaagaccgacgattgttgcaaaaaagcacagtaatttccactttttgtaagagatgacgaatgttgtgaaagaagccaatgacaatttgatcaatgtaactggaaggaagggaaagaccaatttgttttccggcaattcaaaaaaaatttcaaaaattaaaaaaaaaaattttaaattaatatttttgccatccctagta

SEQ ID NO: 57532 - DNA, 475 bp, Heterodera glycines
cctattaaatatttttttaaaaatttattatattttttttttgaaaaattccgacttccgacatttttggggtcggaattccgacttccgaaaatttttggggcatcggaattccgacttccgaaaatttttggggcatcggaattccgacttccgaaaatttttggggcatcggaattccgacttccgaaaatttttggggcatcggaattccgacttccgaaaatttttggggcatcggaattccgacttccgaaaatttttggggcatcggaattccgacttccgaaaatttttggggcatctgaattccgacttccgaaaatttttggggcatcggaattccgacttccgaaaatttttagtgcctcggaactccatccctgattcaaagcctatttatatggcattttgtgcctattttccgctatttcaccatttactagtaattttttccaaaaaaataaccattaaa

SEQ ID NO: 57533 - DNA, 1783 bp, Heterodera glycines
atgaggttcttatacaattttttcaatgacgaagaatgttttaattattttaaatttgaacgccgggaaaatttgggcgaaaacggatcctagccaaaaattgtgggaatttcggaatctctctgagctcgaatctgacaccaattttgaccaatccctaatccaaactcgaaaaagtcgaaatatttttagaatttcaattttttgttcaaattgggaaagtgatttggaattgattcaaatattaatcaacgacttcaaaatttctgcaaacaaattttcactatttattatggacaaaaaaattttgaaaaaaggctgagaaaatttccaaaaaataattaacccattcgaaagcgcataaaattttaaagccataaaatacatttcttaatgagatggtcgtgaaaaatttaaagttatccagtaataaaataattgctaaaaacccaacaacccgtaaatattatatttcttggtgttccttttttgtagcatttaagccgaaattaaagcatttgtccatagaaatacgaaaaacaatgtttgattgtgcatgacgcattagtgaagctgccagcaccgacgactatgtccgatcatccgcgtgaagctgagcgcagtttaataagaatgtgacaatgttttaccacttaatttttgaaatgtttaatacttttcagccatctttgtgacgacgtttggcacaatgttttcgattgttttgtgcgtcccgaactcggccacaaaattgcgattgtctgtgcccgttttgatgcattagtggaacgacatttgaggaccaaaaaatggacacttcgcgcccttgggttttaccaaaagaaggaagaaaagagcacagaaatgcgaggagtttggcaaaggaaaaggcaaaagtggatcgaaaagcttatgctaacggataaaaatggtcagatggtaagggcaccgattttggatgtgccacctcctcccaatttggtcggtttcaggaccattctcgtgaggtaaacacgtaagaatttggcaattgttttcattttatttttaattttgatggaaatattaaaaaataaaagtgatataaaaaatcaaacggatggcgccgggtaaaaaattggattttaaaatacggtttgttgaccatttaaaaaaaacgaacatttattagcagggatcatttttttatgtaaatacattttcctggattctccatgctctaattagtaggaaaacactttcttttttgtttttgcgaacaaaagttgggacttttatttacggattttcctacatattacatatgtacatatttttatacatattttggaccttttgcattttttttgtacatattttgcaatttttgatggtttcttagcgaaatttttctgaaatgccccctaaaatccaaaattcgcaatttttcgtacatattttcatttttttacatattttgaggattttatgaatttttatagaaattttttgtgaaaaataaaattttttaaaaaatctatccctaaaaatcgattttttttttcaaaaaatgagctatcaaaaattaatttaaaatacaaaaaagtgattcaaagcagggatggcacggaattccgagttccgacttccgacatttttggggtcggaattccgacttccgaaaatttttggggcctcggaattccgacttccgaaatttttgatgaaaagtcggaatttttcggaatttttctgagttttttttcaaaaaattagcaatttttgtacaatttatgttaataaa

SEQ ID NO: 57534 - DNA, 697 bp, Heterodera glycines
atgttttatgagataaagtaatttctaatattagatttctacgttttataattttttgttcaattttttcattaatataatcttttaaaataaatttatttaaatcttcaatatttattcttctcccacttttcaaacctttaatttttataatttcactatcatctaaacatttaagtccatatatttttggagcgataaagattcatcagtatataatttttcatctcatttaatggaaacacctatgaaattatctaatattttaatagaattatcattacttccaaaaaataatgaatcagtgtcacaatataagatttcaacatcattattatttaaagcatacattatactttcgtataatattgtacgaccatatctagtaatcattgacgctaatgaaatattaattgtagttccatcatttaatattttaatatccttatcaattctacaaaaataaaaatcacccacattttgaataacatgtttaatttttgtatttataaagtcttcagaatttaaaatatttacatatgaatcataattttttctaccaaatttaccatataatgaattattcaataatttaaatatattagtcattgataaatcttcttttattttataaaaatctttttgtattaaattataagtggtatacttatctaaaacttctgatttattaaataaa

SEQ ID NO: 57535 - DNA, 1143 bp, Heterodera glycines
atgggtccaaaacagtttcttgtgctgtccattttcattattatggcaactttttctacaattttggccaacaaaaatacaaatcggcgacaaaaacgaatggacaattcccaggaaaacaatgtgccaatttaaataattaataataataataattttaaattaaaaccatttaaacacagagtacggtagtccgaaaaaggaagacgaccgtgactacaaatagcggtggtgaaaatgccggtgaaaatgttgctgtgaattaccaccaccagcagcagcaacaattaggcaagtaaattgaggagaggcggaaaaatgagacactaattagtctattaatcattttctcacacttttttggtaataagcattgatttcctcgttaaaatcagttttcaaatcgctttttctatttttttcatatgtaatctaattcgctgaaataatttaaaaaattgtgccagagttcttcgagccagcaaaagcctttggtaaatcagcggctacggcactttcggccaaaaccgtgccaaagcgcaaaacacagccacaacaaatgggcacgtcactgaattcgaaacgaaacgtggaagaagccggtcaaaaccaacagcagtcaccgaagtatgctgttactttggatggcatcaaagaaatgctaatgagcattaattgggctgctacttcacgcccattaacggatgatcatgatcagttgggggcccaacatatgggagaacaacaaatggacaacaatgttcagcaaaatttgaatgatgcagatgaccaatttggtctttcaaatattggaatgcaaccgattgatgtcatcggcatgctcatggaagatgaacccgacaaagaaaatgttgaaatatttgtcaaacttttaaatcagtgccatttaattttggccatagcaacggaacacattcagcacaaaagcaccaatgtgccgaacctaccaatggtattgtgggacgaaaattgggaggcgatgtccaattttattcaacaaaatggtggacatgtggtcggatgtgcgttgttaaacaatgcaaacgatttgacacgtgaagttgcggatgttatcgaaaatggtaaaacataaaattgaaaaatatattttgaattgtgaca

SEQ ID NO: 57536 - DNA, 378 bp, Heterodera glycines
atgcgtgcgttgatcgcctcgctaagcaccgacaaattggtcaatttgctgaacattgaatacgcgccggaaggcacggagaaacagctgacgccgctgatgctcgccacggtgttgggagacgcgcaaatggcccatatttttgtgagttaattcaacggcattctccgccaatttatccattgctacaaagctcattgtcggcagaaattaatttttaaatgtttaaaatttaaataaaatccatttttatttcagctggagaaaggggccgacccccacagaatgtgcctaaggaaaatcaacaccgatgacaatttgatcagtgagttgagagaggaaaagccaaaaatgaaaaaagtgacatttgaaaaataa

SEQ ID NO: 57537 - DNA, 488 bp, Heterodera glycines
  unsure (1)..(488): unsure at all n locations
atgctcgcggcattttgttcgacaggttcggctgctggcaaccgaattttaataaatgcaccaatttttcgtcgattgaatgtgagtgagaaaaaaaacgatttttagggaaaaatgttttttataataaattttattaaaatttgcaaaatttcccacttgtaattttaagtcaaaaaaccccaaatattcattttttggcgaaaaacactaaaagccaattttctcgaattttttttattcctttttaaaatagcgaaaaaatatttttttttccgtccctctaaaatttcccattttttaaatttcaggcccattgtttggcgagcactttggtgttggcggagcacaatgaacaaaagttgagccagatcacgctgaatgcggtgacggccgccaaaaaattgggccaccaaatttcgctgctcgtggccggaaaaaatgccgaggcagtggccaatggggcagccaaaatccctgacgtanag

SEQ ID NO: 57538 - DNA, 606 bp, Heterodera glycines
atgaattgtgctctcgcttcatcgttttcgccagtcgggaaacatttcgctgcagtggtcgcggacaagaaaggaatgaggcctgatttgtacgtcaatggcgaagaattggtagaacgtcttggttcatgcgttaagaacacacagatcgaacttcaaaatttttttgtgaaagttgaaggtaattgtaattgttggcattacctttggttttaatttgagttttcaagtttttttattatcatagatgaatgccttcagctccattgcgagatttcatccgtcaaaattggtgctgggcgcgttaatcttgaggcgattttgacgacaccaattaaacgtcgtagttcggaaactttggagccaattaagaagtcgcaaaaaaatgggtagtatttcgtttgttgtccgttgcttggatttgatttgtgactcataccttttcgattacgtattttatgtttgatttttgatattttgtttgttattgttatttaattatatttgtgatcctcacacattatcaaatacggatataattttcattttgtaattgcgctttaaaattgttgatttgtcagaaaaatgttgaatttattaaataaa

SEQ ID NO: 57539 - DNA, 498 bp, Heterodera glycines
tttacccacttttacccaagatggacaaacttggcacggagaccaaccgattgtgccaattgtacccggaaaagtcggaagatattgcagcgaaggtggacgaagcacgcggccggtgggaggcgctaaagctgagcgtggagcagcgcaagcggggtcttgaccgatcttacaaccggcaccgcttcatggccgactaccgcgagttggtcgagtggaccaatggccaggtgatcgggcacagtccgtgccaaatttgatttttaccgcaggattttatggtttttggataaaaatggcataatgtaaagtaatttgttgagcgatatatttggcttaaaaaatgcaattattatgatctgcttcttacaaaaaaaaagtttaaatttttcaaaataatttgttctgttcaaaaggcactcattcaatcgtcggagttggccaaagatgttgcgggcgccgaagcgctgttggaacagcaccaggagcacaagggcg

SEQ ID NO: 57540 - DNA, 1344 bp, Heterodera glycines
atgccgggattccgacaactgaaccggaatacgatgcagaaatatacatccatcaagtgcaagggttatggaacgtcaaatatcccggtgagtacaaaattttcatatttaacgattaccagatacgaccaatcaccaaatctgatgtcaccgactaccaattccccattcttctctaccacaacaacaaccactttgacggcatcaaaactatctccaaattcttcaataaaaattattattgcctctcttgtgaaacttttttcagtaacaaaccccaacattcaatgaattgctcttcactctgtcatggatgtcgggaggtgggcgttgactacccatgcgagccacaacagggatacttcaaaaaatgtttgcactgcaacaactatttctataacaacgactgctatgaacgccacctccacaaggatttgtgcaccaaatttcagcgctgcgaagattgtggggtaatttataatgtaaagtatcacggaaatgtaggtcaccaatgcggagaaaggttttgtcgtctatgtaagcagtttcatttaaaagaggaagatggcgagaacccctgcaaaagctgcttcatccaacccctaaaaccccataaacttaaaccatacaggatcatcgcttatgattttgaagcgacacaggataaaaaagtaggtaataaattcgaacacgaggtaaactttgcagcggctaccatcatttgtaccgattgcatcaatggaaattggaaggactcacttaaaggatcctcttgcaaaatttgtggaccccaccgcacaatcaccttcgcaccattcgacttctcaaacacgatagtggaccaaaaagtcaccactcaacaaccgctacgcgaattcgtccagtggctactctttgaccacaacaaaaagtttccaacagtcgcctttgcacattttgggggccgctacgacatgacgatgatcatcaaggaagttttggcacaaggaattcacaatccggacatcataaagcaaggaaatcgccactacgagctcaaaatcaaggacaatgaacattgcccactcacaattctacacgacagctacaaccttatgcccatcaaattatctggtctcatcaaatcctttggtctcaaaattcaagttagttttatttattgttttaattatttcataaatttggttttaggacaaacaacattttccacacatgttcaagaaatcatcaaactatgacaacattctctcccatcttcctccacgtgaagaatactgtcctgatcaaatgaaaatccccgatcaacagaaatttgacaattggtacaataataattacaactaa

SEQ ID NO: 57541 - DNA, 847 bp, Heterodera glycines
ttgaggcgatcagagaccatataaatatattggtcaagttgaactttttggagaatgacaaaggctttaaaaaggacgcaaaaaacatggaaaatttggtatgcaaaagtgtcaatatgttttaaaaaataaacaaataattatagttaaagtaaaaattgatggctaatggatagggctgggaattaaattcacaaatataaacttaaaatataatttttttagatattttaaaggtggattttttgacattttcttttgaaaaaaaaaatttttatgttataatttttttttaattttttgtattttcataagaaagtagtttcttactttttagagcatgtcgaatccagaaaaaatatatattatatatatatttaaatgaaattcccaacattgtctaataaatataaaatttttgtatgtatccaaatattgtaactcgaaaattacagaatgcacttgagaatcagcttatcgccaataaggcatgcttaatcaaggaagatgaggttttttgaataaccatttaaatattaatttttaagctttccacgactaattaagattgtgcaaacctatcacaatgaacgcgctgaattggagcgaaaaatgaagcggtttccaataaacttttctattaaaaatattttctgaaaatttcaaaaaaacgaacaattttagatcattaaatttttcttgattgcttccttttaaaaaattatactttcatttctaagttttctttaattcaatctaaaatttactcattcggaagattaattttccacgtaaatcaaaattttttaagaaacgaaggcaacgaaactcttgatgaatatgacca

SEQ ID NO: 57542 - DNA, 1473 bp, Heterodera glycines
  unsure (1)..(1473): unsure at all n locations
atgacaatcgccagcgcgtgcgtcaagaactttgcactcaatcatttgaagcccaactcgctcgccatcgtcccggagaaaggctacactcctcaacagaaccaaagtgcactggccatcaaatacctcaactggtactcccacatcaacaatgtcaacattcaaactgcacactcccgctatggtgaatatgtctttaaacgtgagggtcaggtgtatcaagtggatggttatataaaagggactaatgggaagagggataaaattattgaggtaaatggttgtctgtggcatgggtgtggggagtgttttgtggacttggacgacgaaacgaaaatgccgaacggaaagacgctaggacaattaagagagagggaggtaaggaagcacgagattcttcgccggtacgtcgacttggaggttatttgggaacacgaaatcaatgagcagctgaagaaggacaagcaaatgagggagtttttcgacaactggaaggaccactcaccaatcaaaatcagagacgcatttcatggaggaagaacaggaccgatgaaactccttcacacagcaaagccgggacaaaaaatcagctacaaggacttcaccagcctctacccgtggaccaatttctctacaagttatccactcggtcacccaaaaattatcagctttagattaaatgagcaaactgtcaactggcgagctccatccgacaatccatacaagggacttttaaaagtattacttttacccccaaacaggaatatcaatgtgaccgtaatgcccataaaatttgatgagcgactcctctttccactctgcgaaaaatgtgccaaacacatcaccaatgaacacccgaatggcctcaaagacgacaactactcgtgtccacacttcantcccgatgaccgtgcctttgtctctacctgcactcaccttgaattgaatgctgccttggaggtaggctacaccgtcagaaaactcttccatgtcctgcaatacgaccaatggagcgacaacatcttcaaatcttacgttagcgaaatgatggccctgaagatccacgcaaccggcttcccttcatggtgcagcaacgaagaggagaagaaggaatacattgaggagaaccgtcagcgatttggaattttgttagacaacgaaaagatgaaggctgaaccggggaagcggtacatcgccaagctttgtctcaactcactctggggccgcttctccatgcggaacctcctctccaaagcaataatcaacaacgacgaaagcctgattcgccaatataccgacgacaagaaaatcgaattagtggacttggaaatgatcgacgacgacaacgacgtattcatgctcacctacaagccgaaagaggagtttgtcgacgaaaataaatactccaatgttgtcatctccctcttcacgacatctgcagctcgcctctacctctacgatgccctcaaaaaa

SEQ ID NO: 57543 - DNA, 629 bp, Heterodera glycines; identical to SEQ ID NO: 26783

SEQ ID NO: 57544 - DNA, 1143 bp, Heterodera glycines
atgacaattaccgtttttattgccttctccacgtctcctcaaagttctcgaccgctaacaaatgtaatcacgatagtcattcaattggtggttggaatcgtggagtttgccatgttttaccagttgtgccaatataactcaaaaatctatcagaaaattatgcaaaaacaggggtaccatagcctgtcattgcgatatcaggtattattttaaattgacataaattttttggtacggttgctaggtagtagtgaccagcatgaaaaatattttgattctagttttaaaatagctaagctttattataaatgttaataaattacatgaggtttttgcgcacaattggaagcttatgcctccagttttttaaatttgttctaaatactagtggatgatattcacataaaaataataataataaaaaattatagttcgggtttttataaaatcaaaaaatatgaagaaaattgtggcaatgtttcttcaaaattaatttttttaaacaatgacattcatttttagctttctgaaaacatacgcattggaaaacagcttgtccctccgttattgctccatttgctaacaatagttacctctactgtgattatctcgtggagctattttcagtggccgcattactatcagatgtacaatttgttatcaactttgaacgcggtcaccggttttctgatcgaactgttcataatcacgtaaaaatttattttatacaattttgtttttttaattggccatccaattaagatgccacccatttttgaggagagatatgtgccaaatttggaataattttggaaaaatgtttctgctgtgccccaacaatcgcagaattgctgatcaaactgcaactgccgttgctaatttcgataatagaatagttgctgcttcaaataaaaatactgctgctgttgggattgctcagagggatttgatcagcggcaaggcactgatcattgatcaaccaaaatcggacgaacattttgctatgctgctgcaagcgtgggaaagtcatataaaattgcgatgaatacattttgatcactgcaaaatttaaatggcgtcatttaactttaattgattgtttcacaaacaaaaatggttttaattgatggaatttgaaataaa

SEQ ID NO: 57545 - DNA, 452 bp, Heterodera glycines
atgtcatttttggctggattgcctccgatggtaaaaaaaaagttaattaaatttttttatatttttcattaagatgggtgtttacactgttttttgtgccacattgttttatatgttctttggtacttcaaaatattcatttttgggtataaatttattttcataattatagaaaatttatttttttaaactaatcaattaaataataattaatttaaggaacaaatttggtcatttgttttttgttgcgcaatatcgttgaaagaggtgccgaaagtttgaatgaaattcagtcggaaaaccggtacgatgatgaacatgtgcaaattgcagtgaccgtcacatttttggccgcaataattcaggcaaaattttattaatatgatttgcattaataattaaacgttggcacaaaaggcaaaaattaaagttaaggaacttttttaaacgca

SEQ ID NO: 57546 - DNA, 1437 bp, Heterodera glycines
atggccgatgaccaggtgttggccggcttttctgccggcattggcctgcgcattatgttcactcaactcggcaacattattcactttcggtccaatcggatatgtgccgttgatttgccaataaaggcaagtttaaaaaaatttgaaattatttttttctaattttgttatttaattaataattagagctattttaaaaataattttggttttattgcatccaaatgtagcatatattgggcataaaaatgctcctataaataatattaacaattttaggatgcttcttcttccgcttcacaatccatgcctgccaattttggctcattcccctgtgtcatttgggcttattatcgacgattgaatgggcatcgaaaggtaaaaaaactatgacttttttcgataacgtgttttttagcccggaggctacgcaacccttcagtcactgtcgtcaaatattgtacaaaaattgaatacatccgtggctgaacaagctaattcagcgcatattgtggagacaaatgttgcgaaaattattttaaattgaaaaataatattcgaaaaattaattattaaaaacttaaattgaaatatatttcagaaaaaataaaattaattaagtgtttgccctcattttgggagtgtttcgacgccataaatttaaatacactggcgatttcggtaaatttttttatatgattttttacgtttcactacttaaagcatgggtaagctcctataaatttttgaggttgcttgtgttctgctgttggtgttcacccgtcaatgcatcggtccactcactcgttttcgtcttcgttcagctgtgtcctcggaatttttagtggtcagaaaaacttgttttataaatatatttataattaaattctaaaatgatattcgctatagaatacattttttttttggaatattttcagattttattagccggttttttgtcacgatggcttaatgctgagagactttggcaattagagacaatcaagtttggaaacggaaggttaaaaatgctaatgaattaattgttaaatttctacataaaattcatttcaaaaaaggatttaaattattagtatctctaaattttaattttttattatttaaagttaaaagatataattatattacttgaagatttatttacttttaatttgtgtttagtgcttttatgattacagtacctcatctatcgctgataagttcacggtatgtttaaattcttattttaatgaaggataagaaaaatatattgagaaattttcataattttttttcttcatattgttatattttagcttcctgtcccagacgctgctgcttgatgcatttgcgcttgcactgctcgtgcacacactgcacatacgcgctgcgagcgcgcttgcacgcacgcacaaatatcgcttctacgaaaagcag

SEQ ID NO: 57547 - DNA, 95 bp, Heterodera glycines
tcgacgatttggcttcacaatggcgaaatttgaaggatatattctacaagaggctcaaggaaatgaaccgacgcattcaaatgggcgaagtcaac

SEQ ID NO: 57548 - DNA, 589 bp, Heterodera glycines
ggtttattatcctccttcacctccccgactcccgctcccgcctcgtgcgaaagcaaaaattgaaccaccaccgcgtcctaccgccaagagagagcctcagaagccaacaaagttggaactaaaaccatcaaaatttgagcccgattcacgaccaaaagtcgcgctgcctcggtcgaaaaaagaacctgaattcccgcttgaccctcggccatccacatccaggcaggccggatacttgcctccacccaaaattataccaaaacccgagccgacaaagaggcctgtaccataccgtatcccgaaaagagagccaaaaattgttgaacaacagccacagccgctgcaacaaccccttcctgcttctgccgtcgaagaagaaatgcccactattcctccgcctaggcgggggaccaaacgccactaccccgtaaacggtgagaatggggaaaacagcgggggaggtgcgcgagcgcgacgccaaacgtctggaatttctgcggcggcaagtgaaccgcgtggacgtacactgggaatgcgatatccatcggatgctggagcggagcagagaaatgcgcaagtcgtttgctga

SEQ ID NO: 57549 - DNA, 653 bp, Heterodera glycines
atgccgaactcaacaaggcgctgcagctcggctatgtggtcactgacctttttgaggtagtcactttttaaaatttttttgcacaaaataccaattaggtttgggactacgacgagtgggacggcacgctgttcagctcgtacgtcaacacatttgtcggtctcaaagtgcaggcgacgggctggcctgaaggatgtgtcacggacgagcagcgtcaatttgtggaagactttgagcgcaccgagggcatccagctggaccctgccaaaatggaattcaaccccggcctgcgccttatcgccaaaaccttggcaaactcactttggtcttattaatattaaaatttatttttaaacgaaaaatttacaggggaaagctcgcgcagcgtgtgggccgaaccgaaattcgctacacgcggacgccggctgaattccacgagctgcttgaagacccgtcgctggacaagttggattttgtccacgtgtccgagcacatggaccgctgtgtcgtgcggaagcgggcggaatttgccaaggccccgctgaccaactgtcttccggtcgcttcgttcgtcacttcatatgcccgcctccatctgtatgactacattgagcaggtgttagcgattgacggagcggagctgctctactgcg

SEQ ID NO: 57550 - DNA, 634 bp, Heterodera glycines
atgaccggcctcataagagatcggtctcgttatttctcgtcactacctcctcgcgttgagagtgggtaatttgcgcgcctgctgccatccttagacgtaggggccatttctcaggccccttctccggagtcgaacccttatcctccgttacccgtcatcaccatggtagtcagatacactaccatcgaaagttgataaggcagacacttgaaagacacgtcgccggtacaagaccgtgcgatcagcttagttgttctgagtcaacactggacgcccggagggcgcttggttttgtggcgaacaaatgcgctccgctctggggagattggagctttggtgcatgtattagctctagaattaccacagttatccaagtaagaagtcaaggtcaagtaaattatagctggtgtaatgagccgtacgcagtttccctgtctggcaggttaaacttacacatgcatggcttaatctttgaaatgaacacatcagttcaggcaggatcaaccagatagctgctagcgagcgttgccaagcgccgctattacagccgtcttgtaaagacggatagtttcagcagaaacaactccgttcagcgcaagcgtgcgcatgggcagcgaaggagacagagcaagtg

SEQ ID NO: 57551 - DNA, 1633 bp, Heterodera glycines; identical to SEQ ID NO: 26796

SEQ ID NO: 57552 - DNA, 605 bp, Heterodera glycines
gcggatgcggcggagggtgcggtgctcctccaccaagcggtggcggtgccatcaaactgacgctcggatgcgaagggcctccgcctcaagcgcctgccccatgcggatgcggcggaggatgcggcggcggttgcggtggcggatacggcggaggatgtggtgcccctccgccaagcggtggcggtgcgatcaaactgactctcggatgcgaagggcctccgcctcaagcgcctgctccatgcggatgcggtagtggatgcggtggcggatgcggcggcggttgcggatgcggcggagggtgcggtgctcctccaccaagcggtggcggtgccatcaaactgacgctcggatgcgaagggcctccgcctcaagcgcctgctccatccggatgcggtggtggatgcggcggaggatgcggtggtggatgcggcggaggatgcggtggcggatgtggcggacgtcgcaagcgcatggctttgatccgccgttgccgtgcccttcagggctccgttgttcggcgcaactgagcacaaatttcccaaaagcattcagcgatagattagctgaacaaatcaatcgattgatcacatttttaggacaattag

SEQ ID NO: 57553 - DNA, 2527 bp, Heterodera glycines
atggcgaacaatgcacctgctgctgctggtggaggaggcggcacagaaatgacgtaattcaaacaatagagagggaggaatgcattatttcttaatccctttaggaggggggggggctttattgaaggtagaaagtgaagaactattcgaagaaatatggtaaatatatgcaactcgtatccaaaatacggtatactgcatattggtcaacagagctcttaatcaagctgggttggttggacttttcagccgattcaatggaaaaacgtacactgacaaaaggccttgtctaagtctaggcaacctgcctaagtcttaatttcgaaaaaatataatttgtacgttgtgccttttatacattttgtcattacacctcccctccccagtcacccttgaaatgaattttttttttaatcctggtattttaaaaatgttttttttttttgattaaatcgctatgcttttgaaggtatcgagccggcgctgggtcccaatcgcaactgtactttgttgacggtaacgcaccaagcatggatttgtcatcaccgcaagctgctgctgggacaattcagcagcaccaccaccaccaccatcggacggcaaagtcgtgcgattttgacatgctcggcggcggtggtggtggtactgatgcaacagctacaacaaccgcaacaatgttgggcaacagccacatcatgattgatggtgagaacagtgcccatcctcaacaacaacaaatgggcacacaattttttggcaactatccaaccatcaccggctattttccagcaacacaacaccaacaacagcaatacattgagtatgtgaatgaatgggtccttccttatgcagcatgtgccccaaatgatggggaggagaaataccggctgataccttgaaaaaaatcagtatcccggctttttccgaatcctctttaaatcctagcttgtgactggatgaaaaaaaaatgccgagcgggatgccatacagctggtgaaaattgggttctacatttatcccatttccaaaatggtatcattgtgccaaaatctttgctggtttcccaatctctatttggttacgaatataccgtattccctaaaacagagccacccccccccccccctaaattagatcccacccctgttgagaggagttaaaaaatagaataccatggctctattttaggaaatacggtacgcttataaaagaaatttaatttagccctgctaagcagttgaactcgtcatcatccgtggcttattgggccggtgcgcgtggcaagagtcaaagtttggacccgatacgttttgcggaacaaacggcacagctgtcgccgttgtcgtcgtccgcccagcagttcaccacacctcatttgtccagcccgcatgtggcctctggcgcatctccatgcgatgccacaaagtaccaacaacagcagcatcagcaacatgtccagccgcaacaacaacagcaatcacaacaaatgccattccagcaacaacaacaagcgcaccaacaacagaacccagcaaagcagcaacaacaacaacaatccaacattgtgagtgagaaagagcgggtcttactgtattttgtgagaaattgtgcaaaaagtactgtatttttatgagaaattgtgaaaattcgcatatttttttgatcatgttttggtttggcattttgttggccacatggcatttgcttgctccagaaatttttttgatttcttaataaaacaatatgtttttttatatataaaaaaaaagttcaaaaatttaaatttgtaccaggagctggtagatcccggtgacggacttggcccattgccaaaaggatggaatattgtatgttcaaatattttataatgtgccaaaaaagtaattattccccctcccccccattaaagggcttcgcttccaatggtgaggcatatttcattgaccacaacaataagacgacgacttggttcgacccacgagtgccaaatgccgaacaaactgagctggtggcacgtaaaattcaacaacgccagaagcagcaacagcatcaccaacagttcaacggtgtcacatttcaggcaatttttctgatggtttttgatcacttttgtttcattaacagtcaaaactatgggatggttaccttccaaaggggagggtgtgggatttacctggaccttttgaggcttaaagtctatttttaaactttttaatgaccttttatggtcattttgccaattcctatttatgcctatggctttatacaatttctatatatatgaaaatttctatgatggaatacagtatttcatcatttctggaactgtaccacaaaagtaataataattttttagcaaggaccgtatggggcattgccaaataatgaaacacccgacaataatggttcaacagcagtaaacagttcgccaagctcgacaaccattggcggtatggaccgtcgtgttcagcagttaaagcatgaacaacagtgcatgcaagaaaagcgtgaacaaatggtgcgacag

SEQ ID NO: 57554 - DNA, 272 bp, Heterodera glycines
atggtgggtggatgatgatggtctgataataggtgtggccaaaatatgtatgacgaattttttttcccgttttttgatttattcagcatcacctccaccatcagaaaaaatggtggggaatgaatgtatccatggcaatgatcaaaaaggtggtgatgaaaaagatggctaacaacaaatatggcccgggcgtgcggccccgggacaatgacgaatatgagcagcacaacggattggacgcggataaggggccaaaataaatatggcatcaa

SEQ ID NO: 57555 - DNA, 1376 bp, Heterodera glycines
accttgagcatagggaccttcaggaatgtgtttcgcgcacaaaaaaggtgggatttaataatataatttaaaatgtaattttgataagtccaaacaattggactactctcggttttttgggttataatcctttatgctttaaattatacttgaaaatatctaaaaggtctagacttaaaattttgattgatactaatttgggttttgaaaatgaaaaaatattttattttttgttgattggacttgtaaaataagaacccaatttctccagaataaacggttctggaagatcagagatgttcgcttcaaaaaatggctcagaggtgaaacgccacacattttcgaaccattggctgactatttgaaatcggttcatggtgctccgacttcctatccgactggtcatcgtgtgaagaaatgattagattagatatatcgtgagattctggtttttaataggagtcacatatgcatatgtatatttctgcgcgataaaatgcttttgttctgaagttttcctctttaagtgtttgacactgtcagttattatttccctttgtttgaataagattttttttaaacattcatttaagtaatgcgtttgcttatttgtggtgcttcgccttttattcaaaattcaattttggtttcctctttgaggtattatacgtctaatttgtatcacaaccgaagttggagagaaggatttttcaagtatggaaagtttgttcgccatctccccgagggcgttaaaccgacgcacatcgttgtgggcgcaggctcagcaggctgtgttttggtgggaaggtaccaacaaatagaaagaatagtttacctaacaattaggccaatcgtctcactgagaatccggacaatcgcgttttgctcgtcgaggccggtccccaagataattggtggaattggaaggtgaattctgatttgtgagaggttagcactgacaaataaacaaaatacactcagattcatatgccagcggcactgatgtataatttatgcaacgacaaatacaattggttgggagtcgctgcattttgagcttggagtttgttgattccacattccaggatgtatttcacgatgcctcaggagaacatgaacggacgagtgctttactggccgagaggacgagtttggggtggttcaagttcgctgaatgcaatggtttacatccgtgggcatccgaaagattacgaccgatgggagagagagggggcgaagggctgggcacacaagtgaacaaagtcatcccagtattggtccgagcctttaaataccttcaggaactgtcttccttatttcaaaaaggctcaagcgcatgaattcgccatcggtcccgacgacccttacaggggaca

SEQ ID NO: 57556 - DNA, 797 bp, Heterodera glycines
tgttggcaatgcctttcttgatgaggtcatccgaaattacatgcccaaaccgcacgcaccgatccaatgcattgctatggaggatgcgcattttgccctgaacacaacgccaatctcttcgaacagtccgtccaaatcgccagtcagaagtaaaaaaaatggggagaaacaaaacgaaatgacaaccacagtttcttggtaagtgtctccaatttcagcgggaaatgatcgccttttggaggaaagcatcgctttgatgatgccgcatccgaacagaaaaagggaaggaaaagcatttgcaaggccaaaagatcaacaaaaattcggacaaaaaatggacgaccttttgacagcggatgaagaagaagaagaagcagttttggaacagcagcagaaagtcactgccgaactgcccgcggacgtgaatgcggaattcgctgcccattggatggtcgtggagtgtgggacgaccaaaagtcctaaaacggacgacgaggaacgaaggtgcgaggggagggggagggggtcaaaagcatttgtggcactcatttatgtgctttagtcgcttctccctgaagaagaccccctcacagtcgtcgatccctcggccgtccgttgcgccttcggaccgcagtccaaagacagcgacaacgactgccgatttgacggacactgccgccacttctcttctcaaaaggccggcggcacgttcatcgaccctcagcagaacacaacagaaggcgccgccattggcgccgaagccgaacattgccaaattgggaaaggtcctcgcataa

SEQ ID NO: 57557 - DNA, 216 bp, Heterodera glycines
aaacgggcgcgaagcgcccgttatgaggccgcgaagcggccgaatgttctaaaaaaacgggcgcgaagcgcccgtcatgaggccgcgaagcggccgaatgtccccaaaaaaattaaaaaacgggcgcgaagcgcccgtcctgaggcttaacagccggccgcgaagcggccgaatgaccccataaaattatgaaatgggcgcgaagcgctcgtcctg

SEQ ID NO: 57558 - DNA, 403 bp, Heterodera glycines
agattccatgtgctggcccaattggaacatcttcagtcaaaatacacaggcacgggccatgccgacagttctcgctgggattggatcaccaaccgtaagcattaacgatggcattaattagcggttaaatgtttggcttctaatctactgtcaatgcttttgcacttcaaagtgttaattgaatttgtttctcagagcatcgtgacactttcgcttcaatcattggccatcccgaccatttgaggtgtccgttcgtctgatttcatttacattcctttccttttattacagtatgatggccatttgtgagaatgagacgcgtgctcgaacgaagtacaacatgctctgtcggatggttcagccgtgtggtccgcccccggaaaaatcagctttagacgatctt

SEQ ID NO: 57559 - DNA, 2354 bp, Heterodera glycines
atggacaaggacaaggacaataaggacaaaattgagcccaaaggacgaagcgatcatccaaatcggccatgccactccgctggtacaaaacgggatggagtcggcacaaaaaacgggattctcccactcttcgaatccaaagcaacggcggctacagtttcggcccgcacacgatacacgccacagttcaagactttcgatgtcttaattgtttaacttgctttaattaataacaatttaattttcctctttttcctctctctcttttcttatttttctctttttttttcctctcttcccttccatgtttttcttttggccggcagaaggaaaactttggcctgtctcatttgcctatggtcgctaccgtatacccgtaccacaagttccatccctcccactccttgttttgcccatcccgccattctgtgaattttgttgcctattgcctaacagctgccccaattcccttccccctcctacgaccaggcagggccccatccctggacgtttggagttttgatcagcgctcattaattaattaatcacaggggaaaaagggttggggaaaagaaatttcagctaacaaatgccagtcccgggacaagacaaaaataaacacaaatggcaaatcacgagaaaagactaacaattaacgaaacaaaaatgcgaaaacgaattcgaagaaacaaaatgaggcaacaactgacgggaaaaatgaagaaaaattgggaaaaacagaaaatggacaattaattaattgtcttcggagggaacgaaaatggacacaaaaatgcacatcaaagagggacggtagacgatcacattgcgatcacattggcaatcatcatccaatcaacgacgaccaattgtttcattatttttattacaccaatcgacgaacaattctttaattacttcatcacttcattttcaaatcaacaattactggagttcaacaaatcttttatttttctgagacacttcgacgacataatttctttaaattttaaatttctcgactacaatcaacaaaattctggatttattttctaaattctggtgttaatcagcgaaacatattccgacaattccatcaaaaacggccgacacgcggagaagaccgaattctttagaggaagatggactaaacgaaggacaaaccgaaagggataaaaggctttggctcatccatcaaaaaaggcagttgcgtaatatggatttagacgccctgcggcgtcgaattgttactctcgagcaagagatgcgtgaaattggtggaactcgctctgggctcccgatgccgaccacctttgacgggacgactgatttgcaggattatttgaagtcctttaatttaatcgcgaccgcccacaattggacacccgcgcgatgtgtgcaagttctcccgctgttcctcagaggatcggcaagggcaatttacgagagcatcgaaccggatattaaagataattggcgaagtctaattgatgccatggcggataagttgaaacaaatgtctccgagtctgacagcaagacagaaattggcacaacggaaacaacagactggagaatcgctggaagaattcgcgcaagcgatccggaacctcgtcttacgtgcttatcccgacaattctctcgagatggactttggaaatttggtgctcggtgctttggaaaatgatgtgaaacaagcaaacgaagtccgacttcgacaattccgttcggaaattgcgcgagatttttttcgggcaaatatggcaccacgactgaaggaaagagtgatgtacatggaagaaccgcaaacgctcgaggaagcagtggcccaggcaaggcgtgttgaacaagttcaaggaaatttggccgatgacatgtggaaaaatacacaagatgcaaaagccgaagttgctttagctgaagttaatgcagtgcgaaccgaattaaatgaaattcgtgaacaacaaaggagccgagagaatccaggacgagatcaacgagaatggcaaaatcaaagcaattcttggagaggaaacaacgccgaaggacaaaatcaatctaatttttggaggggcaatcccgaatttcggccaattcgccgagggaatttcacgccaaggggattcacaggatatcccaggggactcaacacataccgaggaggatttaatccgcgcggcgctaacgcaaacttcacaccgcttggcaacaacttccaaggaacaaacaacaatggaaatttccaaccgaacttcaaccaaaaccaaaattggccaagaggacgtggaccaacaggtcccaacagaggacgcggaggaagtgatgccaatcgaggacggactggctggcgcgtga

SEQ ID NO: 57560 - DNA, 350 bp, Heterodera glycines
acatcgaaagtcttgaactgtggcgtgtatcgtgtgcgggccgaaactgtagccgccgttgctttggattcgaagagtgggagaatcccgttttttgtgccgactccatcccgttttgtaccagcggagtggcatggccgatttggatgatcgcttcgtcctttgggctcaattttgtccttattgtccttgtccttgtccatttggctgtggtccgtgtccgccgagacttgccatttgcctcaattggggtctgtgaccaatgtcagcgccgtgttagtgttttgtccagtcgtattgtctcctcaatgtaatttcgggttaatcgttggcacggccttaacacatca

SEQ ID NO: 57561 - DNA, 3640 bp, Heterodera glycines
atgaatggagtgaaaacaaaggccttattcgacacaggagccgacatcacgtacattggccactcaacggcacaaagatgctttatgatggtccgaaaaggggactatccacaagcaagagcagcgaactcaactcccattcgttttatcggatcggcactcgccaacataaaactgggagattttgaaggcaaatttccaattctcgtcagcgaggatgatagctgtccgtgcacagccataattggaacggatttgatggatttcatcagtgaacagggcgaagaagaaatcggattgaacttcaaaagaggactcgtacgtgttggaaacatgcatctgccaatgatcgccgctgtcaacatcgagaaacaaccgattgaagcacaacttattgagacgcaaacattaccgccgctatctgattcactcgtttggggaaaaattaaccgaagtttgggaccagacgaagtcttcatcaccgctgagcgagatcatgaatatttcccgctgcgagttggaaaatgtctaataagtccaggctcaacgcgaattgtgccactaagattgcttaatttcggaaacagcgtaataaaagtgcatgagggatcgcgacttgcgtggctggaaccaatagctgatggcactgaaattaatgcacagaaggaagatgagaaagaaaacccggaaatgataatgactgacgaggtgtggatgaaattcaaattagaaagtgataaaatttcgccagaggcggactggacggaccagactttggaatttcaaaagaaggaagaagcagtcgcgccaatactggaaagaattcgattaaacgacaccattctgagtcgagacggaattgaaaaacttaaaaacatcatccgacaaaacgagaacgcttttgtgaaacctggagaagtcggactcttcaaaggacaaacgatacaccgcatcgacctaatcgatggcgcacggccggtccaacagaggccctatcgttatcctgtcgcacttcaacccgaaatagagcgtcaagtcaaggagttgctgcgtcaaaatgtcattcgaccatccacttcggcatgggcatctccaattgtgcttgtccgaaagcctgatgcctcctatcgattttgtgttgaataccggaagctcaaccaattgacgaagcgatcgacatattatttaccgaggattcaatcgatccttgatgaagtctcgaggaaaaaatatttctcagtggcggactgttcaagcgggttttttcacatcaaactcgcaaaaggacacgaagaaaggagcgcatttatctgccacatgggactgttcgaatggctacgttgtcccttcggattggcgggagcaccaacaaccttccaacgagccatggaagaagtccgacaaatgtgctcagcgacatttcttgtgtatttggacgattgcataatcggctcaatgactgaagaggaacatcttcgggacatcaatacttttctaagaacgatgactgaagttggattcagactgaaaccagagaaatgcagatttgcattgggagagattcgctatttgggacatttaatttcggctaatggcgttcggatagatccaaaggatttggagccaattcacaaattgaggaaaccgaaaaatatcaccgaactccgatccttgattggaatgctgtcatattttcgaaaattcgtctacggatttgcagaaatacttcaacccatttatgagttgacaaaaaatgaaagcacgacagaatggggaccaccacatgagaaagccttggaggaattgaagacaaagctgatgactgctccagttttggctccaccaaaattcggacaaccattcgttgtggaaacagatgccagcataaaagcaattgccggatgtcttctacaagaaaaccgtgaaggcgaagtccatccgatttgttacttcagccgagtgctaacaaaacatgaaaagcgctattcggtggtcgaattagaagccttagcaatttgtgcttccctcaagaattttcgaccatatttggaaggagctggaaaatcaacagtgatcacggacaattcggctttgacatcattattccggcggaaggacttggaagggcgactcagtcgataccaattggctatcatggcattcgatgttgaaatcattcatcgccctggaaagcggaaccaattttgtgaccatctttcacgatacttggacgacaacgacacacaaattaattggctgaaaattgaaccaaaaatttcacaaagtgaaatgcgcgaggctcaaaaacaggagacggacacacaaaagagacgggaaactttgaagaaggatcaaaattcagaggagccaaatgaatttactggaaaatggagaattactgaagatcttttgtgtgcaatggaccgaggcgaatggaaaatttatgtgccaagcagtcttagacaaagagtgatgaaggaatatcactccgacccattccaaggaggtcacctgggcgagaagcggacaaaagacaaaatccgacgaaatttgtactgggaaggaatggaaaaggacattcaaaaatttgtgagaacctgcgacgcgtgccaaaaacggaaaataattgggaaccaaatgagctctgagcccatttgtccaattgtaccagcgtcacagccatgtgaaagacttcacttggatttgatgggaccattgaagacggcaaaaggcggatttcaatacatcttgatgataatcgattcattttcaaaatatatgacggcactaccactgagggaacaatctgcgacgacggtgacaacagcattcgttgacaaatttctatgccaatttggaattccaaaaatcgttgtgacggactgtggaacacaattcctcagttcgacatttgagtcacttgctaaaacttggggattcaaacaccaaacgaccgtgccataccaccaatcagcgaatggacaagtggaacgattcaaccgaacacttgcggacatgctagtcaccacgactggcggaaaagattgggctgccgcgcttccgatgctttgctttgcatataatacttcgattaactcacaaataaatcattcgcccttctttgtgcttcatagatttgatccacggcttcccagtaagatgctactcgaaaaagacggcgaagagtacaatgacatggccatatacgtccaagagctgaccaaaaggatggaagaagcaaaatctcggatcagagaaagtctgaagaagtgtgctaatcggatgacccagcaacaaaagggcacgaaagaagtccgatggacggaaggaatgcttgttttgagacgcagaaatgacaaaaagaataaattggaaccaaattatgaagggccatttcgcgtcatcaaaatcgagaagccaaatttgcaaatccgagaacttgaccccgatggacagccatttacagtgcacatggaccaatgcaagccgtatttcacagatgaggaagcaagacaggacacagaaacatccgagaatgagaaatcaaaacataagaatgggaacaaaaagatgggagattcaaaattggaagaatcggacgaagaaatgcatgatggggaaacaattgtggcatgtataa

SEQ ID NO: 57562 - DNA, 166 bp, Heterodera glycines
atgccaaagaaagacaaaacgaaagccaaagtaattaatgaagcaattaaagcaaatgacatttattctgtttcctctttatacggtctgaataaacaaatgtataaatgtgttcaaccaaatcacagtgaaaaggcaaaacaaatgccatcgttttgctcaagcg

SEQ ID NO: 57563 - DNA, 251 bp, Heterodera glycines
atggtatttgaatcagttgtcgcggatcttcttaatcgctttttgggcacttatgtggacaatttaaatgcgtcccagctgaacattggcatttggggaggcgatgtaaaacttaatcatttggagatcaaagatacagcgcttgatgaattggatttgccggtcaagctgagttttggttatgttcaaagtttggtgcttaaaataccatggaaaaatttgtacgtcgagccgacaatcgtggagattag

SEQ ID NO: 57564 - DNA, 72 bp, Heterodera glycines
atgccttgccaaccaggaaaaggagaaaaaggcccgggggttccgatttgggtcccgacaagccaacaaatg

SEQ ID NO: 57565 - DNA, 284 bp, Heterodera glycines
atttcggactctaaattatactgatgcttttatttacaagatctgggatgctgatcagctcaagtcggtggaaaaatttgcattcgagcagcccatttccagctttcattggttcgttccgtgcgattgcaactcttcgcttatttccattgccacttcctcgtcaaatgtcgttttgttggacccgcggtatccatcgtttcgttccattcacattccgctcattcttcctaaagattgggtaacactgcacaacaaattcgctgtttgcagcaacgcatttg

SEQ ID NO: 57566 - DNA, 76 bp, Heterodera glycines; identical to SEQ ID NO: 51235

SEQ ID NO: 57567 - DNA, 456 bp, Heterodera glycines
atgaattctgaaaaatcagaaaaagctaattccatattattggaagctgcaaaaaaagagacagaaagagcatggcgggatgtagctgcgctaacggatgaagtaagcgattttgccaaatcttctcgcgaaacacttaatcgtgcaataaaatctagagaaaaggctccttacgctaatggtattcgagaattatatcttaaaatgtccgattcaatttgggaaatcttcacaatcctggacaaaatcaatttggagtcagaaaaagccgaatctacgtggcgtgatttcgagagatgcaaaacttttgaccaggcaacaaagctcgaggaacaatcgcaaaattcattaatggaagcccgaagattacatttcgagtcccggagggtgcagagccaaatgttaaattatgaaaataggctccaaacaattgtttgggagcatatgggtatataa

SEQ ID NO: 57568 - DNA, 296 bp, Heterodera glycines
atgggttagttattataaaattttttatattatctttcatttgtaaggattaaaaaaaatcagccgaataaacattttaaaaatctatatatctacagtcagggaaaaaaaatgtgcaagccctgcctatataacaaatatgctcattgtaaatgtcaaaaaacgcacagcacatgcagggctgttgaacaatgtaaaaataaaggaaaacgttgaatctatgctctggctttgtgctagctagacagctgtaagaaaattaaaaaactagaaagaaagagatagtgaaaaataaa

SEQ ID NO: 57569 - DNA, 680 bp, Heterodera glycines
atggactacggcagcggccagagtgcacttcaattggtctacaggcagcaagatctggttcagcgctacgacacgcgcattttatacatggtaagagtgtgcaattaaaatgttcataataaaatattcgtttttcaggacaccgacagtatcttctatgacttcaagactgcactgggagacccgctgaagggtggcaaccagcttggggagctcgcggacgagtaccccaaccataccatcgtcgagttcatctgtggtaaggactttgtccaaaataatttgaataaatttctaatcggttttcagctggacccaaggcctacgccctttggcttcggaacaacgcaaccggcgaggacgagtacaagctgaagctgcgaggcatcacgctggactcgaacgcctgcacccgcatcaactttgagaagatgaaagaaatggtgctggagaagtggggcacgcccggcaaccatgtgcggttcgactaccctacgaagaacttccgcatcacgaagcagggcgacattctaactgtgccaatcaccaagcagttcaaccccaccgtgaataagggggtgctccgggaccgtggacttaaggttgtcccctttgggtatagctcatgggagtactgtaaggcccataaccccaacgaatgtcgctgtaagaaagaataa

SEQ ID NO: 57570 - DNA, 735 bp, Heterodera glycines
atgccaaaacttccggaaacactgtacacggaccgagggctggagtttgtggccaaacccatgcaggagttcttcgcagaaaatggcattaagaagtatgagaccagctcaaagaagaaggctgccgtcgcagagagagctattcgcacgctgaagactcggctgtacaaatatttctctgccaagaatacctctgcgtgggtggatgtcttgcccaagtttttgtctgcgatcaataactctgtgtgccgtgcgacgggacttaggcctaacgaaatcagtgacgtcaatgcgagggaggtgtggaagagggtctatggcgaaggtcttgtaccagcggaaaaaagaccaaagatcaaagcgggggaaacggtcagaatcccagagcccaagcacatattcgagaaaggtacagagactcctccattttttttctgtatttttatttgtgcttaaggttatattcccaactactctgaccatgtgtacaccgttgatgaggctcggtcaaccaacccccagcactatttgctcaaggactattatggcacaaagttgaagagaaaattttatttgccagagttaacaaaagtacaaattgatgaaaacacaatgtataggatcgagaaaaagtacaaagaacgaatgagggatggaaaaaaggaaatattggtgaaattcattggttttccagaaaaaaaatattgggtcacagatgaggattttgaaaaataa

SEQ ID NO: 57571 - DNA, 1817 bp, Heterodera glycines
atgagttcgccaatattggatataattcaagggctagtcaatcgattagaggttgagttaaccaaagaaattccgataaatcctggtcaaaatgccaccccaaatacaatccaaagacatttgtacagagcaaaaaatgcttgtgatgagttaagcgaaattttggaagaaattcagagaaagcgcgtagaaatggcagaaagtttgcaaaaaattgcagttgcagcgcgcgaaaataaggaaagagtttatgtagacttttgtacgcatcttgacattgaggcaaaaattaatcgagcagtaattaagaaaaatgaatggcaaaacaaaaaagaacaattggaagatatttttgacataaaccctcaaaattcgctaaatagcacaattcttactccaagaaatcagcccatcaaaagagtgaaaattccacaaatacaattgaaaaaatttgatgggtcagttgaaaaatggataccattttgggagacattcagagtacatgtccacgaggatgattcggttaccaaaattgaaaagcataatttattagagtcaaatttagaaggggaagctaaggagctaattgagggaataccaatttcggaagatggttatcaaattgcaattgatttacttttggaaaaatacggtaaaagtaccaaactaataagggcactcaatcaagaaattaatttattcccaccaagcacgagtcataaagaagtaaatcacaacaaatatgagtcagaggcaacaatgaattttgcagtaaaatttagagaggaatggaaaaaagtacaaaacgaacaaaaacacaaaaattttggaagcaaaaacgatcaaagacggaggtttagctcctccccagaatattcagtggatcataaaaattctcaaaattcaaataatcaaagattttcgagaccacaaaacagatgggaaagagggaagaaaaaagggtccccatacccaaacaaatttcgttcaagctcaaatagctcaaattattccaacggctcaaattattcaaataagagtcctcctaaatttccacgtcatttttgtgaacaaattcactcaccagtattttgcaaaacatatcagacagctgagaaaagaaaggaacaagcaataaagaaaaaattgtgtttaagatgtttaagaaggggtcattttgccaaagaatgcttttcaaaaaagagaaattgcttattttgcaaaagcgcaaatcatcactcggctttatgccgatggtcaaaaatgaatgattcaagcccaaaacgaaaagattttgttaatgcaagtacaaaagaagtaaatgatgaagttttggcttcaaaaataattgaaagtattaatgcagcatcatgcttaattacccaaccaaataaaatatcagtgttaaaatgtcgatatgtcacaatttataatccattaaataaaaaacttagaaaaagggttttagcatttttcgacgatggcagtcaaaaaacttatattgaagaagaattagcaagaagccttaaattaacagtgattggaagacaaaaattagaactttctggtttaggtggagcaaatttgggaaaattcgaaagcccagtagttgaatttggcttaaaagcgagagattttaatatgttaatgattggaagagcaattaaaaaagtcttaaaagaaattcccgttttggactatcaggaaataaataatgatgaattaaagaaaaacaatatttcagttccatatttactcgatgaaccaaaaattaccatcgggaagcgatttttacaattattttgacattcgaccca

SEQ ID NO: 57572 - DNA, 2317 bp, Heterodera glycines
atgattaaaaatatttctttcaatggcaaaaggtaccaatcaaaattactttggatagaagaagaagccgaaaaattgcccacaaattttgcaatggcttacagtcaattaaaatcaaatttgaaacggttacgcacaaacccaaaattactccaattatatcataacacaattttggaacagattaatgaccaaggatcagtggaaataactaatccgttggtggacccaaaccaaaaaggacaaaaaattcattatttaccccatcatggcgtagtgaaagaaactagtgaacacactaaattaaggattgtttacaatgcaagtgctaaaagcggtaaaaacccagctttaaatgaatgcatagaaaagggcacgaatgaatacaatgatttaaccggtattcaattacgcacgaggttaaaaaatatattgattggctctgatattgctaaagcatttcatcaaattgaattagcacctgaagaccgaaattgtgtacgttttttgtgggtggaagatccattcgacccaaacagtccattaattcattaccgttttaaaagagtgacttttggtgtcatttgtagccctgcccaattggcattaaccattaaattgcatttagaaaaatataaccaccccattattaagcaattggctcaaaatatttacgttgataatttactagtgggaattaaccataaaaaagattttcaaatggtttacgaattgattaaaaaggtgtttgctaaagcaggtatgaatgtgcgtgagtttgtgtcgaatgaattaagtgagcttcaaaaactcccaaaggaagaccgaatcgaaaaagaaactgtcaaattgttgggaatttggtggaatgtaaaaaatgacgaatattttataaaaatgccaaaattcgaaccaaataatgctgtaacaagaagaaaagtactatctcaaatagctaaaacatttgatccatgtgggatgacatctccaataatcttagctgctaaactttttcgtcaagaaatcgaaaatggaaaaaacctaaaatgggacagtaaattatccgattcagaagaacaaaaatggaaagaactcatgcttacatgggaaaataaagagatcaaatatccacgaaaattatttcaaaataatctttcagaacatactaaatttcaattacacgcttttactgatgcgtgttcaaaagcctttggcgcagcaatttatcttcgaattgaaaatgaccaacaaatttattgtaatttagtttttgctaaaagcttagtggtgcctgctaatatgccaaaaggcaaaaggacaattccaaatttagaattacatgcaacaatgctatgtggaaaatatttaaattttgtaaaaatcgaattcgaaaaagaaattaagattcaaaattgcactatttggtctgattcaaccgacgttctcgattttgtaagaagtgaacgcaaatttgacaaattcattagaaatagggtacaaaatataaaaaaatggcatttgaaacatattaatggcaaaaataatccagctgatttagcgtcaagaggaacatcagtggaagaattacaaaaaagtgaaatatggtggaaaggccccaattttctttcagaaagtgaaaactcttggcccaaaacaatacgggaatatgacccaataaatccaccagaaataaaggaaaaacaaaatgttatttttgagataaattcagcaattaaagaaaaggatttttgtgaatttgaaaaatatttcgaaagattttcaaaatgggaccgtttaaaaaattcaattgcttatgcacttcgagcctttaaaaaagaggaccaaaagaaagtttcccaaaatatggaaaaaatttcggatatcaaaaataaaaaaaatggaaatgacataacaaaagaaattattaaattaatcaggcctttagaggctaaagaaatccttaaagctgaaaagctaattttcaaattaatccaaacaaattcgtctccaaccaaatctattataagaaatttggatttgttcaaagatgacgatgatttatggcgcacaaaaggaagaattttaaaaagtggtttaaattatgacactattaatccaattttcattccaaataattcatatattgcgactttattgattagagatgcacatttgaagacaatgcatggcggtcgcgaattggtgaatagcaaattgagagaaaatttttggattcctaaaagcagaaggaaaatttatgaaatattaaaaagaaaaaacaaataaaaatgcgggatttgtgcaaaatttacaaata

SEQ ID NO: 57573 - DNA, 950 bp, Heterodera glycines
atgttggggagcaatatttacatgtttaattgtaagagcaattcatttggagttagtttccgatgtaagtgccgaaaaatttcttttagcatttcggcgattcattaaaagaagaagagtgccaaaattaattatttccgataatggtacaaattttgtattagcaagtaaagcattaaaacaaatagcacttgaagaaaataaacaaaatagaatatggtcagaaatttatcgtgatcctatgatacaaaatttttcatcaaatttgggaattgattggcaatttaattcgccatatgcgagttggcgcgggggagcttacgagagaatgataggacttgttaagacacatttaattcggagtttaggaaaacggttattgagttttgaagaattaatgacatatttaatcgaagtcgagaggattgtaaacgaacgccctttaagctatataacccaagatgaagtgattgaaccattaaggccaatcgatatattaaatccgacggatggagaacctttctcattgaaattagatccgacatttgatcgggaagacataaatgaatattttgaaaagaaaactaaaagagaagaattatttgaaatttacaaaaaggcaatttttaaaagtgaaatattttggaaggaatggagtgaaaaatacttattatcgttaagagaaaagcacattaacaaaaataaagatggaaataaatacccaaaaatcggacaagtagtaatcgtgagagaccaggataattatccatgatcaatgtggaaattaggaaaaattttcgaaattctttctgatagaactgttaaattaaaaataggaaaccgaatggcggaaagacccacaaaattattatatcccttagaaatagaggatgaaggcgaagaatagctataattttagataatttaattaaatattatataatctatta

SEQ ID NO: 57574 - DNA, 5019 bp, Heterodera glycines
atgagcgacagccaaagcagtgatgatgaactgatgtattcggcggatgagaatttcgagatgaaagtctcggttcaaagcagcaaaaataatgacaaaatttcggaagccaaaaaacattcaaattgccaaaaagatccgttggaggatccaccaaatttcgaaaatttattagataacagtccaaattgccaaaaagatccgttggaggatcaacaaaattttggaaaagattcgttggaggatcagcaaaatttgctgaaaaatccgttggaggatgaacaaaattttggaaaaaatccgttggaggaaaaaagtaaaaaattcaaaattcctgaggatttgttggtggattctcaaaaaccaaaaattcggaattatgtgccagaaaacattccaaaagtggtggcacggtcaattttggtttttattgtggataatcaagtggaaatcgaactgaggcaaataatgaggaagaaggaaatgaaggcgatggtttttcgaccgagaaagtgggacaaaaatacaattggcacagaaatcgaaattggcacgattactcaatgcatagtgatatggagagaaaccatggacgctgaactgttggcagttctaacaaaagttgaagaaatatgttacgaactgctatgcatttggattgtccccaaaggagtgccaattcatgttatgaagaaaaggtttccggcaattgttcgagtaccggaagaagaaaatatcaacaatttattaacgaagttggagcaaattggaatgccaattgagaaaaggggcgaacaaaaatggcacgagacagtggcaacaaacgcacagaaagtgaattggaaccaattggggaatggacgcagagagaaggccgcgggaagccattcccacaattcatttgtgccgccacatttttcatcatatttgccaacaactaccaaaatgttcttcccaactccggaaatgccgaaaaaaggtgaaaattttggaaaaatccaatcagaaaattttgatccctttgtggtattgggagtaaaacgaaagtctcaatctccagaatcaaattatgaatatgaagacatttttgaaggccctttgtgcacaaaacgaacaaaattttgggtaaactcaaaatgtgaaactacaaaaacagaaccgttggaggttaaaacatttttcaaaaacgaaaataaggaaatttatcagcctcattggaagccaattgttttaagttcaccttcaggcaaaaaaggagctttctttttcgggaaaaattttgttttttcaaattttcatccgtcttcttttatgatggatggctttaaatgggacaatgtggaacaaaaatactgctttgaaaaggcctcgtattttggctattttaatttggcaaaaaaaattaaattcaaagatggaattactgaaccaagtgaatttaaaaagattactgacaaagagatggaccaatataagtcctttgaagaaaatcccaaattttttgatcagtatgaatggaatagggttcgagaaaatgtcattcgcccaattttatgggcaaaattcacacaaaatgaaaaatttggtcaaatgttgttggaaactggaaaccttccactgtatgaggcctcagtcaattttagctggggcatcggaattgacattagagaaagacagctaattttttcaaacatggaccaaggatttaaaggcaaaaatatgtgcggtcgtctgttagaagacattcgcgaaaaacttaacccaatgaatacaggaaaccaaaaagggcaaacaaacccaaaaaatgaaaaagatttagaccaaattttgaaaaagattgaaaacgacaggaaaatctgtgttttcaaaactgaaagtattttgagacaatgtactcggattaaagaagttgtcaaagaaaattgggacatgaatgtatttatccaagggagcatatacaatggccttggaagaaaagaaagtgatttggatttagttatgataaactcaaaaggaataccgaatgattggacaaaagatgacagttgccaattttttgacaaattgcgaaaaaagttaagagattctggaatggcattaacccggactctgataatcccttcccgaaatgtctccattttggaaatcacaattaattctgatgaccaagaaataaatgctcaaattagttgcaataatttgattggattgattaattcgaaatggtggcatgttgtgtacagttggatgtacgatttaaaactttatattttgccattttggaatgggctgacttttttgaaattcaccaaagtgctaatggaggcggcactttaaattcttatggttggacatcacttttaattttttatttgatgaaaattcctaaccccgttttaccaaatttgatcaaaattttaccagaaatttttgaaattcgaaatgttacatacacaaagaaacaaatttttgaagtactgaaacaaaaacttatttgggagacaaccaattcccagagcatttcttcactattcattggattttttgaattttatacaaaaatcaatttagaagagagccggttgaatatgaaagaaggaaaaacgatttttgggagaaaagtactcaggaaatgaaaatgcatttattcattttagagccgtttggggctttcaatgtcgcaaggagtgtgacacaaaatggatttatcaaaattaaaaatgcatttcatgtaacttgggaaaaattaaaattcggtattcataatccaaaaaagctgttagaagcaataaaaggaaaggaaaatgacgaaattatcgaagaaaaattgaatttgaacagaattttaatatctgatcaggaattagtccaaggacaagaggcaaacacaccaatggacagtgcgagtaagtcaagaaaatgggttcttaattcacaaaaatatttcttcaacgctttaatgattatcaatataataaatttctgtgtagccacccaaccaatgatttgccataatagagcccaaacaaaattggtccaattcaaaagggatacctcttcgtgcggaaaaatcagtagatttcttgaacaacccacccgagctttaatgctagatttatttcggccaaacccagacaattttcaatttgaggcctggagatgcataaaaactagacaaacacaaaaatacagaactgatttatttgggtacaaaattgaagaaatccctgatcaaattcttttaccaaccacttttgaagattgtcatcaaatggcaatttacaaaaaatgtgagtttggtgttttgtcaggagaaattggccaaaaacacaccaacaaaaaattaatcattgaacaatcatggtggaaaattgggttccaaaaaaccgagtccgaaaattgttttttgtcaaaaatcactttgtttggaaccccagggtcagacataatacattcaccagcagatgatacaaagaattgtaaatactcagatggacaatgccagttagaaaatggtgtttatcttttatgggagattaagaaaaacattaaaaatctttttgatgaaaaaacttgtgtttataaaagggaagaaaaaatcaatggcacttatgtcccaggtatttggatgtcaaatgataacaatcgggctttagtttttgatcaaaattcaaaaaaggtagagtcatgtggtgaaagattgcgtgttagtgcgcaaggatttgcaataattgaggaacaatttaaggaattaatgaaaaatgagaaaaattcgtttgatcaaaacataagaaacaaaagaaaaagattcaaacgttggaatactcctttctcaagtgaaatagagaatactcccttggacggagaagttcgagcaagccaattggcaatgcaattacaagccggtgctttttaccaaaacaaagaaattaagtcctctttccataaattaattgaaatggtttgtaaaacattggatgataatattttcaatgggtattctcatttaaacccttcattgtttataagacaaaaaactggtcaaacttttttagaagggcattggatttccgatgaaattttggaattttggggttgttcggcaattaatttctcctttgtcccgtctttagatggaaaatgttatgaatttattccattaaatttttctttagaccataccgaaaaacttttgataggatttttggatccaataacaatgattgtcaaagaaaatagtaaaatccaaacatgcactgagggacaatttaaaacaattttactgaacaataagctcataaaaataaaccaattaacaggcaaatatacttttattggagaaccaactatttataacatcaatcaaaaaatatggggtgaggaaaatttgcctatttttccggtacaaattttcaaacaattaattttaactaatttaacaaacaaacaaattgacatgttggaaatgcttcatgcattccgtactagccgaattattgataatagaccaaatgaagaccgaaaaatttggaattcaaaccaatttcgagcatttacctttcaaaatttaatcactgaaattgattggtggaaatatgtaattcgatcagtcattttagtcgttataattaattgggtctataaaatttataaatggaaacaaaaaatgctgatcagaaaagaaattaataagaggaatagtcaaaactttcagcaacaaactggtgccattcaaattccactggccgccctgaaacaacgtttcgttgggggagtgtcggcgcccacgaccgacgaagccgagatgccagagaatgccgaaagaattaaatgccaaaaacggaagagacggagaaaataatttttgaacaaatttgcatttaattatttattaatttaaatttcatttcatttctctattttattattcatccatatctttcatcctttgcttttgcgatcactttataagtcgttggagacaagaagaaaataagcgatagggaatttcacagttta

SEQ ID NO: 57575 - DNA, 491 bp, Heterodera glycines
atgagttcgccaatattggatataattcaagggctagtcaatcgattagaggttgagttaaccaaagaaattccgataaatcctggtcaaaatgccaccccaaatacaatccaaagacatttgtacagagcaaaaaatgcttgtgatgagttaagcgaaattttggaagaaattcagagaaagcgcgtagaaatggcagaaagtttgcaaaaaattgcagttgcagcgcgcgaaaataaggaaagagtttatgtagacttttgtacgcatcttgacattgaggcaaaaattaatcgagcagtaattaataaaaatgaatggcaaaacaaaaaagaacaattggaagatatttttgacataaaccctcaaaattcgctaaatagcacaattcttactccaagaatcagcccatcaaaagagtgaaaattccacaaatacaattgaaaaaatttgatgggtcagttgaaaaatggataccattttgggagaca

SEQ ID NO: 57576 - DNA, 712 bp, Heterodera glycines
atgttggaaatgcttcatgcattccgtactagccgaattattgacaatagaccaaatgaagaccgaaaaatttggaattcaaaccaatttcgagcatttacctttcaaaatttaatcactgaaattgattggtggaaatatgtaattcgatcagtcattttagtcgttataattaattgggtctacaaaatttataaatggaaacaaaaaatgctgatcagaaaagaaattaataagaggaatagtcaaaactttcagcaacaaactggtgccattcaaattccactggccgccctgaaacaacgtttcgttgggggagtgtcggcgcccacgaccgacgaagccgagatgccagagaatgccgaaagaattaaatgccaaaaacggaagagacggagaaaataatttttgaacaaatttgcatttaattatttattaatttaaatttcatttcatttctctattttattattcatccatatctttcatcctttgcttttgcgatcactttataagtcgttggagacaagaagaaaataagcgatagggaatttcacagtttaacaaaaagcggaaaatgtccgtgagcggaaaaaagggggaaagatggaaaaattaaaaatctgttctcattcgcttaactttttaatccgttcaacatcttctctctccgattaaaaattatttattaatttcgaattttcgcaccgta

SEQ ID NO: 57577 - DNA, 767 bp, Heterodera glycines
atggcagaaagtttgcaaaaaattgcagttgctgcgcgcgaaaataaggaaagagtttatgtagacttttgtacgcatcttgacattgaggcaaaaattaatcgagcagtaattaagaaaaatgaatggcaaaacaaaaaagaacaattggaagatatttttgacataaaccctcaaaattcgctaaatagcacaattcttactccaagaaatcagcccatcaaaagagtgaaaattccacaaatacaattgaaaaaatttgatgggtcagttgaaaaatggataccattttgggagacattcagagtacatgtccacgaggatgattcggttaccaaaattgaaaaaaacataatttattagagtcaaatttagaaggggaagctaaggagctaattgagggaataccaatttcggaagatggttatcaaattgcaattgatttacttttggaaaaatacggtaaaagtaccaaactaataagggcactcaatcaagaaattaatttattcccacaaagtgacactgtggaagaagatgaaaaattgtacattaaatttgaaaaaatttgcagacaattgtcaagtttaaatcaagacatggatctatcccctcattatttatcgctagaagggaaattatcaactttagttctggacaagtattttgttataaaagatgccgaagataatcaaaattggaatactacaaaatttagaaatgctctatcgagagcaattgagcaaattaaaaaaggcaagaagtga

SEQ ID NO: 57578 - DNA, 650 bp, Heterodera glycines
atgggccgtgagcatcgttctgaccgcaaacgagactatgagaaagtttgtttcgccagttgttggctttttcaatttgtttaccactcaatgctttgttttttccatgtttggttccactaagttactcaaaaattagtttttgacatttgaatttgtgtctaatttttcgttgaactcttcccattgttttttaggagcacagtccgttggcggacgaatcgtcgagtggcagcagaaagaggacaaaaagggagaagaaccgaagtgtgagcccggcgcgttctcgttcccacacttacaggttcagtttttctactaaactctaaatttccctacattttgtctgtctccgtgttctgaccgactttatgaaaaatctgagtttggattatccgaatattggatgtcttacaacacatttggcaggcacttttgtagtttagtggtcccgataggaaaaaagccatatggatttttttacaatttaatttctgcagaaagagtggtcctccccctattctatcgggcccactggactataaaagtgtccacatttttcatcggtgtatatgccatgcaatttttaacactgaaatttccagtccgtcaccacgccgagaaatttcgccaaagcgccgcgctcgaag

SEQ ID NO: 57579 - DNA, 1385 bp, Heterodera glycines
atgtcgcacaatccgaaggaagcaaagaaagaaatggaaaaagcgatgtgatattctaaatttgaatttccatggtaatcattttgcttttccttttcagcttcatcgctgccgactgttggctcaaagtgttcgatttgcttccacgctcacagcttggccttggaatttcgatgataagccgccgatttgactatttcgttgacgaacacttcaaaatccgcaaatggacatttgacaaattggaaattcgaagcaaaatcggagagaatggcgcaaaggaaatggaaattgtcaattccgatggaaaagaattgccaatcccacaaaattcgttgccgaacaaattcatcggattcggatgcattttgatcaagtgaaaattcaatttagaaatgatttgtaaccatttctggttttcagctacatcgaccaaaatgtgctcatttttctccgccgttttcaccgttttttcgccacatttgaaacaaaaattcacattggcactgtgaatgttcgcatttcgaagttcgctatgctcaccatttggccaatgttcaaggacaccattcgtgtgatgtatttcaattccatcactcttcgtcaaatgcgccaatttgctccgtcaatgctcaacgattcgccatcccttcgcgttgttgctttcgatgatggcatttcccccgaatttccgcctgacgacagtgccaatgcgacggatggccaagcggtggccaaatggctgttctcacctcgccatgacaatttgacgaaggcgctcagccttgaaaatttagcagtggagcaacaatggttggcaaccatggaacaaatcaaagcggtgattattacccattaattttctattttttttttgcctttaggcattttccgctgcttcttctcctgtcaatttcgtcatttctgttggcttttcgtcgtcctctccgattgattccgttgtgccatttgaactgaccaacgaattcactcaagagaaattgacactgtcaccggaattggttaacgtttataggcttactcgtcgttcaattgcagcagatgatgagggaaaatggatgaaggaaatgaatgaattgatgagaggacaaaagaacaacaaaattggcattttcatcggagacgacggaatcgataatgagtgaacatttaaaaatctgctaattttctcatttcattttgttttttttttattcagtcttctcgacgatttgccggggccgagtggtgatcattgatcagaaacagcaaaaaatgaattgattggatgattttgactgatgcgattatatgtgtcctaaatattgagatcattgttatttaaatgttgttgttgtatttgatttttgctcattcacaaatca

SEQ ID NO: 57580 - DNA, 963 bp, Heterodera glycines
atgggcagattggaaattcgaggcaaaatcggagagaatggcgcaattgaaatggaaattgtcaattccgatggaaaagaattgccaattccgcaaaatccgttgccaaaaaaagtcatcggattcggaagcattgagatcgagtaaaaaatgaattgaatttgtacatgatttgtttccatcacattttctgattttcagcttcatcgaccaacatgtgctcacttttctcggccattttcatcggtttttctccgtttgttcgacaaagttgtacatttccactggaactgttcgcattgcggagttcgttgtgcttaccattttgccgatgttcaaggacaccattcgtctgttgtatttggacatcactgatcttcgtcatatgcgccaattggctccgtccattctcttcaattgtccgtctctccaagttgtcactacctttttcgattttttgcccgaatttccgcctgacgacagtgccaatgcgtcggatggccaagcgctgaccaaatggctgttcacgcctcatcccgacaatttgccaaaactgttttttgtccacatttgggaggatacggggaaacaatggtcgacaatcgtgggacaaatcaaagcggtgatttgttctaaatttgttttttcttattttttgtcttttaggcattttccgctgctgcttctcccgtttctttcaacattactgttgcctttatgccgttttatacgcttcctgatgttgtgccatttgaaatgaccaacgaattgactggggagaatttgaaaatgacaaaatcaattggaactgaggacgatgaagatatttttgagatcatccgttgttcagttgaagaagggagtgagcaaaaattggaaaaggcattgaatgaattggtttatggacgaaagaacaacaaaattgatttttccatcaaataccgcggagtcgacgaaaggtga

SEQ ID NO: 57581 - DNA, 845 bp, Heterodera glycines
atgtctgacaatccgaaagaagcggagaaagaaatggaaaaagcgatgtaacaattaatctaaattataatttccatgctaattatttgtttttttagctttatctccgccgactgttggcttgaagtgttcgatttgcttccgccctttcagcttggccttggcattgcgttgatcagtcgccgctttgactattacgtcgacgaacactttaaaactcgcaaatggacattggacaaaatggaaattcaaatcaatggagaaattggacagaatggtgcaatggaaatgaaaattgtcaatgccaatttggattcgctgccaatcccacaacatccgttgccgaaaaaagtcatcggattcagatcaattacgatccagtataaaatgatttgtgatttgatacacacattctgattttttgtttcagtttcttcgatcaaaatgtgatcacttttcttggccattttcaccgttttttcgccaaatgcgcaacaaatttgtcaattgagacagagaatgttcgtatttcgaagttcattatgctcaacatttggccaaagttcaataacaccattcgtctgatatattttcactccatcgcttttggtcaaatgcgccaattggccccgtcaatgctcaacgattgtccatcccttggaattgtcagtttccgtgacggaattttccccgaatttccgcctgatgacagtgccaatgcgtcggatggccaaatggtggcaaaatggctgttctcgccacgtcctgacaatttgccgaagtcactcagaattatgaattcattggttgaccaatggttggcaatcgttgagcaaattagatcg

SEQ ID NO: 57582 - DNA, 636 bp, Heterodera glycines
ttggccgccgctgctgccacactgttgctcaaccaacaaaacaatggggcctccaccaccatcgccggtggtcagcaccacctttaccaccaccatgacagtggcacttcgtcaaacagtagtagcagcttggtcgctgctgcccatcaccagcatcaacagcagcagttgctgttcgctgcacttgccgcgggggttggcggcggcgatcagaaaccatcagcgactgtactgcaccaattgttggcagcgagcggcgtcactggcggcgacttccagcaacagttggcaacactcgccgcgctcggaaacggcggtgccgacgccgcaaattcgctggccgccgttgcggcactccaacagcaacaacaacagcagctcgtccaacagttacttcagcaacagcatgcactgcttggtgctgccggtgctcataatggtggtggtggtggagcagcaaatgcggcggcacaacaccaacagcagcagcagcaacaattgttgtccgcgttggcggtcgcgcagcaacagcaacaacaccagcaacagcagttgagcaatggctatggtggtggtggtcatggcggacattcaacgtacggatttgaatatatttataggtgtaatcaaaattaa

SEQ ID NO: 57583 - DNA, 539 bp, Heterodera glycines
atgggccgcagaagtcaatgtgaagtcgctgccatggcttttctggcacttcccatgggtgtagagggttaaaatgattccaattttatttttatacttgcaaatttttttatatcttttaattatgttgttcttttatattttatttttttgtaatgaataaacatttttaaatgcttaatattaatatttcgataaacttttaattcattaaataaatcttttccccaatttcttatagaataaactttttgaaaaatttcatggctaatcctcgttttttttcttcgaagatgttgtatttatttgagaattaaaataattaatcatctttaaaattaatgagtttaggtttattgtatttttttgcaacaagcatctttcttttgattgttccattggtaatcattgggatttttattgatattgttagatcatcattttctatgttccattttattaaagaagcttgttaatttttggcatttttcagagctctcaattttctgaatatcattcttagaatttcatgattagaa

SEQ ID NO: 57584 - DNA, 1797 bp, Heterodera glycines
atggctttggttagcacaatgctttctgccgtttcaaaggaagcattgctgccaaaacgtcagtttttaagtgccgaaacaacactaacaacagtgagtgggtggcatttggtagtgccaaaaagggaataatggaagaaatgccaacaaaacaaataatttaaataataaggcaatttttttaagctttgcgatgacaattattttggtgcccatttggatgattggcctgagactgtccgtcaaatgttggcttcgcccgacgtggcaatccccgcgccctcagaatgtcacagactttgtttgtcctccttgggagccgttctttggttcgtttttttctttggattccactttcatttatactttttcattttcttgattttaggtaccttaagcattgccttgtagacgtggacactgtcaccatgcgtcgcttttccgcgtacattccgccgtacattgaaagcaaagaaattgtgaaaggagcgaaaaatggcatggaggacgaggcattctgggaaggaaaacatatgtgagtaaaaaggcaaaaatcttatcgggaagggtcacgagaatgctttttaggggaatgggaatgaaaagttcgttttcttggaattggcatttatcttcctaaattacataattagggtgttggacggcgtctctctctccaatttgcacattatcccttctctttccgtctccggcctttcctccgcttcttcgtcctttgctgcatcctctttccgaatgaataatgcaaatttttcgctgtataacactataaaccgatgccaaactccctttggaaaacgtttgcttcgacaatggatctgtgcgccgattagcgatcggaaatcgcttttgggcagacaaaagtctgtcgagtggcttttatccgacgaaaggcgtccaaatttgacaaaaatgaccgacttattgaggaaaattccggacttggaacgccttttccaaaggtaacatcacaaaagttttaatttaaaacattgaattttcagaattcacacaattggtcttaaataccggatggattcgagcaacggacacccggactctcgggcaaatctcttcgaagctgacaaatataacaaacgcaaaatcaaagatttgctcattgtcctcgatggtctggaagacactcggaaactaatgcttttattcgaagagataaactcgcagggcgaatcgaagttcgtttttaaaaatgaaaaattaatttattggtgtacttttttacgtattaatttcagtgcaccgcctcttttaaacgaatgtttgagtgccaattacaaagaaatggtggaagatttgggcttctttaaggtcattatttggtttggcattttaataacaaattggcaaaagcttttttttctcatttaagcgttgcctgttggaaatatttattggaaattttggcacagagcaaaaaaaaaacttcccccccccctcccctccgaattttctgcttgtgagactgattgtgagcactgcatcacttttcattttcagggtgcatttgaccgtgagaatgccctcgagcgtggcgttattttgcctcgacggggcgttgactcggaatacgacgggacatgtcgagaaattgaacattgcaaagaacagttggaggcgtatttgggctgggcaagcaaaaagttgaaatgcacgccgaaattcgtgggcacaggcagaaattcacaccaattggaaatccccgagtcggcatgtcacaatttgacggacgatttccaattcacgtcccaacgaaaa

SEQ ID NO: 57585 - DNA, 532 bp, Heterodera glycines
atggacatttgcgaattgattgccagcattgccttcgacactcatgtccagggacactctcttgctgcgtgtcacctttacgcattggcaaaggttagaaaaaacatttaatttactaatcacaataaaccgtttctgatttagtgtcacgaaaaagccataaaattggcaaattgccaactctccatgtgcgtgtccaatccaatggccaaagaaacttgtgagatggtcgaatgtgccaaatggttggcccaacaattcggacaaccaaacatgaacgaagagaatgcttccttttccacgctgatcctccttttaaaattgcacaattttttccgattggctgtagaagaaagacacggagaagccatagaactgatgaaatccgaaaaaatgtatggaaccggacgatgtgcaacccaatgtcagccaattccacgaagtgccaattgaggtgaacccaaagacatcaatcccgtaaattgtttcttgttttttatccgtaattttttgtattcatttgacgattaaa

SEQ ID NO: 57586 - DNA, 1865 bp, Heterodera glycines
atggagatcagctcgcggcacattccaaccatttggttcaccagtcccaacattgcggaagcccatggaggcgcatcggtaagatgctccatgtggaattgttcaattgctgaggcggaattgtccaattggtgcacaattcgctgttttttggagttaattggggggatagtgacggagggtctgcggcgggaaattgaatttagattttgcatttagggcttaattggacaattacttatcaaaaaaatgaccaattgattaagttttgggtttttaggatgcttaacatgaaagaaaaaagttggaatattttttaaaattaaaattttaattaaaataatggtaaagaaaatgtgaggaatattctatccaagtggggaattgaacccaggcgaaaaattatgaaaggtagaaagtttaaccactacaccacatgtgcatgttaaaaaaaaaaaaaaaaatttggaacgcttcacgaatttgcgtgtcatccatgcgccgctgctttgttggacgctggtttagacgatgtattcagacgcagtgaagagatttggtcgagaaaacagtcactgcggccgacggccgtcggaatgggcgcttcgctaaagaccaaccaggacttagttggtggaactgttcattcactgtttaaagattaattcaaaataatcattcagagtcagctttcatccacccgtctccccatatcaaaaattgccgaaaagcctccgtcggctgatgcttctgaccgttacgaggatataaacactgatgttttgaatgaacgatttacggatgcagaaacaaacaaatttgtgcaacgtacgattgaacgagctcagattgaggcggagcggaccttcctcaaccagcaaattttggagcgacgctttgcacccggggaaagtttgtttggccccgtgaacaaaagggcaatgggctcggcacaaccggacagaacagcaagtggtggaataaagcgtttcataaatcttccgaatgcgccactgtcccacgaacagagcgtatttgcacaaaaggttaatgaccattcatcccattgtaattctttctcgtaaattgtcaggttaacgaaacccttacatccaacgcctcggctttaattctacttgccgtgaaagaatcactgagcaatttgaaatcgaaggaagccgattatatttggtctaaagcttgggccatgtttccgtcatcaattggtgaaaattggcacgagaaaagatcgtcacataattggatgggacatataatcgacaatagcaccaaatttctgcaaaatgagtgagcatatattttttattattgtttcattgataacatttcatccgctgtttagatttatttctcacaccgaagccaccatcgaagcgaatttggaaaaggcacgccgtggaggcattcccggcactttgtcaaggattcttgcttatttgaacgtgaaaatgccttcccgtgacccattcgaggttcaattcgttgtcattttcatttttccaaatttccattggataggacggactgttcgaacgataccctatttggacattgctattctattgccttcgtgtgggcgacatggctgaggctggccgagttgccaaggaggccaaagagttgtcaaacaatccgcactgtgcatcgcttgtcgggattctgaaaactttgccgaaatcgtatttttaggaacctttgcccaaaaaacgaattctctttagcgatttgttaaacgacgagcgacgcctgaaattgcgcgcggaatggaacgcccagaattgccaagacatgcacaaaaaggccatctacggactgtttctcggctttgactgtcctgaaataaa

SEQ ID NO: 57587 - DNA, 419 bp, Heterodera glycines
atgaaagaaaaaatcgaagagtttgctgatcctgatttgtatgcgaatgtggtaatcttacatacatggatgttctttaaaaaagcgaccgtaattacatacggtataaaagacaaatatatttaatttattattttaaaagacaaatattttttaattcccgtgagatttctaggctacacgtggacttatgtgcgtgcggtccaaacccaacaaggaatgaatagtttggttaacccgccagttacagatgccgaagcatttcacacacatcttttcctttgaagatgcgacccaatatgcaaagcaaatttttttttaattggtgctttaaataatcatcatgaaaaatttcatttttatttttaatgccattttaatggcataacaccaaatttaaataatttcatattaataaa

SEQ ID NO: 57588 - DNA, 72 bp, Heterodera glycines
gacgaacactcatcactagtcatgcccaaaaattgtgtgcataaactgacaattaaaaaaagagaattgtaa

SEQ ID NO: 57589 - DNA, 411 bp, Heterodera glycines
atgggcggttccctgtatgtttacgcagtcttacggtaatttatatggatgctgatgaccgggtgttcaatcggctcccggtcatttggacagggtaagtcattcgggcagaagcggacaattggacagtggacattacgacagtgaatgaatttatttttactttttaatggttttagcggtgtcatggcaattcgtacaaaggcttagactaaatttaggcttaagcctaggcttaggcttacttgagcttaggccaaagcttaggctttattttgtaaactttttattgtatgaattgctattgacccggttttagcaatgaaaaaacaatttgttttttttaatttcttgggacatttggtaattcctccagacaaattactcaaattcataagcgcataaatagca

SEQ ID NO: 57590 - DNA, 707 bp, Heterodera glycines
atgattcaatcagctccaggcgatatttttgatgagatatgggacaaatttcaaccaaataaagttttttaaagttttatcattttcctattttttccatttattttagggcctttcgaatgaaaatcactccaaagagcaaaaaccatctaatctgttacaaattaaagaagaaaaaacggaattaaatccaaatgaaatgatttggaataaaggaattgaaataaaaaccgaaccaaaaaaagaggacgaagaaattggagtaaaaattgagccaaaaatcgaaaaagaaaaagaaaatgaagaaatgggaccaaaaatgagaaaaaaaagttggaaaataaatggaaaagttcataaaattaaaataaaaaattaatttattcgatatttatttaaaatcggattaataaaccaattttagagaataaagctcacacgacagaagaaaaactgcaaattcttagaaaatttatgacaagaaaaattgaatgtgcggaaattccaagtgaaaattcggtttatgaaatggaagaaaaaatagcaaaagaattgggcgtttgccgagcttcgattaacaaatggaaaaaagaattgggcctatcagcaggtattaatgataagaacattttgtgatttttaaaatgcatataaatgtttggcacttaaataggccatgttaatttttggaaaaaaaaaaaattaaa

SEQ ID NO: 57591 - DNA, 539 bp, Heterodera glycines
atgaatccgatcacttttttgtctgcggtttgctgcttcctttttctggccaaccatttccaaagtgtcgctgctgcttcaacgaacgtgttcgttcagggaaaaaaaagctacacaattaacttgattcttgatgatagggaaggtggttatatacaacaaataacaacaaaaaaagtcaacggaaaacaatgtctgacgcttaatcaaaacctttggaaaacgtaccaagacgatgatgtgattgcattccgtcatggatcgacggacgtaattcaaacaaatcaataaataaaaaaaattcgtattgtggtttggcgaaatgaaaattttccggcctgtctcgtctcgcttacacatttatttttaaaccttaatcttattcaatattctaagattttttcttcttttttttttgttaatttttcaaaaataatataaatatttttcattttcaggcgctgattggtagcatcactgtcaagttattgcgtgcggacacttcaatagacatttctgctgataatactcatctctag

SEQ ID NO: 57592 - DNA, 1297 bp, Heterodera glycines
atgggttttgcctcagcgataccatatgtcgtctattttgcggtgatcaatctcggcggtcatgtaagttatgctgtattcacttattaaagattatccgtataatcattaggtttgatcagaatcatatcaagttgataatttattaaattttaaaatattaaatgccattgaatcgggcgaatccatttcatattactaaaaatgagtaaatatttcaaaaataattttatttttatttattcacaaaaaaattttttgtgacgatgccatctatcaatttttcaatgcagctgtccgattcattgctacaacgtcagctgctctcaacgctgaactgtcgacggttggcaatggcattggcactcggtggccaagcatttttcctgctgctgatcagcttttgcccttgcggctatgataaattggtgatcacgcttctgacgctgtccattggcatttccggatttcaggcaaagggccaaagatataaaatttcaaaaaattgcatttacagtattctggctttgtgataaactacctagacattgcacctgagttggccggcctactgcttggacttggaaacaccctctcctgtttggccggctttcttggcccaattctgatgggatggctaacgccaaccgtaagaatttttaaaatgtaatcactacgccaagaaatatatatttttaaattcttctcgaataaacaatttattgtggaattttgagaatctgtttagatattaacattagaaatgggttcaattaaattggaaaattgagtctgaaactcgagtaacaaaattttttcctgaaaatttcttgaatttttccattatttagggctccaagacggaatggttgaccgtatttggcatcactgaactgattttggtgcttggtgctttggcatttgctgtgttggccagtgccgatgtgcagccatgggccaagcgggaacagacggacgatgaggaggaggaagtgatcagcggagggacaaaaactgatcagcatatgactgatcaggatcaaatgatgatcaataatagcaggaaattgccggaacaattgctgttgttggaggatggcactgatcagcagcagaatgccaaggacaaaatttaaacacacatttttgaattgatcagacccgaacgctatacacaattttggaacaaaacgggaggattttgaaaaactaatttttaaaaaacaaacttaattattccataaatttttgattatttttatatgcacaaattgtacaattaaatttatgaaataaa

SEQ ID NO: 57593 - DNA, 689 bp, Heterodera glycines
  unsure (1)..(689): unsure at all n locations
cgctgcttctctccaaacggttcagcttggcactgatctgttttgcgggctgcgcactttgctatgcgctgcgctcaaatttgtcatttgccatcgtttgtatggtcaaggagggatcgcctacggtggacgacaatggcacaacaaaaaagggatgcggtgccgcgcatgcgacaacggagcaacaacgacaactgcccattaatgaaagtgatatggccattagcaggttcaggaggcagactaatcgatcggtaatcgctacaataaattatccataatcatttaattgctcaaatttttaacgatgaaaatatttttgatcttagcctaaaaaaattagtcgagagtcaactccgagaataattcttgggtcaagaaaaaaaaaagtcacatgatcttggatacatccttgagatcaacttttggcctcagcttagcatgaaataacgagaattgattgtgacaaggtctcggattaagggataaataattattttgaaagcatttttgccgtttccaagacacggtaaaaattataagctcgggatcatataactgatgttaatatcttgtcagttcaggctcttattggtcatcatgatgctgatgttgaacaatatcttccggtcccacttgngcctggtgaatttgattggtccaagcaaagtcgagngcaagtgcttngn

SEQ ID NO: 57594 - DNA, 64 bp, Heterodera glycines
tagagaccgacttttgaggcatatgcctttttttctgcgcactagtttcgatatattaagcata

SEQ ID NO: 57595 - DNA, 843 bp, Heterodera glycines
gaccaaatgccggtggtgaatgtgtactcgacttcggtgaccagcgacaacatttcgcgcaacgatcttttgtcatgggtcaacgactgtctccaagtgagaaacattgacatttgaaatgcgacggcaaattcgaattgagaggcctccgtttgccatttcagtccagcctgaccaaaatcgaagagatggccacgggcgcggcctattgccaactgacggactttctcttcccgacccaagtgccgctcaaaaaagtgaaatggaacagccgatcggacgtcgattgggtgcacaattggcgcgtgttgcagcaatcgtggaaaaccatcggaattgacaaagtttgaatcaaaatgcaacatttggagttaatttgcaggggaggaccaattcatttgggaagttggaaaattggggtgaggggatgccaaaacgaataaaagaattcaaacggatgtcaaatcccattgcatttcagcctgtgcccgtgcagagtcttatccgggccaagtttcaggacaactttgagtttttgcaatggtcagtctcgttcccattcattcgatcgttccttttccctttaggttcaaaaagttcttcgacgcaaattacgatggtcataaatacgactctttggcggcacggaatttcgaagtccgttttgagggatttgggctcaaatgctttaaaatcacttttccattgtcacttcacacacaaagatgggtctcggaaatatattttttatccctaaaatccgtaccattttttctgctcatgtccatccccctttttttcattcatttatttccaatttcttaggagttccccgccgttttg

SEQ ID NO: 57596 - DNA, 752 bp, Heterodera glycines
ttaaaaacgcagaaaaattgagcatttatatatcgcagttatccgcgaagcatggacaaaatgccaatgccaatcagcaaagttccgctggattgtcttcagaaacaagcagtgaggaagaacatgatgtggtatctgctgatctggttctgttattaaatctgatgaggctaccagtcgaatgtgttcatccgggagagaaaaattggtggaaaaattattgggcagtaattgcggacattctctccatttggacagaaatgccagaaattgtgttcctttcagtggtaagcaatggcaaaatgtacttaattatatttttaaaaaattccaaaattttgaaagaatttattttccacaagaaactgatccatgccaaaactcattcaaatcaatcatagactgattccaatcttaaatttatatccacttttgggtgattcccctgtttatatttatgtattgaaatggggcagacttttgaatagcaaaaataaagaaattgttgagtgaatagttttatgagtatttgtgtattttaatttaataaatttttaacaaaaataaataaaacccattttttatcaaaaagatttcaataaatcgtaaatatattttgaacaattcaaaattttcaccaattttaattaatttttttttagaatatgctaaacattgatgcggaaaagcgaatgactgcccaaggggcggttgattatttggaggggaaatgtaagcaaagaggaatatga

SEQ ID NO: 57597 - DNA, 811 bp, Heterodera glycines
taattaaatcccccccctcgggggaccgtgccgggtgccgcggggtaagcagtgctggttcgtttcatcacggcaccgaaccttttggctagtcagcaatcgttgcttaacttgccagatcggacgggtgcgcatgattccactgttccaagcaccccaccaaaagcaaaacgatataaccaaaatataaggaaaaattttttaaaaatttttttctccatcttcctttttgatactaaagcatcagagtgctaaaatttagttgtaaataaaatttggtgcgctttagagcactttctgaaaaaaatatttatgaaacaaaaaaatcgattttttcaagtgtccgtttggggtactcaaacaattatggggagcaaaaatccaacgcagaattaaagtacaggctatagggaagctattccggaaggattcggtctccccataaatctgggcgcatcggttcggggggactgccccgaaaacaaaaaaatcgattttttcaagtgtccgtttggggtactcaaacaattatggggagcaaaaatccaacgcagaattaaagtacaggctatagggaagctattccggaaggattcggtctccccataaatctgggcgcatcggctcggggggactgccccgaaaacaaaaaaatcgattttttcaagtgtccgtttggggtactcaaacaattatggggagcaaaaatccaacgcagaattaaagtacaggctatagggaagctattccggaaggattcggtctccccataaatctgggcgcatcggctcggggggactgccccgaaaac

SEQ ID NO: 57598 - DNA, 1482 bp, Heterodera glycines
atggacgaaattcgcgcagagattggaaagggagggaattcggtgaagaaaacttacaaaatgtggcacaaattggccaatttgttcaacaaaattcccatttcgaagtcgcagcaaaaaattggcataatttacgacaaatttggccaaacgaagacggaatttttgtggaaagcgaaagaccaaatgatggaagaacacgcgaaaaatgtggccaaattggcaggggacggacagaacgaacttagccgaactttggccaattcaattggccaaatgagaggggccaaacatcggctcaaaagctttttcacctccaaattcaaaggcaccgaaattttggaaaaattaatgggagaagacgcgaattttgcggcagtgtttcgttcaggtgaaagtttaaaaaaattttaaaatgtttttgttaatttgtctcgttcccatttttcatagatttaacttcaaacgaaataaaggaattacaaataaaattttacctaaaatttttggacagtgaaagcgaaacggacgattatttgagagcaaaattaattgtggacaatttggcattttatcaatggtaaataaaaccattggccgttaatttttatttgttttttaatttttcaattttaggttcaaaaataggcgacaaaaactgccaaagaatggacagtcccttctcgagcagcacctcctccaaatcgaacttcgcttggattccatcgccgaaatcgaaacttcggagggaacggaattggcacacgaagcgaaaatgatggcactgaaaatgtcaaaagacaaacttttcccagaagaaaacccaacggaagtgaaaacatttggcaaaagtatgaaaaatgaggcaaacaatgtgaagaagactctgttgatgatggaaatgcattgtaaaatcatcgaagaatttgcggaaaatgagcagaaatttatggacggagttaaaagtggggaaaaactaattaattaataaacttattagtgtgatttaattattaaataattagtttctaattaattaattgtaattaattattagtgattgatttagaaattgttcttgacagtcaacgtttgcacaaaatgataccacgactgagcaaaacatgccaacttttgaaggaaaatgccaaaggggagacaaacggaagaaagaaaagcaatgggaaaaatgagacggaaaagcgggcggaagcagaaaaaggagaagcaaacggacaaaggggcggagaatgcgtcgcttcggacggtaagggaaaactaatgggcaattagtgttaattatcattaattgcttttgccatttgccattgatcactgaagaggaatccgacctgatcagctgctatcgccatttaatgtgtgctgatcagccaatttcgaaatctgacaaaacatttttaatggtcaattcgctttttttccatctgaaattagtgataaacgaacttttattagtcacaa

SEQ ID NO: 57599 - DNA, 388 bp, Heterodera glycines; identical to SEQ ID NO: 51536

SEQ ID NO: 57600 - DNA, 65 bp, Heterodera glycines
cattactggagttagcatcatagcagtgcttttccttgtctttttgatgccctcgcaaaatctgg

SEQ ID NO: 57601 - DNA, 436 bp, Heterodera glycines
ggttcgatgaaactttttaaaatataagcctaaactttttggcctgtttaaaaaggaattaaaaatttttaaaatatttattcatctccctttttgatagtgaaagcatcagagagccttatttaacttttaattaacatttggtgcgtttcagagcacgttctaaaaaatatttatgaattaattttgcaaaataataaataattaatgaaaaagtcagaatttcgaaaaattttaaaaacaacaagcgttggcattttttcaggttaagttagtcctttacaatggagaaggcctgcaaaatttggagagattatatcgattttagtgcgctaggttcgatgaaactttttaaaatataagcctaaactttttggcctgtttaaaaaggaattaaaaatttttaaaatatttattcatctcccttttgatagaa

SEQ ID NO: 57602 - DNA, 288 bp, Heterodera glycines
atgaaatggatggcctcgcaatggaacactttgatagccggagggcattggttgtggctggacgaagtgaaaatggaggaggatgaagaaatcgaggacgtctcagtggtggtgccatgggcagaggaggcggaggaggaagagcagttcccaatgttttttaccggccttttacgcatccactgaaaaattttaaaaatggtttttttttaatttttagggcttatagaataccaaatctttgacatcatgacaaaatacccaaggaaatgtacctcataaaataaa

SEQ ID NO: 57603 - DNA, 335 bp, Heterodera glycines
atgttcactctttacatttcaatcatcaacattagcactgtcatttgcaaagaaatagccattaaggtcagcgaaactccaaagtaggaaaactcgttttgttattttacaaccaaattcagcttaggtcgacattcaaactcagaatcagcgcgtctctctcggagaattggccttcgccggaattgcccttgagccgaaccaacaaattggccaaatttttaaacatgacatccgggaactaggccaacacatgtgagttttgttttgttttttactagatcgttcataacctaaatatcttgttttgttttttaatttcaaaaaaaaaatca

SEQ ID NO: 57604 - DNA, 981 bp, Heterodera glycines
tggctcaacaacgccgtcaacaaaaattgcgggttgccttcaaaaaaggagaacaaaatttacgagagggcacaacaactgatggaagaagtggaaagcaaacgaagcacaaacaacggcgaggattttacgatgtctcgggagtataaaaagtgtaaaccggtaaaaacaaaagatcattcaaaaaatttgtaaatatagaaaaacaagattaaaaattttttagaacatttatagtgtattagggtattatttttgctcgattcataagtgtgttcttttaccatttccattgctttttatttgcgcagttaaaaattaactgcgcaaaattccaatttaatcggaacatatgaaaaaactaaaatttggcgtaattaaaacttattttaaaaatttgtagtccttgaaatgaatattgaatttaattttaattaatattttacctttcaacagatgttttggtacgacttacagctgttaggccatttcaagcagcggaaaaaaggattgtctccattaaaaatggtaaatttaatataaattattgtaacaaaacaaaatactaaagaggccatttttatcaaaaaaaaaaaattaaaaattaagtttcaaaaatttccgcctgcttttaaataaaaaaaaacacgtaaatcgcgccgataagggataaactcaattggtttttcttatcctcaatgtttttagctttatcaaaggtcggcttctccaatttcacttctgtcgaagcgctcaaaaaaatcttttcaaaattgttttttaccagtgacattgagcaagtgaaaaagagggaaaaacgcagcgaaagtgaatacgagtaagcatcaaaattaggggattaaatcattttaaaactcaaattgcaggtgctttttgaagaaaatttcattccgttacgaacgacgaagagagccactgcttgaccatgcgaatatcatcatttctgatgttgcacggatt

SEQ ID NO: 57605 - DNA, 790 bp, Heterodera glycines
atgcttttgtgctttgtttttctcttaaccaccctatcaacacaaaaagcgtttggcgtgtgacggcttcccaatttcataacaatttcggcatttgcagtcagtaaaaaatgccctttctctcattacagcagcactctcgcgtaaccaacaacgtcgctattttcgctcggttgccactgcttcgtttggacatcggggcggcccgcaatacattgtcaagtcgcgcagcgctgcggaaccacggctcttcaaccgtcttgtgcaccagacaagccgcggaatccgcgtctcagccttcgagggcggtggttcgcaccaatacggtgccgcgcaccaacacgtgccgggtggcggcggcttccgtgacttcaattctcgtcgcggtgtagggccgggagggtcagcggacccgcgccgttatgacgctggcaatgccgagcgtgaggaaatgctgcgcttgatggaacaacgcgaggaggagcatcgcaagaaggaggaggagttgcgcctggagcgcgagcgggaaaagttgaagtacgagcgtgagaagttggaacgcgagcggctggaggtggagcacatgaagttgaccgcccaaatccaagcgtccgggtggctccaagcagccgcactgcccgccgccggtggttttgttgctgcttcacccgccggttttggtgtccctgccgcaccacagcagtcgtctgcccgggactctcgccagcagcagaattattctcggcaccacagcgaagcggcggtggcactggcacgaaacagcgcgaag

SEQ ID NO: 57606 - DNA, 59 bp, Heterodera glycines; identical to SEQ ID NO: 52421

SEQ ID NO: 57607 - DNA, 59 bp, Heterodera glycines; identical to SEQ ID NO: 52422

SEQ ID NO: 57608 - DNA, 59 bp, Heterodera glycines; identical to SEQ ID NO: 52421

SEQ ID NO: 57609 - DNA, 59 bp, Heterodera glycines; identical to SEQ ID NO: 52422

SEQ ID NO: 57610 - DNA, 59 bp, Heterodera glycines; identical to SEQ ID NO: 52421

SEQ ID NO: 57611 - DNA, 89 bp, Heterodera glycines
ggccgagccagtcgattttatcaaacataatcttacaatacaatcgtactacctagcgggggatgcgccgaaggcgctgaccccgctag

SEQ ID NO: 57612 - DNA, 1606 bp, Heterodera glycines
atggagtccgctggcagcagctcacagccaattttaaacagagatttgcaaattttggtcggcgagcaaatatttactgggatatgtggtcctggccaatacattagcaatggatttttcaatttatttgttagttttttaaaattatttttgcttttgattcatgcaattttaggaggcgggaccgactgttaaaagctctgtcgtctcagttcttagcaaaatgactgtttttacaatgaatgaatgccgggcacagatttcgtcgccaaccgacaaaagggtccatttttaatttattttaaatgatattttgtaattccttatttttcagaagtttctttgtatcgactttcgaaaatcgtcggggtatttgttcttaaataagttggtccaaattatgaatgaaagcaaagggaaattcttcgaagttttgcatctgatctgtctgaaaggggtttacattgagcgattgttcgatatttttttgatgctgaatggttaccattttattattttgtccaatttgtattttttttgaacctccctttccttcagatttgaccatcattaatcttccgtacgaattcgattccttttctcgcaacggggaaaccaaaatattggacaaattaatcggaaagaatgccgcgacattacattccattcaccatttggtctatccgttccaattgttcccaaacattcgcaaccgaattgttgcgattaattccgcaacattaaggacagggacaatggaacgggtgagttttgaatggtccgagcgggtgagttttggaagctcagcccctcgaagaaaaaagaaaagaaacggggggggggaaatgagcgcacataattcatttctgctttctaataatttaagtcacataaattttttagtgttatggattgcttaaaaagggctagaaaattgttagttggtcatatttccaaatttttaacacatttccaaaaagtaaaattttttgagaatcccctaacaataagatatttgaaaagtagatattttcaaaagtgaaaaacacaattaactacccatggcattatgctccattcgcctgtgccttaattttctcactttttaggaatgcgatttctttgccttttacatggatccgagtgattgcccaaaagaacttttgccgcccaaatttggaggcatttcgatgagtatcagcatcaatcggtgcaaagaagtgttccgctcaataaaacggttgttcctttgagtcatttttcggatcaccgcttttgaattgttttttgagagcattgcaacgggacaaactccgttccgaaatcaccaagctcagactgttgtccaccttcgattttgatgaaaagtccgcgcagattttactcactcaaatcgaacgcattcgcagcactttgccaaaagtgcgttcactgaacatcgaactgagagcagtcgaattcaatgcaagtttatggaaattggaaaagtgccattttgaaagtggtgccggataaagcgctgtttcagccgaaccaggacctttattcgaacgacgacttcgccgactccaatctgatcccatcctccgcttccgcttgttcacat

SEQ ID NO: 57613 - DNA, 608 bp, Heterodera glycines
atgcattcatccccatttggaggatctcttatcgctgccattggttttctgatcagcgctcttttgcccgcccttccggttctctatttatgttttggcgtcattggaggtgtgtattttgccgatgcatctgttctttacccgtttcttccccacatttccaaggtctcggcttcggtctcattttccttcctgccattgtaattgttggccaatacttttccgagagaagggcattggccacgggcatcgccgtctgtggttccggcattggcacggccatttttggaaaggtgccatcggcggtttttccatttgccaattccgcttgttttttttagctcaacccatttttgcttgatttgttctccgatatggcgggggaggaggagagttggcgtctgttccttctcttcctgtccggcacttcccttttctgcgcctttttcggctatttcttcaagccgttaaaaccgtcaaagtcccaattggaacaagtgaattgttttaagcattttcaaaagattatcccatattttgttttggatgaagtgattggatttagtaaaggttgttcggatcacagccgaactgatgggaatggatga

SEQ ID NO: 57614 - DNA, 722 bp, Heterodera glycines
ctctttccaaaattggtggcgatgagttggctgacagtgtgcaaatgcgtcttcttcgtgatgaaaatgcgcgtcttctctcagcgctcggcagtgttaaggcggacaaagccgtgctgaagaaacggttggaccaactgcagcagaacgacgcattggcggagcaccaacagaccaatgttttgaagcaggtatttattggcataagacgaattttaaacactaatttttctcaattcgcttttctctcattaattgaaaaaattttaagaaattcgaagccgtaattaacgaatgacagaaaattaaagatttttttgaatgatcgacaaagtctccattcctggtttttacatttttttcaatcaaaaattcatagtttggtttttcagataaattattaaccgattacaacaaaaattgtcggaacaggtcgttctcccctgcgtcgtttcccccttaaaattaaaaaaaagtttggcaaattttctaaaaatcgttgaaaactttttcgaaatttttttaaattttccgatggggaaacgacagagggggtggaatgaagtgcacctaaaaaagccttcaatggttaaatgtttttttttcagtcgaaactctcaccgacgagaacggaaaagtcgcagcaacggcatgtgttcactttgcacgacaacaacaacggattcactgggtgcacgtcggcgcgacaaccaacaacataa

SEQ ID NO: 57615 - DNA, 230 bp, Heterodera glycines
cacttccgccgctttgtttgttttccacaaaatgtcttcgtcagtttaatcctccatttttttgtgccatgccttgcaattgtcagccgattccgccgccgccgccctttgatgtcccccctccccccgacccatcgtttgtgttccatttgctgagtgacgacccgcccgaggcatttgaaaaggtaaaaggcaatttgaagaacgggccaatggtaacggagaagtga

SEQ ID NO: 57616 - DNA, 898 bp, Heterodera glycines
atgaaaagtgatcggacaaagccaaacaatggcatgaaaagtgatcgggcaaagtcaaacaatggcatgaaaagtgatcgggcaaagccaaacaatggcataaaaagtgatcggacaaagccaaacaatggcatgaaaagtgatcggacaaagccaaacaatggcatgaaaagtgatcgggcaaagtcaaacaatggcatgaaaagtgatcgggcaaagtcaaactatggcgtgaaaagtgatcgggcaaagtcaaacaatggcacgaaaagtgatcggacaaagccaaacaatggcatgaaaagtgatcgggcaaagtcaaacaatgtcacgaaaagtgatcggacaaagccaaacaatggcatgaaaagtgatcgggcaaagtcaaacaatggcatgaaaagtgatcgggcaaagtcaaactatggcacgaaaagtgatcggacaaagccaaacaatggcatgaaaagtgatcgggcaaagtcaaacaatggcatgaaaagtgatcgggcaaagtcaaactatggcgtgaaaagtgatcggacaaagccaaacaatggcatgaaaagtgatcggacaaagccaaacaatggcatgaaaagtgatcgggcaaagtcaaacaatggcatgaaaagtgatcgggcaaagtcaaacaatggcataaaaagtgatcggacaaagtcaaactatggcatgaaaagtgatcgggcaaagtcaaacaatggcatgaaaagtgatcgggcaaagtcaaacaatggcatgaaaagtgatcggacaaagccaaacaatggcatgaaaagtgatcgggcaaagtcaaacaatggcatgaaaagtgatcgggcaaagtcaaactatggcgtgaaaagtgatcgggcaaagtcaaacaatggcacgaaaa

SEQ ID NO: 57617 - DNA, 783 bp, Heterodera glycines
atggccaataaacttattctgctgccgtacgagcactacaaggggctggttgcagcgagggagacaaagaatgacgacgacgacgacattgctgagcggacaaacttaggctttgtcaaacgacaggtgaccgctgcagtacagaagcggaagggaaacgtcagcgagcggaacgcaatgtacaaccagcacctgcgccggtacctgaagatgcgcaaggaacataaggagcggcccgtccgagtacagctcagcaacggtgctcaactgctaaataaaacagtggagacgggtgtgcaggtacggcctggtccggacgaaccgaaggacaagtccgtgatggttaccgacgaagatgaagaggaagaaattgaagtgccaaagtttttaaccccaacaagccagacgcagggaagcagccgatcacccaggaccaataagaaagcagcaaaacagcaaaaattgatcgagaagaaggaccacctgttggccatcattatgtctgatccgcagagattcggcgcaactgaccgtgggaaaatcattaacccaaagacgggccgagagtttatcgactcggacctggcctggtcaattgaacgcctggtggaccctcgcccggagaatgccccttcgccacgcggaaccaaagagttgaagaggaaactcgcacagaatccgctcgccagtagcctactcaatcgactgtttgttgggtctgggttcgtcggacaagtcaaacaaacgagaggatttgttccctcaaaatggacaagaaaataa

SEQ ID NO: 57618 - DNA, 2739 bp, Heterodera glycines
aagttcgaaacagctgctactttccgtcaaacgtgcgacaggtgctcagtgacttttcgggtgagattcgcgttgtgttttagaatttttatcaaatttggtaatgaatgatcaaaaaacgtttctttatcacactttttgtttcaatttcctactaccctaagtgatgatcgctatcgtgtgcatgaatttgctggacgtttttctgggcaccaacacaactaaggtgaatgttcaacgcaacttccgagtgttgaaaaatgaagttcggtatttcttcagcctatggccgtgatctattttctgcatttctcgaaaaatggggagctgtttcgaggggcatagctctaatttaaaaaaattttttagtcggtcccaattattttttgtagcaaagagtatttggctcttttaaatggcttaatttttcctggaaaatttttttaaaaatggaaaaaatttctcgtgatcatttcgtctcagttgcttcaactcgctgcgctcgtagctcaccaatgtttttgccaaactttacttgccaaccaaataaaaccaattaattttatgagttgtttttttagtgtttaggtttgctttaagatgtcttctagcaaatgtctagaactttcaaatattgttttttgggcataaatgatttttttaattcaaaaacactgtccgtctttagccaagttggcccggccgtggttggttggttcatccgttcattggcaattcgttgtggatccctccactgacgctgattcttgctgttctcgcatgtgtcctcctcatttttatgggccaacaaatccatgcggtcattgtcaaccgtcgggaagaccaattgaaaaggggtaattgaaaatataatattgaagcaacactaaaatttcaaattagccagacggtgctggcattttcaaaaactagttcccgggtccaccctctccaaaagggaacaggacaaaatcaccactagaaattttttaaaaattttcaatcttggaattctttcaagaaaaaaatcttataatttttttataagagcaaagaaaattgaaaaattttcagctattttttatgatagattattaacttttttcgaaaactctccaaaaaaaatttttttttaaccaaatttgcatataaaaaattttaagatttgaaaaaaattaagcttgaaaatttaaaaaaaaatttctaacggtgtgattttggggtgcacccctccaaaactagtcaaacaacgggtatttacaaaaatcaccgggccgttttgctcaaatccgataaaaaattgtacacggcccggccaggcacgtatccagaaaaaaatttcggggagggcatttttttttcttttcgggctatatttttttaccagggttgtttttcaaaaaatttcaccgctggagccacaaaaaaaacaggaatttatagcgattttgcgcaaaaaaagacaatttttaccactttggggtcaaatggtaaaaaaataatggtacactggggtcccgcggtgccgataggcgccgctgggaaaaattttaatcaattataaaaaaaacgtacaaaattttcaaaaacattgaccaatttgcttttttttaaatttcacctcgaaattttcaagaaaaaaaaaattttccaagactgtggctaccatcttgatctcttcgatttattgggtgtcgagtccgaaagtcgcgaacctggggagcatagccatttcatcagttatctgtgagttttagttattggaactggttgccaatttttggccttttgctaacaaatacatgccgacatatttcgtagggtcgagtgccaatcatagctgtgcaagggtggggagtcccaacatttgccgtccgactttggcggccccgacagttgcgcctctgtccaaaatcaagatttttcaagaaaagaatttgaaaatttttcagctactttttggaaaaaacagtaattcatttcgctgaagtttttttcaaaaattctagaaaatctctcatacatataaattttctaagaagaaaatttctgtttgaaatttttttaattacggagaaaacggaggaggggggggggacgaactgctcctgtgcaagagtggacgtggcatgtcgctcgccgatcgcatggggtcagtgggcgtcgatcgcccgaggcggaagtcaaggaaaaggagagagaaaaaaagcatagaaagggttgagcatttcgatctatttgttttgagcaagattcttcgcaccgcgagaatataaacaccgcgagaatataaaaaggatagggctagagacagaaaaattcgaaattttttgacaaaatttggtcattttatgggcaaaacttttgcaaacggcacctccggattccccctccccagatcctcaaaattaaaaaaaaacgcgccgcaaaaaaaggtgaaaagcaaaaatggtcccaaccggataaaatttgtgaaaagtaatcgatagcaaaataaatagccggcgggggaccaatttccgagtccttgtctgactccccatgcacagctatggttccacatttctatcctaagtgaagcgagaatcccgccccatcgcattcatgctcaaatgtatttacaggaaacggtatattaccggcattgtcactgtcactctgatcggcctttctgtcacgatgaccaaactgctaagtcggtgcatgcattcattcactaatggcatagcaacgagcaaa

SEQ ID NO: 57619 - DNA, 747 bp, Heterodera glycines
atgcccgcctcagcaaattgtcgggcagcaaagcggaacagtacgtgttcaactggaaactgttcacacgggaaagaactgatcgaaatggggcacacattaaatttgcgtgtaattaggaggcaattaacgaatgccaaatccacgcccagcggcgatgcaaaccatcactttgggccatcagattggtacattgaattgtgaaagcatgcaaaaaacaaataaacaatgttaaggcaactaataccgtaataatagcgatgattcttctgtccatttactgtatacataccgccgtccaatcgtcagaaactgtggaaaaatcatcgggcagtatttttacaaagaatcaggtcaaatcattttcatgattttttgataaatttaataaattatttattttatttttcaggttccccttttgctgtccacaattacacatatttttccgatgatttttgaccttatcgggcgcattgagaagtttggatttatttttaaacaatatttctcaccttttttagacatcatgcaaaactttcgctgcgacttcacttaattaggtcaattaaaaaggtcattttataaatgtaatattcattttaggatctcatctctctatgtcattaattatgtaagaggaattattattgggaaaaataatatttatttttattttatttttattcaaatgtttttacaaaatgaaaatttgggtttattgtattttaatgtttttaaaataaa

SEQ ID NO: 57620 - DNA, 730 bp, Heterodera glycines
atgagagaaaataaaataggaatatacaataatcacttaaacgcatatgtgaccactgtgagttaaggaacggtggctgattgtaagaaaaataattgtcctacggtagtaaagtattatcgtccaactgtggcacaaaaagcggtggcaaaggcgatggattcgcttgctacgagtaatggagtgacacctcgaaaagtaattaataattaattaattaatcctaacaacaaaaaactaaagttttgatataaaaattctttaatttctcctataaatttttatttgtaaaaattaaacaaattgtttttataggattttacaaaagtgtttgcttctaaaaagtcgaaaaaagaattgtataaaattgcttctggagaaatggcaccccattttttgttgaacgttggcgacaatttttacgacgaaggcgtaacaaaagaggatgttgcagagcgttttgaacaggtaattaaattaattaaggagtattagaaaaggaattaaccataaagattttttaaggaaaaaatatatataatatttaatatgtaaaaaagaaacactatattttgtataaatacaaatgtttttctgtttatagaattttacaaaagtgtacaattatgacagtttgaatgtgccatggtatacaattgctggtaacgacgactggaaaagcaaagatggaattaagccacaaattgactacccaacgggcaaatggtaa

SEQ ID NO: 57621 - DNA, 49 bp, Heterodera glycines; identical to SEQ ID NO: 51181

SEQ ID NO: 57622 - DNA, 688 bp, Heterodera glycines
atggttcgaactaaacaattatttccctctgagcttcaatgttcttcatcttctttacaaaataattcctcagaaatctctgaaaaccaaacgggttccaagctcccgtctaaaaaagcggttaaaccggttcaaagctccggaaaaaagcggtcaagaacaatgtttgattcttttgaaagaatgcatatgaatgagaaaaagaacattggaaatgaaatgaatttggaaaatgttataaatttggatatgattgattttgaagaagttaaagaaagcgatgaaatagaaagaaaaagaaagaaaattggaaaagatatgaacctggaaagcgttataaacctggatatgattgatttagatggagtaaacgaaaccactcaaacacaaaaatctcaaccaaatacgaaacgtataccgacgggttttttgtttaaaagtgcagcagaactaaacaatgtaaaaaaattctctttacaagagtttaacattgaatgtatattttgcaaggcagtgcattttatagaagagcaatcaatcaaaaattcaaaagtgaatgaattccattcatgttgcaattttggaaaatcaaaaaatttgttggaattatttgatgaatatccatttgaattaaaacagttgtttacagaagaaaatgaaacttcgaaaaattttacgaataatataa

SEQ ID NO: 57623 - DNA, 243 bp, Heterodera glycines
atgcgcaagaaagtggagctgcccaggttcacacgcattttgtaccgtttcccgaacggcacttatcggatgatggtcggcacggggctcgagggcagcaaatgggtgaaggggtccaagaagaacgccgattggcagttcaaggtaagcttaaatgaaaatggcataacgtgaaggaaagtgccgacttttcagcctaacgagccgttcattggcaattattgggacggctccaaacacgaa

SEQ ID NO: 57624 - DNA, 1236 bp, Heterodera glycines; identical to SEQ ID NO: 26880

SEQ ID NO: 57625 - DNA, 4275 bp, Heterodera glycines
atcttcaaaaacttttctctccgtgtgagattaaagtctgccgtgtgcagttctcttcatttggccatggacgcacaacagcttcaacaattgctaaatgcgctccaacaaatggtcactaatgccgcaccacaaaacgccgcacctgcaaatttgagcaatgccaatttggcaagctctatcgatgctcgcatatcgtcattccattacaatcccgaggtcggcactacctttgaatgctggttcaaacggtatggcaaattgatcgaagaggatggaagcactctgccagaggcttcaaaagtgcgacttctcctcggcaaactcggagaggaggagtacagcaaatatcgggacacgatcagcccaacgcagcccgaccaagtgaattggaacgaaacgatttcacacctcaaaagcctttttgctgaaacccgctcgctgttcgtccgtcgctacgagtgtttcaaaattcgacagcaacaaggacaagatgtttcatcactaattgcgcagatcaacgcatcatgtgaaaatgccgatctgagtctgacaaaggaacaactcaagtgcattattttgatcatcgcgctcaacgatgaacatcacgatttgcgacaaaaggcactgaaaatgttggaggacgctcagaaaaatggcaccaacatttcgctcaagaaaattgaggaggaacttcgggcaattcagcttgtcaaggagagcgccctttcgctggtcaacccaccaattgccacaaacgccattcgcacaaggccacggcaatgggccgacccagcgcaaagacaaagcggcggctccaatcaaaggcaaactccaaatgccaattcaagcggaaagccaacgcgtggtcaaccgacgcatccatgcggatcatgtggcaaatccgaccattggcgctccgactgcacattcaaggacgccatttgccttaagtgcaacaaaaaaggacacatttcaacaatttgccggcaaaagaaagcaaaggcggcaccgaacaaccacagggcatttcacactgtcaaagtcgacgcaaattgtctgcatgtcggcacgactcaaggacggtggtggaaattatgcattttgattaatggaaggcaaacttccatgaatggcgacaccggcgctcaggccacaattatttcattgcaaacatggcgagagttgggagaaccgaatttgacgccatccgacatcgatgccaaaaactgcaatgaccagccattcgccttgcttggcaaattcatctgcaccgtccaattttccgacaaaccaccgcaaactctgatcgcctatgtgagcggagaagtcggacacaatttattgggattgccgtggatcgaagctttggagatcattccccgccaaattttatttccgtccagcaaatcggctgatcaggcgacaatgattgaaaatttttcggcagtgaagccgccaaacaaatcgatcaatgatgtgtcaacgcttaaagcggcactccaaaaagatttcccggaagtttttgaagaaggactaggacactgctcaaaggcaaaggcgcatctcattttgcggtctgatgcaaagcctgtattttgccgagctcgcccaattccacatggcgccatggaagctgtgaatgccgaattggatcgccttcttcaaattggcgcaattaagccaatcgatttcagtcattgggcagcgcctatcttagccgtaaaaaagaagaacggcaaaacgagagtctgcatcgacttctcaactggcctcaacaacgcactggaattgaaccgccatccattgccaaggccggacgacatttacgcctcactgaatggcgcaaaatttttctcaaatttggatttacgcgatgcgtatttgcaaatggaaatggatgaagaatccaagcaattgtgtgcgatcaacacacatcgagggcttttccaatgccaacgcctgccgttcggagtcaaatcggcaccggcaatatttcagcatttgatggaccaaatttgtgccggtatcccaggtgtattcgcgtatcttgacgatggattaatcgccacaaaaacgcttgatcaacacatcacggcactgtacactctttttggacgcataaaagaatatggtcttcgcatccaactggacaaatgcaaatttttgcagcccgaacttttgttccttgggcatattgtgtcagcaaatggcattcgtcctgacccatcgcgttcggacgcaattcggaaaatgcccgcaccgatcgacaaaagcaccctccgatcatttttaggcgctttgaattattatggcagatttgtcaaatgcatgcgtgagttgcgtgcaccgctcgaccgactcctccaaaaggacgtagcttggaattggacttctgaacagcaaaatgcttttgaaaaagcaaaagaaatgattacatccgatttattgctgacccactacgacccggcacgcccaatcgtcgtatcagcagatgcgtccaaagatggaatcggcgccacattaagccacacattccccgacaaaaaggaaaaagtggtagaacacgcagcatgcacattgacagcagcgcaacaaaattacagccaaattgagaaagaggcactggccattgtgtttgccgttcaaaaatttcaccgcatggtgtacggccgaaaatttattttacaaacggaccacaaacctttattggctatttttggctctaaaaagggcatcccgatttatgccgcgagccgcctgcaacgctggtcaatgattttggcgaattacgactttgaaattcgctacgtcaacaccacatcatttggccaagccgacgttttgtcccggctcattgctaattatccgcgtccagaggaagacatcctgatagcaaacatctgtgctgatacagattgcttcataaattctgttttcgaaaacagaatcgatcaaatcccagtgacaaccaccgaaatttcttcagccatggccaatgatcaaccactccaaatggttcttcaatttttaagaaacggatggccaaccaaagtcaccgaatctgaaatcagtccatattttccaaaaagggacaaaatttttgaagtggacaattgcctactgtatgaggaccgtgtgatcgtcccaacttcgcttcgcagtcgcatccttaaggcattgcacatcgctcacccaggcattgtgcgcatgaaagcacttgctcgacgtcacgtgtattggccaggaatggactcggcgattgaaaaagttgtgagcacgtgcgaagagtgccaactgggccagaaaaacccgaccaaagcgcctctttcgccatggccaacgacggacaaagtgtttcagcgagtccacatcgattttgctggcccctgctcagacggtcaccaatatttgattttgatcgactcattttcaaagtggccagaagtctatcgtatgaatacaatttctgcttatgccaccgtatttgttctccgatcaatcatttatcggctcggaatcccagaggaaattgtttccgacaacgggacccaatttcgatccgccgaattcgccacattctgtaaagaatttggaatcaagcacattttcacaccgccatttcacccacaatcgaatggccaagtggaacgattcgttgacaccttcaagcgatcgatgaagaaaatgtccaaaggtggaaaggattggatcgaaaagatgctgttctcctacagaaccactccccacgttgccttaaatggcttttcacccgatcaattatttttcggcagaaaattgcgcacgaaattgtcgctcgttcatccgaatggagaaaaagccgaaaattttgatcaaaactcattcaaaaagggacaatcaaaatacaccgacaaaatggctcaaaattttgatcggaagcatggatcaaaactgatcaatttctttccaaatgatcatgttcttctgatcaattatcgaaacaacaagacggaatggctgcaaggaaaagttgttgagaggcttcacaaatcgcccacatatcgtgtttatgtgcctgttctgcgtagactcgttcatcggcacgcgaatcagctaaggcgacgccatcttttggaagaagaagccgaaaaggaggcacctcaaatcgaagagccaccgccggttgtcgaaccgcctcatccgccccaacaaaatcagccggccaattcaccattggttatccgccgatcaacccgagttaaaaagccgcgccaattttattctccaggatga

SEQ ID NO: 57626 - DNA, 327 bp, Heterodera glycines
atggacgtctatatggccctcgattctggcgcgattattgattgcttccatgatcaaaagaatggactcgccagccttaatggtatgtcaattttttcaaaataagattaataaaattacatgctcgagtacatctgtttccagtaaatactcagatccgtcgccgaaaaatcttatcttccagaaatggcagattttttcacaacgcaggcagttacagatgtcgtacagccgaagggatgctatctcgtagaattccttcccttcgtcctcaaaatcgcgttcacattgctccctgtggcgatgcgagcattgctgggtttttaa

SEQ ID NO: 57627 - DNA, 119 bp, Heterodera glycines
atggccgtggtaagccgaatgtggtatattggaaaggagacttgcaaattcttccacggtgctgtgaaagtcttttttgacccaaattggcaaatcccaaagaccaagcttgatccaag

SEQ ID NO: 57628 - DNA, 612 bp, Heterodera glycines
acaaaaaaatcgatttattcaagtgtccgtttggggtactcaaacaattatggggagcaaaaatccaacgcagaattaaagtacagactatagggaagctattcccgaaggattcggtctccccataaatctgggcgcatcggttcggggggactgccccgaaaacaaaaaaatcgattttttcaagtgtccgtttggggtactcaaacaattatggggagcaaaaatccaacgcagaattaaagtacagactatagggaagctattccggaaggattcggtctccccataaatctgggcgcatcggttcggggggactgccccgaaaacaaaaaaatcgatttttccaagtgtacgtttggggtactcaaacaattatggggagcaaaaatccaacgcagaattatagtacaggctatagggaagctattcccgaaggattcggtctccccataaatctgggcgcatcggttcgggggtactgccccgaaaacaaaaaaatcgattttttcaagtgtccgtttggggtactcaaacaattatggggagcaaaaatccaacgcagaattaaagtacagactatagggaagctattcccgaaggattcggtct

SEQ ID NO: 57629 - DNA, 531 bp, Heterodera glycines
ggttcgatgaaacttttaaaatataagcctaaacttttgggcctgtttaaaaaggaattaaaaatttttaaaatatttattcatctcccttttgatagaaaaagcatcagagtgcctaaactaacatgtaaataaaatttggtgcgtttcagagcacgttctaaaaaatatttaagaattaattttgcaaaaaataaataattaatgaaaaagtcagaatttcgaaaaattttaaaaacaacaagcgttggcattttttcaagttaagttagtcctttacaatggagaaggcctgcaaaatttggagagattatatcgattttagtgcgctaggttcgatgaaactttttaaaatataagcctaaactttttggcctgtttaaaaaggaattaaaaatttttaaaaattttattcatctcccttttgatagaaaaagcatcagagagccttatttaacttttaattaacatttggtgcgtttcagagcacgttctaaaaaatatttatgaattaattttgcaaaataataa

SEQ ID NO: 57630 - DNA, 987 bp, Heterodera glycines
atgatcaagccacaaatgcgaccagtatttggtgtttggggctctgcgggtaaccttcaatgggttattagcttctacttatgtacattatttcctaagaacgggatatgtatacataggtgctgggtcgatatcaaaatgattgacaaggggtgacgcaaaaatcatttaatgagaaatttagaaaaaaaaagtttcatactatccctatgtagaaaaaaaacaatctccacctcatatggcgtatccctaatattagtacaaaatgcaataacgcgaaagattaccttagctaaacaaaaatcgtccacgatcggtttcataaatccatccccctagccacaccgggtcctcagggacagcctggccaacccggacaaccaggaggacctggccagcccggtcaacccggacaaccaggaatcaaaaggcgagagaatcgaactcagccaataaaaattattgaatgtttttgttcagcacgacaattcccggcccacctggacctcccggaaacccaggagcaccgggccagcccggcagccccggacagcccggaaaccccggaggacaaggaccgcccggtccttccggaagccctggccaacccggaaacgccggggccccaggaacccccgggcagcccggccaagctggacagcccggccacgacggtgcctactgtccttgcccccctcgcacaagcgtttttgctcgccgctctcgcgtcgctgcttaagcatttgaaatggacaagaggagaagagaaggaacaaaaaagagaaaccattcgaaatttatgttggccaatgcattcattaatttggcatcgaatggaaaaagaataaaaaagaaatttgcaacagattaatggcataatttaaaagaaaatcaaaagatcaaaacaaaaacatttcaaattaaaacactgatttgtgagtcatactgtggcaacaaatacattttgtggctcctttagcaaataaa

SEQ ID NO: 57631 - DNA, 177 bp, Heterodera glycines
gcaatttgaaaacagaacataattcactgcttcttctgctaaaccctccgcaacagaagtcaaatttcaggaaagaaaatgcacgaagcgaaaattatagtcggaattgcttccctttgttcgctggccgcgatttgggcactctcgtggtgatcccgcaactgtacactcaaatca

SEQ ID NO: 57632 - DNA, 1335 bp, Heterodera glycines
ccactcttttccattgttttccatctttttgccattatttctggtcatatccgtttgccattgtgccgatcgtctcaattcgtcggcggatggtcagggagtgatcattttggttgcccgaggggacgacccgaacagttcccaagacaaagtggtcatcccacagggtcggtggtccaacaaatgtcgacgctttggtcataagtcacttcacttcagccaaggacgggctgcagccgccattgccatgtttgatcaccggcgtcggcatttttgagcacggacaaactttcaccaagggcaactttcactacgagtgcaaaaatggcacagccgaggtcattggtgggtattttggtgttgtccgaaaggttgtccgccttggtcagcttgcattgccgaggatatgtcagtcattcaaatcgggcgcacttttcttcggaatgggacaaggcacaaatgtttggtgagtggcaacacggcactttacgaacagagtttgtcttcagagcaaatgacacattatagcacaaattataacaattaagggtcgacttgcttcgaaaatagcatttattatgacgttggtatgtgaagggaatcgttcccttcccaaaattggcacttttaaggcgacactttcaaaaacggctctttcaaagtgacttgtaaagacacgggagttgctgttgtcggtaatgatgcccttttgagcaattcgatcaaaaggcccctaagggtgttttctgttaaattcaacggacgacgcaattcttttgggtgagtcgcgtttaattgggacgaaaaggcacagctgcgaagtttctgaaagcggcaaggttcgctatgtgatcagaagtgagtgtgagtttggggaatggccaacaaaaggagtgtttggcgtagtgttgggctgccaagggcaaaatggcaccgaaggggagttcaagccgggccaaacatgggcggacaagcacatccgctaccactgcacggaggagggccagaagaaagtgttgggtgagtaatgccgggcagcggcaaaggtcgtgtttttaaaagggcaattggccaaggatgcgtcgacgacggcggacttttcatcgaattgggccacgacgtgatgatgggcggcacggtgcacagatgcttcaagtcgcaaaatgttacttattatcaccggtacgaacagtggcggacaaatagcagcagaaacatcttaacttaaatatttccttggacagatttcgttgtgacagacaacgaagtttggcggaatgtatcagcgccacaaaagtgccaaaattgaaacgaaagaaacgggtggccatgaga

SEQ ID NO: 57633 - DNA, 1077 bp, Heterodera glycines
atgcactttttgggcaacaattatttggagtacccaaacggacgcactttggccataattggggacacggaggagaaggtggaaagtgcgcgggaccacgtggacagggaattcattttgaagagatgggaggcgagtgaccgacggacggacagaccgccgaacattttgggcaattttaaggcatggaacacgggccaacacgacaatgttgaggaagaagcgacgacctacgaagaaatttaccaattgtcaccgaaattcgcactgcgcgaggacctcgaattggtgatgaagcaaattaaggtgtgcccggcaaattataagcaaataaaacgccacaaacacttgaggaccaatccggcatcgtctcctattgctaccgccaattcagcacgggccatcgtccgattattctcagagggactgaacaggcagtggcggaagcgatcaaaatactcaaaaagatggagcaggaatggccacaacagcgcacaatgggcaacagccgagcgagaagtctggacgaaatctcaatcacttcggtaaaatgggaattaattattgaaaaataaattaataacaacccaaaaatgggttgaggagaacgataaacaaatgaaaactttcagttcgtcgagtcaatttcaaagcttaaaatttcgaaaacatccgaagaagcggcgaacaatggcgaagcaaagaggaaagaagcgcaaaagggcgccaaagggacgaaaagtggcggaaaaacggcgccagggggaggaaaaggtggaaaataaaataataggacagaatggcatttggggttattaacggaatcgcatttggatttattattaattgccagaagcaatgaatggcgacagcggagaaaatggcaaagacaccgacgaagccgaaaaagaaggcaacctgaacagatcggcaagttggcagaaagagaggcgcaggaaggaaaggtgaggaggcggagaagagaaaaaaacaacgaaaataattgggaggaaacggcggggggcgggggggggggtgaagcgcacccattaattaaactttcaattaacacttaaa

SEQ ID NO: 57634 - DNA, 287 bp, Heterodera glycines
atgaatattcttaattataaatttttagctggtgcgcaaattggtccaaatggggacgatgaacccagcacaagtgtatcggtgagttttgttaaaaataaatttaaaatttttttttcaaatttgtaaatttattttaaaaaatacacaaattttttttattgaattacattataataatagcaatttcgaatttaaaaccttcagaaatttaagcgagattgggaatttgcgacttcctcggacgtaaacgaacaagtgaacaatctgcagaggtgaaaattaaa

SEQ ID NO: 57635 - DNA, 154 bp, Heterodera glycines
taagcctaaactttttggcttatttaaaaagcaattaaaatttttaaaaattttattcatctcccttttgatagaaaaagcttcagagagccttatttaacttttaattaacatttggtgcgtttcagagcacgttctaaaaaatatttatgaa

SEQ ID NO: 57636 - DNA, 727 bp, Heterodera glycines
atgaatacaacaatctggaaaataggtttattgaaaagtcaaaggatggcaaaatggcggaatgccgaagatgtaaagaaaatgaaaggcccaagtatgaatttaccctctctgactctcccggtagggcaaccgggaaccgggaaaaacaagcactggtaagaatggggtctgagtgaaaaattagtgaagaaaattggagtcaaagggaaaaataaaaaataataattaatatattctttaaaagtaacactgcccaattgtgcaaatggcctacgggctagtctccttgactttcccttcttctttcccctggttcaatccctctacagaaattagattattttcaattttttttttgtatactcgtgggtttcctataaagaaaatatgattcctcatagtttttttttaaattgatacatattttatcattttttaatttttctattttttatttaaagggctacccgtatttcgatttatttaagaattaaaatagatttataattttttatttgttgttgttaaggctatttgggtagttcgcctagaaaatagaggcatcacttttttgtcacacctatttttcacgcattttatgaaaattcataaaccttagccaggtgaggggaagaattccccccttcccccgcccgaaatgaaaaattaaaaatttttacaggaaaaattgggacttttaaattttttttgtcgatttttctta

SEQ ID NO: 57637 - DNA, 631 bp, Heterodera glycines
gttgataagagccaactgaggccggtcgatcgtgaccatttcagcgccgctgatcggtcattttaatctactttataatatatattttggatggtccatgatagtaaattgtaataaaaatgatatcttataggcaggcatacgataactggcagacaatcgtggtgaaaataaataaattaaaaaatgaaatggagtaatcagatcgaaacgacaattgcacaaattcggcccaattggcacaacaataaaaataaaaataaaaattaaaatgtaaaatagtaaatagtaaattaaaattaaaaaaattaaaattgaaattgaaaatgaaatgaaagacgaacattattcaattgaattgaattgatgatgatgtgttggcgcgatcgtggtaaaaaaaacaacaaacaaacaacagagaaaaatacaaaaaaaggaatgaatgggcagtgagtgatctgaactgatcggaatcaaatagcacagaaaagggagggaaagttgtagtgtaaaaagtctgacacagaaagaaaggcttggcagcacagataagctgaaaactcgaaacaaacaaaaagaaaaatggatgtttatttgtgattcaaactgatcagaagatgggacctgatct

SEQ ID NO: 57638 - DNA, 903 bp, Heterodera glycines
  unsure (1)..(903): unsure at all n locations
atggcatcgtcaataatctttgcaccactggccctcaaaattccactaaaatttgcaaaaatggacaattttggtaaagtaggtacctatattaaaaaatattgcaaaaatttacattttttcaccgtcagacatttatagataccgccagaccaaaaactttcttaaaaattggctgaaaccgggattcccggaaaaacgggagcctcgtcccgggttccatcccgatccattttcaaagtccccttcatttcaaaattccggtctctagatcaaatagtatcctgtctcataattggaacgtttcataaatttttaaatgatctttaatttatatttattattaaagcaaaagatttgcccgattttattaatggatgaccacgaatttatggaggggatggagcaggaagatgaggatgagtttatcgaagagccaatgtctgctgatttcgacttagggaatataaatgatccaattggtgttgacgaacctattaatcacggttattcacttggtaaatattggtgagaatcgattttccacattcagaagttcaaccgaagcctcccacagttaactccgctggcatcgatttggattcgctttccaatgactacacagattatgctctgatgaacaggtttctttgagactgagcttttgcagttaagtggaccatgaaaaacgataggtggggtgcttttattttaaaaaaataatttaaaaacgtcaccctgtggattttcaccaagtccattanactgcaaaaatgccccatttactaattgtcagcacaaaacccnttttccctttctggctgttgttcatttgcccgacgntttgtccgcccgcttaaagttgaaagccttngaaaatgctcatcacttatggtcattaaa

SEQ ID NO: 57639 - DNA, 2632 bp, Heterodera glycines
tttaaagattatcatacatattttattttatttttttgctatatataattaaattttcatttaaaattcatttctaaattaatttatgattttttaactggtataatatttaataaacacaacagaattttatttaaaattattattatttaattgttttaatattattgaaatcaatttctaaatttctatatttttgaatagatttaatttttttttaatttaatttttttttctaattattattttcagacagctgttgcggttggcacatcgttgcagattcaaaaggatggcattctctcaccgcattccatttttctgttcactgtgcttggcagctggtcaatttgcaataaattcaaaatttaattactatttttacctaatgtcatactgtattgtttactgtatataggtttgtcgccgctctgttacatccgctcgagtttggctgtgtgattccatgtttggccttgaaaattcattttagaacgcatttggggatggtcactaataaatttttgatataaaaaaaccaggaaaaaccaattaaaaagtcaaaaaaatttttaaaagcgaaaaactaaaattttggaaaaactcagacaaaaaatgtttttttttatataaaaagaagacgaaaaaaattataaattccaaaaaactaaaaatttttgtaaaactaaaaccaaaaaaaaaatactaattgtaagacccaaattaattataaatttacaaacaaaaactaaaaaaatttttttggaaaatctaagacatattgatagttagttggtcataagcatttttcatggtcaagaaatttcatggattttttttgataggggggggggggaggctctcggcttcgaacctcacggtcaaattttcgtttttcgagctttggcaaaaaaattttttttttttttacactctcgactagcatcagtagcagctcaattaattacattttgtcaaaacattaaacacctcccgtcaggtgcactgtacttcttggccatcccgagcatgtaactgaccgagtgtttttcaaaaatttcaaaaaaaattttccgaaattttccaggtatatgctgttgcccatttattcgttgtgcaatctgaacaccgtcagctggggcacacgtgaaaatccgatcagcagcacaaattcgggcgaacatcaccaccacaacggcacacatcataatgtattgttggctaagacaacgttttagatgcctcttaattttttattaaatttatttttttaacaaattaaattatttggggcacaaaaatttttgatggatcaaattttatttaaattaaatttcgagatgaaataacatgtttttatttattaatattaatttatattatttgaaaatctttatgtcttttttgtaattttctgaatactatttttaaaaatattttttgttgattaatatttaacactaaaatatttatttttaatttcttatttatttatttattatgcattaaatttgcttttaatatttgatattttattcaaatattaaagtaaatatttattttattcaattatttaattaaataaatttcttttccatttcggataaataaatatttttacttagataatttaaaaatcttataaattttttgtttctcaattaaatttaaaaataaaattaggcgccggaggatggcgaagtgtcgctgggctgcggcaatttgtgccgcgtcgtctgctgcgtgcggcacgcgttcggcgccggcggcgccaacgcgtcatcccatgccaccaccgcagtgcgccggctcgacgagggacttcaacaaattgagcgtaaattggctagtcttgagcggcgccgggacggcggagactgtggcgccagtgaattgggcgctgtcgccagcgcccagcagcagcgagccgaccaatcagtaccagaaccaactgcagcggttggcgttggtcttgttgatcaacgggcgccacaagcccaacaacaagtacgtttgttcaacaagtgtaattggacaactaagcgttgaacttttggcgccaaaacatagcggagccataaatccggcgctgactattggtcttatctttgttgtgctaattgtaagcacatgtaactctttggatggtctccctcaatgaaaaattaaaattttttaataaatatgtaaaatttgaaatttttctccggcgacgtaaataacgggccttaatttctcagtttttttaatttaacagaaaaatttttcaaaatttagcctagttaagtttttgatttattaaattttatttagcgatttttatatttggcacaaaaaccttaaaaaattactaagttgtgggactaattaaaaatattcgatttaaaaaaatttttacttttgttagcgaatggactcgccaaattggatggaggaggagccgttcaagcagttcgacaccgtttatcttgacccggacgaggcatcattctggcgcgagatgatcaacaagtactactaattttatggcatagaaattccaaaaaaaaaaattcaaaattttcaaggtaccttaggcctattaacctggactcacaggaggttgaacggatgcaaattgggctggacgagt

SEQ ID NO: 57640 - DNA, 98 bp, Heterodera glycines
ggattctttttcaaaacacctcgtagactgggggataattggagactgcgggattaatagagactgggctataattagagcatatacggtatgcattt

SEQ ID NO: 57641 - DNA, 1831 bp, Heterodera glycines
cgccggcggtggataccttcaacaatggccaacatcatccctctgctccgggactaccgaaatgtggtcaaagtgaacgaatccgtcacaatttggtgggtttttaattaaatttttttttttagaaaatttgaattatttaatccaacaaatttttatttaatccaattttatagcgaaaataaaaagaaattaaaataaaattaactgatgagaattacgtcaaaaaaaattgggggaaaaaagatagtatgaattataaaattggaattttaatgaaattttgtttttaattttaccaaaaacttgcctcttttacaacaacccaccctcaaccgttgctaaacaacatatgtttttcaaaatccacgagatcatgactaaattttcaaaaagaacaaacaaaaatgcataccgtatatgctctaattatagcccagtctctattaatcccgcagtctccaattatcccccagtctacgaggtgttttgaaaaagaatccctctatcataatcccccagtctctaattatccccccttttctgaggaggttgaaaaataatcccccatgggctataattagagcatatacggtataatcaataccaattaatatattaaataaaatgaattaactaatgcaattattttaggtatattgcctatcaattggtgatgttgttctcttctgtgctcgggccaggcaccatctttttaatggtccttttaattaacaattttatttattttttttttttgattttttttaatttaatgttccttttaaaaattgttgtagtaatttccacaggatttgattcattaaatttctaaaacgggttgtttgaagggcgtccattaaaattttcaaggatttctaaaaatcttggctctgatgagagatttgggggcctcacttaaatttctaaaaattatactctgactagggaatggtgcgggcctcgcttaaaatttccaacgattttctaaaaattataaaaatctttactctgaatagcgagggtttcgtgggattggtttaaattttttaaaaaatttttgccaactttttcgaggtggtcggtgccatttccatctctttcaacattgacacacgccttgcactgctcgtggtcaccacgcccgtgctgtgcttctgcatttgttgcttgacctgttcaacggacaagcaattgttgatggcacaaatcattggcgccctcttcgccatgctaatggtgccaaaaataattttatacaattgaaattaataatttttattttatttttttataatatttttagttatccagataatttaaaaaaaaattattgtttaataaaaaatgttctctatgcaaggataacaaccaaaaaaaaaaattaatacattttttattatttgtttaattaattataattattaactatattaaggttgataatttttcaaacaaatataaatatttgcttttagagatgctgcccaattagttttataaaactaaaactactatttttacgctatttttaagttaataaaacattcacatagaatattttttataaattattgtttgtttttcatttgaaaaaataaaaaaacattcgcaattaaaaataatattttattttaattcaattataaatgctgatcattttcaacaatataaatgtttttcttttaaagattatcatacatattttattttatttttttgaagaaactataattaaattttcatttaaaattcatttctaaattaaatttatgattttttaactgaggtagatttaataaacacaacagaattttatttaaaattatta

SEQ ID NO: 57642 - DNA, 682 bp, Heterodera glycines
ttggatttgcaacgacgtttggatggacattttcccatcctttgaccgtcctcaacttggcctcaaattggcacttctttcgccacgtttcaatgcgttggtggacaaacatttcaatggcaaaagcgaattgacaatttggagatcaatcgaaattcgtcgcaaggacaaaggaccagaaccgaaactatctgtgtggttggatgacaaatttgtgccatttccattgcccgaccgtccgttgcccagcaaaatccgttttaagaatcttcagattgagtaattcggaatcagagatttatggcaataaaagcattcatcccatttttaggtacattgatcactccgtcatcgcttttcttcgttcaaatcaccaaattttcgacaaaagaggcaccaatttacatttgtggattccatcatcacactctacgaatggccagccgattttggacattttttgtcgtgaaatttggcccattttttcgacaaacattcgctgtttgggctttaccaatggtgttgatttggacaatttgcgtcgtctcatttcaccgacaattctcaccgatctcaaccaattgaattcaatcaattccggtgatttgtcgcccgctgcgtttggtggtgattttgatgggccaaatgcaacaatttctgctggccaagcattgtcaaaatg

SEQ ID NO: 57643 - DNA, 56 bp, Heterodera glycines
gctatagggaagctactcccgaaggattcggtctccccataaatctgggcgcatcg

SEQ ID NO: 57644 - DNA, 213 bp, Heterodera glycines
gaacgaaaatgcaaacgatttgaactatgctttgaaccttttcgactacagaataaagcgtgactatttgaggtataattacgcaaaagtgtcagccgatggaagcgcagaaaaaccgtacaaagcgatggaagcggaagaaatagaggggaaaatggagcagctaaaggttggactcaagtcaattgtgacgaacagagaaggactgactga

SEQ ID NO: 57645 - DNA, 51 bp, Heterodera glycines
atggatgtgccaaacgttggagacgaacacgaggacttcgaagacgatgcg

SEQ ID NO: 57646 - DNA, 493 bp, Heterodera glycines
atgagtgattttgaatttgcggcaataaacgctgccggaaatgtcttcccaaattcggtcaaaagtggttgcctatttcactttgggcaggcgttatttcgtcgcatccaacgtcttcctaatttgtacacaatctacctacaagacagaaatttccaattgtcaattcgatcattggaggtagaaattggggggggggatttttcggttttagaccccacccccagaaaattttaaaataaaaaaataatttttatttttttttaaatcaaggcattggcatttgtgccagatcactatgtgtacaattatttttgtgcattgatgtcaaagtcttttggaaaaagcgcgccgaaaaaaagtgattgagaagcaaatctgaatttctaatagtcatttagcccaaaatgattaattgtttgaaatgattgaagaaaatttgtttgaaaattttcattaatttaatttagctctaacttttggattttattaa

SEQ ID NO: 57647 - DNA, 131 bp, Heterodera glycines
aaaaaaaattaattttaatttatttcaattgaaaataatacaaaattaaattttgattttttatttaataaaatccaaaagttagagctaaattaaattaatgaaaattttcaaacaaattttcttcaatc

SEQ ID NO: 57648 - DNA, 238 bp, Heterodera glycines
gcattgatactcggaccaactcgcgaattggcagttcaaattcagaaggtctttcttattgtttcttacttgttttgaacaagtgattcaggttattttggcactcggtgattatatgaatgtgcaatgccacgcctgcatcggtggtacaaatgtcggcgaggacatccgaaaattggattatggacagcacatcgtagctggtactcctggacgtgttttcggtgatagacaatga

SEQ ID NO: 57649 - DNA, 646 bp, Heterodera glycines
atgaaactaatcagtgatcagaggaaaatcaccgaacaaaaaagtgatcaacctgcgagaaaatgtgattagcggagttttcatctgaaattaaattattagactcgtaattacaaaaaattcagagatcgcttccggatttcatatttttatccggcaaattttatagtaaatttatttctctttttaaataaagcagaatacatacgttttgtttccatttataaaaaaatatcaaggctcagagatgaaaagaatgatactttgatgggggttaacagctgtgctttatctctaggatttcaacaaaaatccttaaaaattccaaattttgaaccgcttttacggttcatccaaaatcccattgttttttttggctaataaaatttccaataaaaaattctcaggtggccaaatgggttggaagtgtccaaatttcggcacgaaatggccacaatgggctggtcactgcaaatcaaccaactcgacgtggacgagtggcgttatcggagcagagaaaagtggacatgagaatggaattgagggatggatgaatgggacaatggaataagagcgatttgcttaacctttttttctcacattttaacactttttgttgcaaaatctttgcttttcatttttatta

SEQ ID NO: 57650 - DNA, 813 bp, Heterodera glycines
  unsure (1)..(813): unsure at all n locations
atgccgcttctcccggnccgagtggtcagcagcagcagtagaaatgaatgaatgaatttattggttgattgatgcgattatgtgaccgaaatgctgttggcactatgccagttcaatattgttttatgtacctcttgacctttgcttgttcgaaaatgtgtccatttccattgttttttatgtaaaattcattgtgagtatcgttgataaaagggctaaagacaaaaacaggctgcggcgctagtttaaagaaggggtcttttgaattttatcaaaaagtaaaaacaaaaagggggggaccctattggtttgtaaaattttttaatgtataatctagagtgtcacgggaccgggaatttttgccaaaaccgggacctcggtttttgtccgggaaccgggaaattttccaagaaaaaatagaaaatcattcatttaaatgatttttttgcccctatttcgcgaattttttacccctatttaggcccctattttggactttttcgcccctaaaaatcccatccctactcatcactcactcatccgcaatgtccaagccaccggcacccttcgtctgcacattttaatttgcgtttcccattgtttaggcatttttccgtgccaccacttctgccagtcacattttgttatttcgtttacccccatcagggcaaattgtgccatttgaattggtcaatgaacaaactcgagaaaaactgacattggaggaaggacgagattatcctaattggttgctgaagcgatgtccaattggacaaattaattaattaactaaattatattttctacaataaa

SEQ ID NO: 57651 - DNA, 953 bp, Heterodera glycines
atgcgaatttgccaccgaattggagagaatggcaccaagcaaatgcgaattgtcaattccgaaggaaattcattgccaatcccgcaaattccgttgccgaacaatgtcgtcggattcagacgcattcagatcaagtaaaaacttgattagattcaaattgatttgtggccatcacttttcctgcttttcagttacatcgaccacaatgtcatcgaatttctccgccgttttcaccgttttttctctgcatgtacaacagaattggaaattttcactgcaaatgttcgcatttcggagttcgttttgctcaacatttttccaatgctacgcgattctattcgtgtaatgaatttaaacgacatcgcttttccccgtttgcttcaattggaaccgtcactgctcaccgattgtccatcacttcgttactttgaaatggagaacaaagtcccaataatttttctgcctgatgatgatagtgccaatgcgtcggatggccaagcggtgaccgaatggctgctcacgcctcgtccggatggtgtaccgaagatgctcaaatgtacaatgcgtgcgctaggtggtgacaaaaggtggtcagcgatggaggaacagctcagagcggtgacttttcccctcttaatttgtctttttgtatgtgtgtttcccatttttaggcattttccaatgcttcttcaccaatgactttccgtctttacgtaaacttcacaattacacgaaaaaagcggattgttcatattgagccatttgaatggacaaacgaagtgactggggagcaattgacactggaacaacatgagcggaattattttgcaatcagccgttgtccaattggatgggaggagcaaaattgggcaaatgtattgaatgaattaatggatgatcgacagaacccaattgacattgtgatcaaagatggcgaattcgacgaacggtga

SEQ ID NO: 57652 - DNA, 49 bp, Heterodera glycines; identical to SEQ ID NO: 51181

SEQ ID NO: 57653 - DNA, 721 bp, Heterodera glycines
atggaaaatcacataattcctggaatcccttttcttcttgacggtcaaatcgccataaaattcttcactttgcgatatttcactagcaatcatcatccagcaccgtttgagatggatttcgacgactggggagtgagacacatgcactcgtccgagcaagggtatttcgccttgcgtgcggttgagttcggtgaccgacaacagttcgaatatgttcttaatttggcttcggccagagatgtgaagaaccgaggaaaaagggtacgcggctacaactatgggcattggcagacggtcaagagagaacacatgctgcgcgtggtcttggaaaaatttcggcagaatgaaccgctgtgtgaagctctgctccggacgggctttgtccgactcgtggaagccagcactgaccgatattgggccgccggattgctgataactgatgaagctatacgcagttcaaataattggatgggtcggaatgagcttggctgggtgttgatgcacgtcagagaccaacttcgaccattgccgcaacaagtccacctgatccacaagcactacatcgtatgccaggcggcagcgcctgactacgttgtggccctcgcagcggagccacatgttcagccgtatgctgttcggattaacaacgaaactgtcaatgctgcccgacaactgcaaattggcgatactttggtgatagaaagtgtggagtggagagaag

SEQ ID NO: 57654 - DNA, 614 bp, Heterodera glycines
atggaaatctttgacgaatttattgttgttgacgaaaaagcgatcaatggattctctggccaaaactatagcagatacaactggtcatttcgtgatgtgacccaatttgctgcactgtaatttcaattttttaaattttaaaattaaaaataatattaaaaaacaatcaaattttgataacataattggcctagcgtgatttttcacatttttcagtgattttatgacaagctgttatcccatattgaaaatcaaggacattggcaatgcttcttcttccaagccaaattctgtgccattggcacaaattatccgttgggattgggacaaaaatggggcacaacgggtcattagtgtaagtttaaagaaatgatcagcctttaaaaatgattttaatcaattaaatcatttagaccaatacactcaacaagggcagtgaacttagtttccacatctgtgccaatgattatgcttcatttgttattcgaattctcaaaaagcaggagaaaaagtaaatttggtaattcccggcggcacctatcggccggagtgggacaaaacgtcgtcggacgactttttggaccataacttttttctttcttaaccaaattaaa

SEQ ID NO: 57655 - DNA, 321 bp, Heterodera glycines
tttttgggccccggggtcgtttgggccccaacccaaaaatagaaaaatgtgcttttttaaaaattaagattctaaaaactaagcctgagggatccctcgccacttggcataaattaggtttaattaacattcgctcattttttacaattttacttattccaactcctattattttttaatagttaaccaatttgatgtgcattctgatttggacatttttcagaaatggctaacccaattgcaaccaaaaaacaaaaagtaaaattgtcttacgaaggccacctttacaccttcgctaaaatgagttctgattggatgaca

SEQ ID NO: 57656 - DNA, 367 bp, Heterodera glycines
atcctgcactcgaattaacaccatttttttcaataaaccacattttcattatccattttctatcaagatcacatgaactttactatttcctatatttgtatcgcgtaaatcttataaaagatttaaataatattaattttttaagattctacaccgcgtctgaaaccttcaaatctgtaagtaaaatattttccacaaagtgctaatttttccgtttctgttgaatccattatcaaatgctttttttatcagagcattaataaatttcgatttatcatttatataactaaaatatttttaatgattaaaataatattaatttatttatagattctgcacgcgaattaacaccatttttttcaataaa

SEQ ID NO: 57657 - DNA, 370 bp, Heterodera glycines
atgtttctggccggcgaagtttttgcctgctccgcattcggagggagtactgtagtacagtattttaatctggctatagattaacgaaatttcctcttctctattgatttaataacataccttataattaaattaaacaatatacagtacgtacatggactaccatttggcgaatttgggccaactgtctccggcggtgacttctgctgctggcaacaatattgccgcaggcggcgtcgatttcttccagccgcaacttgcgcaattcaactcatccgccgcaattggactcatggcacaacaacacccgccaaaagacatcaaaagggagcagcagccaagcaacacgtgattattacactcacccaaa

SEQ ID NO: 57658 - DNA, 7968 bp, Heterodera glycines
atgtcggctgggattagatcagttttaggtcccgcaacggctagggttagaacgaatttgaatgagggactagcgctcttacacaatcaaaatgttaccgccgaagcactcatccgtgcatctgaaaaaatcggccggagtgttaaattagtccagggatacatgcgggactgggacagaatcatggctgggttagacggggacgcaagaactgccgaggaagcggtttatcttgggtttcgcccaggcggtgaacagctcggagagctcattgttgaagccaacgaagcggtgaccgaattggatctgcgaaccgatcaattgcgcattcaagtcgcaccaatgcaaccgcaacaacatcagcaggcagtccaagtgcaaccattcgtcgcacatcgcccggtcgtcccattgcccaccatgggactcttggatttcgatgggaccccatcccgttggagttctttctgggccaattttcgggacaatgttgaccatagaaacgatttatccccggctcaaaaattgtgttatctcatgggacaattgaagggccccgcaaaagacattgttttggggtattccactacggacgctgattaccccatagtaaaggaagcccttgtcgggcggtacggagatgagacaaaacgtgcccacgaattacgggccgaactcatccgacttccaaaagcgaacgccgcaactccgtctctccgtttgttctcggaatccgtcgaacgtatttgtcggcaactcaattcgttggaagctggccttgacgatagtccatacctgattacggcattaatggaaaagttgccaggcgaaatccgtctaaaactgctcgagcaggagagagatggtggtgccaaatggacagcccgccaatggaggcttggtctttctggactagtgcagttaagggaagcggtgaatatggatcgcgaaaatatgcaccgccaaccaccgaataatggcggagtaggggagcggcgccaaaacagccatcaaacatttcagacgcagcctcgccgggctttcccggttgtcaagccggttagaccggaaattcgaaaccccacccctccgccacgaaaattttcaccaaattgctctttgtgcgagagtggcgatcacaagccgactaattgtccgcgttatttcaccgcgaaaaaacggcagcagcgattaacagaacaaggtcgctgtcatttgtgcattagaagtggccattccgcggccaattgcgcaactaatttcaaatgttcaaaatgtggtgatcggcatcacttaatcgtttgtccaaaatttcgttctgaacagtccaccactcaaaatcgggactctcgaagcgtccatttttctggtgaaaatagaggcggcatgcgccagggtcttttagcctcagcgccggtgtcagccaccgctttgtcgcaccctggaaaaaagagaaatccatcatatttaatggtaagaaccacgccggtgtataactatcgggaacccgccaatcccacaagagctccagttttttgggaccctgggagccaaacttcatttatcgccactgatttaactaatgaaataaaaccgcccagagtttcttcagaagaaatgattgttgggggttttatcggtaatcaaaaggaaacatattcccgtttccactccccgtgctactctgttatgcttggcagggaggacggtggttgggagcaaattctgcttaaccaaacagacagaatcacgccgcctattgagtgtttggtagaaccaagaaattcaaacgaatttttgagtggtgatgaccaggaagggcctatcccgtattttttggaaccaaaaatcatgatcggagttcgtgaattctggcgttttattctggatcgtagggaaattcgaccgggaatttttgaaatccagacagttttcggaacgatttatgggggcgaagaaatggcagttgcctcgaaccccgggaattcgctaacctgcacaatcattcaatcagcacacattcagcctgagtcggacgtcggccgcttctgggcattagagtcaattggcataactgactgtccaaaattgaatgatgatgaaaaggcactgaaaaaatttaatgagtcagtttctgctgaccctgaggggcgttacgaggtagctctcccatggaaggaggagggagagtacccggcggaaaatttcagattagcattttcaagactttctgcacttatacggagactgaaggaatcgccacaactttttagcggttgtaacgacattatacaggaatatttagagaaaggaataattgaaaaggcccatcgcgctaaaagtccacaacatttcttgccccaccatacagtgatgggcaaaaagcttcggatcgtttttgatgcttcatcccacgaaaagggtgcccaatcattaaacgaaatgttattttcggggccaaatctctatcctgatttagccggaaaactcattcagtttagggccacaaaataccctatttgggccgacatagaaaaggcttttctgatggtaagtctgaaagaatcggaccgtgaattttcaaaatttttgtgggtaaaaaatatatttgcaccactttctggggaaaatctcctcgttttccgctttcggaggataacatttggaatagtgtcttgcccttttctattggcagcgacactccaacatcatttggaagcatttcccagtgagttagcagaggaaatccgggaaaaatctctgctttacgttgataaccttctgcttttggctgattcgcctgaggaagcacgcagaaaggcagccgaagcacaaaaaattttcgccgcggctcaaatgcgtctgtgcgaattcattgcggctgatccgtcaagtttggacgaaatacctgaaaatgatcgcctccgaaatgaggcaccaacggttctcggactaaaatggactatttgtgaggacaatttgtctttgacttttcctacggttcctagtccggacggtttaacccggagaacggtcctaaaaacagttgcgtccttttttgaccccttagggttatgttcgccttgtttggttggggcgaaattgtttttccaaaaattatgggatggttcaaaaggctgggacgatccaatcccagcggaagagaccaaagaatgggatgaaattaaagccctctgggcagcaaaaacgatgcacatagcgcgcttcacgcctcgaattaacactggcggaattcaattacatgttttcaccgatgcatcacctaatgcgtttgcctgcacggtctatttgagagctgaaatgccgcagggaattctctcgtcgttggcttacgctcgttctcggctccgcccgaagaaaatggcggtggaccaggcggatggtctcactatcccacgattagagctacttggaatcctaatcggatctcgggcagtaaaatttgtgcataaacatttaaattatgagatcgaacaaattaatctttggtcagattcgcgcattgcgctttcgtggctagcgtccaccgataaaatgccgatgtttatagcgaatcgtgttcgagaaattcgcgccaatcggcacataatcttccgctatgttcgctccgcggacaatcccgcggacctcgccacgcggccagtgacacctgatgagttaaaattatcagaattatggtggagagggccaaattggctcggcaaaacacctgaaaattggccggacgaactcaccgtcagcctcccaccggaggaaagcgccatttcagagccaattgtctgcgctccgttgaccactccgccggcagtgttcgattttgatcggttcagttcatggcaaaaactgatcagaacggccatgtacgcgttgaaattcctgtcagaaacgggaaaaaagaggaaattgctccccgaatttagagaggctgaaaattttagcccagattgtaataaattcacacacaattggatcattagaatagtacaggggacttttagccccccaaaagaaacttatctggataatgacggcctgattcgtctcaaatcaaggctttgtggcactggaaacccgggattcgaacatccaattgtcatcccatcagagtcgtgggtctgcgcccttctcattaggcattcacatttgaatttgtgccacgccggtgttgactcaaccttgacagatttcttgcaaaattattggtgccataaggccaggcggacagtccgctcggtcatcttcagttgtaatatgtgcaaaagggatagggcaaggaaatttggactcccgcctatgccaccccttccgaaaaatcgcacatgtccctctgccgttttcgaaaatgtcggcatggattttttaggtccaacactttacaaaatacccaatgaacagcccgcaaaggcttgggtcctattgatcaccagtttggcatgcagggcggtacatctcgaattggtgtcgtccatgtcagcagagcattttttgcttgccttccgtcgctttgtcgcgcgaagaggacttccaaaatcgatcctttcagatcacggttctcaatttgtgttggccaaaacactttttgagaaaaacactgaagtgtccatcaaatggacgctaatccccgcatttagcccatggtcgggcggggtctatgaacgactaaattctctcataaagaattgttttcggagagttttaggccgacgactcttgagctgggaggaaataaacacatttttagcggaggctgaggcctcgatcaactcaaggccgatcacttttgtatcagatgagtctgacggtcctctgccgctcagaccaatcgattttattgctcctagagcaaaccttgaatttgaaggaacggatatggaagacgaaagttatcgtccatcggctgctgaaaaattagccaccagatggtgggcaacagctaaatccattagaaatttttgggaccgctggtccagcgaatatttgctcctcctccgggagcgtaatcaaacagcacataaaggaccgcaccttaattctaatgtccaacccgaacttgggcatattgttttagtggaacgcgacgaatatccacgaaacacatggccaatgggtagaattgtgggactgaatggtcccgaagggcatccccgtagtgccgaaattaaaatgccaaatggacatatttggacacgtccggtctcaaaattagttcccttagaggtaaatccggacaataaagacttaaaccaggccctgtcgccgcggggagattcccgggagggaaatgaggagtcaaatgaagaattaacgagaaatcagcgatcagaagaacccgttgaaatggggcctgaattgatcaatgagtcaattcggcccaaggccaaattcagatgggcgaaaaatccgcctattcaaattcaacgggctagcaagacgccccgagcattaacatcgtctccagcttatttgttgtccatggtggcgattttcattctccttggggtaccgattgccgacgctttcgccctttcaacagcaaatcagcagtcgaatcagtcatcgtggataacctgtaatatgaagggggtcaaaatagaggccccagaagggtctaaaaacatagaattatgctgtgatgggatatgtgggaccagaaattacataaaaccattcgttttcccattactggaggagagtctcctctccggcttttcatgtcgggccacttattggtcgccacctgataacaccattcaacaaaatatagaatgtgcaccaatagacgtatgcactttattggactgctatttatgtgaaagccgaattttaaacgcacattgctcacccgcaatttcagcaatcctgattggaattctggctcttctggccggtttcatatgctgtgcactttgctgcttgttcagatggagcgcctggtgctacaaatcgcttcgaatgattgtcaaatgcatttttcgatgccagaaacacaaaaacctaaaatacacacgactccgaagggaatcctatggggataatagtgccgaagagggctattcgccacgaaattactacaggacaacgggtaagcctttaaccaaattgggctatgcattggccatttcggtcatggtttcaaatgttggatggactcatggtgatccagtttcgatcacagccaaaactgaggagtgtgaaacgagtccaatcagtaccgaatgccgtttaaattcggtgactttgttaaatttactcccggctggtcaaccggtggatcttatagtccggacaacggacgctgcggttttaggcaaaatcacattcaaattaaagggattagtacaagaatgtattcccgagtcggtgggattcattaggtcgtaccaagttaaaaccctggcgagcaaaagatgcccagggatgggctcatgttccggcaaaacctgtgaaaacttgttgcccaacggaaccgtttcagaattggccgaaggtaactcattcccaggtaattccttctgcttagacagcagcagcttttggttccatggatgcggtggaactaattccgcttgcttgtttttccgtaactacgcaactccgaccctaactggggaaggttctgtttatgaaatgttcagatgcccggcatggcaattccgaattaaaacggaaattaaagttagcttcagtgggggcattactattagtgaagagacagagctttactcgggtcgtacttttcacataaaaggggctaatttgtcggtcactccagccgtttttggcaacccggcggctccaataatgtccgaaacattttttggcggatcggacagtgctgttctcgttccgaacattgaacccgctttacattgtagaaacgaattagatgcgttgttaatgaaatgcgccctttcgttggacgcatgcacaaaatgccgtcccgatcacagcgaaggtattgttcgatgccactgcaaggaagtggacatcgaaagatggcggaacgacccgtctaaacgattaccactctcggtcggccctttaactcttaattatcgtaaacctaggcaggtttgggcggagtcggaatatgtacccgttcaaatggccttaaaaatggagggtttgactctaagcattcggaaagatatggccaaatgcataatcacaccagggggcttagcaggctgctatggatgtcggatgggaagccgttttaacttcacttgtaaggcatccctcggtaatcccctggcagatataatttgtgataatggtgcccgttgggttacacattgtccagaaaattcaataaaaatgaatgtgtcattatccctaaatgaaggggaggtaaaaaccgtttgccatgtatcttgccccgggggcattaccaattttacgatggaaggacttttacattatttgcctattgttagaggcgaatggaagatttctggaaataaagtcgaaagaggttctcaattgcccgacttttcgatactagaacatttttatcgagttttgagttgggtcctaggcggacctcaacttttcattgttgtgtgcgttttttgtgcaggaatcttcgggttgtacatttgtttgaagtgtaatccaattttccgtgcctatcgccgattgattcgagtagtcactctgatcaccatcttgttgatcactgcaccattggtcacatgtgatgagggcaccaaagatgaagagacgatcatcaaccagtcatggtcacaattcaaatttttgctttccaaattcaaggcagaattagcatggggcacttttctcattctggcatcggcaaacgtatatgccatttacataatctataaggaatggaccatacggcacggtgagccgcagagaaatcccatacgaaaggacagagtccagccaaggggtgatagaattatgcccggctttcgcctttga

SEQ ID NO: 57659 - DNA, 1274 bp, Heterodera glycines
atgtctcaacaaaaccaaccccaattcaccgctcctcctcccgctcccctctatccatacggctatgcgccgcactatggctacatgccaccacatgccccaatgggctaccaaccagtgccaaccgcaccaccgcccagttttgtgccacaacagcaggaatccgttccacaggctcatccgcagggcaatgcgacggttcaggcaaccgccgcgcaggccattccgcaaaattcggcctctgttccaccagcaactgccgcaccaattcaccaggtgcagcagaacaacaatggtcagggggtcgtcccccaagcgggccgtcaagcccaggacatgcaccagagcggaagccgttcacaggtggaatccatcccctaatttttttcacatattcctttattacctgtttcttccctccacaaattttccttccactcacgaattttatcattaaccatttcccagcacggaccggctccgtacgcattccgtcgcaaaggaaaattcggcgttgccaaaccggtcaatttcgggccccctccggccccgattcctcgagtttctgaggtgctgctccaattggtgaccgagttcaccaacttcaccaccgaatacacgcgcaacttcaacgcttttgcgaccagtttttcgtgtgattttaacaattacgcgacggagttcgcgcagttctcggcctgggtccgagagaatgctcatcaatttgggggcaaaaacgcttccggccaggcggctaatgaaacagaagacaaagaagaggaggaggaggaggaagaggaaaccgaggccaacgatgcctaagaaggaaacccctggctggggggaacttctgtcatggacagaaattttgttgaatccatatataatcttgatcgtataaatttcgcttttccttaaaagatttggattgggaattttgccctagtcggacttttttaaaatatggggatcatcttcccacctaatccctgcgtttttcccatttttaaatatcttcgtggtcagtacgtagcgtaagccggtccttggtcatcaacaatttgccgaacgcccaactcaacggcccgcccatggatcagcttgtccgacggatggccgtataaaagaaagacgaaggaatgatgctcaccttcttccactacccttttccaaagtccaatttcttcccccaaaatttgcttttgctatccaattttcaaagatcgtattcaagtgatcatttttcatttcacatttcattttcttggtgtgta

SEQ ID NO: 57660 - DNA, 610 bp, Heterodera glycines
atggaaaagcaacgggcggaggcggacaaaatgaacaacaggaaggcatttttggcacgaaaacggggcgaagtggcggcaaacattggcaaaacggcggcggaaacgaatggcaccggcggcggcactgtggcggaggagaaggacgaggatttggtacgcattcggctcgtgttcccgagttctgcccgcatggaacagaactttcgccactccgacagtctcgaggtatgtttttttgtgtgtagttcgacgacagcaagcagtccaacagctggttattctcattgcatcaagaaaaaagattatttccatctttcaagcgttttatgatgcattaaaaagtttttcacaaaaattgttacaaaaaatcgctaaaaacttttttgaaaaatttttttttcttaaaattttataaggtttttcttttttgaaaatttccgggatgagggaatagggacaaaacaaacgtcaccgaccgaaacgtcaccgcaaaatttttagttaactagccctaattcgaacaaaaaaaatttttttttagaaaattcaaggaatgaaacaaattcggtggcaggcctcattttgggggtgtactcgggaaacgtag

SEQ ID NO: 57661 - DNA, 478 bp, Heterodera glycines
atggcgtgctcagcaggaagcacgaaaaaaaccaatttaagcaaaaatcagcatgaaaaagatggacttagaagcctcaaactaagttagaaatgcgtttttcatgcttattagcacgccccaagttagcaaaaaatttcagcaaatgctgcacaatccggtctctacatactaatatttcatcaaaatgatttcattttttgttatttattgtctttgtttgtgctcattttgtttgatacttgcattttcctcaaaaacggcgtgaaagtggacaccaaaaattgtgacactgaaaagcgcaaaaactgacatcatttaacaaacgaaaaaatgaaatgacgtcggaaaaatgtcatattaattgtacacactcaagactctcgagtttctccaaattttaaattaatcagattgcaaacgatggcgactttttgccggtctgctcaacgatgccaacttttttatagtaaataaa

SEQ ID NO: 57662 - DNA, 1204 bp, Heterodera glycines
atggaattgttcattttttatcacgacgaatacgaacggttgtacaattgcaccgggctgaacattgactccgtccctttggagcagcgccaatttgtgcccgagtcaatcgcaattagcattttgtgcaccatttactatgtaattagagaaattaaatgcctaattaaattaatgtaaaaattaaaaagccgaatagtaaaatattcgaagtcagattagctaggttttttgatgattttgcattaatcgaattcacttctttttaatgatttaaaattttaatagaaaaatgactcagtgttaatgactaataaatttgaagaaaatagaaaataatcacagatagaaagagtactgtattgtctgattcaatacgttgagatactgtatctgccctgtatgtactccatatggaagcgtttgcgtgacaattcctgctacaaattgctgttctacatcggcatcactgacatgggcattttgtggattctcggcttcttcagggcatggcttaacctgcatggatatgtgttctgctcctatcccacactgatttattttgtcggtgttttggtaacaggtgagaaataattattagttattagtcttatattaattgaataaaattttcgcttatatctctcagtgaaaagtaggactggttcattcccttatttgctagagttcccaggttccggtttttgaagagtcaatttcccggtccgggtcccggtagaataacgggagctgggaaaatttgccattattaggttaaaatttaaattttgactaaaaaccccaaaaaaagcttttctgacaataaacaccaaaatgagtatttatccagttcgttttttctgattaaccccttttccactgatgaaagtttttgctaccggtcttggtattggttttcttaaccctcttttgcacaaaacttttttttaatttctaaactctcaccaaaattaaggaattttcggacaagttgaaaatctaagtaaattatcagttttttgaaccaaggtaccgaaaaaggtcgggaattggggatgagagctcggggtcagggatttctattgaaaattaagtggatttaaatttagtaatattttatttaataatgttttctcctttatttttataattaaaaattttagccctttggatggctgaaagcactgctgatttggtaggctaa

SEQ ID NO: 57663 - DNA, 334 bp, Heterodera glycines
gcggcaaattatggcattgtgttggactccctcccaccgctcgatgactactaccccggcggacacttccctgaggagctaaagaagccggagcagtggtacgaggagaaccgcaacacgccgtttgacctgcgcgaagtcattgcggattactgcaaagcaggtaaaaattgggcatcaaaaaaaaatatgcaaattttcttcagatgtccaaattttggcccatggaatggccaaaatgcggcagctgttcgccgctgcaactagccaggagctgaccgactccatcaccatggcgtctgttcgacttcacaagggccaacgggaccactga

SEQ ID NO: 57664 - DNA, 245 bp, Heterodera glycines
atgagtggccaacaaaaagcggaaggattattcccagtggacgaatgcttcgggacgaacatcggtcgcccaatagccgaactggtcgatgagaacggattcggcagggaaagccgagaagaattggtctctttcgaagagttcgtgcggggcggagacaaaaagcgaggcaaaaaggagaaagacgaaggtgaaaaaggaacaatgggagttgaagcggcaaaaagacaattaattgttgaagg

SEQ ID NO: 57665 - DNA, 312 bp, Heterodera glycines
atgatggcccgctgtttgcccggggccaatgcggaggacacatttgtcgtcgacgtcgaaagtatgaaacttcaaatttattattagaaaaaaaaaagaaaaaaatttttgcagatacatcacactcaattaatctggtgaattattcggacaccagcagcaacgagacaacttttacctggtaagaatggagggggggggggggtaaaattttcattgaaaattataaaatctgttttgcatttcagcacaactgatcgtccaaaaagaaaagcggctgaaaaagccatgatgcttttgataaaaccgtaa

SEQ ID NO: 57666 - DNA, 560 bp, Heterodera glycines
atgggagaagcatcgcggcaagagccgacaaaactgtggaaccgcgtcattgtggacaatttgactgcgcgacggttgagacgcgagcaaagcaataggaaagaggaggaaaaagcgacggaagaaagagacgaacggcacaaagatgaggaggagggggaggaggaagaaaagcggagggaaggagaggaaaagcagggagaggaaatggaagaagcaatgggcacgagtcggaaacaaagtgagaaaagagatatttgccaaatttattaattaatatttagcaaccaatttgtgtttgtttgttcagagcacaaacgatcattctccggcattctgtcaaaacttatgccgagaaaaaagtcctactaacaaaacaacggacaaaagctgaaagaaggcgcacaattagggagagaagggtggcgaatgccttcttcaggaaaatatgccgtttttgaggaagggaaaacttttacattctctcctttgacattgtaatatctttccgagtacgattgttgtaaatcgatttattcattttaatcataaaaaataaa

SEQ ID NO: 57667 - DNA, 984 bp, Heterodera glycines
atgtccgccgtttgttggaacccaattctcttcgcttggctgggcgccaggggaaaagtgagaaatcgtaaaaataaaattccaaaagctaataatacggtaacgaaatttgatgcttttctatcataggaccgaaccaccgccagcaacgcggcgattctctccgccgccggaggagcaccatccgaaatgacagccaacaaaaagaacagcgcattgaccgttttcattggaaccatccgacggcttagccaaagcgaactaacggcacaaccgaagcggagaaagggcgaaaggcacggggaataaatggcacaaaagaaggaggggaggggggggggggggaatcaccggcaaatggcacaaaagatggaggggtggggggggggggaatcaccggcaaatggcacaaaagatggaggggtgggggggggggggggaatcaccggcaaatggaacagagttgggggggggggaatcaccagcccagaaaaacttaaatacgaagggttaaactgaatacgcatttatttggttggccatttcagccaaagagaagaaagattaacgtatcattgaatttttttcaaaatatttaattcttaattttttaaattctttgaaaattttagaaaaaaattctgctcacagtgagcgaattgcggccatttccgcaacaaattactggagaaaagcaaaactgcaacaagcgaaaaggacagggtcggttgtttgcctctttccggcaataaaattgccgacggaaatgactcattaaaagttgggaatgcttaaaaagctatcatttttattttgaatttcagcccattttttcgtgtgaaaagttccaattgatgcagccgaataatcggagatgaaaatcaacaaattcaaacattttttgatcgtatttaagagctatataatgaattctaccgttctagacttttatgaagaaatttaatttatgtaaaaaacaataaa

SEQ ID NO: 57668 - DNA, 280 bp, Heterodera glycines
attttttaagaaaaaataggagttttgagggcgcggcggtgccgataggcgccgccggggaaaaaattggaaattttgatcatttataaactggttttcactgaaaattagccaatttataggtaaaattttgaaaaattttatgggaatttaatccaattcttaggggtgtaaaagtcgcttttcgcgccaaaaagcgaaatgcgaaatgcgaaacgccaaaaaatgcaaataatgcgaaaggcgaaatgcgaaaagcgaaacctaggcacatccctgc

SEQ ID NO: 57669 - DNA, 558 bp, Heterodera glycines
  unsure (1)..(558): unsure at all n locations
atgattttatggcatttaatatttgttatatttttcattgcttttaaaattgactccggcaaaattcaaacaaattttgacgaaatatttggcgaaggatggaacaaaaatgaaagagaagataaagttataaaaatggaacaaaatgacccaaatgaacataatgaaagatcagcagcagttgatcaaatgggtggagaaatgggaaatgacccaaatgatcaacaaaaaagagaaatcattcaaaaatttgatgcaattaaagaaaagcttaaggaaagaggaaaataccactgggaaaatacaaccaacattgagaggaaaattgctagattattaggcgcaaatcgccataaaatatataaatggaaaaaagaattaaatttaaataaaaagaaaattttttatgagaagaaaagaaaagaattcattgaacgaattgatgaattcaaaagtttatacgacaaaggcaaacagaaagaatttgtgaaggaattgggcatttctaatgtgacatttcgtaaatggaaaaaagaattaatgccaaattgtcantaa

SEQ ID NO: 57670 - DNA, 348 bp, Heterodera glycines
atgtcttgtgaactgcccgtcaaccacgccgatgcccatctccctctggctgcagccacggcagaagaacggaagaagaatgccaagcggaaatgggaagagacggtcagagtgaaaacggaaactgtcgacgaaccgaagcagaatgagccggaagaaaatgccaagcggaaacgggaagagacggtcagagtgaagacggaaactgtagacgaaccgaagcagaatgagccggaagaaaatgccaagcggaaacgggaagagacggtcagagtgaagacggaaactgtagacgaaccgaagcagaatgagccggaagaaaatgccaagcggaaacgggaagagacg

SEQ ID NO: 57671 - DNA, 921 bp, Heterodera glycines
atggtcattcgagacacagaacaatcggaaaaaggtgccaagtcgacagagagagtgtgccaaacatttcgatttgccatttctctgctcaattgtttatggaaagaaatggacgaagaacggaggaaaatgttggcaaaatggctaaaggacggccgatggacagaatttgtgagaattgtgaacggttggttaatcacttcacttagactaaaaacatttagcttttgatcgggagcacattagacaaattggcagagggacaaaaccccaaattggccattgacgacgcacaattgttggagcagttcaaagtgccgttccatttgaaactcgtccacagcctaacgatttacagactgctgaaacgctcttttcaattctcttcgtttttttgtggccaaaattttcaaaaatttaacgaagtcaaaaataatctgttcactttgctcaattcgtccagtgaattcaattggttggaacggaaattcccttttgtgctgaaaattggtaattattaaaaagcaaagaaaaataaaatttatttttgaatttttagagaaaatgaaccacagaatgcgcatttatttgtaccgaaaattgataattaacagaagttggagtgccggatcgctggcgacccatgcccgaattattttgccattgttactggaagaacttgacacaaaaatatacaataaaaatatcgcaaaatgtcgaatttttgaggagttggaagaactattgttaatcatcaagttcgaggtgttcagagcaattgaaagttttagcagtgtttgttggcttatgtacttatggcaatacgttgaggggtacgacgggaggacaatggagtcgacgaaagagatgccgaccaggcaaatgatcgacgaatgtaccaaactcaatgccgcgatgccg

SEQ ID NO: 57672 - DNA, 167 bp, Heterodera glycines
ccattttgtcttattttgtaaaaaagtttgtgagccctgctttggacatgattattgcggattcgcatttgattatggcgaatttggatttgattatggcgaatttggatttgattatggcgaatttggatttgattatggcgaatttggatttgattatggcttga

SEQ ID NO: 57673 - DNA, 1725 bp, Heterodera glycines
  unsure (1)..(1725): unsure at all n locations
atcacttcttaattggtccaaattggtcaccctcaacttgttcccccaatttttgcagcttttgggcgcaatgctcatcgattggctggacgattcggtggacttcccaaatggcatttacttcgccttcctctgtttaactgccattgaatacggcaaattaattcctacggagtgagttgaacaaattaaaaaaaaaattttctaacaattttttcaaattttatgatgaaaataattaaagtttaaaaattaaaaagttttttatcatttaaaatatttgaataaaattgatcagaaaccaatgatcaatttccctgatcaccccctgtccatttttaatggccaattcatttggccaaaaaatgattttaaaaaatttcctaaaatttaagtgctctctatctgccgctggtgatcggctacatttgctttggccttgccatttccaccattgcacttggcaaaaaaatagggaaatttttttcgggttttcaaccgaaaatttttcagacattggctcaacatatgtgaaaaaattatactatttgggccaaaaaattcggaacattgccagcatcaaaatttggtttggtgccaagcatttgcgagtgcgtgatctgctcgccgcgctcgggcacaacatcggcctggagccgacagtgctgtgcgacttggacttggagcaactgatcacggtgggcacaaagtcaatggaaccacgttgggatagggatggcataatgccaaatgggaatggcacaatgccaaatggtgtaggggatgggcatggcacaatgccaatggggatggcacaatcccaaatggggaggtgatggggactggcatatctcgtggaaagaaattgaatggcacaacgccaggggtatgaatggctcaatgccaaggcgggggatggcataatgccaattgtgagagttgggcgggatggcacaacggcttagggtggagaggttggtaaatagttgtggacaagcttgaaaatgatagaagatttgagaaaggaaggacgagaatggcacaaagtcaagggatggacgagattggcacaacgtgccgccatcgagccctaaattttgtaactgattttcagaatgccattcaagtgaaggagggtcggctgcaccgagtgccacagacgcacatggtatgccgatttgttcaccaaaaacaattaattgctttaattaataattaaaccaattaagataatggatggcatttggccacccggtcagtttttttgtgccgtggcacggcggggattgatatttttctaagaaatcatttggcacttttttggttaacagagttggtcccgctttttctcaaggatggcaccttccctggttcgttcatggctcatcataaagcactgagagttcattgatttatcgtgcaaaattaatcaataaaatcaaacgattggctaatcaatcgataaatcgctcgttggcaccacccccacagaatgggtggacgcggacgagcggcgcaaatggagcgtggccagtgcaatggtgcgcaaacggagcatccggcacggttctactactaccgcagcgttggcacacccatttttggttggtgtgccattanaatgggatggatcactgtggcattttgtattagtgtctttttggccagatttgctacaccagagtaatacagtaaccgcttttttaacattntcatgacactgct

SEQ ID NO: 57674 - DNA, 194 bp, Heterodera glycines
atgtctgaagaagacacaaatacggaaaaatttccttcgtctgaaacggtcgttccatttttgttcgaagaaaatgaacaaattgcggcatcacattttaattatgatgacaatcagtccgggaaatgggttctatcatttcaaattgatgatgagcttgacacaaaatggaaacgcgcccgacaattgtacaa

SEQ ID NO: 57675 - DNA, 412 bp, Heterodera glycines
atggcaaagttcgcctccaaagtggacactgacggaggagccaaggcattttattgtcaggtcaaacagctcacacagcaaaaggtgtttatttaacaattaattttttatgtataactattttttaatctttttctttttgtatattttctcttttcagccccttttggtggcctgccctttggcgtcagttccttcaaatgattttctttcttcctcaaatctgttcgattttttcctcatcgacgaatcgtttgaactagccgacacagaactgatcagaccacttctgttagccgatcgctttacattatgtacggcacataaaactcctgctaggttggcactttcatctgcatttacatttagtaaacagctaatttctcattccttaaaaggcattctctgctga

SEQ ID NO: 57676 - DNA, 559 bp, Heterodera glycines
atgtcttcaaattttatcggttcgccaaattgctttttccgtccaacagctgatcagggtaagagaaataattaaaaaaagaattacgaaaaaaggaaaattattttatctgttttaaataaaataaaataaaaatttatcaccattagcagcagcagcagaagaagtggacaagtatgaagtgttcagttggcacggagatttgagcgaccaattggcagcacaatttttggtcagtgatcagcagctgttgaaggtgggacattttcagaacggacaaatgagcaaagtgggggggggggacaaatgagcacagatgggggggggggagggggagagaggccggacggatcagtcacggacaaagggccgaccaattccgagagcaatcaagagacattttgccaaaaatcagacaattaatgagtgaaggaaattggaaattatttagtggactgaaaaactttttttatttaaggaatgccgagaaaaacttgccagtgccgaattgagagaaacgaaattgctgtgcaaaaacggggaattgaatgcagagaat

SEQ ID NO: 57677 - DNA, 648 bp, Heterodera glycines
atgatgaaagaagtatttgaaaaagcagtagaaatttcaaaaaatactgactgtgaaattcctgacattacaatgttatttgatgtaagagaaggaacagatttaaggcgctataatataccgaaatcgaatgaagtttgtgctatcatttttcgtgatgctaatgatgatatacctgctgcaaattatttccttttaattttgcgattatttgcaccttatcattttaagaacgcacctctgatgagaagggaaaagaaaagaaggacaaaaggaagaaaatgtgaaaatgagtgataaaacatgccaagagagatgagactgttaattgaattgaatgttgaaatggcattttaagaataagaagcaattcaaaagagtgaaattgaatttgttaaggttttgtctaacctgcaaaattgtgcagtttttgttcaattttttaatcttgtaatttttgaaaaattttgcacaaaaaatgattatcgtcaggttttttttcaaaaagtcacaaaaaagctcattttacatgaaattttgctaaataacacaaaaatgtggtcagtactccaaaaaaggaaaaatctcacaaaaaagaacattcttacaaattggctttttggcaaaacaccaaatataattaataaa

SEQ ID NO: 57678 - DNA, 435 bp, Heterodera glycines
gaagaaaacaacaaaatcaaaggaacccaagaattttatgactgttgcaactatggtaaaaacagtaatttagaagaaatgatacaagaatacccaatggatttgcgggttttatttcaacctgaaatagaccaaaataattacacacaaattggagagttacacaatgatttcaaaaagaaattaagatatttaaattcctctttttcatgtgcgtctttgggatgtatgcgatttaaatttcctgataaaaatgtgccaattttcaaaatacaaggtagcatttatcattcatataatagtgttgctaggccaaatgaagaagaactaccgacgaatggacagctttattttatagatactgatgaagcgattaattatcgattaagtgcctacaaagaccaattaacgaaactttcattcccagtcatataa

SEQ ID NO: 57679 - DNA, 216 bp, Heterodera glycines
atgcatgaatctggagctgtacaagctcagtgagaattcagagttcaaatctaggtccatatttgggctgaccgtggctagtttactcagaattatgtattgtaaattcagtattttcaggtcgtattacaaaaacttttgcgtggtggttaagaaaaatgttatttttggagactgctttcaaacttgactttccagtaattcaattaatattaa

SEQ ID NO: 57680 - DNA, 419 bp, Heterodera glycines
atgaaattcgggctttttttccttttgatttgtttcttttttgaaattttcgaggtgaagccaaaccaatccgaattgaatgaccaaaatccgttagtttttatataaaatttaaaaaatttatatttaaattttagcccgggattttggaccaattttgtgcaggaaaatggcattggggacgaaaatggtcaaattgggcaaattgccaaagagatggacgaggacgaaccaatgattgagcaactttcagacgaatctttttataaggcaccgccgccttcgcctgcgcacccaacttttcaggtggtaattagcgaaatatgatgaacaattaagtggaagacaatttaatatggtgtagcataagttttgttccccgaaaattttcgaaaattttattttttctaatgaataaa

SEQ ID NO: 57681 - DNA, 1760 bp, Heterodera glycines
atggcgcaacagccgaccaacaaaggcacaccgaacaaactgaaaagacggaatgagagaaagaaaagagggataaaaagaaagagagaaggaaagagaaaaagaaaaacatacagaatcttttttgaagacattgcggcggcaaaaggaaaagaaaaagtgagtgaaagagtgaaagaggcaaagagaaaagccaggacttttatagtgaagaacagtgaacaataggaaaaagagaggtacctaatttctgcgtaatacaacataccgtatttcctaaaataaagccgccccctaaattagtgccccctttcaaataaagccccccaccttttgagggggtggggtgaaaaatagagcccccgggggctctattttaggaagtacggtattacagcggaccaggccgttttcgtgcgagcccaagtttttggctataacttttttctttgccaaccaaatccaaccatctttgtacaatcaatagccctaacaaataagtgtcctctattagcctttaaaatgaaaaagggaggtagtttgtgcgtaatactgttataaatagggaccggattttgaggcatatgtttttttttttttgctaatctgctatgacttatatacatgaattacgagtttttaattggcttggtttgaatcttctagcttggactttttggtgcctttttttcttgcgaaaatttggctaagatatggacaaaaacgaaaaaatagcgaaatatggatttattcccgataaccctaaatatggatttatatggactaaaagctcaaatcataaaaatttatcgtagaaatgctattttttagcaactttcttcatagaatatgcgcagaaaaaaatatataaaacccatataatctcgtaaaaagacccaactcgtttttattaccccaactcgtttttttgactggaaaatgggaatttaagtgctaaccgcagtttataattactacagactgaaatgtatagtcaacgcatttacaaaattgccaacgagttgggtgtcgtcctataatctatacatattcataactttttttcaaacttgatcaaaaattcatttttttactccagaaaaacatgatatccatttgttttgacagtgcgaaagaaaaattgtgaattttgtggtaatattaagaaaatttttttgtccaaaagtgtaaattttgctgcctttttcctttttgtgcctttttttgtcgtttttgtacatttttatgccttttttcacctttttcgtgcctattttcggtaactatttgaaaaatgttcgtgcctaaaaatccggtctcatgttataaattcgagcccaaaacttgtgggttttcgggagcattgaacacgaatcagacacccatttcgaccaaatccagaacccggaattgtaacaatttctttttgttttgcgcaaaatagcgtcaacgcaccttattttatggctttctcgcagcttgagagtttgaagtccatcgggaattacaattgtttgggttcgattcccgaatttttattctgtctcattctttccttccttttcaaattttttcaagattttgataaaattttaatcattagatttttatttgttttgtcgctaattttgtttgatactgtattttaactccgacataagtattcgatagtttatttattaattatttgatattctgtcaccggtcccttctcacctcgggggacaaaataacattttcttcaataatgagaaaataaa

SEQ ID NO: 57682 - DNA, 1140 bp, Heterodera glycines
atgggcattcgattcaatggacatttggcgcaaaatcggagagaatggcaccaaagaagtactaattgtcaattcgcatgggaaggcactgccaattccgcaaaagccgatgccaaagaaaatcatcggattcaaatgcattacaatcgagtgaattggacatttatgaaaaattggctaacatttctcgttttttttttcagatacttccaccaaaatgtcgtctcctttctccaccgttttcgctctcttttcggctcttctgggattaatttgtccattggatttggctcactcactgatcgcactgctgagtaccttatgtgcaagctttggccattgctccggggcaaagtctgcggcatggaattttggccagcggagttccgatgtttgcgacagttcgccccatacattctgcgcgactgtccgtccctgcgaaccgtctgtcttccctactgtagtcatttcgacgagtcggatggccaagcggtgtccaaatggcttttgtcgcctcggccggacggtcttccaaaagtgttccgttgcgaattcgatttggctgagatgcgatgggtgtcactgatcagagaattcaaagcggtgatttatttgttgatcattattttacacaacttgctattacttttcattctgtccatgtttcagtcatttgcaaatgcttctcgccatgtcaatttcatcattgtcattcgcttttcctgtgccgatgactccgccgttgcgacgttcgatctgatcaacaatttcactggggagcgatcgacactgaaaaggcttaacaaagacaacagcgacgacaataacaatgatcgttttctgctgattcgctgtccgatttcgcgagatgagtgtaaatggagcaaatgggaaaaggaagcgattggatgggaattcgacaatcagtggaacagaatcatcttctcaattaaggactatggaatcgaccattggtcggctatttgaaaatttttaactgttttttcatttttcatttttttagttgctatcccggtccgagtggtcatcagaataagagcaaatgaattgatgggacaatgtgaccgattcgctgaattttgtgtccttttaatttgaattgtttgtttctaaattgaa

SEQ ID NO: 57683 - DNA, 297 bp, Heterodera glycines
atggccgaaatatggactaaaaaggcaaaaatggcgaaatatggatttattcccgaaaacccacaaaatatggatcggcgacttcctggcggtcggcgtctgcgcttgccgggctggttcagcctgaacaatgttcccctccttcgtacccctccattgagccctgatttgtcaccaatcgaaaatctttggcactttgtcaagcggaaaatcgccggaaggcactttcagtcaaagccccaacttggcatttggaggcctggaactcaattccgcttgacccaattatcaatttga

SEQ ID NO: 57684 - DNA, 80 bp, Heterodera glycines; identical to SEQ ID NO: 51817

SEQ ID NO: 57685 - DNA, 80 bp, Heterodera glycines; identical to SEQ ID NO: 51817

SEQ ID NO: 57686 - DNA, 984 bp, Heterodera glycines
atggcactcacactgcaggaggtggagacggtgctgaagcgggtggaggcggagaaggcacacgcgtcggaaaggtggggctgatcaactattgtttcttaaaatttatatgcattttctattaaaaaacgccctcatcgacaggggcttgagttgagacacttcattcctaactgtctctaagtaacagtagttaatgcaaaagaatttgtgtaaaaaatgctttaattgccaaattaggcaatttttaataattcattagcctcacaacgctttatgtcggcttcatttaatagttttttaagtcaactccaatccgcaattctcgagcgtgacaatttgcgtcaattgctcgacaaccttcatgatcagaatgcacagttggtgaacggtcttaaggtgagccaagaaagacaacacgtttttgcccaatcattacaaatttccattttgaattttgcatttcttttccaggccaatctcagccaggcgagtggcgaccgtgacaaggcactcgccgaggtcaaatcgttgcagagcaacatcaacgcgttggacaatgtctaccaacggctaaaggctgaccatgagaaattgcgtgaggagatggaacagatccaatccactgataccaacgtggaggcgtgcaagaaggagattcaggtgggtaatggaacgcaaactttgcccttttatgtctatttttttctataaattcaaaattttctttaaactttatggaaaaatacttttagaaaagctttccgtgtcattaatacaattatttttgcacagaaattgcgcaacacggtcgcttaccaagagaaacaaattgcggaatgggaacaaaagtgtgaggagctcaaccaaaccattgagcgcaaggacaaacaaatggaggaaatttgtcgccttggagccgacatggaaagcagcattgaggtgaaactaaaaaaaccaattaccaaacggatttaccgttaa

SEQ ID NO: 57687 - DNA, 843 bp, Heterodera glycines
atgcgctacgacgagctgcgcttctcatgccggcgccagggcggcgacggcagcagtggcacgttctgccaacagtgccgcttcgtgttcccgaacgcggactgctttgaggcgcaccgccggcgcgtggatgttgcgccggcaccgcctccgggcgtcgccgccgccgctgctgtgcctcactgtggtgaggaagcaacgggtggagacggtgacgacgcggtttctttagctgctgctgttggcgccgctgtcgcgccagcgtttgcggaccgccgtcgcgggcggccccaccgttcaatgtgtgaggagcggcgcctgtgtgagtggtgcaatgtggttgtgtgggcgagaagcggtccgcacgtgtgtcgccgccgtccgcagcagcaacagcagcaggaggatcgcgcagttctgcagcagcaacaacagcagaaccaccacaatcagcagccggcaccgccaaagtgtgagaagtgcggcggtccacacgacccggaacgaacgccgcacttcatccagcccaagcaatacgcgcgccagtgccagtggcgacgcggtgcggcacgtggcgcccacgacaacgctgacgacggagcggttgctgatgctgctgatgctgcagccgctgttgatgacgatgacgatgatgatgtcagtgaagaggaaggggcggaagctggtgccgcgcgtggtggtgttggagatggcgctcgcggacaccttcggaagccaaagccggtgcgcttcatcttttgggatgttgaatgcgcacaggagcgcgtgggagagcagcaggagcagctggaggacggtaatgaattcgtttttaaacgatga

SEQ ID NO: 57688 - DNA, 420 bp, Heterodera glycines
atggatgcagttcaacagcagcagcagcagttgcccgaactgttgaagcacgtgccggtgctggtgtgcgccgaggtgatctgcgagcgctgcatcgcctacggggtggacattgagcgtgagccgttgcgccgcgcgccccagtgccagtgcggtgtcccgtggcgtggtgcgaaccggcgccggtggtgctctcgcatcggcgaggagctgtttgacgacgacgacaccggcggaccagcgaccgcacaacaacaacaacaacaacaaatgccaccggatggattgaacccgcggcgactgcgcttcttctgcgacggcgagccgggcaccggacgtggcgcaatggcccaatttgtggactttttgctccacaccggccccaaagggacgcgcaccgtgatgttggcgcacaacggg

SEQ ID NO: 57689 - DNA, 308 bp, Heterodera glycines
atgcgatgccaaatgggcatttgcggagaacgaacggtgcgctgtcacgcagctgtactcgccaagcacagagatcaaagtggcgccgcaacacgtgagtgtgacgaagggcagaaggaattgcactgaccgattaattaatggtcattaaaaacggttgaaaataatgggatggaaagaatcttatcaacaaaaaaacaaccagatttttgcttttttaaagaatttgccattgggcagcagaagagcggacggagtgacagtgatccaattggaaccgcagcaagtggaaattcgcatgaagcccg

SEQ ID NO: 57690 - DNA, 372 bp, Heterodera glycines
atggacatcgcaggtgtgcgcaagaagctaccgctgatgaatttataagtccagatgaaaagtcggagacccgttttgtccgttgtttttacaggtctgaccttgcaacgcgattacatgccgaaccgatccactgctgacacccttgccgcccctttcaacgccgaatgcactaccgatgagcccaaagcgctgaggacatcgcttcttagagggcgaggatgtgctaatattgtgattttaaaatatatttggcgttttgttatttaatttgtttcatttttgtttgtgatttttgtgaagtgttagttgttagtttatgctgtcgtcagtttttattgattgtcttcgccttaatttatttgaaataaa

SEQ ID NO: 57691 - DNA, 84 bp, Heterodera glycines
gtcctctccccccccccccccccggcgtccctttcctccccaaacaccacagccacaccaattcattctcttctaactttccaa

SEQ ID NO: 57692 - DNA, 383 bp, Heterodera glycines
atggtagtgactcttatgattggaatgaaaaatggcgttgaaaaactgttcaagcagcgtccactcacaattgaccagttggacgagcagtacattgacaaaggtggcacaaatttaaacaatttttttttttatttttcccaatggccaaattaaattttatggcaaaatttgctcatcttttcaatttgaatttttaattttcagaagttttggtacaaaattggaagcccaatgttgtgtatttggtgcaatttccgcacaccgattcggccccaagtttatccccggcggcgatccaattggagacatggctacggatcaaagaaatcccattttatgtgggttttaattggggaaattgaaaaacattttaaaataaa

SEQ ID NO: 57693 - DNA, 1359 bp, Heterodera glycines
  unsure (1)..(1359): unsure at all n locations
atgnaacaaaaggaagaggaagagaagcgaaaggagggagagaaaagggaggaggaggagaagcagaagaaatcgagagagaaagaagaaaaggagaggaaggagcaagaggaaaaaatgatggaagaagcggagaggaaacggattgaacaagagaaagtaagaaaggaggaagagacacagaaaaaggaggaggaagagaagaagcgactggaggaagagagcaggaaaagaatggaaaagaaacgagcggaagaagaaaagaaaaagcaagatgaagagaagaagaaggaagaagaaaaagagcggaaaagaaaggaggaagaggaaaagaaaaagcacaaagaagagaaaaaggaagaagaagaagagagaaaaaggaaagcgacagaagacaaaaagaaagagcaagcggaggaggagaagacgaagagtaatgaagaggagaaaaagaaagcaatggaagaagagaaaaagacggacggatttgacaatgctttggaggacaaagaggcgactgaaggccaaatacgagtggaattgggcgcaaaactggacaaaaacgcaaaagaggcgctaatgagggcaaaatggtgggaattaggccaaaccattacaaaattaaccaatcatttcgatattaatcatttgaaggtacaaagatgggaaattactgaacacacgaacatcattaaaatacaaggcacttttggagatgccgcgcggagaagcaaaacttattgtgaacaaagtggagaaaggagacgcaggtggaagagcaaaagggggaaaagagagggggaagggacaagagagaagataaagagtggagagggaaaagagaaaaagggagagagaggagggaaaattggagaaaggagggggagaagagaaaaagtgaaaaggggaaagagcgagagaaaaaggggagaagagaggagaaactacggtttttgaaaattgaacacattcacaggtcggtacaaattggagttggagttgactaagactaccgtaaaaccatctacagaagccaatcttatcgtctttggggtacccttagttttcatttgttttatgtgataaataattgtcctttaaattcagaagaatgagccaagaaaagcaacggaagtcaaaggaagcaaagaaactgaggaggaaaagccggggacaagcaaaattcaaaaaagggaggaaaagcgtaaagcaccggaatttgtcaaaaagccaaaacaaagcattgtaaaaaggggaagatcaaaagtgaacaagtcaatgcgcctttcaggaagcgatcagtggttctcgcgtttgtttggccggttcgtacgccggcaacccaatgccatcgtttaa

SEQ ID NO: 57694 - DNA, 1214 bp, Heterodera glycines
atgtgcacatggcagcacctggaggtcgaaattctgagcggaaactcagtgagcgttcgatggacaaccgcggaaacggtgcagcagcaaatcccgcaaggggcgcacgcagttattcaataccgttccgagggcagttccgtgtggaacgaggtgttggagcagtacagtaaatcaccggctgtgattgaggatgagttgaaggagggcgtgccgtaccgaattcgcgttcttatgaagtcggccgacggagaggaaattggaaaatcagcggaaagtcgcactgtgaagctttctggctcgaacctgcccatcttgacgaagactttgcgcgatgctttggttccgaaaaacaacgaaattcgacttgaagtttgtgccgtcggcgagccggcgccaacctatctttggtttaaaaacggcgaggaaattgtgccaacgccagaaaacgacaacgtgtcgataagcaatgaaggttatctgagcaaactgaccattcatcgaatggccgacggagacgagggggtgtacacgtgccaagtcagcaacagtcacggcaccatcgaaagccgtgccgagcttttgctgggtgccatccaagcacacttcaccaaggcattcgcggaacgcatggacttggtcgagggcaaggacataacgctcgagtgcgaagtgtcgcatccggacgccaacgtccgctggtcccgcaacaaacgtacaattaacgaggcaaccaaccgcgtcgcgctagactctgtgggcaaagtgcgtcaccttacgctttacggggcgatgaaggaggactcgggcacgtacacttgcgaaacggagggcggccaagatcgtgtgcagactgaacttgccgtgcgacctcccgacgcgcgcattatgttctccccgcagggccgaacagtgcacgactacggcgaacgcgtgtgcctgttcgcggaactgtcccggacgacggagcgggccaattggttccgcaacggagtgggactcatgtcgaagaagtgctttgcctatgttgacgaactgcgcgctaacctggagatatacaactttgacgagaacgatgtcggcgactaccacgtcacattggtcagccgcaaatggcgaaaaatgcgactgaaaaaatgggaaaaacttttcaggacagcggagaacgcagtgcaccggccaagctcaagttcgaagttgcgcctaaaatacag

SEQ ID NO: 57695 - DNA, 1134 bp, Heterodera glycines
atgtatttgcaattctcacagattgtgccgttggacttcatcatgaaagttcaggttaaattttgtggcggctcttatgtgatcaaatgcgtttttcagatcacattggacgaccaaacgatcgaaagtgttttgacagtggaggaaacgccggtggaatttgctgagaaattgccccgcaaaagtagaacggatgatgacattacaaatggctgtcttacataagttcgttcattttcagcaattgcccattgcgacgagacaattaccctcgcggcgacactcagtcacgacgctgcgcaaaaagtgaatttgcattcctagtcaggaaaagccatttatgaaattcatttatagatttcttggtaccataacggcagagaactgaccgaattgggcacggagcacgtcatctccaaggagggatgcctttgtaagttgaaatccgtacaaatggcgacgaaaacccggcatttgttttgcttacggttggcattgtgttttttataaaaacaaaaggcaaaaatacagtttagcagttggattattgaccaattataggtctaattagtggtgatcagtcatcatttacgcttgataaatgcgaaaatcatttaaggtagtttggaaattcgcaaaatatcctaccgaatgggcggtcgttacacgctgaaagtggacagaatggagtcatccaccgttttggagggtcattgattgggggagggatttcgaccttactgtcctttttcagttcatggaaagccgagtctcgaccagcagaaaggcgaacgcattgttttggactcaaatgaaaacctttccctgaacatccgtctcaaatcactgcccgaaccggaagtggatctgtacctgaacggcgaactgctcacgcctgaactgcgcacttcggtcactgttctcgaggaggcgctcctgctgacgcgcaaagagctgaccaaggaggacaggggcacctatcgggtggtgctgttcaacgagtacggcgaggacgctgtcgaatacgaagtgtacgtgcgcgacgtgccggacccgccctccgggctgatggtgaccgatgtggggcacgactactgtttcttgaaagtcggtcccttgagggcaaacttttga

SEQ ID NO: 57696 - DNA, 656 bp, Heterodera glycines
atgctcaccttcattttgttggttccgctggtcatcgtcatcggcgcgttcatctacctcctgttcatgaagccaaagagtgcggcaagcgacgaagaaggagacgaagaagccaaaggaacagctgatggcgatgtcgagaagggagaagacgacaagtccgatttgatttgtctacaattgtaagaggattaacggtttttgccccattttcagaaaggagactccacctgctggtgaaggcgtgacagtgcctgctgaacaagtggtagatgaacagccaaaggaggacgatgggtgagcaaaaagggcggaattgttgttttcaaccaatgttgcttttcttttacagtggcgacaaagctgaggaggagaagaaagaggaaggcgggtcggcagcagaggagaagcagaaagagggagccgcggagaccggcggaggagaggagaagtcggcgaccacggaagagacgaccgaggaaacgacggagacgaccgacgaaactgcgaccactgagacttccgaaagcggctccggctctgcatcgtcctcagcatcgggctctggatctggctcgggaggttcgacttcggcggacgctacttctgaggacaaaacttccgacgcatcatcgtcttcatcggagggctcttag

SEQ ID NO: 57697 - DNA, 428 bp, Heterodera glycines
atgatgcattattttgcaatattttggtccttaaatataatatttctccaacaaaatggccaaaatgttgccagtgcaaccaatccgttgatgggcaagcaccagatgaaaattgccaaattggaaaatctgttgaggtaaataacaaataatttgtttgcataattcagcagaggcccagcccaatgctgtccttggaaatcgaaaaatagtctctattttcttggaaggttcttgaaaaacttttaaataatttaagcagtgagacatttgaccagtaatcttagagaattcgggcagttcactatgaatctgacctgaccaacacttaattttactcaattccaaattcccaaggtaatcggattactcgtgtgccgtgccatttgcgccgcataacaaaatcgaccttttcgccgctcattaaa

SEQ ID NO: 57698 - DNA, 446 bp, Heterodera glycines
agcccattgccattggaggcccaggtttttgtcgtcgtattttttctgtcgtaccttgtcttgaagtcgcttcgtcgagattgacgaaacgctggctgtcaaacggaagtatggcgttgggcgaattttagtgaagggcgaagtttggttatttggtggcgtggaacgcgactccaattgggaacgcgtcttcttggttcctgtggaatcgcggaccgcaaatcgtctgatcccacttatccagcaatacatccttccggggaccactattgtttcggatgaatggcgttcgtaccgtggaattccgaatttgccataaaattacactcattggaccgtaaatcattctcagaactttgtcaatcctgccaatcgtcaagcacacacacaaaatgtcgagtcattgtggaagaaattgaaaaagaatttcaaacagcattttggaa

SEQ ID NO: 57699 - DNA, 560 bp, Heterodera glycines
atgaaagaagccgccgcaattgtcgatgattgctgcgactctcagctgtcaactgcggctgatattcatgtgctttctgagtgtgagttcatttttttgtaaaatattaattgttttggtattaaaaaataagcatgttttcaaaaataaattaccgtacttactgaaatatgacccccgcgggggcagaggtgttcgaaaatttatggacgactctatttcattgaatacagaataataatactttttataaatgcaaaaattgaatattctatatttttatgtaataaaactctccctcaaagatgtgatcgggctcaaaatgcagttgagtggtttgagcaatggaagcacttaattgggctcaatgttgttgaccagaagtggaaggatgatgagtggaaggatgatggtgttgagaaaatgttcgaagtttttgaatttatttaaattgccaatttaaaggggctgccaaattctttgataaggaaaaacagtgattaaaaaaattttagattaattaatgcaaattcaattatgtttaaactcaaaattaaaga

SEQ ID NO: 57700 - DNA, 450 bp, Heterodera glycines
atggcgttaaatccgacaattgaccagctcgtgaaaatgctggcggatcaacagaaaatggtgcaggaccaatcacagcaaattgctcaactgattgcgatcggacaaaacgcaccaaatgcggcggcacagcccaatcaaggagcaaattcagtgccaatattgccggacatttcaccattcgagccaacggacgacaagagccgaatttcggaatggattgagcgcttcaaattcgcgttggattgcacagcaccaacggcggacgacgaagtcaaggtcaaatgtttgatgaataagctgagcgaatcggctttcagcgaatacagcagatcagttctgccgtcgtcggtcacagatttcagttttaaagtgacgacagaaaagcttgaaaagctgtttgccaaggctcagtccatattcatcgaccgctacgagtgtttaaaagcg

SEQ ID NO: 57701 - DNA, 3668 bp, Heterodera glycines
atgtcgaacaacttgttcaacccatgtttatcaatgcggcacatcagcaaatgccggtatttttttattttttttttcataaaacaaattctgttttagtcaccattttgtgctgatggcacgcacaccattcaatttttgaatgggagcgtctctattgtgggccgcccgctgccgtctgttatttaaacagttttttctattcaattgattattcaggccgatttgtctcaccgtagtagcagtagatcaccgcccgcaccaacaaacaccagctggccctctccctgtgaccaatgttgtgctgcgcaacggcgacggtcaacgtgttgaagcttcgggttggcagcaccaggccagtgttctggcgtctttggacatcgggagtgcctactggttcaccaactgcactgcgcgggcccgataccagcaactggactgttggtatcgcattggcgtcgatggcaaaaatgccattgtcgtccctcacaccgccgctccacaggtaagtttttcaaacttttcttataacagaatattgtgttaagccgacggctccgcaaagtggtggactccaccattcaattgcctccattttgggagcacaggtgggcttaaatttattcaaaaattttttttaaatatggaataatttaaggcgccacatgttcagacgggtggaggccgtacgttcaatgaggcgcgtgcccctcccgaagcgagcccaattgaggaggacgcgaataacaatgtgagaaaatgatttttttttttgggttgtgtattttttttttgaataaaatttgctcagacaaatgatcatcgttttgggatcccggtgcttcatcaaagacgggcacctcaattggttggttattatgatttgctttttcttgaataattataccatggataaatttaaggtgactcgatcaattgaggactgtttcgtcattgaacgaacgacgccaatgcgcaacaccctccgcaacaccaggggcgaactttgcgagatccgcttcctgcctttggaggacgccgagcggcccgatctcgtgctggagacgctcattcagcatctgctcgaccgtgtgctggaaggtcacccgcctccgatgctcgttggacttcagcttcatccgcccggattcgatcgaccgtacgtcatccgactccgcccaccggagcaaaataatgcggcagcattgtcggcgcctattgagcgcctcaacgagcagtctgctgccggaatcgatctgctcgctgggactaccgtaaccaaagtgcttgctgtgtggcccctggagcctattcgtgctaatgctcagcgtggaggttgtgctattgtacctttaaatattgatttttctaatgaatttaggtggttgcgactttgacgctgaacaccatgtgtccaacaccgtgcggtcccttgtgcgcgtcgtcaacccaaacgaccgccattgtctggcgcgttccgtcctcctggggctctgtgaccgtgagacgcgacagccgaacggcggtggacgggacacatttgcagcgtacgctggacgacaagaccaacacggggcgcaggcggtggaccttttgaggaacgctggacttcccgtcgacaaacaaatgtacacgctggaggacgttgaacagcttcagcggtggatcatcaacgagcacggtgttggacaaattcggcttgtcgtgttcgagaaggagcaagagtatcggattgtcttcaaaggagaggggtgagtattttgtaatttttaattaatgtctaaaatattcttttaagtgtggctgcgcatttcaatttgtgcctcttgctggagcgtggtcactttaactacattggaagaattgaacaactgttcaaaatcgagaactactgtttcgactgtgaacgcagagcaacgactcgctatcatctggccggctgtaaagttgtgtgtcgtttgtgtcttcggtttggcgcagggtttccatgtcaaccggaacaggtaataattaaaaaataaataaataaaatgaaatatgcttttttttttagttgccaaatggtgggagcagttctcgtcgctgcaatgaatgtggctttgtatttccgaacgacggctgctacgactatcatcttgccaacatggctcccgctccgattgatggccgaggccaacgccaacggcagccaatttgtcaatggcgtcgtttctgtcgagcctgtggtcgtgtcgcttattttggcgtccatcaatgtgcaccactccgtcggcccgctggaccaattgactgtcgccgttgtcatgggcggcacacactggatgagccgtgcttcatccaaccgctccttgacaggcctgctcatcagaacaacaacaacaacaacgatgatgacgacgacgacgatgacgacgctgatgtcctcgacgatgatgaagcggatgacgaactcccacttcgtctttgcttcttcgacgctgaaacgtcccaggagcggcccctgcaattgaacaaccaaattgctcagaagcacgtaccgcttctcatcgttgctgaagtcatctgcgagccatgtcttcgagcgggaatcaacgtcaacgatggattcggaagaagagctcctgattgtgtttgtttgtgtcggatggtgcgaggtcaacaactgaggcagtggtcttctcccccgtttgtcaatggagcaggcgacaacactccgcccccagagggcgctccggcattcaatcagcgccgcttctactttcactcttttgacaacgaggccaacgatccgattgagcaatttttgctctttctgatgaagcacggctccaagaaggcacacacagtctgcatcgcgcataacggtggaaagtacgattttcatctcgtacttgaggcactccatcgccgcagcattccaccgaagcgactctgcacgacggggctaaaaatatattcaatgaagctgcgcggattaaatcaacgacgaattacattcaaggactccatcaactactttttctgtgaattggatgccttggttaagagctttgatctgccacaacatctggcaacggtgaagcccttcttcccgtacttgtacatacagcgacaacatctgctacaccgtctcaacggtcttccggcaatagaacactattcgcccgacacgatgaaggtcgaaaaacggaccaagttttcttcgatggcacggttacaacaacaacaacgccaactttcaactgcgtgatcaactcatcatgtactgtgtcaacgatgtggcaattcttcgtgaatctgtccttcgatttcgtcaactcatcggtgaacacacccaaggccttgaccccttcctctgcgcttcgacggccgccggcctagcgctcgccacgctccgccgctgcttcctccccgtcaaccgtttggtgcactctccagaaggcgggtacctccgtggacgacgagcttctgccgaatctcgtcgctacatccgcttctttgagttggaaaacgatggagcacaagtgcagtgcgctgactggtcagtgggggaggcgcacatcgaggattctgggtaccgtgtggacggcctttggcgccgtgacccgccccttcgtccaatggccatcgagtggatgggatgcttctatcacggtattttccaatca

SEQ ID NO: 57702 - DNA, 843 bp, Heterodera glycines
atgatatcacgtttaataccccacaaaattctgttcagatatgagttcaaggatctgctcggcaccggcgccttctccaaagtgttcctggccgagtgccgctttgtgcccggcacttttgtcgccatcaaatgcattgacaagaaggcactgaagggcaaggaggagtcgttggaaaacgaaatacgggtgttgaaaaggtgcgttgccaaaattgagtttgaaagagggcaacgtgagaccaaggaacaattaccgccaaatgactgactttaggcattttgtccgatttctcaaaactgatcggaaaaaaacgtattgcccaatttgtaactaattaactaccctgctctcccaacctaagaacatcagatcatttaaaataaaacataaatccgatcattttgtgttcaaccgcgtttttttgaatccgtaaaatcgaatcactttgagcatgttgatcaaacacacacacgtaatcacagagttcattgttattgttcagactgcgccacaacaacattgtgcagctgtacgacacatttggtaaaagattttatttttgaatttaaattatatttttgctactgcgaatgattaattattaaattgtttttaagaagaaaagcattgcgtatatttggtgatggaggtaattgaatttgttattgatatgatacaaattatatcaataaatatgtgccttaagctggtcaccggtggcgaactgttcgaccgaattgtggccaaagggtcgtacacagaaaaggtgctttttaatgtttttattttaaaaattaatttttttaaaaatataaaaatttcaggacgcatcaaatctga

SEQ ID NO: 57703 - DNA, 450 bp, Heterodera glycines
atgccaagcggactaatcaaaaattgcattgtcgcaaaacggcacccaatgaatcaccattttaatcggcaccagcggtgcctagatggactttgcctgcacttgccaacctcatcaatcggcagcaaagtcgccgatgtcggcaccaaattctcgccaaaactttcgatcagaaaaaagtccatccacggcgattgccttcaaccggaacttgatgttctgttgaacgaactcagagagtgcattttggacggaaacgctgtggtcgaagagttggagcagttcaaacggaaagacggggacaatttgcacaaggaatttccagtgaattgcgaagagaaagggaaagaggaagaagctgaagaaaagagacggacgaggacagaaaaagtgcagcgatttgtgaagatggtgaaaaggcaatttgaattggggcgacgcattgaaaag

SEQ ID NO: 57704 - DNA, 929 bp, Heterodera glycines
atgggtgaaagcactgcgcgtgatggcctgggcacgacgatttgccaacaacgcacgaagaaaagccgaggatatgcacggaacaatggggggatctgacccctcacggcgaaaagcggcaattcggggacaaatcgtggctctcccaacccacgacgaagagacggacgcaaaatgggcaattgtacgggcaacacaacggaattgccaaccccgggacggcatgcgaaccgagctggacgaaaacggggtgcaacggctcatcagtcgaatcggctggtgcgaagaagcggaactcagtcggccggtgatactcccgaaaagatcaagagcaggagcgctcattatcgacgacatacatgtgcgactccatcacatgggaacggacggcactctgtcggaattcttgaggagctggtggtgtcccagtgcacgacaacaagttcggcaagtacttggtcaatgcaaacgatgccgacggctcagggggatgccctaccccctcccgacaatgccacaactgccaatggatcgagtgagacgacgattgccgtttgaatcagtcgggctcgactacctcgggccgacagtcactctcgacgataagggacaacaaaggaagacatgggtgctgctaatcacctgtttgacgacgagggccatttatgtcgacgcgactcgagacttatcggccaacagcttcatctcagcactgaggagattcatcgcccggcgcggagcaccgagtcgaattctcagtgaaaacgcgccaaccttcactgtggttggcaaaacgctcgccgagttcggcatgccgggagacaatccgatcgattttgcggactcccgaggcattaagtggcgattcacgccccagcacacgccgtgggccggaggaattttcgagcgggccgtgcaactcgtcaaac

SEQ ID NO: 57705 - DNA, 293 bp, Heterodera glycines
gtttggcgcgaacgtcaaatttactcagctaagaatttggatgatttgtcaaagtgtttaaccgcggacgaaccatcaactttttccgtctctccgaatttgaattccgaaacggaaagcccttcgaagagttcgccggtggacgggggacaatcgccggttgcttcggaggaggacacaaaggcaagcgaagggcaaagaaacgaatagggcaaaggcattcattccacagaaaatcaaggaggaattccacgcattctccacactcagttccaacatgatcgcccttctgc

SEQ ID NO: 57706 - DNA, 382 bp, Heterodera glycines
atgcgagttgcaccgccaaagtcggcaattgttgcggcaaaagttgagccaattcgaagttgggtacgtataaaatgggtggggggcgggggaggaatttcggggaaaggggaaatttatataccaaactaaaatttaaaatttgctattttgaagaagcacaaaaaataaaaattgattttgaggtggaaacaggcggaatgcagtatattcaccagcaacaagcggccaatgaccttttgctgatgggcgacgacgaattggaacagaagggaaaaggggagggggagaaggacgaggagggggcagcagaacacaacgaaatggcatcgaacgaagtgaaaatgggcaatttaaaacagttttaaaaaattggaataaa

SEQ ID NO: 57707 - DNA, 576 bp, Heterodera glycines
atggccaatcaaaaagaagttgatcaatcgatggccccttttcagtgtcttcaagcaaacatgcactgtactgacaagcaaccgcagcacatcatcactggtggcggtggtggcatcaaattggaacgggcactgagtcggattagtcagttggagtgccggctgaacacattgagtccgctgctaagtgatggcaatgccatggacaatggcacggcggaaaacaatggccaaggcaaagaaacagcgcaatttaaaagaaattaaaaaaggaaatgggtgaaccaacaaaggcagaaaacaaaaggacattgtttttattagggactgagttttcgagtctaattttaaaaaataaaaaaataaattttaattaaaacacagcacgacttgggcacgcggttaatggaaccaacgacaaattcaacgtgtatcatcagcagcagcaacagacgcgcagcaacaggcgaagacgcggcacagccgcaaaatgtgccgtaacggagaagcgcgcgtcactgtgcagcgcggcggcggagagcggcacggaacagcaggtggtcaaataaaaataaa

SEQ ID NO: 57708 - DNA, 905 bp, Heterodera glycines
atgacggaacgatgtgtgcttgtggcaaggtcgaaatgtcaaaacgccccgaatcaaaatgtgaaattcgacaaatgtttcagacaatcggacggattcggactgacagtgaacggagaatacccagtgaaagttgcaggtgttgttttttatttgacaaccaaacacacatttaattaatttggcaactttttagtggtaaagcacaacggggccgctcaaatagccggcgtaaggtaaaacaaaaatgaagtaaaaaaaggcaattgctttcccatgaggacagactaattaattaggcttaagcatcatttttagacaaaagagcgaatttaatgtgcaattatattcatcatttttatatgcgtatagcaacagtttaatttaattgtattttttatcactttacagtaatagcctttatcactttatatgtaccgtatccgctcgcttccatttcatttccaaaattaagggagggcgaccgaattttgaaagtcaatggaatgccagtgacagcgcaaaatttccaggaagtgatcaaaatgatttctggtcagtatttttatttaaaaataaatttaaataaattattcaaatttaatttaagaaattagcaattaacaattgtgtacactaattgactctaattaggaggttacaatttggcactgactctgctcggccccgcctctgtggcaacaaacagttgggacgactttgacaaacttttccccgtacaacaccacccatcgccggctacggcactgtgccagaaatctccgccgccattgacagcgacaaaaagaacaaaaacaatgataacggaggaggacaaaaatggacacaattgggaggtggcaacgaattataagagaaaaaataatttaatttaaattaataaa

SEQ ID NO: 57709 - DNA, 509 bp, Heterodera glycines
atgtcctcccgttggtcagttatttctgaagaaaactcatcaaattcaagcagtacaactacagattacccaccgtccatcccgggtacggtaaaccggtggagagaatactgtaaagagtggtattcgtacatctcactaaatcaattattttatttgtaaataaatttttatttttttcaaaactaagtaaaaaaataaaatattttatttatttttaatatatcaatttaaatattccatttattttacttttaaaaaatgaaattaattaatatatgtcttttttattataaatatttaaattgatttattttttagaactttctccgcagtgccggcgcttttccccgccgacttccgccgccggcaccgaattgaccaaaaagggcggaccacagacgacaacggcggatggaacgcagcgcgaaaacaccaaaatttcaccgggttagcaaatgaagctgaacagcaaagttttctaataatagtcattggataaaaataaa

SEQ ID NO: 57710 - DNA, 747 bp, Heterodera glycines
gtgtgacatgtgaaaagggacggaaaaagaaccgatcgaaggcccttcccttttcagatcacacgcatcgaagccatgggaattgcactatcgctggtcggtttttggtttgttgatcagaggcagccccataatcagcagaaaaattcggacgaggcctgggaaaatacggcatttcgttcaaattagtgatactttttgtccgctttccccccgcccattcccttcccttttgtcccaattgacaaatggccttttgattttgaggactgagggtgtgctcgaggagttcttccgccaaggcgacttggaagtgcgtttcattcggcccacattttttcccgtggtaattagctaattaacggtttcccaaaaggcgtccatgggtcttccctattcgcccctttgcgaccggcacaccgttcacgtggcagactcgcaaatcggcttcatcgacttcattgtcgaggtctgttccgccgacaccgccgccgtttcaattcgatccgctaattagcgctaatgatgacatttgttgtacagccgacaatggtcgtctgcggcgaaatgctggtcaaaatggtggagccgctggtgtccctgccgaccaccgattcgctgtttcccccgggcgcccaccgcggcggccccgacgacggaagtgcgtccgccacttcgctgtcgccgttgccgcccgatctgtacgcttcgtcttttccgacgattccgggaagatagacactccat

SEQ ID NO: 57711 - DNA, 94 bp, Heterodera glycines
atggcaaaggaaagggagggcactcgagtaggcgcggacagggagggcactcgcacagacagagagcagcgaaggccgggtgcagtgaaaggcg

SEQ ID NO: 57712 - DNA, 219 bp, Heterodera glycines
ccaagtttgaggtcgacacaataaacatactcttattaaaattgtgcccaacttggtctatttgcctggacgaaaaccggcacgactcatcgctctccgatcggtcccgaccccctacattcccccgaacggctactctgcgcgcctcgcccatttcatccccttcccgtccccttcaccccgcagagttcgacgcaaatttcttgtcgccacgacatt

SEQ ID NO: 57713 - DNA, 1423 bp, Heterodera glycines
agtctgaacccggatcatgatgagcctgctaaaatagacgaggtgttggacaattattcgaagcatgtgcttggccagcagcccgagaagggcaagcagtccacggacagccgctccatgatgaacaccttcttcatgtacttcgaaatgaatgtttacgccaagctgaaggagggcaagggaaaagagaggaaaaaggtaagaaacatagggaagtttatttatttccttttgcactttacccttcattttaagaaacttcggctgcacatgttacaatttgtggtactgaacaacgtatttgagggaatcgacgagcaaactctgctcaagttcgacatcaaaggcactttcgcgccgggcagtgccgtgcagcacgaccagaagcagaagtggtacacaggagagacgggttggcagaagagtttgtaccgcgagtacgacttcatcggcatctcccgcgaagggagagagatttccgcctttttcccggagggcattcagctgcatcctgaagcgtatagacaattggccgacggagtgaagaacgacacgagcgtaagcattagagtggagaccgcattgacaaactatattaatctcaaatagctaacagaaactcccatttacagtaccttaccgagaacggagtcaatgactacagtctgctgttgggtgtccaattcatggacccatacccagactcaccaaaagacagaaaagacttcgagggaacaaaaaagggcgcaaagtgtgtggaagcaaaatgccataattgcaaacgatggcctgatgcagaatacgaagagaaggcgaccctttgtctgtacatgggaatcattgacattgtgacgccgtccaacgaaaaggcggagaagcatttctttgaaatgatgtatcgaaggaaagacatagcagattttatacactacaaacgcatgagcgagttcatcccctaccacaatgttggcttttctaaatcaaagggtgcccgttgtgacagcttcccgcctcccccccccccactttgcactttgtgcgtctgccatcagctggatgagatttctgtaaagcatcctattcctagaccgccattatttttggaaaagggaacttgtgggaaaaaacctcgttttaactgaagggtttgttaaggaactcttgtaaatccgtaatgcaaattttgtttggaccgaaagtatttataatggcatttttaccttctcaggaaattgtgacgccagtgccgccccaaatgtatggaaaacgctttgttggcactgtgctcggctgcttgttcagccccgagtcttcaacatcggtgggtggagaatcggaacgccaatttcaattgggcatgaggcaaagcatttgtaaaacattcggcgagaaacggggaatcaagacaaaccatggaattgag

SEQ ID NO: 57714 - DNA, 74 bp, Heterodera glycines
atgcttttgctttatttccgcatttcaagtgattacgcattttttgaaagatgcacatcgcgaattgctgaaca

SEQ ID NO: 57715 - DNA, 537 bp, Heterodera glycines
atgttactacaaaaagggcaaagttagtcaaagttgaattaattataattaggccaaaccatttttcatcaaaatgaatgtcgtctcatgaccctataataacgaaaatatcaaattacagtatcttagttatttttgtaaaaaatacggaataaataacatattacagtgtattagttttttttactgtgcaattgagacattttcttacagtatcttagtttgttgtaacgataatgtacatctctttttccgataaaattctttttatctatgattgatactattttaggtaaacattgtcacccaatttgtgccatttgcattgtatccgtctccattccctcgcactatttgttgtgtccgagaacaacagatatgaataaaacaaatatttatttgaagcacaaatataataataaaatggtcaaggcgatgggaattgcaatgggaggaataaatgacagaatgaacgagggagggaggaaagacagcgcttatatgagggaaggaattgtgcctaagggaaatcagtga

SEQ ID NO: 57716 - DNA, 1884 bp, Heterodera glycines
atggatgcatttggattgttggatggcatcaaagccaaaatcaactctccgataaatctttgcagcgcaagggaagaattgagaggcaaaacacatgccccaatcaaatccaacaaagttgccggcaaacgaaacaaggacgccgagaaagaaatcaatcagctaaagcaggagtacaccaatgtttttaaaactgaattgggactctgcaaaaaggtcaaagcgcacttagaattgaacgccgacgcacggccaatatacagaaaggcccgtccggtcccgtacaacgccaaagaagcagttgacagagaattggatcgttgggagaaaatgggagtcatcggcaaagttgagcacacagaatgggcagcaccgattttggtcgtcaaaaaggccgatggtagcgctcgactgtgcatcgactattcaaccggactcaacaatgcgctaaaagaccaccagcacccgttaccattaccggaagacatatttgccaccttaaatggaggccagtatttttcacaaattgatctccgggatgcgtatcttcaagtggagctggacgaagcatcaaaaaagctgtgtgtcattgccacccatagaggaaattatgaagtcaaaagacttccatttggcataaaaacagctcctggcattttccaatcgataatggaccaaatgttggcagattttgacttcgcgacagcctacctagacgacatcatcatcgtcagcaaggaccaaaaaaaacattctgaacatttgaaaaagatgttctcgcgatttcaagaatggggaattcgcgtcaaacgggaaaaatgttcgtttttccaagatgaaattaaatatctcggacaaataatcgacaaaaacggacgcagacccgaccccagcaaaatcaccgccatcaatgagatgccagaaccgacggatgtctcttcacttcggtcatatttgggaatggtaaaccattaccaacaattcattaaaaacatgcgcttcgtcagaaagccgcttgatgatttgctaaaaaggacaccgaatggaattggagcgacaaatgcaaaaaggcatttgacaaaatcaaagaaattttgtcatccaaattgctgctcacgcactatgaccctcaaaaagagatcgtagtagcagcagatgcttctgatcagggaattggagcagtgatttcgcacaaattcccggacggaacgatgaaagccattgcgcatgtatcttccgctttaactcctgccgagaagaactactcacaaattgagaaggaagcactagcaataatttttgcagtgcagaaatttcacaaaatgatctatggacgtaaatttacgctcctaactgatcataagcctcttctcgccatcttcggcaacaaaaaaggagtgcggcaatgcagttccaatccgatggtcactcattctcttggcatacgactttaacattgaatatgtcaataccaacgacttcggccaagctgatgcactttcacggctaattgccaaaggaaaagatgcggaagaccgcgtcatcgcaaatacttcggtcgattcggatgtagaatcgattttcattggaaccgtcgagaagcttcccatcaaattcgatgacattgtccagtcgtcaaaaagtgatcagaacatcaaaaaggtcatgaaatttattagaaatggctggccacaaaatattggcaacgaaaatgtggaaatcagaattttccaccaaaggaaggaacaactcagcatcaccaaagattgtttgatgtatgctgaaagagttgtgattccaacgcaacaccgagccaaaattctgcaactgctccacaaaggacatcctggaatgaaaaggatgaagcagttggctcgtgaataa

SEQ ID NO: 57717 - DNA, 760 bp, Heterodera glycines
atggacatgtcaaatgccgttacgacaatctttcccggatgccagatccggttttgcttttttaattttgtacggaacttacaaaaggaagtgaagcagcaaggcttatggcaggtaattttctcccctttatttaaaaattttttttttcaaaatttaagcgttattgttctgatccggtgtttgctttgaatgttcggatgctcacatcagtcgcattcgttccgctttgtgatgtcaggaatgcagtgacagcacttgacatggaatttggaaatttggcggcttttcgacctctcattgattggtcagaaaataaaattttcaattttagaataagtttttaggcttttggacaattatgttgggcgtcctcgtcccaatggcacatggtcacaaccattgttccgtccggagcagtggaacgtctaccaacgaacattggatggaaatgcgaggacgaacaataacgcagaagcggaacaccaccgtttgcagggcgcgttcaattgtcgtcatccatcgttgtggaatttcattgatgttcttcgacgtgaacagaaaattgccgaccacaaatacaattctgcgatcgctggattgtcacctgataaaaagcgaggcaaatatttggcagctgatagaagaattctgaatatggttcgcaattacattccattgaatgcagtgaatgatcatgattatcttccacccattccccagcccaatcaatttcacactattttggaatttcttcgag

SEQ ID NO: 57718 - DNA, 435 bp, Heterodera glycines
atggcaaaattttgggcttttttatgccataaatcccaaatattttggctatcttttttagttgataaaaatcgcatcgatgataatgatccgtgtgacgtgcactaccatggcatagacaaattcaaatatttggacgatttttttgcacattggcaagccgatgcccaaattcaccacattgatttgtttatgggcaaggcatatttgaattatttcctttggcacaacgccaacgaaacatggacaagtgatgagaaaaatgtgttaaagaaattcagcattcagctgcaaaaagtggcaaaaaagttgaacacacgttcacagtttgccatgactgtactgccagagctttacgaattttgttgcccaacagatttggccaatgacgacgacttggaaaattgtattggccatgaagtggccaaccccacg

SEQ ID NO: 57719 - DNA, 1102 bp, Heterodera glycines
atgattctccgatttagactcaaaaattacgtattaattggtgacttggaaaaagcatttttacgagttggattaaatgaattagacagagacacaacacgatttttatgggtaaacaaatcatacttgaatgaaataagacaaaattatcgagaaattgaaatgagagacatcgaattgagacgattcacacggataccatttggagttaacgcttcaccatttttattaactgctgtagttaatctccacttgtcaaagataaatgaaatgtttgaaaaattcaagacaattcaagttaataaggaattatgtctaaatgataaagaagaagaatttaaaaatctttgcatagaacttaaacaaaatgcatatgttgataatttcgtaatgatgtgcgacgatgaaaaggaaataaaattcaaacattattggagcaaagaaatatttaaacttgcatcaatgaatctgagagaatttgtgtctaatcatgaacaaagtaataaagaaattcaaaaattggaaggatcagagataccaaaagtaacaaaaatgttgggtataaaatggaatgtcgattcagatgaacttgaactccaaataaaaattccactaatgagtaaagacacaacaaaaagacaaattttaacgatgattgccaaaaatttcgatccaatgggatggatttcaccagtaatactgaaatataaactatttttccaaaaactatggcgatctaacaaagattgggacgataaattagatgatcaagaaattattgaatggaataatatttcaaacaccgaaatgatagccataccacgttcacctttcacaagccaatatttaaaacattcaatattacacattttcgctgacgcttctgagttggcttatgccacatcagcttatttacatacaaacgatcaaataaatttattgttcgcaaaaacaagacttactccacttaaaggcttaacaattcctaaactcgaattattaggtttattgatagccgcaagagccgccaaatttataaaaagggaatcaaaattgaatctcgaaaatacctatatttggtcagactcaaaatgtgtactca

SEQ ID NO: 57720 - DNA, 736 bp, Heterodera glycines
atgtgcgcaagactatgcgaagcattgtgggcacaattccagcagtggagagccagcacaaaagtgtgtgtgtgcaaaaaaaaaattaaattttaaattatttttaaatgattgaaatagtgcgccattgccactatagtgctgctggtcgagactgcaaatctctaccgagaattctacttttttttgccctgaccctcaaactgatcagaaaaaatcgatcaaagaattccgtcgatataatattttaatttgataaattttttctgttcagttttgtgatcagagaaaaaaaacccccgaaaattcacaatagaaaatcggccagcttccatcaaaacgcttcacgcatttttaaaatttccgatgctccataaagtcatttgcttttgccaatttaacattttgtcaggtgctgacaggaggcggtggaagaaaggaatcggcgggcagtatggcggcaccaccgcccgtcgtcgagctggtcactggcagcagcagcataaagcagcaaccggcgccgccgcttggaagcagtgctcggctacggaaagtgtccggtgaacggaggccaccgccgagcggagaaagcggcggcggcggattggttttagctgcttcatccccattggcaggcaaaaccgtaggaggaggcggaggaggagggccaattgttggcacaattggagcaacaaaaagcccaatgtttggcgacatgcggccacattatgtgtga

SEQ ID NO: 57721 - DNA, 744 bp, Heterodera glycines
tcaaagaagagtgaggacatgatcgaggcttttgatcgggtgttcgacaagtcgaagattatcccgatgaaaatatatagcgacagtggactcgagtttcaggcgggaaaaatgaaaaaatattttgaggaaaaattcatcatcaaaaatgtaatgtatagccccgacctccacgccggagtcgttgaaagggcaaatagaacaataaaggagcgtttgtacagatattttacaaaaacgaacactctacgatgggtcgacgtaatagacaaaataataacaaatattaacaacagtgtgaataggacactgggagtcaaaacatcttcaattaattttgaaaatgcccgtgcgctctgggaaaaattatataaggctagggaatttaaaattttaaaaaagaaaaaatttaaaatcggtgatatcgttcgtattaccaaggaaaagggaaaattttcaaagggatacctcccaaactttaccgaagaattgtttaaaatcgttgttgccaatccgacgacacccgattcatacaggatcgaagatttggaaggaaatttaataaaaggcatattttataaccaggaattagtgaaaacagatggatgatttttacattgtactaccttcgaacacaccggggcaggagaacactacgtcaaaattcacagtacgactccccgagactctggaattgggcacaaattggtcagtagctctctcatcaattatttacccctactc

SEQ ID NO: 57722 - DNA, 322 bp, Heterodera glycines
atggtcattttcgagctaggtattttgatggctgacttaaagaaaatgaaaagagatatagaggtagagaaaacaagagtaaatagagaaaaattaggactataagaatataatacagctccaacttcgtgtatcgagttggagtagtacaagctcagggttaatatagatcaggtttaaaggcatattcggattttactgatctaaaatttacagaatcaggtttagtattgatcataaaaaattcgagaaaaattattggaccaattttcaactttggcatggtcgggaaaaaattctgaaaaattgacaagcaaataaa

SEQ ID NO: 57723 - DNA, 554 bp, Heterodera glycines
atgacagcagcgcgaagtctggtcaacgcgataatagaaggcgagccaaaagaagaaattcgcttatttgtggccaaaaaggcagattttgtggcgaccggacagtacccaacggaggaagatcaaaagaagtctttggaatgtttcttcaaaaagtgtttggtggccagacgcgccttggaggaaagcaaatttgagaagattggcatgacggcgcccgctggactcaaccacttggccgaatcagagaagaaaaagtgggaagaagcgtccaaggaaacgccatgggcgttagaacaattgagggcaaaaatcgtgcacaaggcctcaaaactgatggcacaccctcgtgtcataatcggtgatcagtctgctcaccaattggcggaaatcctggaccaaacggcagtgattgggcccaaaaacggaacattggcggaaacagtgcgcactctgaagccagtggtactgtcgagcaaagtgaaggcagctctgatcattgccggacgcgactctcttctgagaggagaaactgtcgaaatgatgatggaaca

SEQ ID NO: 57724 - DNA, 398 bp, Heterodera glycines
gagttgccgaatcggaaaagttcgtgaattgatcgccctttttccgtcacccagacgggaatgaaggggtttaggctcctcattggtccaagacgtgcgaccagttcttcgtattcatcgtgcttgtcatggacataaggcgggcatatccagaagaacttcacgtgtgcaaaacgacggcacagattcgcgatcatttcgtactgttccatcatcatttcgacagtttctcctctcagaagagagtcgcgtccggcaatgatcagagctgccttcactttgctcgacagtaccactggcttcagagtgcgcactgtttccgccaatgttccgtttttgggcccaatcactgccgtttggtccaggatttccgccaattggtgagcagactgatcacc

SEQ ID NO: 57725 - DNA, 2014 bp, Heterodera glycines
ttaccccaacagcagaaatctctttctgtcacttcaccaccaattgacaaattcgcgaaggaagggacagaatgcaattggcgatttccttcaacatgcgccacatgaacttaccgatggcatgctccaattgagcggagaatcgtcagaaatgctgatggcaacgactctgttgggactgagcgaacagatcaaagaggaggagggcgatgggacaatgttagaagaaaagatactgaccgacgacaaacacacttttggtgagcagtgcaaaagcattcaacatttcgaaatgctgaattatccgttgtgccatttccccaattactcttgtgctttagccactttgggtcacaaaagacggcaccaccacggccagcagtcctccgttggtgccgcttgctcttccacccaatcctccgccccttcttcaagtcaatcggaacaggctgattcaacactccatccggaagagcggaaacgcattttgcatttgcatgcggaaaagaatcgccgttttgcgctgaaggaaggcttcgagtcgcttgtgaatgccattccggtagttgagcagacgggcgttaaatgcaccaatgcggtggtgctgaacagggcggcacagcacatcaaacaattgaagagcgaacaggatcagcagcagatgaagttgagggtgttgcgggagaagattaccaacatgaacgaacgaatcgcgtgagttaggagtggaagagggggggatgaaccgatgcaccccaaaactccgccgccgaaactccgcctggcaaaaaatttcacttacaaattttcaagaaaaaatcttaggaaaattttttcttaaattcggagataaaaatattttctaaaaattttccagcgattttttttggaaaacagtttttcatcatcaagttttgaaaaaatcgctagaaatttttttaaaattacttttttcttcgaattttctaagaaaaatttttcgaatatatcgaagtttgaaaaaaaattaaaatttttttggcgaagtttcggccggcggagttttgtcctgctccgtggatgaacgtggtggaccgagcaacaaacactcccatcgttttagcctaatccagtccaatttgccttcctcatcaaccggtggttcacggccttgtgaagctcagactcccagcatgcgcattcaagtggaacaattcttcgaacattacaaaaaggaacgttcccgtgaagattaccgcttttggctggtgagtcgtgattaaaaaagggggcggggagtcggagacaaaaaaaacacgaaggggtaacgatttttttgctcttcattgttaagttttttggccaaattttgtccaacaaaagcgagtgaattccttcagatgggtgaggtgctcaagcctattgtgcattcgtttgccgaacaaattcacccggacgcgtctgaccatgaccgtgttttgcattcgttgaagaaatggctggacacccattggaatgcggcggtgcttcgtcccatcgcttccgatgtgttggtccgattggcgaccgcaagcgcagcattcactgacgaagcggcgctgagcaattatataatgaatgaagtgcgcaacgcatcctccgctcagtgacacgatgccgcttttgaatgaatgtcagcactttgggatgcccggttctttttgaggttgcccttctccttctctggcgatgtgccctccccatccattttgttgcgactattcctattttttttcattattttgtacattctctgctcccccacttttccatcccttctctcccttgataacatatctttcgtttcttttccttgtcacctcattgcccttcgttgaattgctggtcaattctctgcaaccttttttctacacatatttcttattattttttgctcaatcagaataggccatcacagaaatgtgtcaaatatatatttttaattaatcagagaaatatttgtcagagttttaccatatttttaataaatggctaa

SEQ ID NO: 57726 - DNA, 1360 bp, Heterodera glycines
atgccttccaaatgtccttcgtttggccaggctgaaaagcggttggagcgtacgcactgcgaacgcccgctcgccgacgacctcaaaacagacgctgatcaacgggggcatatccgaggcggagcaggcgcacattcagaaggtgctcgaaagggcggaggccgggcgccagaacgaacagcagcgcatatggtgggccaattcaaaaggcattcccaactgagtccctccagcaaaatgatcgaacggttggaacggctgagggcacgcgctacgggcaacggcgtcacgcaatgccttttgtgccaaaccgaattcggactgttggcggcaaaaagttacgctgcgatgtgctcggactgccgaaaggtgccaatgggaaaagccgcttaaactcaatccgacccgttcagtacgtatgccaaaggaattgcggcgttgaaacattcgatcagaagcgtcgtgagcccatttttctgtgcaaaatctgctcagagtaccgggaggttgtaagtgcctttcgcttgtctcttttcgcctctgttcttcgtctgatcgtttgttcgttcattttgctcagatgtggaagaagtcgggtgcctggttctaccgcgaggttccgctgcccctcggctcctcacggccctcctccgccatggccgggtccatcgcaatgatggccaacggcgggcagtcctcctatctgccgctcagcccatccgcacggtccaacccccccttgggcagccaaaccggaccaatgcaacggaggcacttcgaatttggggccgggaacgacccctgcagcggagcagaaaacattcgaatgcattccgctggagagggcaatcagcaaaggacggagggcaggacggaacagcacccgcagcagaagaggaacagcaacagggcaccagtgccaatcccagcggaacatcagcaaaggtcgaaaaagccgggggggggagaagcgaagggaccaatggcaatggcaggctgaagacgaccccgcgaccgcgcatcatcccttcttgggtccacgaaggccttcagcagtccagcgtcagtgtggacgacgactcggacggcgagtcggcttcctcgtccacttcctcgtctttggaacccgcacagttccgcaagtcgttggtcgcggctaaagagcgtgcgctttcggtaaaacagcacgcggctgctcatcccctcggggcaaacgccggcggatttgcgagtggattaaggacaaacaaagcgaagccgaagagcaaaggcaacgccacggaggctttgggacatcagcagggcatccaaaagatgcagagagttgcactgggaagagtcggacgaatgtcggacacag

SEQ ID NO: 57727 - DNA, 951 bp, Heterodera glycines
atgttcgaaattaaaacgggcggaaagggcggcgaagcggcggccgcgcgattggccaacatggtaaagtgggcatttgacaattggaaagtgccaattgaaaaggccctcaaaataaagtgccggggattaaatcggtggcaaaatttcagaaataagggcaattccccctaaataggggcaaaatcggcacctgatgttttaattggcagtaatcgaccctaattgacccttaaacatgcaatttccgtctccaggcaatccagcgtcgccagttggagaagcgtgacacgctcggcgactattggtcgcgccgtttgcacgacatggcgttgcgggacgacccggtggacgagcgggcggaaggcattggcggacgactcggcggcagcggtggtggtgccacctcgccccaggcgccgaccactggcggcgtcgccaaaacggcggcgacgtcgaacgcaagcaaaagcggcggcacttcgtcaacacgcggcggaagcagcagcagcaaagagaatgcaccgcgcgcggagagtgcaggggcatcagccaaagcgaaggtagtacatagggcagagaaaaagagggcatagcgggaaaaggaaacgccgcgttcactccatatgataaaatttagtccaaagaaaagaccgcgcgggatgtgccacaatcggcgtacgcgcgaggggcgcgtgacgaatttgtggagacgccatcgacgggatgctgtaaggaaaatgcatcaaattggaatttttataaaatgacccgtcaatttgtctctgaattttagtgccaaattcacacaatttttcaatttttccgcatttaggcacatgccaacgcggaccgcccggtcgtacgggtccgccgggccgtgacggattgcgtggaatagacggagagccaggacgtagggatttcaaaattgaaaaatctaatgtttaa

SEQ ID NO: 57728 - DNA, 697 bp, Heterodera glycines
atgcttctcacttttcctttctgtcttctgttgatttttgctaaatcattcaattgccaaatgcaaaatttcaattgttttgcccaaaatgggcccaatcgccgcctctctcccgcccaattagcagacacagccttttggcatgagcaattccaaaagattgagctcaatagcgcggacttcaaattgaaagagtttatttgcgagttgagccaaaagcagcgaatatttgaggcagtttttggaacattgccaagagtaagttaaccgcttaattaattaattaactaatgagtccaccaccattaattaggcccttgttcctccttccatggatgatgaatttgaatttatcaaaagtagaagagaaatgcttgtccacaatgatcccgctttgagtgaagtgctcaatggtttatttgtcactgcaatgaatgccaaacagaaattgcaattatttccgggtgaataaataacacttttaattaattaccattattaatttgtttcctttttcgatgttgacgcttttctgcttgtcaaaacgatgcgaaagcatctgagttttgtgcttctgttcttggccaaacgttaccgaattcggctgagtgatccgaaagagcgaattgttttgacggaacaaagtctaaaggactttttagaagaatcattccaattaataagccaagtaattaaa

SEQ ID NO: 57729 - DNA, 1164 bp, Heterodera glycines
  unsure (1)..(1164): unsure at all n locations
atgtttttcactggcattgaccgactaatcggaattgctttttcggaaatgtaanaaaaaatttttactaatttaatttttaattactaattttagtcacgactttttaaaaacgcgactgtatttggcaatgactactgtcatttccttgtcatatggattccttttctctgttgtgagttaccaagaagcaaaacaggacggcgatctaatggtcactggttcatacatagatgtcttaagggtaataattaatattgtttcgttctgattagagttgagcgggaccggggcgggaaatcccggttttttcaggtcccgaatttttaacaaaaattttcataattttttgtaaacaaccaaagaccaggtttcaaaaaagattcaatataattttttttttaattttggcgtttttgttaatagaggacactcaaatctatcgaacaataccaagaattgtttaaattagttgcttaggaaaaaattatggcaacttttttgtcggatattttaactgtgttatatttttcagatcattcctctgtttgttacaataagtaacttgtttactataatgacttttgccatttatatctttcttggcattacaatacgtataaaagcatcaggtaaaacatattaaatatgatacaccgccggtattttatttttatcaaaatttttgtgcttttttactggtgttttttgatcctgcgattcaacctaataaatggtaattaaaataaaaaatataggcttgccgtccgctgattcgtttaatcgtcgcacttttcgtgcccttttttgcattatcactgtgaatatcggcggctatttaatctcagcaattacttactttctgctaattccaattgcttctccggtcactctttggtttttcgctttaatggccgcaattcctatgaacattggcgcagtgtcaaacggacccattttatattttacgaggtgtcattttaattaaaaatgttttaataattatttttaaagtttagtacggagtatcggcaggcatttcaaaaggaatttccatttgtgttcaaacaaactcccaaccaaaatcaagtcgtacctcggcaaaatgggccacctattcgtgtaatctcacaatcaagaataattgacagtagtaaaccataa

SEQ ID NO: 57730 - DNA, 48 bp, Heterodera glycines
atggccactttgatgaagcaattcaaaaagggaacaaagtgccaaaag

SEQ ID NO: 57731 - DNA, 3341 bp, Heterodera glycines
atgttatggttaattacgactatcgttttcgcttctgctgtgcttgtctatatattctacccacgaaatggacaaggtaattaatgaacaaattattaagaaaaaacatgattatatttttacataaaaagtaacttttggtttggttatatcaaggaaaagctcatggttatttattaactgttcatgtttgttttcaggtgtttcttcaactccccccgaaacggagtctgttgatgatgcacagaattcgcttgacagtaacaaatccaaagataatgtttttaaggtactttcgctgaatgaatcttcaattatctaatgaccactggccttattttcagagcatttattcgtctttcgttaggggaaagtccacaagtttggctgacattccgcaaatgctgcagcgacgccattcgacggtggacgattcgcacatcccatcacaagttgccaatgtggctaaaaggtgacttcatttcctcgggttttttgattcaattcgtctttattacaattttattttaaagtcaacttccaaaaattcaattttttcgaaattttttgattgttttaattaagagactcacaatcagccaaataaaataccaattatgcataattgtagggctatttttggttatcttatagcacattcagatttgtttaaaaatatttaggctgtgtaatgcctcatgaaatttaagtgggtttagtaagattttggccacttaacggggccataactttgtgaagtcaaagtgaaaaccctaatcaattcgtcaaaattgggctaatataagagaataaaatggtacattctcattaaaatcgctttatttaaatgaccgagaaatctaatttcaaacactgtcaataaatgatccatttctttaagcctttttcgcaacagtgcaatgtatcgacgtcaaaaatctgttggaggaaatcgagaagcacttcccaagccaccgaacgaattttttgaaccgattcctatgccagaaatcccggtttttgttcatttacatatgtgaatctctaaagcacttaaggatgaccgttttaaacctctcacttttctccgtcaaaatctccggtaggcagggaaaattaagccatgaccttttcaataatacatttaatttactattatttcattttattcgttcattttttagaattctcggattcccttcaaactgtgatatcaaccagaaggacatccaagtgttcataatcgaaccgaacgaagttattgtgaagccgggggatccgggttggttttttgtaccagattatgttacctttttaagaagtaccaataaacaaaaagactcgctaatacatatttctccaatacttaacttattgtgagtcggagttttttttaactttgattgtttcaaatgtttagatgatgcaatttttgtcactttggaaggttgtctgtccgttttcatcacggtaattaaacggcattttttgttggtttttccccatggactatttgcattgttgtatgaattgtatcagatgtttatttattttttcaattttaagccacctgatgccaacgataagccaattcatgtgcgacggattgagcccggtgacttcttcttcagttcgctttctcttattgacattttcatggtttgtcctctcccccctccgtcccttcactttttcctttagggtaatccttctaccttgaaaacagtgactttacgcgcggacgttcggacacgtttggccaagtattcgctgctcaatttctacaacttttatataaatgagccgaatgtgtctgcgtgggttcgtccggttcagataatcgccactcgacttttgcacgttgtgctgaccacgcttcatcagcagatgggccttggggaggaacttattaacaaagttggacagttgcaataattagttgggtttgtcgccattttcagcgcttaaatccgccaacagaacgaagcaaagagaaacatcgcgggcagtctttgcgagcgctgaactcgttgacaaaacccaagctaaaacgaatgtcgacggaagttgagcagccaaaggcagagcagaaaatggcactcgctgttagctatttcagcgaagcattgcgtctttcagaaagcgatgccaatgatttgattcgaccttttctcaaaataattcatttggaagagaatcagtcgttgttcgaggagggcagttctgaaaatcagcccgcattggccattatcgtgtcgggcgttctgaagctcactcaacagccccgcttctcgacatttgaagacagcggccaggaaatatggactgctttcatccatcccaaagaacttgtcggaggccttcaggttggggctcattcactgattgttttggagttcaattaaacattttcgaattgaacatagatactgacggatgaaccggctttctacactgtgaagggtgcttgtcattgtgtggttgctttgctcgagaaaagtgatgtcgaccgtctgattgagcaaaggccttcctccgtccttccaattgcttactcagttttgctccgactttccccctttgttcgtgctgttgattttgcgctcggctggttattgttggattctggtgaagcagtttataggtcctcttctatttttgtgttcatttgcaatcgattgatccgttccattctcttttaggcagggcgacttctctgaatccttttttatggttctcagcggacgacttcgttccgtgtcccacaaagttgcaattgaagagttcggaaaaggtgacgtgttggggctcgttgatgtgttgcaacataatccaagagcaacgacgggtaagtcgcatggaaatcattgaaactctcgcaaactgagtgtttggcgtagtgttggctgttcggttttcgcaacttgcccgcatccccgagggacttttgaactttgtgaagatgcaggtcggtgcagtttctcgacacataatctcttatccttctatttacagtacccacaagtcggtttccgtctcgttcgcttgcttggccaatattacgctggtcggagtcatttcccgctgatcagtcacccatcgtctgacccactgacccaaagagtttttcgtcttattgatcagtaatttcatatttttcccgttagaaccttcacacaattgccgttttccccgcttccatggacattcccttggttgcttttacctgtgaactttaccatgctttgagtgcgactacccgtgttcttcggcttagtagcacttcggtgatggaacggcttggcgttgactccgtcatggaaaggtatggacaaattaaa

SEQ ID NO: 57732 - DNA, 646 bp, Heterodera glycines
atgacggacccagcggtattttaagattatttagttacgactacactcatagaatttagaatttgttggacgagcgtcaacagcaagcccagcaaactttggcaggtcttcgtcgcgattatgaagaattggatcacacctttgtcgtatatgaaaaggaatttgaaactagggtaaattatttgattcttaagcatgcttcgcttcccaaaaataattgtaacaaatttagataaatcgcaccaaaactgcttgggaagacgcagttcgttctcgctctaatgaaaatggtgagtgaatgttagagttaataatggacaagtagatccatttgagcctttaattcatttttttacagacaaacgtcagttgctcgagtcaattagggaccgtcttcaaaatgttttcgaaggtcaacaatatttattaaaaacaaaaatccagattatttaagaaaccctgaaacacaaggctgttattgagaaattagaggagcgcgacaaacggatgggcaatatgttggaaagcgtagacaatattgaaaatctcaggaagtgaaccgacatagaatgtatgtagtattcccccacttcttatcccgatatcaccattattgcctcgttcactcctgatctctctacagtca

SEQ ID NO: 57733 - DNA, 1314 bp, Heterodera glycines
gataggaaaaagcaaacgcatttgcgctgtgaaaggtgaatacgaacaaaatttcaagtttgttaatgttaatacttttggtttcagacagaggagagaagcaattaatgtgtgagatattcaagactttctttaaattttaattttagagcggttacaacgaactaaaggaccttttgccagcttctgcctctttcattgggtgtaggttccttctaaatcccttcattctttgtatttgaatattccaaggcaaaaccaccaacgctgccatcctctttaggtattaatccttttcataaaataggtaaattccccttcccattttccctctcagagctgccgattatgtaaaggctcttgaaacatccatggagcaaaacgctgaagaattggcaaagttacaaacgcaatattcggcattggaaatgattttgcagcaatacgaaaatttttcgttgaattcacagccctgctcggctttgcaacttcagattgtaacaattttagtcaaaccgaaaatgttattctttcaaacattaagcttcaacactttctcgacacctgcttcgactctttcacctcgagagttgacctttcaaattaccaggccctcactcggtcgttgctctcctgggttgaatgtcttgaataccaagtatttttactttttaggcttcatttaactgatcttttttagggaacatcggatgtacttctgaacaaactctacaaaaatcattgatgaatgttgggctcacaagataacaccaaatatttccgcgttttattgtagagggataagtataattttaccaataattattcacgtaatatacatttattacggataagttttatgctttattgactgtagagagatcaggagtgaacgaggcaataatggtgatatcgggataagaagtgggggaatactacatacattctatgtcggttcacttcctgagattttcaatattgtctacgctttccaacatattgcccatccgtttgtcgcgctcctctaatttctcaataacagccttgtgtttcagggtttcttaaataatctggatttttgtttttaataaatattgttgaccttcgaaaacattttgaagacggtccctaattgactcgagcaactgacgtttgtctgtaaaaaaatgaattaaaggctcaaatggatctacttgtccattattaactctaacattcactcaccattttcattagagcgagaacgaactgcgtcttcccaagcagttttggtgcgatttatctaaatttgttacaattatttttgggaagcga

SEQ ID NO: 57734 - DNA, 1185 bp, Heterodera glycines
ttcccgggtttgacccaatttttatgggaaaaatgtggaaagtcaggcctttccctggttttccaaggccctggggacatgtacgacgttggcatgggccatggcgctaatttctctgtgaacgttccgctgagggaagggatggacgacgaaagttaccacagcggtaattgcaaatttatttatcaaaattggcaatttctaaaatttggcattttcagtttttaagcccgtcatacaggccgtcgtggacaatttcaatccttcggtgattgttctccaatgtggcgctgattcgttgggctccgatcggcttggctgttttaacctcagctttgacggccacgggtatgtttagaatggcacaaaagggggagagagagagagaaaggagagagtggttgagaaaaagtctatggccaaaccatttgggcaatttgccttggaatactcttccaaattcattccctcagggaatgcgtccgtttcgtcaagtccctcggccttcccctgcttatcctcggcgggggcggctacacactgcgcaacgtggcgaggtaaaaatacacaaaggaaaaaagaggagcacaatattaaaagtggggtaatttggtgtgaagatgctgggccaacgagaccgccattctcgtggaaagagactcggagatcagcaacgaaatcccggacaattcggaatacttggagtattttgcacccgaattcactcttcgtcccgaactgcccaaacgcatagaaaatgccaatagcaaagaagtgagggatttatgttggaaatgtaaaaaacgttctgctaattggacatttccctttttgataatgggtggaagggggaggaatgtattaaaagagggatttgtaactaattttgggtcaattagcgtctgttttaaattacagccattttattcacaatacttaaacacaaagattactatcttagtaatgttctgaatgtaaattataaaacaattaattcgcagtttctttttagtatttggctgccatcaaagcagaagtgttagaaaacatcaaattggtgcggggtgcgccctcggttcagctgcaacctgtccctggcgatgccttcgatttgcatgacatcgactcgaggagaagagaacggcgcgaaaatggcacggatttccgttcgatttgatcactttt

SEQ ID NO: 57735 - DNA, 93 bp, Heterodera glycines
ggccaacagacccacaaaaacacctcttgcacatctatgttcgagaagcgttgtttcaagattaagtcgcgagatatgtcattaggagattac

SEQ ID NO: 57736 - DNA, 646 bp, Heterodera glycines
atggtcatcagcacaacaacgacaacaatgacaacgaattgcttgacagagcggaggtaccaacggaattggcacgacaatcaaagggaacggcaaaaacagcagagggaaagacaacgcaccgggaaagtgccaacggcggcggcacttttggacagtgccaatggtcggcgtacttttgctgcttctgccggtgcggcaggtcgaatcatttgcatgcaaaggatgcacgccgcccatgcgtatgcccaggcgaaaagggcgaaagggtaagtcaacgagacaaatattaagagaaatgccaatgaagaacacagttaatgaccactaatgactcaattgtgtccgacacattcactttcgttcgttctctcaatttgatgttttcccttgtcacagggagaactcggcttttcgggccctcgcggctttgccggcacgccgggcactgacggacccgaaggacagccaggcgctcccggcatggttggcgcagaaggcgatttcggcgatatgggcccaaaaggaccacgtggagaccgaggactaccaggggcaccaggccgagagggcattcccggcttggacggattgccgggtttgcccggcgatatgggcccgcccggatgcaatggaacggacgtaa

SEQ ID NO: 57737 - DNA, 1751 bp, Heterodera glycines
atgcaaaagaaggtattaaatccgattaacttttaaatatgaatccgtttttaagctttattatgtgaatcaatcagcgacacttttgccttgtctttcatcaaaaattttcataaattaccaatagttgaggctaacgctgatcaaattcaaggaaagaatataatggattttgtaaaaagttatttaaataattatttgacgaaatctatcgaaaaagacgaaactggagaaaaccctatgaattcaaatagtgatttaattaagatgaagcttaatgcgttggttgataaagcaggagagcaatgccaaaaagttcgcaagaatcaatcaaaaaattttctgggaaaatttagtgcaaaaattggcaaaacatttcaaaaaagagagttaaaaaattcgaaaacaataaaaaatgaatttgatggtaattttattctgtgcatttaccattttttgtacacattttgccttgaacttatcaaaaatattgcaaatgatcagagcaacaaaatgaacagcgacgaattaagccaaattaagcaaatttatttaaatttatatggcaaatcatcaaaaaaggttataaaatattttaaaatgaattttgaagccggaaatgattttaaaaattcaattggaatttactcattaccaaaagaaaaggagatgaaaacggaaaattttggtaaatttaaatatttttaataaaaaatttaaaacttttagaggaaaatttatcagcgaatagtccatttgaaatgatttcaaaattatcagataaaactggtaaatacccgaaaaatattacgtcaaaagaaattacaaaggagagaaataaaatcacaaaatttgtaaagaaaagcattgccaatttaaattttggggaaataaaaaagattttgacactaaaatggtttgccaaaatatttgctaattttaaaaaggccaattttattatatttaccgatttaacaaagctgaaggacattttactaattgcattgagaaatgacaaatcaccagaagagagccaaaaaaaggttcatgatttttaaatttcattttcgatttaatcactttaaaagaaaaaagaacaattaaattatttaagattattaatttggccgacaatattttgttggcaatttcatccaatcacaaatgtcaaaaacgaataaatcaagcattaaatgaacgaaaatatggcaaaaatgacgacaaaatgattaaaaacgagccatttatctatatgaataaaatgatagaaattagaaaatgtaagttcttcttagtaaaaaaagtttgattaactagcaagtttttatataaactgaaaccgtcaaagaatttaaacctgaattctaaaaatttttacttttctaaaataatttaatagtttgggagaaaaaaggaccattctgaaaagccgataaaaagtggtaattatctaaaaaataaattaaagagtaattttttatcatttaaattcttgtgaattcaaaaagtttcgttcctttttagcttatcgccaaattggaccacgtgtaaaacgccaaattggcacagatattgttgcgctgatcggatactgtaacttttattttggcttggccgttctgttcattggcgcaccaattgtggctgccgtttttctgtccccggctctgttggcattgttttttatcaccggatgggttggcgttccggcggcaaaagtcttttttgaaaattgcattttgaacatttga

SEQ ID NO: 57738 - DNA, 435 bp, Heterodera glycines
  unsure (1)..(435): unsure at all n locations
atgtcctatccaatttttgtttngagagaggagatggtcgatgaagcaagaaggggtgcttcgcttcaacagcagaagtgagaggtcaaaagatgcttttattataaaggatgtgccgatgagattttgcccatccccgggggggaaattctttggccccgtctttccgcaagtccatctcggcattttaggacaacaaatatataaaattttgaaatacataaaaaaacaaatctattcattacagatttttttgccagcatgccgattatcaagggctaaaatccgtagatttgcgtatccatttttgggttattttaaaatcaatcaattagattaagcttactttaaaaaatagtgaaaatattaaaattttctgaggtgatgtccaaaattgttttcaacccaatgcatgcgagaagtaggccgaataaa

SEQ ID NO: 57739 - DNA, 954 bp, Heterodera glycines
atgccaaatgaatgctcttcaggatcgcctcagggctatttgtccgacgattttgaccaacagatgagtccatgctcggatgtttgtggccaatccagtccgctgtttgtccaacaggtggcgcttgcttggttgctaattgaaatgataaattattgcgaaatccggcttgcaatattttaattttgtaaaattcaacaattttctaatataaaatatggatacagtgggagtgggaaacatctgttgcaaatactaaattaaaatcttaaatttaagcatcagttcatattcaactccaacagacagtcaacgtccaatgatgtgttaaacaagtcgtctgacccgcaatcggtctttatgacaaataaataaatcatttttatatattttttataattttattttaccagatgatttatgaagcggcccgttttgacagcattatgaaggatttggccgattgtggggtacaaagacggcaacagcagcaacaacaacaaaatgttccgaagtcagtgcggttatggtggtggtggtggtggtggttgattggatacaatgtttttttcccgttggtgtgatcgaattcaatcgatccgattgctaatttggtttatttatttccaaaacattttaatatggaaaatgggccgttcagataaagggagtgaagtcgacattttttgtgcgaaaaattaataaaagtgaattttttggctgattccgtcatcacaaattaggcagaatgatcggcattttgcagaattctattttaatcattttttctgacaaccttttttgcagcacacctccgtccctgtcgctgcccaatggcatttccgtcattcaatatgaggagccaatgttctggtgcaaggtcacatactatgagctaaaccagcgggtcggcgaagtgttccacgcctccaaaccatcgcttattattgacgg

SEQ ID NO: 57740 - DNA, 366 bp, Heterodera glycines
atgggaaatcatcatgccgctaatggctcgccaacatcaggcagcccctccagcagtacggtaaggaaattttagaatttacagctaattttttttttttaaatagcgccatttggaggcggtggtgcgtaaatcggcaatgtcaaaaaatgcacgcataaagtgagaaaaataatgtatgaaaattggtatttaaaaaaatgaataaatttagattggcacaattgagggaacagcaacggcgaaaatcagtggcaattgcaatggaaagggtgaaaaaaaacaaattatcaaaaaaaaattcaaattaggcaataaaatttccaatgagcgtatttttggagtttaaatgtaaatctaaataaa

SEQ ID NO: 57741 - DNA, 729 bp, Heterodera glycines
atgaagccaattagggcaaacttaatggattatatcccagacaaaaagtggctgattgtgagtctttcggtttctataaatccctcataattgaaagatatgaggttcgcaagtgctaatttgatgctgccgctaggaatttttggcacagatgcaaaaaaacaaaatgaaaacagacccttttggatgatcagcttagtccccaaagccgattataaattggaacttcgatattagcttaacaaagattttttatactaaaagatttccttaaaaaatgattattcattttttagcatgtcaatggcaatgaaaaactgcaaagaaatgccgatgaaaaatgcatgccaaagggtcgtggaccgaagaaggagggggcagtacccgccaagaaatggtcatccgctttacgtgtggtcgctgcgatgacacgcttcaaaaacatcccaagggtgggcagcatggaaatcactttttgtgtgaaattaattaagtttaaattatgaaattaatgaatttgaaattatcaaattatttaaattatgcaattaattacataactttaaatcttcaacaaatttttttttattacatttggacatgtggaaaaaaattttaaattttaattgtttcatatgcttttataattataatttacgaatatgatttaattaatttcagcaaatggtcggatttccttattttttggtctcttttcccatttattaa

SEQ ID NO: 57742 - DNA, 502 bp, Heterodera glycines
atgtttttgaagctgtcccccctctctttgcttctcttcctttcgctccttttgctcatttctttcgccattggctacagccccgtgggcaatgccaaaagtcacccgctgaaattgcgcaaacggatcagttacagtgacggcggagtgatggcactgaacagcgcggcgcggaagacgcgaatgccgacgcgcaaaatggtggagaagccgcggatgcgctttaagggaggtgagagaatctggggaaagccggaaatgccgtaatcagccgaaggaaaaactgatttaaatcaccattcggtccattgaatgatcacctttttctctcaggaagcaaattggcacccaaacacagcgcagtgacgacacaacgccaatgagccaatgtttgaattcggaaggacaacggcacgcacagagagagaaagaaaaatcagtcaatggcaaaacattggccaattcctttgcattttgtatttatattcagagaaaattaata

SEQ ID NO: 57743 - DNA, 391 bp, Heterodera glycines
tactttttaattgcattttttttcatttcaacatttaataaagcttggattgccatataaaataaaagttgtagcaagacttcataaatgtgcaattatcagatatttaaagaaaccagcacaaatttggtattcgaaatggaagaaggatttcaaaatgctttgtatgaccaatactgaattgcagcaccctctcatttctgcgttgtctctctcccaaatgatatttcccgccaaaagaaattttaaaaaattaccgaaattttaaaattagcgttcatttatacgttgttggcaaaatgcacattgttaataattaaataacaagttaaaggttgatctccgatgaaaaaatttttttcataagaaaaagttgttttgcctttctcta

SEQ ID NO: 57744 - DNA, 294 bp, Heterodera glycines
atgatgccaaagattggtcatattttcactggtcttttggcactgtcctccgtcgcaccgggcacggtaaacgcttcccaaacgggtggagcagtccaatcagttcaacaacaatggacatcaccacctcaaatgccgggccaaaatttaatggtaagattagtaaaatgtcctattaatttttgaaaaaagcctcaggaaacgccgatatcaatgaaaaatcgtgaactatcacttggcggaaaggaaagtttcgaaactgcggtttatggacaatcaaaggtagaaagttaa

SEQ ID NO: 57745 - DNA, 893 bp, Heterodera glycines
atgggtataaatatcataaatagcgggcgaaatgaagaaatgggagaaatggagaataatgataagcaagttttagacgaagtggaaaatatgaacaaaaaaggcagattaaacgagtccagcaaattaaatggagttacttacgagagccattctttttttaaaacaattgatcatacagaaatggaactcttgacgaaagacgaagagcacgttctcaaatcactggaaaaatcgctacaatcgcagatgttagcggttcggaaaagtttcgctgaaagtgaggggtcgaaaatgccggtggaggacgaagaccaagtagcaccactaatggacgagtggggagaaaaggaggaaaagaaggaaaagaaggaagagaaaggaatgaaggaaaacaaaaaggaggaaaagaaggaaaaggaggaaaggaaggagaagagggaagtgcctaggaaaaaggcggaggaagaaaaacgaagcgcaagtgcggtgacggtcggagaagaagtcgtgtcaatcgtggactccacagaagaacgggaacaggagcgggaacaagaactgttcctaaacccgcaggtaacaaatgagcgcatggctttttgggaatcaacgctgtataatcattgcacaaaaaagacgtggcggaaaaagaggccaaccgaaagacggcagaagtgggagtgacagtcggctcaaaaaaaacgtgtttggagcgagctggagcctcctgtgttgcccgatgagccaatctcgaaatttagcgaaaaaatgcatcgatgcgcagagatcgaccaaaacacgaagaaagcacgtgtggtgatggatacactcctcgcaattcgagagaatgcgctcgaactgagcgaccaggcgcaaaagggtttccgtga

SEQ ID NO: 57746 - DNA, 91 bp, Heterodera glycines; identical to SEQ ID NO: 53030

SEQ ID NO: 57747 - DNA, 568 bp, Heterodera glycines
atgctcgcacttttgttcgtgagttcaatgccaaaatttaaaacggggattttgcatgtttttccatattttttagcaaaaaacagtttaaatttcaaataatatttgccggatttccttaatttcttatatctcactggttttgtgatttgccacttttatgtgccatttctcctcatttgaccaccgcggctgcgctgcgctccgtatgccgtgacactttttgggaggcacacacattggacctgttcaccagaagtggcacagtggcatacgaactgggcggaaccattgccaaaattggcactgtggtgggcagaattgaagatgccatccgcgcattaattccacaatcaactcaagaaaaaggtactgtacaaaaaaataaataaaacttaattggaaaaaacaatgtaattttttttgctcctggcattaaaataagaaggaagaatcgccgatgccaattagtgttttaatgacatttattatcagattttgcaataaaatggacaattttcttaataattaatttcagataatgaaaaattatcaaatgcaaaattga

SEQ ID NO: 57748 - DNA, 1804 bp, Heterodera glycines
atgaccaaaatttccaattttttccccggcggcgcctatgggcaccgccgggccccccaaaactcctattttttcttagaaaatggcccaaaatcacaaaatttggtaatttgatgaaaaactgttctcagcggcgcgccaaaactcttatttctcattagaaaaatgatacaaaaatcacaaaatttgatgattttttggtgaaaatctgtcaacaaattttaatcaaattttcaaaaattttcccggcggcgcctgccccctcttcccaaaaagtttttttggaaaaagcgcgcctcaaaaaagcgttttattgatttttaaatttggaataaaattttaaaaaatgacttttgctttatgattttaactattaaaaagttgcagaaaaaatttcgcttttcgcattttcgcatattttggcttttcgcatttcgctttttttttcatttcgcatttttcagtttcgcaaatttcgcttttcgtatttcgctttttatttttcaatttggcccatccctgttatatacaaaatcaaaattggcggtatgttcagttttaccaaaaatcttttaccacatcttttaaagtcttcggcttctgccatgcatttgtgttgttcaatcttcgccctgggtttcagaattgctgcttaacggatagaccgtagcactgatgctgctccttcgcttacagtgtttcgcgaccggagtacagtaacgccgctgataaaggtgacccggttactgtggaacactttattgtacagcatgcggcaatcctcgcgtattgttttgttcaacgcccagtaaatcaccgggggaaatcctagggcgaaaaatctaattaaatattataagcaacagccgaccgtggacatggaacctaaaaaacgaatttttggaaattaattgccagccaaaattatgggtttgaccaagcaaattcagcgagagtgatcatccactgatgggcttcgttgtattgcaaatagacgtaaaagaagccggtcaaagaatgcatcagcgaaatcaaaaacacttggataaatgtctgagaatttaagaagtcataaaattaaatttactatcttaattggtcaaatttctgacaataattaagaaggcaatcctaaatcaatttgtttttaatttgcgctaaaaatctgtttctactgggtgactctgattgtgtaggtgctagtcaatgcgcgagaaagtgcataaatgatgacgtcacaaaaaggggtcggggtcgttttcgcgtgggccgttttcgcgtggggcgagtttttgaactataatttttttatttgtcaaccaaatccaataatcttggtatcattcgatagccctaagtgttctctattagcctacaaaatttggaaaaatttcgttaaggtccaaaaaagttatggtcagaagagttcaacaaaccaaattttccaactttttttggctcgaactttttttatactgaacgaaattttttggaattttgcaggctaatagtgcatctggagggctttcgaatcataccaagaatgttggatttggttggcaaagaaaaaagttatagtccaaaaactccgccccacgcgaaaacggcctggcccgccaaaagatgcttttagtgccattgaattttttggtctttttatttgccgcttttctcatgaagtaaaattaaatgttggagaataatcggcacagtttggttttgccgaactgtttaatctgaatgttgtgccatttgtgcaagagttgtgccaacaacggcaaagaagctttaattggtcatcaaa

SEQ ID NO: 57749 - DNA, 732 bp, Heterodera glycines
atgggtaaaatcctgtcccagttacgaaattacggatccctttttttggtgcctcggaattagtaaccctcctccgttctgttcaatcaaaattccggactaatatattaattaattcatccattaccaaatccatcgtactttcggcaatataaattgcttaaaataaaagaaataaataaataaatcatgtgagttaaaaactcgatgcggtcatcccagcgaagtaaatcagtgtcggattggagcagaaaacggctccgcggaagctgagcaacgcgcttaaatagcccaggacgaacatgttgaccaggtcggtgatgccgatgtaaaacaacattttgtagcaagaattctcgcgcatatgcttccaaatggagtaaatgcagggcaaatataggacctgcatagttcgaaaatgttcgaaatagggtacggatttttatagatgtttcattttttctgactttctgagaactttggaagacagaatttgttttagttgctactgttaagcaactgttggctctgttatgatttttaatatatattcctgaaaccataaaaacatagaaatcctcttttatggattatatttaatattttctaccgattttttaatttttagtcatttttcctaaaaatgttggtgatttcggtccaatagatggagaaactgatcaaaaaagttttgatcaggacaccaaaaatgatcggataaggaatcattag

SEQ ID NO: 57750 - DNA, 428 bp, Heterodera glycines
atggttttgaaaggcaaaaaatctcaattctacaaatttttatgtgtacttggatttcacaaattttccccgttatgtacttggaaagtgacttggtacgatccgagccctgaataatatagatgaggttaaaatgcttttttcacaatttatgtttcaaaactagaagaaagaagacctaaaaaatctttttcacgaaaaattacttctttataaaaaggaaaaatcttaattttctaaacgaaatattaaatttttcagttaattattaggtattagggtcgagattcttaggttttaaaaatttcagcggctttattttaaatgagaaatgttcaagaaaaatacttttggacttttctcaccgaaaatagggcgtttttttcctattttgattttttcaaaatttttaacataattaaaataaa

SEQ ID NO: 57751 - DNA, 272 bp, Heterodera glycines
atgagtgttgagacgggcgccgacgaagacgacgacggagacggcgaacttctcgcaattccttctccgtccgcaattgccgcccctttggcgggggcacaacaaaaacaaagtgttggccaattcgccaaatttatgccaatcgattcggaggacggcggcgacgaagccaatgaaagggaagggaaaagcgaagagggacaaatggccaacggaggaggacaaatggtggaaggggcgtcgctgagaagccaaatgcttaagctgagcaa

SEQ ID NO: 57752 - DNA, 2388 bp, Heterodera glycines
tgctctgtgtgttcctctcgccactctcttccgcccgtttccatcacgcttccgtccccgcgtgtgccctttggctgttcctcaacttcctcctcctcctcctcatcccttccgatgcttcccattcactgatcccttctctgatcaccattttcgtcctcttcgccttctttcccttccggccattggtcattttcggcacttcctttgccatttcattggcacatcttggcgcatttgggttttctgacgaggccaagccgagcacggaaaaggtgggcattcacagtgatcagtacgtcatggcaaccaacagaccttaaatttgaatccagcttttaattattaaatcgaattttatctctgatcaggaaactccattataaccatgcataggttttatttgataagacattgagtaaagctgttctctgggctattgatcagagttggttgacttgatcacattcagcacactcacattttttgcaatattacggcaacaataattttatttttaaaacaaaatcaattttcagctaatcgctgctttgttggcacatttgtggactcatttggtcggcttttactcaatggcaaacggtagaaaaatttctcgtgccgtttttctgagtgcgcgcaattcggtggaaagtgaaacggagtggaaaagggagagagaacgaatggtaaaaaaaaattaaatgatttgccataatttctgatcggaaactcctaaattcgttttccctagaattattggggcttaagttgctgataacacctttttacaatccctttttggcttttaggcccagcttctgtccgcttcgctgccccctcatgtcatttcgtctgtactgctccaacttgacgggcccgaactgccgcgagtgtttgttgaacactttgcccatgccaggtgactcaaattgccgcaaacccggcaatttccagcgtttctccgtcccactgattagccaatgcctaattaatcacttataccatttcagtgtcatctttgcccgattccacggcttggcctcagtgttggcacaactgcaagtgcccgactcggcacgtctgctcaacgagttggacttgcgcattgggcggttggccaaactgcacggccttttgctggtccaatccgacgccgtgttggcaatttccggggtgccggaagcgcgcgctgatcacgcgctcgtcgcctgccgctttgcattagaccttttggcattgacaaagtgatcaatccgagtcacactaatattgaatgagtcatcttcaaatgatcactaatggtcttcacactatcacaccgatcaactcattgctgatcaaaaacaaaagatcagataatttctgatcaaatctctttttttgtccaccaaattatttgacttttatttggccgtctctaacccgcttatcttttttctctgtcttgccacaggagtttcaacgagtcggcatccgtcgatattgatattcgcattggcatcggttcgggttcgttgtccggcggcattgtcggcgcccgtcgatggcactgggaggtgattggcatggcggtggacgcggcaatgcatttagaagccaattgtgcgccagacaccgtactaatttcggacgacacgcggcgactgatcggcgcgagattagccgccgatcgggtggacagaggttgctggcggttgagcccaacgggcacggcacaaccgaccaacaacccggcacttaggcctttgcttttcctgaccgcgtcgcgtcgcttttcactgctcacgacaccgcaggcaatggcattaatcaatcaataccgatcaatattttggccaatgaattattgagattttattctgcctaaagtgcgcaatgttcattccaaagaaagtctcattagatcaaaattttggtcaatttaatctctaagcaatgtatcaaagtattacaaatttgatcaattatattcattccagcagattgatcagtctttcgatcgtttttgtccagactgaaaagtccttttttaaacagccactttttattcccattaatcagttatcaagcaaccataatcactgatcaaaaccccttcaggcgatcaaccgtctgctcaaccaatcggtccgtccccccaccgccgtcgccgccaccaccgacggaattccgttgccgacgccgttcaccaagcggaagcagttccaaccggcgcaaaaggtcagcctgtttcggcgccgtgttcgtctgccgtccgatcagtgccacagttcgctgccatcgcctctgctgggacactctccgctgatgactttgtcccttcgctttgccgaccatcaaattgagcagctgttccacgcacaaatcgatcggtggtacgtttga

SEQ ID NO: 57753 - DNA, 546 bp, Heterodera glycines
ttaatggggctaattattttcttttttaggacccgagcattttcactgtgctcaccgtccctggccttcgtaagggcgtcgcactcgccgattttgtcattttcccgccgcgttggtccgtcgccgagggcactttccgtcctccttatttccaccgttcgttttttgggcctttctatccgataataagcaaatccaggaaattgtatgagcgaatttatgggtctgatcgttggccgatacgaagcgaaggagggtgggttcagcgcaggaggcgcgtctctccattcgatgatgacgccgcacgggccggacgcggcgtgcttcgaaaaggcgtcgacggacaaattgaacgccggaaggattggggacgggacaatggtggactaatgagggaaataacgagcaaggagcgacctaattaaggcttttatgttcgaaagttcgctcagtttggttgtgaccgattgggccaacgaagaatctgtggatgagcgataccacgaggattggcaaccattgaaaagtcattttgagaggagcaaa

SEQ ID NO: 57754 - DNA, 237 bp, Heterodera glycines
atgaaatcatttgaggcgcttcggaagagtttttgtctgcccgaattgggagagaaaggggagggaagtgaaaatagaacagaaaatggagaggaaaatgaggaggaagagaaagagacggaagaggagaaacaaatcatacagaaatattgtgagcagttgaaaaatggagacgaaactgcggaaaatgcccacattttgttcaaaatcaacataataccactgcaaagagatggg

SEQ ID NO: 57755 - DNA, 1290 bp, Heterodera glycines
gctgaattatggagcacatttggacaacaatcatcacaaggaaaagttccagggaatatttgttgaaatggcacttcaaaatgccaactacgcatttcggcacaattttgacacatttttggcggaaatgctcaaaagagcggaggaagggtcactatacttcccaattctgataaccgataatgacggttcattgatgattgaacagatggcgtttgaatcgtactttttggtaatttcttattgaagcgaatattttcagaccggagagcgcctatttgtagaatttgttagaggtcagccctattttgaacaattttgctgcgatttggaaagagatggtaaattgagggattttgtcatggcccaagaagccactctcgaagaaaagcaaaattatttggcaaaacaatatgagacttacttcggcattttgtatttgatgcgacacaattggcattgtgacaaaaaaggggaggaaattggggaagaaaaaaggcggacaaaatgcgaaagatttcgcaaatacacagacattgtgtacgaatatttgttcaaagtctatgcaaaaagtaaggaaggaattacggtagaatataatgttgtttggcatactgtaggtttaaaattaaattattatttttaggaaattaattaattttttcaaatttaaagctgaagagcctttgttgggtcagcaattccccgtatttaaaccaacgtttaatgtctcaacattaataaatgaagtattgctttatctgcacaaatgttcagtgttattttttgacgaggaactcagaaatcaaaattattatatttttaaaatacaattgcaaaatgggcacaaattgcgcaattataaggctaattttggcactttggaagaatcgctgcgcaaaaaatttgacaaaaaactgaaaacgatgcttaaaaaggcgagagaaaacgaaaggaggacgagagaatggagtgccaattacaatgacagcagcaatttgctgagggaatcgcccttttttcacagagttttgcgggttcgtttcaatttgcgatgcgcgggacagactttttttcgaggcccgggaaagagacattttccaaaaacattccgtaaaacttaaagccttgcaaacacttttcgggaatgcacccggcacggatttcatgattagaatcatattttagggtcctgatccgggtgcatttctcaaaaactacctgggtcaagatcagggttcccaggaaaaccctgacaagatcctaacctgtcaacttcctgttcacccg

SEQ ID NO: 57756 - DNA, 114 bp, Heterodera glycines
atgtcttcgcataatacttcagttattgatgaaaatcgacgatggagtgacttacgctgtttaacagatagggcgtctacatttgccaattcaggattcgtccctggaatcaag

SEQ ID NO: 57757 - DNA, 621 bp, Heterodera glycines
atgttcgatggaacacaagtcaaattcatcggaaagggagtcgccaatttcaaattccgcgatatttgcatcaaaagcgaatattatgtggcaaaaaggggatcgctaaatttgctaagtgtgcaaatgatggacgcttttggactcctgaacgaactcaaggccaaaattaatgcgccagtaaatctgtgccgagttggagacgagacaagaggttttacaaaagctccaaaaccgtcacaaaatttgacagtcaaagcgcacatcgaccatctcaaagcgacatttcccgacattttcaaaaacgaattgggccgatgtatgaagttcaaggcgcatctgactttaaaagcagacgccgcaccggtctacagaaaggctcgcccagtcccatacaacgcacaagaagcgattgatggagaattggagcgatgggagaaaatgggtgtgattgggaaagttgaatacaccgaatgggcagctccgattttggcggtgaaaaaggccgacggaagtgcacgttttcgcaaatcgacctcagggatgcatatctccaaatcgaattggatgatgaatcgagaaaactatgctcgatttcaacccatcatggcaattacgaaa

SEQ ID NO: 57758 - DNA, 364 bp, Heterodera glycines
atggccataaaatatggaccaaaaatcgcaaaatatggacataaatggaaaaaatgtcaaaatatggacataaatttctcaaaattgaatgtaaaatttcttcaaatttattggttgaaattgcatatgagatacatttccaaattttttgactcggtaaggcgctttgacaaagacggctttcgttttgcaattagtcggtcaacattcggaaattggtctcgaattttttcggcaattacgtgcaatcattttaaaagaaaaaaaaacataaaagctaaaatttattaattttttttagcgcaaaatcaacaacaaaagcgaaattttcgcttttctgcttatttttgacataatttattaa

SEQ ID NO: 57759 - DNA, 155 bp, Heterodera glycines; identical to SEQ ID NO: 51421

SEQ ID NO: 57760 - DNA, 1670 bp, Heterodera glycines
  unsure (1)..(1670): unsure at all n locations
atgaacgcaactctgaaaaacagaagcgaagacaacgcattaattcagaaaaataaaagcgatgatcacggattaattgcacttttgtcatcaagaatatcatcagcagggtaattgatggggatggggttaccaggggtggagcgcggacagaaaaatcacacgtcgcggatctcgcatcgcggaaggccaagtcatatgttaagcgccgccgatactttttagcaatttttttgtttgtttgtagattaatattttcaaaatttcgtcgtttagtcgagacttaaatgaccgagagtcgagacagctaccctaaaacccaagaaatttcacctaaaccgataacggtgctgaccgatagattccgtacggggacctgaaaacagacagtgattatatcgccccggtatcggccctgacctaatccaattaatctgcataaaaattaacaacaacaatagaaaagtgagcaacgcggacatggactgtgcactgatcagttttggacgagagttggaaaaacgcttgcgatttgtgcatcatgagtttagacaatttacttacaagagtgaaaagcaatgtggtagagacccgcacagtaaacaatattttgattataaacaaccattcattggtgataacaatacgccggcagaagggtactactgtaaatgtttattaattgtaacaccgtattcccatctattataacggtgctgggacgtttgtcaaaaaccaccccctcaaatggaaattttttggagtttttgtgcctaatgtgccgattttagaatttttgaaaaaatccttaacaaaaatgcgataaaaacgaaaaacacatccctatgaaatgatcaaaaaaaattcagaaaatacacccctaagaattgaaaaaattttcaaaaaattgaccaccaatttaatattatttatgataaaaatttttgactaaaaatttgtccttattcgaaaaaaactttaaaccaattgaagcaaatttaagttgtttgattaagtttttacgtgatttgctacctaaaaacgttaaatttttatttgcctatttaatgcctattttgcgatttttttctgcctttttaggtgcctatttcgcgattttttgtgcctaaaaatcgcatccctacttatcataattaattattctttaaggagtaaacagattgagatgaaaatttttggcgagccgttgtggaattatgcgagagtaattgaaattgatacgaacgacgccaaaggtcaaacctaattagtagggagtccaattatatggaaatccatttttttcctggactgtgggaggcctaaaacgcacgaaaaacatgtttttagcttgttttgaagcttttaggatgactttccatatgcatattttgcatatttgtgcatattttggcatttcatgcatattttatgtgcatatttgggcatttttccaaaaaacccctattaaaacggcccccatgaggtaaattggcatttttgactcttaaagaccgaaaaaatttccgaaaaagacattttttagcaaaattttgtcaaaataatgattgaatttaaattttcttaaaaatttgttaatttatgtcaaaaataagttaaaaaatggaaatttttcgatttttattcaattttcgccanaaattaataaa

SEQ ID NO: 57761 - DNA, 409 bp, Heterodera glycines
atggacaaaggatatgtccgagggaagagattcgagaaactaagactcttgaataatgacgggattattgattgccacgcagctcagtcggttaaaaagaattccacggtatggaaaggccgtgagttcgagtcacaccgggagaattaactcttaagacaaaggatgtgctcgagaggagagattagagaattgaaatgagctctattgattggtggactgatgccgaaaatagggaaaataggccgagactctcgactatctctctaattgatttgatttgatacctttgccgtcatcgttttcagtccagctgatttggacgcaatgttgctggcgtaatgcatgatggaactgaggaattgattgatcagagaggaatattgcaattatttaattgtaatttaaa

SEQ ID NO: 57762 - DNA, 950 bp, Heterodera glycines
atgcagacactgtttgaaaaggcgagaaaatattgtggcgagcaaatgtatccattaggtgaggaaaaaaagtttttttttttaaatttttgtttgttttcgatatgttgcatcggagcaaaccgaaagcgtattgggacgacatttacgactcaccaggtgaattggcgggattgcccgctaatcatttgcacccttgtgtgacaggcctggaattcatcgcacaaaaaaaaaaatcgaaattcgtgattctgaggcctcctccccctaaaaacgggcataggcacttggtttcctaggccccttagtttgggaacggaatatcgcgtcccctacaatgtccgagatttgatgttcccatctctgatgtgtaacggcattttttgcaggcggactgcgtatcatgcgaccgtacaccaaggacgagaacggacacccgggctgtcccatcaacgggtccattgacggtaaaaccgagaaaacagcagcaatattttttctaacaaacataaaaaattggtcactcatttttttgaaagtgcaatattttacttacctacatttacttacgattgtttttctattgaattttttttgaattaaatcaaagaaaattctcggctttgtatccccctatcctttaggtcttttcttctccacactgttgcgcggcaaaaatctgcctaaggattcgccatttgggtcagtatatactcattaaaaaaaaatttaattaaaaaaatttattatagcgacgtgcaaatggtcgtttcggcgcgcaaactgctcgattttgacacatgcaatttgtactttgccgacttttatttgcacgcggcaagcgtggacgagccaactcagtcctccgtgctccactacgtcacggtggtggtgtgcaagcacaactcggacacggacaagtgattatgatttattttattaataataaa

SEQ ID NO: 57763 - DNA, 157 bp, Heterodera glycines
atgggccaatttgacttgggtggactgctcggcaacgtcaaccaatttacgagccaagcgggcgtcaatttgggcggcattttcggccagatgggtcaacagcagccgaacacggcgcaaagcaatgatcaaccgccacggcattttcatcggggcg

SEQ ID NO: 57764 - DNA, 313 bp, Heterodera glycines
atgcgaggaggaaaaggccaagtcgcgggaactcgcccatcggatggaacgcgaaaggcaattggaggcggaaagggaggcactgaagtgagagcatttggcacagcaaagacaaaatgaaatgccaacgcatctccacttcccttttaaggcatcaaatgttgtcgaaggaagtgaaacaattggaagtggaaaaggagcgaatgggcggcgaaatgagagaggcgcggcggagagcggagcaactgcaggaacagctagcagaggcacagcaggagacggacaggggcacagacggaaacacgacagttga

SEQ ID NO: 57765 - DNA, 771 bp, Heterodera glycines
agcaagaatattgctatcttgcctaggcgggattctgacttagaggcgttcagtcataatccctcagatggtagcttcgcaccattggtctatcgaccaagcacatgaaccaaatgtctgaacctgcggttcctctcgtactaagcaggattactatcatagcaacaggtctttagtagggtaaaactaacctgtctcacgacggtctaaacccagctcacgttccctattggtgggtgaacaatccaacgcttggcgaattctgcttcgcaatgataggaagagccgacatcgaaggatcaaaaagcgacgtcgctatggacgcttggccgccacaagccagttatccctgtggtaacttttctgacacctcttgctggaaactttacacattcaaaaggatcgataagccacgctttcgcggtccgtattcgtactgaaaatcaggatcaagtaagcatttgcctttttgctctacgagaggtttccgtcctctctgagctcgccttaggacacctgcgttacgctttgacagatgtaccgccccagtcaaactccccgcctgacactgtcatcggcgcgggtcgccgggccaccgggtggcccgacttaacaccaaaatggacaccctttcgggcgcactcccgttttaccgattaagtaaggaatcgatgaaagtagtggtatttcactggcgccttgcggctcccacttatgctacacctctcatgattcttcacaaagtcagactagagtcaagctcaacagggt

SEQ ID NO: 57766 - DNA, 133 bp, Heterodera glycines
ttaaaaaacgggcgcaaagcgcccgtcctgaggccgcgaagcggccgaatgtccccaaaataattaaaagacgggcgcgaagcgcccgtcctgaggccgcgaagcggccgaatttccccaaaaaaattaaaaa

SEQ ID NO: 57767 - DNA, 748 bp, Heterodera glycines
atgagtaagagatttggataattctactgaaggtgccatcagaaagtgaatgaatgtgtttttattgcgtcattttttaatataaaataataaatggaccttaaataaatagggaattggggtaattctactgatggtcactattatagattgaatcataatatttgtatcatttttaattaagtctaagaaaaaataataaatatgattaaataaataagagaaattaaacaacttaaaaaacaaaaaatcgaaataaaccgaaatttttatgaagatccttcgttgacatttgagcagctttatccatttgtaaacaaatgctttagttggacgatgaaaatattaattattcatacgaaattaaaaattttatttgctaatgaatttcatattatagaatataattgagcaggaattaaaaatcttcgggattgatcgggttggtcgggatccatattttgaatttcaatgttttggaattcatctcggaaattatgcaacgctttttattggtgaaatttttgaaattttgtttaggctaatacaaaacgttaatgaccattcgagcaatacacggagactttgcaaagaggcttatccaaattctattcattattgttggaatgaattgaaattttgcaggaaaatacttgggattgagcaggaacaaaaaatcaagaataactcaaggcttaatcgataggccggaattatttaacaattataattcactataatatgccaa

SEQ ID NO: 57768 - DNA, 1786 bp, Heterodera glycines
ttaatttttgtatttttggatgaagaaatcgatgggatttggcgttggttcggatgaccgccgacggtcggctgccgcccgcccagcgccgaaattacagcagcgtgctgaacgcgttggtgcgcgtcacgcgcgaggagggcgtcctcacactatggcgggtgggccgaaaatattttgattttaaatattttaattttaaatagtttattcattatttctagtcatgatttctggatggattcctcgatttttcgtaaaattcgaagagttcaattttttctgatttttttttttttttgatattttacgatgcattactgagttttttcaaaaaatgatcaaaaaacgctgaaacgtttcaatttttcttaaaatttcttattaaaaattttcgaagattttttcctgaaaattctaagtttgaaaatttttttttaatttcggcggcgagattttatctcggcaagatttcgggcgcagcgagacggaattgattccttttttctttatttttcaattcaaatttcatttaaaatgccacctctgaatcccccccccccccaaaagggctgtactccgacagtgatccgtgccatggtggtcaacgcggcccaattggccacctattcgcaggccaagcagcagctgctcgcctccggccatttccgtgacggaattccgctccatttttgcgcttcaatgatttccggattggccaccaccatcgcctcaatgcccgtggacattgtgaagacgaggcacaaattagcaattaaatgacggacaattaattaattaccctaaacggggaaaatgcgcaagaaaaatcactttttattgagggccgaaacttttgaaggaacactatcaaattttgttgattgttgacgaaaggatcaaattggaaattttaaattggcaaaagtggaaaaatcttgaccagaaacaaagggtgaaagtgagaaaaaacatttgaaaatcgggaatatttgaaaatttaatttattttttttcaaaaaatgcgttaatatgtctcaaaagcaattaggtaaacggacaattaatcaactgtaaacaagtgaaaagcgcaaaaaaaattgtagagggccacaaaattggcaaaaagtggaaaacgcttgatcagaaacagggataaaagcgagaaacaacatttgaaaatcgggattttgaaaatttaatttatttttttttcaaaaaaataaagcgttgcatatttatcaaaagcaatttggaagtcgataaatttattttggcaccgctaatgacacctcttgtttgaatcatttgcataaattcatttaacagaatccaaaacatgagcgttgttgacggtcgtcctgaattctccggcgtcgtggacgtcgtccgccgcgtgttggccaacgagggcattttcgccctttggaagggctttttgccctattacatgcggctgggcccgcacactgtgctcacattcatccttctggtgctatttctaatcatttttgactaaaagggctggctgttcgagagtctcggaagagtttggagagtttgtttcttaatatcgactctcgagctcatttccgggtctcgatttcggaaaatctttttttccgtcaaaatttacagttttataaaaaaaatccaccgttttttctttctttaaggaacaaatgaacgccctttacaaacggttgaaatacggcgcctaaaaatgcatgagggagaagaatgaacacacttttccgatttcaatttcactttttaattttgttgt

SEQ ID NO: 57769 - DNA, 751 bp, Heterodera glycines
agcatttgccatcgaaccgcgctcaaattttggagctgaagcggaacagtcaggcgtgctttctgttgctgcatttgaagctgtatctgttacgactgtacgggctgaaggaggagtgcgtttttttttactttttcaaaaattaaaacaaatgccaaaaaatttgcaggaaaattgccgattattctccgtccgaagcgaaggaggtgtacgagaagccgtgctgtcgtcgcaacatccggtgcttttcgcccgattttgccaccacagttggcgaaagtggcgccgccggcgcggcaccgcagcggacggtaacggacgaatgggcggagagacggagcatcgcggaggaatttcacaaggtacagtataccacacacaaaaaaacattcaaaagcatacggtatgagtgtggtgaaggaggaaatgcccacaatctgttgaattttacaaaaaaaaaaaagatttttaaatttttgtgaaaggtttaaaatgaattttctaatatttttaaaacattaaattttttaaaagaaaattttaaattttgtaaaggtttcaaacattttaaatttttcaaatatttttaaaaatgtttcagttccacgaaatgcttttgtcattggacgaacggcgggacgacgacgaggaaagggcggtaggcgctgcggcgaacacttcgaattcgtcggcgacgacggcgccggcgggcggcgaccattccgcagctgatgatcatcaaaatgaatga

SEQ ID NO: 57770 - DNA, 333 bp, Heterodera glycines
atgccttctggatggagaaattgcagatttcatcgtgagtaaataaataattattatgaaatttttattttaaattttttaaaatttgcttttaaaccaaacaaaaaaaaataatatgtgacgtaacacaactctacaatttcaaaattgttcaaaaataaacgtaataaaggaataaattaaatataaaaattcatattatagagtgtaaattataatttaaatacattcattggttgtagtcaaaaattataatttaatgaacttttaaaaaaattttcaggaaaaatttactataagttttgataaattaaataatgattaaaaaataaa

SEQ ID NO: 57771 - DNA, 420 bp, Heterodera glycines
attaatttaacctctgacaattggtcgggcgcccacccgaaaatcagcgaggcgctgctgcgccattgcgacggcggtgccaccgcttatggcgccagcgttttggacagaaaaattgagcggactttcaacgaagtttttgagcgagacgtggcggtgttttttgttggcactggtgcgcaaaaaatatcaaaaaagagctaaaagagattatgtgaattggtttttacgattgtttgccccaggcaccgctgccaatgcgttgtcaatggcttatgtgaatcgcgcgggtggcatcattttcgcgcatcggcatgcccatctgattgaggacgagtgcggcgcgcccgaatattttacgggcggcgccaggttggtcggcgtaagcggcgccgagggacgcattgagccggaagtaat

SEQ ID NO: 57772 - DNA, 672 bp, Heterodera glycines
ggggggactgcccggaaaacaaaaaaatcgatttttcaagtgtcggttggggtactcaaacaattatggggagcaaaaatccaacgcagaattaaagtacaggctatagggaagctattcccgaaggattcggtctccccataaatctgggcgcatcggttcggggggactgccccgaaaacaaaaataaatcgattttttcaagtgtccgtttggggtactcaaacaattatggggagcaaaaatccaacgcagaattaaagtacaggctatagtgaagctattccggaaggattcggtctccccataaatctgggcgcatcggttcagggggactgccccgaaaacccaaaaaaaaattttttggataaaaattatttaaatgaactgactagataatatttaaaataggttatttctcttcctttcagtatccctgcaaagtttggtgcgcttctgatcagtttctgaaaaaaaagttaagcctaaactttttggcctgtttaaaaaggaattaaaaatttttaaaaattttattcatctccctttttgatagaaaaagcatcagagtgcctaaactaacatgtaaataaaatttggtgcgtttcagaaccctttctgaaaaaatatttaagaattaattttgcaaaaaataaataaaaacgaaagact

SEQ ID NO: 57773 - DNA, 427 bp, Heterodera glycines
atgacaccgccctttagaacatcggtgattgctgtaacgaaacgaatcacattcccaagtaaacctaatatggttaccatccacataccaacagctatgtggatagtcaccatccacatagctgttggtatgtggatggttaccatattaggtttacttgggaatgtgattcgtttcgttaaaacaatgaccggtgttttaaagggtggtgtcattaccgctgcagacgtgcaggatttgaagcgtggttggacccagcttgagctggatgcgaaagttggagcattgaaggcgaaaaatgaccggatgtatcagtccatttgtgcgcgccttcaaggacaggccgccacaattcagcggctgcgggcgacaaaaggcttgaaacgatctcgtggagacaagagaaagacttcagttcgtggaaatg

SEQ ID NO: 57774 - DNA, 333 bp, Heterodera glycines
atgagcgcatgtctcactcccttagtggctgcattgcaagcacagctctccacacttcagcgtttgcgggagccacaaggcttgctccgctgccgtcgacacacgacaaagccttcagctcgtcgaaatggtaagcaacatccacatagaaagtggtatgtgaaaattgagcatccacatagccgttggtatgtggatgctctatttttcaattttcaaaatttaggtgttgcaggaaagaagaaaggcctgagaaaggatcagaagactgcaggccgccgcagagttgtcattgacgattcatctaacggaggtgggtctagaggactgtaa

SEQ ID NO: 57775 - DNA, 665 bp, Heterodera glycines
atggctttatctgcagccaaaccggctctactgcagtttacgcgtccaatcgacttttacgcgtccaatcaaaagtttatgtgtccaatcaaaagtttgtgtgttttgatatcagaggttatcgaaaccaaaataagcacgcacatattagtctctctattattaaattttataacaattgattgaatgcgtatatacctatcgatactttgataataagtgatcaatgacggatttaaattttattaaaaattaattagtaattttttctttctcttggagttacgtttttaatatttaaattattatttctttttgcaatggttggtaccttatgtgaaaaggatgttcgatttaggaaaattttgattggacgcgtaaacttttgattggacgcgtaaaagtcgattggacgcgtaaaagtcgattggacgcgcaaactgtgattggacgcgtaaaagtcgattctacgcgtacaatgccgtagagccaaatccttaacaaaacataatcacattttctaatttatataattagagagtgggaaatttcagggttttcccattctttggcatcacgccaatgaacctgaagagagggaaatggacgggcactcgtactctaaccgagcagagcaggacattatccttgactacgtcaaaagg

SEQ ID NO: 57776 - DNA, 538 bp, Heterodera glycines
atgaatgtcataattgccaaggtaatgatgacacccggaaaattttttagattaattatgttaaatatttattactgcaccgccgattattgttgacatatcactgaaacagaacgggtaatgaaaattggaaaatgctaataagccgataagcaatactaataaataaagaaattagaagaaaatatattgaaacggaataaagcataattatggcatttcggtaacggattaggctagtatttggtatttaatattcgacttaatgaccctaagggattttgcatttcccaatacaaattaggacgcacttgccatttttcataataaaaaaaatcggatactaaagctccatttcgacggagactaaaccgtccggggcgaagccgttatttaaaaaaccttctttatgaaaatttttgtcgaaaagatttttgaacatttttggccataactttttttaaacttaatgaaattttttaaaattttgcaggctcgtaaagaacatttagatctatcgaatgatatcaaggattaa

SEQ ID NO: 57777 - DNA, 619 bp, Heterodera glycines
atgtgctcgtacaaaaacagcctggcccggccgataggtgccgccgtaaaaaaaaaaaaaaattgaaaattgggagtttttggtagcattttttacataaaaatggccatttcaaagcttttttttctcaaaaccagcgaaataaaacattaatcagaaaaaaattaaaatgtttaggtgaagcctgaaaataagaaaaatcttagaaataaggacattttcagtttctaagatctggcccctccaagtaatgacaaatcttagaactaaggaataaggacacttacgaaccctgcttaatgacattatgtcataaaatttcaaaattataaatatatttaagaaatctgaacaattttcgtcgttaccccaaaatcagaacattcttataaataagaacaaatggaagccctggtttaaaggcccgcttggactcattcatactggcgctaacgaaatcggctacccgacttttggggatttgcaacttggggacccgacattagggaacccgacatttagggacccgacatttggggattttaataaaacaaaaaaaatattaaaaaagcccttgacggatttctgttctcgttggcccttggggaaggcactttaa

SEQ ID NO: 57778 - DNA, 833 bp, Heterodera glycines
atgacaaatgcacaaagacagtcgcagggattcgcttctcctcaggtgaaaacaacggctaatgaggtccgtaattatgtcagcgtggggagggaaggagccacgtgcctgcccctcccaaataaacaaaaatgaatttttaatatttaaaagagagaatttttgaaaatttcgaacatatttgtcctgataaaaaatctttttcaaattcgaaaaatttaacgcttcttttttaaataggcgaaaaagggtgaaaactaaaaactaaaaatcaggcccaaaaattatgaattaccaaagaaaattaattttctcttcagaaacaagtaaactttcatattttgtccgaaaatgactatttaagtctattctttgtcaagaaaaattaacttaatttaaaattattatgaattttcttaataaaaatttgattctgggattgtggggttagtttcccgcaaaatccggccggtggatcggtctcgcgccgatctctaatcccaataacttagtatgtttttttttatttattcaaaaatttgaaaaccctggatacaggctggactaaatcaagaataaaatgcaatataaattttagcaaataaaatggctagcgcgggtgcatgagcttgaatcgacgattgagtcggccaaattggtcattagaattgcgctgccgcccaatttaattgagaaatgggttaataatgaaaattgggctgtgttgaaagaaaatctgaaaaacatcgacatggaagattttatggcctatcaggacgaaaggcgttggtttgggtgcaatttctcgaccactgtttgcgataattggggat

SEQ ID NO: 57779 - DNA, 459 bp, Heterodera glycines
tttaaagccatccattgcctgccggttctcggcaccgcaaagcactaatacggtgtttgactcacttcaaaaaataattcattacccaaaagttttttacaaccacttattgccaatctaatttcttgcagatttaaagctatccattgcctgccggttctcggcacagcaaagcactaatacggtgtttgactcacttcaaaaaataattccatacccaaaagttttttacaaccacatattgccaatctaatttcttgcagattgaaagccatccattgcctgccggttctcggcacagcaaagcactaatagggtgtttgactcacttaaaataataattcattacccaaaagttttttacaaccacttattgccaatctaatttcttgcagattgaaagccatccattgcctgccggttctcggcacagcaaagcactaatagggtgtttgactc

SEQ ID NO: 57780 - DNA, 658 bp, Heterodera glycines
gttttaggggcagtccccccgaaccgatgcgcccagatttatggggagaccgaatccttcgggaatagcttccctatagcctgtactttaattctgcgttggatttttgctccccataattgtttgagtaccccaaacggacacttgaaaaaatcgatttttttgttttcggggcagtccccccgaaccgatgcgcccagatttatggggagaccgaatccttccggaatagcttccctatagcctgtactttaattctgcgttggatttttgctccccataattgtttgagtaccccaaacggacacttgaaaaaatcgatttttttgttttcggggcagtccccccgaaccgatgcgcccagatttatggggagaccgaatccttccggaatagcttccctatagcctgtactttaattctgcgttggatttttgctccccataattgtttgagtaccccaaacggacacttgaaaaaatcgatttttttgttttcggggcagtccccccgaaccgatgcgcccagatttatggggagaccgaatccttccggaatagcttccctatagcctgtactttaattctgcgttggatttttgctccccataattgcttgagtaccccaaacggacacttgaaaaaatcgatttatttgt

SEQ ID NO: 57781 - DNA, 1160 bp, Heterodera glycines
atgcaaaacacgacggacgttgaaattgctgcgctcgacgcggacaaagcggtgcaaattgagatcaaatatgacgacaagttggacgagaaggaggccgcctatttccaagtgaatcattcattcaatcaccccaccaattttgcatttttcactcccaaatttcaattttattttaatttttacattttattctggttactggttgcaggaatggtccaatactaatttgacctagatgggtttttagaagtgagaggagggatgtcatggatgagggataaaacaaaagaaaattcgaaattttaaacaaaaattcttacttttcccttagaaattttcagagggttatcttagcctcccctcctcttttcctggatgaagggattttttctaaaacattttcattaaactatacaaatttagtgtttctttttttcagttggccgtgctgttcaccagttgcggaggccaacgacggctccgtgtgcacaatgtaaaaatggaaatttgtaaaaaacaaatttacaaataatgcaatcctccggcacagctctcactgccgatcagctccgattatgcgcaactgtaccggctgattgacgaggactgcttggccacccacttgttcaagcagggcaagcaaaaaataaaaaaaacatttcaccaaaatattatttttgaaatttcagcggaacaaacgctgcgcgaaaaggcgcccaaagaaattcgggacgagctgacactacgctgtgcccaaatgttggccgcctaccgcgagaagtgcagcgagcaggccccgcttggccaactgattttgcccgagtgcgccaaactgttgccgctgcatgtcaactgcattgagcgccacgacgcgctcaacggaggtcagtagagcgaacatttaggaaatttcatgatgatacatgtgattcgggaactgtatcggaccggatttggtgtgaaaatcctgtaattttgattggacattgatccgattccattttttaaatcccgtgaaaagcccggcaacacccaggataaatgatgtcattgtggacatggttgctgtagtgttcagcttcatactgtatttacattcgagcgcattgttatttgcacttcattcctccgtcctcattttttctttcgttttttaa

SEQ ID NO: 57782 - DNA, 717 bp, Heterodera glycines
atgcacttttcgtggtttacctgtgcaactttcatgtgagtgcaattctttcttttatgctttacgttttgcctattttttgaaaattgtttaagcccaaaaaatctctcacagacttttgttggtcataatgccaattgttaattttttttttttttgaatcaactgcttttattttttgtattacacatttgtatattaactaataatatgcaataaaatttagtacaaaagtccaaaattttgcactcacgtacaattttattttaaatccgtatttttataaaaattgaaaaaatcaactaaaaatttttatgtgaacttttaatttttactaataaacggatttttgtaaaaaaaaatttagaagaataaaattttatgaattttgcagattctgttgcccttagaatttattttcctgcaaatttcaagtgattctgacaaaaacacgaactgaataagaaaatcaacttcttcatacttcgtgaaaatttatgtccatataattaattatattccctaataatttaaataaataataataattaataatttatcttttagtaattttgcttgatagaattaataatcttttaaccaataatcggtgagattttgtacaaataagcagattgttgtttaagtagacggattgtgctggatatacaaaatttgaatgattaaccacattttgctaaacaaaaacaaaataaa

SEQ ID NO: 57783 - DNA, 183 bp, Heterodera glycines
ctgatcgtttcccttgttgaccttttcggcaccgccgacgacctttggcctaaatccgcttccaccctgaccatccttctcacaatcatttcgctgattttggccattgcagctgcaatgcttcttgtttcgggtgtccaattccgatctccgtatttgctagtgccacacatcttaatgcag

SEQ ID NO: 57784 - DNA, 1350 bp, Heterodera glycines
atgccaaaatatggaaatatggacataaatcgcgaaatatggaaaaatatggaaaatattgatatggaaagtcatcctagaagcttcaaaccaagcaaacacatgcttttcgtgcgtttcaggcctcccacagtccaggaaaaaaatatggatttcgatataattggaagccctactcatcaatttcgaccactttgttttttcctccaattttagcctgttttgaacattgttaacgacaatagttgaagaaattgactatagaaggatttgacacgcccaattctttgacagcgtttttgtttcggtagtcttcaatccacatgtagatgatggtgaacatttgtgtgagactcaaagcactattgtgaaaaaaacttttttcgcgcacagatttgtatagatgacagtgttgacagtgccacttaaaaaaggacttaaaaaagattttttttttcaaattacttgaaatccatcctttatttggctacgttttgtcagagccatatacatagttccaacaattatggcataaacatttattttggacaagtccgctgtgtgccaaaaattgtaaaatctcttcagagttttgggaaaaaagccatctcaaatttatatcgtccaatgttggaaaagcgatgaacggcagattgttggaatcattaatagaataccttgaaactttaaccatttgctaaaatgaattaaaaaaagatttaaggcaaaaatttctcaagaaaaataagattttagggtccggcggtgccgataggcgccgccgggaaatttttgaaaatttcagtgcaatttattaataaaatttgtaaaaaattgttaattttttgaaaaaaaattcaaaaaaaatttccgaaaatttccgactttttatcaaaaatttcggaaagcggaattccgggggtccaaaatttttcggaaatcggaattccgactccaaaaatgtcggaaatcggaattccgtgccatccctgctccaaactgttgcaattgtgctcactttgaccatcatttggcaactcctttcactccaccagttctgcggcacttttaccgacccaaaagtcaattgcattagaatttcacaaatgatcaaagtgatgtgattttcaggccttcctctgtggtcgtctttgcgaacgctatacgctcattggaaaggactcaaaaaacggcgaattcggcgatgtgatcgaccggcacaacccattcattctttatgaacatcaccaatggacaaccaaccaaagaacagaaacgccaattctttcacttcttggtcgcgagattgcctcccgctggacgccattgcattccgataacggcccgtaa

SEQ ID NO: 57785 - DNA, 713 bp, Heterodera glycines
atgatcagcaattttggctgctttttcctccagtttttgccaaactttggcctgttctcctccgtttggatcgttttctttgttggcgttgatcgactgatttctgtccttctcccattaaggtaatgtacgagaaaaaccctgccgatatttagagattattttagtggaattttacgaatttaatcatagaatatttcactaaaataatttgttttaaaaatataaatctataaataaatctttggacttcagatatggtctctttgagcagcaccttttcatttatattttaccaatgcttacggttacatttggctacagtatctatgtgcttgtagaagctgcaaaatggccactttttgtataccccgactggtaaataaagctcatttttgaaaatttaaaatttcattcgttttttaaatattaattttaggccagttttatgcacaaattctgacatgttcagttttggcatgaccacaatgctcctgagaaatggtctggtcattaatggggtgtcaatcatttgttatttgtttgttggactgtcactgttttggtcatggcaaaaaagttagttggactaaaatttaattatttttaatttctttctgtgccctgcctcggcctttcaaaggggctaaagattttacatgggaatacaattaaaaaacataaagctaaaatttttcattaaaatatgacaa

SEQ ID NO: 57786 - DNA, 587 bp, Heterodera glycines
ttcacttgcgccgctttggaattgcccgacttttcggacttcgcccgactccgtccgttaattgacgcactcattgctgaattggtaggccttttttacctcactacttacggaaattaaaaaaaaaactcgaaaatctagttttttttagtttgttttttgccaggaatgggggggggggtagggcaagaggatgcaaaatcaagaatccggcattcatttcgaccaattccaaaccccgggcccgatttcgaataaagactcaaatatttgaatttcgcatttgatttggcattggatgccaaaaatacacaaagaacaaacagcaaacaaatgttgtgtctctcccattttaggatctcaacgatttcctcggctgcaccgcggcgctcgaaatgctggcggagacggccgccacggcgccaaagtgtgtgcccttttttggccaaattggcctcctggacaaagtgtacgcgctgttcatccgaaccaaggaggagccggacatgggcatcattcacattggtatcaattcccaacctaatttggatacacttcttcgggatttcggaccatcgcaaaattaa

SEQ ID NO: 57787 - DNA, 690 bp, Heterodera glycines
atgaaccgaaagagattcatttacccacgcgagggactgaaaatggtgccatgtaaaatggactgctttatactggaatacacgacggagtctggtgcctggcttgacacccatcagcattttcttctataattttttcaggctcgttgctccaacaagtcggctgctatggaaaaagcattttgtgccattggctatttgcaaaaagcggttggatggattttaatggctgttcttcgtgtaacaggactgagtgcaacaaacccggacgaatctatccacttaaacaaaccgacatgggtgaatgatggatgaaatatctccttttcatgtattttattggcaattttcagatgccaaatgtgatgtgttcatcagccaattcactgctccaaacaacacgaaattgtccaaagaacaaattgacgtattctgcgcaaaagtggaggaagtactaaatatggcactaccaggcaatgcaaattattgcatatatttaattgaaatactggccataagtaaaaattcacaaatttaaatttcaggacaaagttgtttggacggaagggagtgcctatttggctcatattgcaacggcactctatgcatgtgtagagaagggtttgttactgtgcgttcatcgcaaacggatattcgctgttgggccaaggatgaatcatttgacgaaat

SEQ ID NO: 57788 - DNA, 1409 bp, Heterodera glycines
atgctcttataccattggcaactacaacaagttgaagcagttcgacgccttcttctgtccgctggttggtgcctccgttcttcttccgttgccgtcggtggtggtcaatgcgttcgaccatttgcaacacgcgacggtggccaaaaacgcgtcagtgatgatgaatggaaaacggagagggagcagtatcagaagtacgagcaacacaaccagcaacagcagcagccgagggtgggcaagcagggcggcaacggccaatggcggaaaggcggcggcgccgtccggggcaaaaaaagcaccgtagtgcgcaacgatttcttccaaatttatgtgcgctcgggcgcgggcggcagaggactggcgaggtgagagaagccatgtttgacagagaatgattagtgaatggtggggggagggcagggcatgtcgaaatttacggcattagtcgaacgatttaaaaaaaacagttgcgactgaattttcaagttttcaaaatttttttttcgtgggaatacggtgccgaaatttacggcactaattacaggaaatttaaaaatatatttggctcgctccgttttgtgcctttcttttttttttatcccccccccccttttgagccttttaaaaaaaatcttcccaatttttgcatgccttatacatttttggcccaaatttgaattattttttttaaatcaaggggaaatacgcacaataatcgtttcaatttttcattaaaaaatttttttttggattttttaatgaaaattttgaaaaaaaattcgagggggcggcgactgaaaatttctgcatttttcaaccattctttgcgcctaaaaaatacataaaaattgaaaattgctcccaaaaaaggtacaacggcatcggcggttgcggtggctttgtgtacgcccggccgagtgccaagctgagctttgaccgcttctgtggcggatttacatccgaccgtgccgccaatgcggcttggaagaaagacgacgacgatgaggaggatgaggatggccaagtgaacgaggaagagcagcggaggagggcacgaacggtggcggcggaggacggcgaaaacgcgcggcagacgaagttggccgggcgccatggcagggacagggtgagcgcagaaaccggcacaattattgccctccgccattttttggccgaaaattaaaaaaaaaattttgtttttatttatttttttaaattttttttttttttgtaattttgggtcaaattttcaatgaataatgggttcctataggagctgcagaattttttttgaagtttcaatgaaatataagaagtaaattactagtatgtctagtttgaaattaaaaaaaagccttgatacggatttttttttggaaattgattgggaaattatttgaaaaaataaa

SEQ ID NO: 57789 - DNA, 904 bp, Heterodera glycines
taacaaatagcactcaaatttccaaaatttttcccggcggcgcctatcggcaccgccggacctccgttttcccactatttttacatggtttttgccttaaaacggccaaaattgggtcatttttagtgaaaagtgcagtttttacccagcagcggaaaaaaagggtttttttttgggtaaatagcaaaaaaaaggtatccagttggagcaaaaaaaaaaagaaaaagatcttcaggtcgggccccccccccgaaaaatgtttctagatagcctctgtgtcttctaactttataaatttacaggtgccggttattccaaaattggttggcatccgcaagatgaggaggaatgggagtacttccgctattgctaccgctgtttggcattcaaagcgccacgcgttcaccactgttcgaagtgtaaccgttgcgttttggtaaataattgtgccataggttcttctcatcattgcgttttcttttgctttagttgatggaccatcactgcccgtggattaacaattgtgtcggacaacgcaatcagatttatttcatcaaatttctggttgtttccatcgttgggagtgtccatgccgccgtcgttctcacgagttgtctctatcaagtcattttctttgtgggtttcatttattttcttgattttctctaaaaaattaccaaattttcagtttatgctccaaaatcctgactctgtacagcaaaaccctctccaaagtccgtccgatttgtccatctcttccttttaccttttcattgcctccattttcgctgtcggtctttcctacggtgtgataattgcggttggaattctgctaattgttcagctgagaagcatttatttggaccggacaggcatcgaatcgctaaaagacaaatgacttaaa

SEQ ID NO: 57790 - DNA, 466 bp, Heterodera glycines
atggcattgaaccacccacttgtccactgggaaagttggtttctgattaaaaatattaggagcaccgggcgagagtcgaacccacgcctcgggatgggtgggcaaccaattctccactgaactacgctaatttttgattttttgtaagccactaaattttaattttagacggcggtgcaaaagtttgccaatggcacagtgttggcgaacagcgactggcgcaaggggacggagagtgagccggcgggctactaattaggacacgcatacactaattaatttatgccaattatttatgtcgttttctttttagctaatacttatgttgtttcatacttttgagagaatttcaattttttagatttttcatacatataaaagaattttactttttaaatttgttgttttgttactcacgcccgttcccttcccctaattgccctcataatttgtattgattgctgca

SEQ ID NO: 57791 - DNA, 609 bp, Heterodera glycines
atggcggtgacgaatgtgaagacggaaaaaatgcgggaaaaattggcgccgcaaaaattgggagcaattagcaacggaaagtacagtatgacgacggacgacaagggcggcggcaactacaatacaccaccgtacagtagtactctcaagaacaacagtaacaacagtgacagtaataattgtcgtaaagacaacggtggtggtgcctcaggattgaaaaaccagcagaatcccggcatcggttggatctgattttgtcgcgcattcattaacaagaaaatgccaaactgagtcccgcgtttctcgggactcgagagtgggaccaaaaactcgcgacccaaaaagcccgagactcatttcgatcaaaatccttggcctcattaagcgcaaaatgtgcgccttacgctggacaaaatgcgccaaaaagaggcgcaagcgctgcgcgagcgctccaccgatgtgtacgccaaggattatgtgccaaaaaaatatgcaaagaattcggcggagtacggtcgaccggtcggcggttaccgtaaaacaagaatttatgattgttttttagccgccagggtcgctgacggaaatgagggcgaacaaagcgtgtaa

SEQ ID NO: 57792 - DNA, 668 bp, Heterodera glycines
atggcacccaaaaaattcatgccaatggagttaatcgtggaaattgtcactttcctccaatttcgtcggcgatgggccaatgttcgcgtgtcgagagcatttgatcactttctgcttgaacaaattggcttatttttgacgaaaacgaactcatcggtttgtaacatcaaagcaatcactttttaaagaatttgatcaatttaatggtttttttcaaatttttcaatttttctaagaattttaaatttggtttttcatgcatttttccattaacccgttggacagttaaaacatgtaaaaaaaaagccccaatttgtactatgccccgattcactgttttcgataaaaaattcattaaaaaaacaaacagaaaagattatttgctttttagagatgagaattgaacttttgagtgaaaattggaccaaataaatgggcataagccactacgaaaaaaagaggaaatgcccaccaagcttcatcctgaacctccaccaaagcgcaaaataaacttattttggaattaacaattttaggaataatattttttaataaatatttttaaatttcaggctaaacaatgcttaacagagtttggagaaatgataaagaatttgccatcaaaacacaagagaaatgtttttaatgaaagcgcgcgtaacgaaggc

SEQ ID NO: 57793 - DNA, 189 bp, Heterodera glycines
atgcatgtgaatgtgaagaatgaaaaagacaacgttatggaaatgccgaaacagcaagtgctcatctcaacaatggactcgttcatttttgcgccagagtctgtcactaaacctttgatgaaagatttaaagttggtgcaggacaaccaagtctttaaggctggacgaagtcttggcaagacggggctg

SEQ ID NO: 57794 - DNA, 171 bp, Heterodera glycines
atgattcatcaaatcccagcaaaagcccccacccgtcccgaacttcaacagtccggccaatgtggatgctgccgtaagtggattgattcttcggcatatgaatgaatatatatcatttcatcaaaatttcaggttttgttccgcagcgatccggcacgatacagggaggaa

SEQ ID NO: 57795 - DNA, 387 bp, Heterodera glycines
gtgccatgtattttgtcaagtgccataccattccaaaggacaattccgtcatcaaattaaactctcgaagtgcacgaattcacatcactgtatttttgtagaatacaagtgccactttcaaacgttattctttaaagcgctacgccctcgtcattgtccaggaagtgccgcctaaacagcgattgtatctcaacttggaagatttgtccggtaattactgctcggattggtcaattttttgtttttcatctatcagcagatgttgaatgcgttcaaaatcgctttgcgtttcgcgcattgacctacccctggtcaacaccgcaaagctttgtgttcactagcgatcagatccctgaactgacagccaaattgcagtgtctcctgaag

SEQ ID NO: 57796 - DNA, 108 bp, Heterodera glycines
gctggttatccgttgccttttaagcgcccctcgggatgggaggagccctatcggagagataaaatgggggggggaagggtaaaggccatttccggtcccggccttaca

SEQ ID NO: 57797 - DNA, 2258 bp, Heterodera glycines
atgaaggaaaaacgcgaaagaatttttgacttggaatatttttacaaaagcaaaaaatttgaaggagcgaaaaccataaaaaatggacaaaacattgaactcgaaattgatcagcaacacaatgccaaggaagaaggcattgaaaaggttgatctgcaattttacattttcataaagccatttggccgtgatgaagttccactcattggccatgcgcgagtaaaaatggcaccggaaggatggctgttacgacgctatttgaccatggcagtgatttggccaaacccatcaaaaagatatgtgatcaatttgggtcgcattgatccgcccggcctttattggaatcggaaactgatggttgatcagaaaaatgatcacgggacttaccatgcccttttgtatgccaatacgatcaaaatcggtcgaactgagaactccgaggagaaaatgcttttgggatacgcaaaattggagaaagtttatgaccaaaatgaaccagcgatagacctaaaactgaatgaggttaaatttataagtaattattaggaatgcgactttagtgacgaaaaaattgacagagtccaaaatagtgacaaaataatggctaaaagtcaagagtgatatatttttagcaaaaaattgagcaaaaataatttttattaactaattgcagttgcaaattaggtacatttcatttctaatattttcttagcaattatttacattatttaaattgataatttcgtcaaaaaagattaggcagaggaatttagagaaaatttttcaattcttaggggtgtatttttaaaaaatttttaggccgtttcttaggggtattttttgaaatttttttgtttttatttttaggggtgcattttttggtttcattgcatttttgtaaagtaatttcccaaaaatatccaaatagttaaaaaatagtggcaaaacgccaaaataatgaactttaactattttaaggacaaagcgccctaataatgatttctagtgactgatagtgtcatcagaatcgaaaattttcaacgcagaaatgagttttttgcgctcctttcttcacaaaaaattgagcaaaaaaaaaaaatagttaaaaaaaattaaaaatcgcatccctagtaattatcggaaattttttttcattgtttggcataaggcaaaaattgaaaaacccccggccgatggtcaaccccgtcccaattcttgctccgaaaattatggttaagccccgccgctcggggaagaaattctcgaggagcgaggggaagggcaggccggagacctgggctcgggcagaaagcccaaaaatgtcggtggagctgagtcgggcagctcggggtcagggcttaaccctacgataaaccatgtcccgaaatttcccatcccaatattggtgttccaaccaaaatgcatgggcaaaaagccaaaagcccggcacacgagatcaaaaaccctcatggcaaaaagaagacaattctgggtttttggtttcgaaaaataaatgagggcttcattaaaataatgattttaattttgcaattcattttaaatttcagtttaacgaatatcaattgtcatttccaatcaaacatagtctgttctataaaagcattatggaagagacggaacttattgagaatgttgaattaaaaatttatcaattcgaggttaaaacccaaaattttaaattaaatttttgaattcattcataaatttaacttttagaatatttttgcaaataaaacgaataaaagagagataaagaagaagcgtgaagaagaaatttgttcaatatgtttagaagcaatggaatataaaaatgaacaaattacagaaattcataatgacggaaagggcaaaataacggttgttttgtcgttaattaattactttaattacttttaatttagcataaattccacaatgaatgcatcaaaaattggttaaaatttattttttttttaatttttatttttttaaattacttttaggtttgcacaaaacaagatttgctgtcctctctgtatgatggaagcaaatttagtgctggtaagaaatttggatgtgattttagcagattaatcttaatagttatagaattgagaattgatcacaatattttgtgcatcaaatcaaattttctcatacttttgctaaaaaaattatatttttcattttattaaataataattattttcttaagattcaaaattaatttgtattctttttcagtcatcaacttttaa

SEQ ID NO: 57798 - DNA, 354 bp, Heterodera glycines
gtcaatttgctgtttgcttcgcctctgttcattttcattgtgatcgcttatccgccactgatcggcacttggggtgcccttttctttatgccaatggcactgatcagtgccgtacttttgtttttgctttatcggtggatgcccgagacaaaaggcttatcagtgaacacaattttcctgagaatggccaagttgggactgttaaacagcagcagtgagggaagcactacaagcataaatggtgatgatgaggatgaagaaactgaagcattaattttaaaaaattaaaattaatttgtttaattttgaacaaaaagttgtattaaaactcatttgtattttaattcatattta

SEQ ID NO: 57799 - DNA, 721 bp, Heterodera glycines
atgcttttatatttatttttatatttatgtctacattattccgtttttggagacgggtaagaaaactaatcaaaaactttgtcctacgaacgcatttttgacaaatgaaaatataaaatttgtttaagtaattttccaaaaatggaaaatatttattaatttttaattaaaaattttggaataatgagaaagttttaaccctccgtgagaaccttatttctaacaagccagaagggcatgaggtatttttttgcattttattaaaggtttttttttagcctatgtttaaaaaaagtttggggttttggtcttttaattctttttttaaaaaaataaaaaaataataataattagaaaaaaaaattaaatttaaaaaaaattaaaaaattccaactgattcaaagaaaaaatctataatatttaaaagaccctgggatagggtgatttgccgaaaaaatgcaaaatgtaaaacataattccagtccgccgccgcacattttcccggcaccatcgaaatgtgaaagtgggactttgtttgcgccatcgttttgttcatcgcatttcttctatttgtgctcaaatggacaaccgatcagaatgaaatgtccggcagaccttgtgtttgaccaactgatttctgtgtgcaactacaaaaatgcatgcggcaaaaggcaacaaccgtatgcttcttgtggaagaattacgatattttgaaaaatta

SEQ ID NO: 57800 - DNA, 562 bp, Heterodera glycines
gttaacggaaagcggcctctcaatggtcaattgggacattatcaaaacgatgaagccgccattcactcaaatggaatgggagaaggaattttcaaaatatcggcaatttccagaataccgattgtgtgtacatattattttgtttgatcacttttttttacaaatcagcaaaaattctgacggcgaaatgactttggccgacttcaaatttatttggaccatggaatatcttcatcggatgtgggggagagccatcggacttgtttttctccttccttgcgcatatttttggcgtcgtggttatttcaacggaccaatgaaattgcggatggttttttctggcctacttattgcttctcaagtccactttcattgattctttcgttagggtttccttttccgtctttttagggccttgttggctggtggatggttaaatcgggacttgacccatcaaataattcgaattccgacgtgcccagagtttcacattatcggtgaggactcaacatgccttttcacttaccttattttattttagggttgcgtccccgacgtcggg

SEQ ID NO: 57801 - DNA, 697 bp, Heterodera glycines
gacaaaattgctggcgatggttattcatacacggatgacaatgtgtgcgtgttcaacaatgtggtgacaagccgtggacctggtgagagaccttgctcaacaatttgattgaatttaatttaaaaattattaatttatttgatgaatggcaaccgattttttgcagggattttttgagtttttatgtataattaagtttttattttttttaatctaacccaagttgcataaaatttggggtccgtttagcgtatggggtagctaaagcgcgaaaaatttgagtctgactatttttaatgcatttttctggaaattttccaccccttcccccaatatggctgtaaaaaagccctagaaatcatcaaattacgaatgaatttctagcatagcccccaaaaaaaaactgacaggaacccacggattttaattgtggcgcaattgtctggcgcctaactttcaaatcagttaaaaatttaggaaaatttaatttttataatttcaattgcaggcactgcctttgaatttgcgctgaaacttgtcgaaatgttggtcagtgaggagaaagcgaaagaaataagcaattctttgcttgtccattgatcagttgctcttatcaaactagtcaagatgagatgatcaaaaagcaatggaatatattcattgaatttgtgtgatggatacaattttaagcaataaa

SEQ ID NO: 57802 - DNA, 72 bp, Heterodera glycines
atgacaccaaactgtgtattcccgaagttttgccgccggaattcatctctttggtcgacccaaatccgaaag

SEQ ID NO: 57803 - DNA, 231 bp, Heterodera glycines
atgaattgcagtaaaatgttaaaaatcaattaacacttataaattttttaaagctttttttatttttttattttataatttttttttatttgcagatcaaataaatattagagtgcagcgggaccgggaaatttgggcaagaccgggaccgggacttttttggttgaaaacccgggacttttttggttgaaaacccgggactttttatattaaaaagaaattttatagaga

SEQ ID NO: 57804 - DNA, 901 bp, Heterodera glycines
atgacgcccatttttctcccaattgccttgtgcattttactccacactgtctcttttccccacaatgcccacgccgccggagattatggtaaatattagtgatgcttaattccctcagactcgagagtcacggcttgaaaaaaatttactggttctttggagtattggtctagactctatgggtcaagtctcggtcaaaagtcgggtctcggctcaagaaaaattacgggtcttttgggtcttggtctcgactttaggaaatcaaatctcggggcctagtctcggtctcgagtcgagttttgctctcgatggtgcctagtcatggtctcgttgctgttttggtctcgagtatcaaaggtcaagtctcggcccgagaaaaatcacggatcttttgggagtctttgtcttgagtctaagggtcaagtctcggtattacaaataaaaaatatgaaaatttccaaatgttttctcttttttttgtaatattttaaaaaaaattttccatttaaagcatctgatgatgagcaaaatttcccattgctggacagcgaagacagctcctcaacagcttcatttactgacacagaaaattatgaaagccacactgacagtagtggacacagtaaccaaacgccgaaaaaacggtggcaaaaagcgggaaaacagatcattaaaaactatgattggaaaaaagttgaatattatctcaacaaagaagtgctgcccaatatccgtaaagaggtacagtatccaaatgcaaacggtttttgtgtttcagcaaacaaaaaaaaataggcagtcgactaaggaccctgctgggacaggaactgagagtgaaaaaagttttgtaatttttttggcaggtattatggctcaagaaaacatgtaaatcaataataaa

SEQ ID NO: 57805 - DNA, 952 bp, Heterodera glycines
atggcggcaggtgcccattttaatccgtacaatgtaagccatggagcaccagacgcacgcgtacggcacgtgggcgacttgggcaatttggctgtcaatgtgaattaattatggaattaattaagtatagtaattgaccaattgtatgccaattatactaataatcagtgatttgtagtagtacacttatacaattggcctaaatacgaatttaatttggatgaataattgactactaaaatcagacaagctttattgaaataagaatttgacaagacatgatgataaatcaatatcattaattagacattgttttgttaattgctcatgcctttatggcatgtgatcaatcaatcaatgcgtgttaaaattaaagcgccaattgtcccaaaatgaatttttgctcccattgatttcgttttctgatcatccaaactactaaagctctattagctaatataaatacctaatcacatatcctgtgctcgtattggcagtacaattttaaaaatgctttcatttggtcacgatttcgggaatttaaattttgaaaaacaggcatttttaggctgaaggcgttgccgtggtgaatattcaagaccgattgttgaagctgaacggattgcacagtgtggtcggacgagcattggttgtgcatgagaagcgggacgacctgggcttgggcggcaacgcggaaagcctaaaaacgggcaactcgggcaaacgggtgggctgcggcgtggttggcatcaccaaggagctgtaatcaaagtgccatgatcagcccagcatcggctgatcagtcgaaaaaaaagaaaaaacatttgaattaagtgaccggtgatcgggttttattttgtatccaaattgatcagtcaaggaataacaacaaattagtgattgaaaatgtcggaaaaagggcaattgtctagaattgtggtcccaacaaaaa

SEQ ID NO: 57806 - DNA, 439 bp, Heterodera glycines
cataaatgggacaaatgggacgaatatattcgataatatcctttttttgatcaaagaatttaactctggaattttgataagcgaaattaaattattttgcaaatgaggaaattgaaaattaacgataaaacttttgcattacattagagaaataaaattcacgataaatcaaattaaataataaatttcaaaaatttaaattttgaatggcatttcaaataacacaaaggcatcgtttgcattgccacttttgactggcaattaaattgtaggcaatataaatttaaaatgtttgttcaaacaatttgcttagatttatgcccctgatatacttaatttcttaattctctctttctctctcttatcctctgatcattgttcccccgtcaatgtcagcccggggggcggtccttcttttcactaatcgagactctttata

SEQ ID NO: 57807 - DNA, 690 bp, Heterodera glycines
atgaccgccgcttggcatcgcacagacccaaaactgaaggcggagcgacgaatggccgaaacgctggcagaagcggcggtggccatttcaatcacttcattcaccgacatggtaaagatttcatctctggttaaggcagactcagttcgcttaccgtaatgcctttcctaccgtaatgcgttgttcccttttggcatcgtcccttttcctttcagctttcttttggcatcggttgtttcaccactcttccggtggtccgtctcttctgtctttacaccttcttcggcattttcttcacttacctttaccaaatcacttattttgccgctgtgatggcttttgccggccaaatggaacagtcgggcgatcattcgcttctttttggtcttcgcgcactccgtcccgaggaggcgggtgggaatttaatgggactaattaaccccaaaaatatttaattaattaactcattcagacagcactttcaaaagatggatgttggccggttcatcagcagaagcagcagcagatgagggagaagaaaaggggggagaaatgaagccaaacggagccaaagacgggaagagaagggaaagggacaaatgccaaagggtggagggaacggaggaggacaattggcaaacggagggacaaaaggaccaaaaaagggacggacaaaaggaccaggaagag

SEQ ID NO: 57808 - DNA, 770 bp, Heterodera glycines
atgcgttggaattcaacatttcaacaactcccaccaaaccaacaaaaagaaatgtataatttggtaaagaatgggccaaattcggcctcttctagccgaagtccacagccatttcaaagttcaaaccaattcccatcaaaccaatttgggtcaggtcagtcgaacagattctgtgcttaattagctgaaaattaactgaaatggagaaatttagctaaattacgtgcaaattaatttgctgatgttttaggcactgtgccgttggggaaagcatatttgggccaacaaccattggtggcctctggttcatcaagtagaccattacaatccagcggcacctttttgagaccaaatcattcgagaaatcctagatttaactcatcaggcaactttcaagtaccacagaacagttctgcaaatgcttccgccagttcttcatcgtttcactcactatttggattggaggaccctcaaaagaacactttcgaatcgatgttcggatcaaagaagggataaagcagcattatgtgctaatgagctaagagagaagatgagaaagaaaagcatgatgttcgaccatcatatattgttgaccaatttcatttctgtcccttattttttgtaacgtcctttttctttcataaattactttactaggtcacttcacaaaaagtgcaaatcggggggggggggtaaccaaaaaggcaaaaatcataaatctgactttttctatggattttttattaataactttcagtttttgtattcga

SEQ ID NO: 57809 - DNA, 3063 bp, Heterodera glycines
atggaaagtgatctggacaaaaacaatgtgtgccaattccaaacaacatttccattacatgattatctcaacaaaattaatcgggatttggaagttgagcaaaaatgtaagatttgtgaaaattaaaaaaaatatttatgacgaaatttatataagtgtatttatatttctataaaaaatggttatttattctgtttttgtttgacctaacgtaaatccatttttaattgattatttaaatacctcctaactcaattatttatatacacaattttcggcaattaaattcgattaatttccaaatttattgaaaactgaaatgaaaatcttaataataaaattataattatctttatctttgcacaaagcaaacagtttttaataaactctttcttttaaaaacaattttattaaattaaataaatatcaaaaaaaataattaaataaattcatatgtaataataataataataattatttttttttagttaaatcagagcgccagcttaaacgttttattaactttgccaaaacaaggagttctccaccaataaattctgatgtgcatccaatttccaaaatttcaatttcgatgaaaaattttccaattggcccgtatgaattattcgattttcagaacaagtcggaaagtgtaatgattgaaggtaaaacatataatgtttcgtgtcccgacatttgcgcctttgtccaaaatcgggttcaaaataaagttttttttcaatccctgatcgcgtaagcagctttaaataagctattgaaagtgattgtatccgatcatttgatcttcaaaaattaaaaaaaaataataaaatttttcaaacaacaaattattgaacataatgaaccaaaagaccgtgttttcttaattttattgctaattaggcgctatcagagtttgaaaaaattcaaactttgagtccgattttggacataggcgcaaatgtcggggctcctaatgtttagatgaaaaaatgtttttattctcatttgcaaaaatggaaaaaaaattctccgagatttttgaaaaagagccttggataaaaaagaatatatgctgtttctccattattatctgcatgaaaacgccgcccataaataatttcaacatttttatttaaatcgaattcaaaaaattaatataaaaaataaataaaataaatatattttcagctgtgaaacaagacgcaaatgaaactgatcaatcatccggcattgcaaatatgattgagataattgatcctttgaaatgcagcgagctttgtggggttgccgatgaactttttattgaaaaagatgaacatcaaagctttcgtgtaagtaacaaatgtcacattggcgcgggtacttttggcgacttaaaatttaaagtgtcattaccaattgattagggtaattaaatttcatttaattatttgttcgatttgatggaataagtgttttctttcgcctggaaaatttaaaaagtttaattaagaaatttaaaaaacttcattttagcgggggagtacgaaaaagaattaaatgaaagtaaaattaattcgaaatttaatattaaaattagctatatataattaaaactcattttgcacgataaaaaataatgataaaatgctttaaaatttaaaaataaaaaaacattaaaatttattaatttttaaaaatttaaataaaaaatataaaaaattggaattaatttgtccaactatattaatttatttttaatttattaaacaattatatttgcgattattctattaataacttcttggaattaattgtttaagcaaagtttttcatgtttttaaaataacggatttctgacaaaatatatcaaagtctttctttagcaaactaattggtggacaaaacaacaaattgtctttttactagagaccggcataattaatcgtttaattagtctttttcgattgtttgttgttgtttttttgatttgaatatcaaaaaatcgatccaacaacacttcccctatcaattttttacaatacttttgaaccaaaaaaaaaactatagttactcaatttttaaattctcgtttttttatttgtaatttttttttaaaacagacagttggcggcgaagtcatcaccgacaactattatccatgggttgtttttgtccgagtccacgtgcattgtgcatattcggccccaatctacattcactgtaccggagtgcttatatcgtttaagcatgtcatgacggctgctcattgcatgcatttaaatacaaccatgttaaatgagtgcattggctggatgaaattttttccagctgggtgtgttaattaatgttgatttgtttttacaaggtgtgctcggggtgctgagacattatatagtagggtgggggaccccggaaacggtgcgggaattccgggttttcccaggtcccggagtttttaaacagccaggtgcccatgtagggccggaaaaataagcattgataagtagggttgtaaatttatatggactaaaaaacgcgaaatatggactaaaaaagtacgaaatatggaataaaaaaccaaatatggaccaaaaaatggactaaaaactgccaaaatatatgttttaaacactcaaacattcctaaaaaggtttttatatatatatatttgcttaaataaacttaagaaatacaataaacaaccaaaaaaaatggatttaaaacttaaaaatgcgaactttttattgtcgtccgttgtataaaaatacctccaagttcattttaaaaaaagaaaagttcgcaaaaaaatagtgcaaatatttattaaaatgccaaaatgacaacgaaaaaacaaattttttaaaatttttatttgcagtcgatctttaggggtgtatttttcgctgttttgcatttttcttgtgaaaaattgccaaaaatggccaaaatatggaccaaaaatgctatttttgagcccctttcttcatagcatatgcgcagaaaaaatatgttaatccatataatttacaaccctattgataagaatggtaatttgagttgaaaatttttttgatggaa

SEQ ID NO: 57810 - DNA, 1693 bp, Heterodera glycines
  unsure (1)..(1693): unsure at all n locations
acagttggcggcgaagtcatcaccgacaactattatccatgggttgtttttgtccgagtccacgtgcattgtgcatattcggccccaatctacattcactgtaccggagtgcttatatcgtttaagcatgtcatgacggctgctcattgcatgcatttaaatacaaccatgttaaatgagtgcattggctggatgaaatttgttccagctgggtgtgttaattaatgttgatttgtttttacaaggtgtgcccggggtgctgagacattatatagtagggtgggggaccccggaaacggtccgggaattccggattttcccaggtcccggagtttttaaacagccaggtgcccatgtagggccggaaaaataagcattgataaaagatgtgaatttgagttgaaaatttttgaaggaacttagtggaatgaaatttttttaaaaaaatacacattttgcctaacataaagatgcataataattagctttatactgccgtttatgtaaaaaaaaatttggatatgttttttcgtagttgatacggtaacagtatgataaaaaagctcacctcaattttttaaattgattgaaatttttaagtttaataaattgtgcatatttgatgccaaaaaatctacttttctataagaaagattcttttttttgtatattttcaaaaaaatgaattaaatttcgcgtttttttcgccactatttaaggcccctaagttgtaatgtttctcgcttaaaaacccgaatactaattattatatttgaaaaagaagtaattttatttaaccctattataaaatttttgattcgtaaaattgtctgttgaaaaccaggtcttaatataattctaacaaaattcgaatcaaattttattagaaattaataagttaaaaatttttaaaaattagatggaagaaaaccgagttgcacgacgtttacattcattttagttcatctactatgagtgaaacaaaaattgaaaaagttcggagaatttcaattgtcaaagattttgacatgtcacatgacaatttattacggcccgacgatcttgccattctcgaggtaaattttttctttataagattgaaaaataaaattttttgaaggcttttctcattttatacagcgacacactaatagtaatgtggggtagaagaggtaacttgccggtgggacttgaacccacggtccatttatagcgtggaatgccataactgactgacaaatgagctacggctgttacaaaaaaaaatttaacctgcttttgttcgagtttttaatgttaatcgcagtaaattagaggatttggcgaatttttatttatttaaagaatttaaaaaattagaaaaagaacactgagtttttctaaagatagaacgaattttttttttcttaaatttttgcttttgtgtacaaaattcacggttacagaacatgttggttctgtttttgtagctcaattcattattatcccaacgaccaaacattttataggttagcataggagctattttcatggaatttctgaatttttaaattggttaaattttttaaaaagaatccgcctattcttatggacaatttataaaagcattaattttttttanattttctttcattcagctaagccgaacattagaccgaaaagcggacaatgttgttccgatttgcttgtataa

SEQ ID NO: 57811 - DNA, 2501 bp, Heterodera glycines
cgtcaaactacttaaacaaaagccagacagcaactttagtgccaatacggtccgcaatttattgcaacaaaatttacaacaacattttgccttggaaatacaatccaagcaaatttgtatgcgcaagtagcagaaataagggcattacaagcgtaagtaaatttatttgtttgaacaacagttagtcatataatcctctggacatttaatgtcgaaaagtgtccgagttttttaggtttccaaatgtataggtgtgattttttaaattttattttataacattcattttctcattgttttcttgaaactaaggttgccaaaatataagtgatttttcttcattttgtgatttttctcgcgtttacatttggcattgtttgactactaatgccttttttgcttttaaaatttctgtcaattttgattcaaaaaaatgtgtgaattttaataatattatgcgtaataattatttagggcgattgtggcggccctttgatgattgaacgaaacggattgtattatttaattggcattgtaattgcagcgtatcacccaaaagcaggattctacaggaaatacgttcctggtgatatttgtttatttttttatttttgaacaattaaatgaaaattcttggtaggcaaggtaagaataaaaatttatgactaactgaaaatttttttcttacaatttaaaagattttaatttaatcgaaatgtacctaatggtcaggtttatgataccattccagcacgaatcagcaaaacaattaatgattgcatatactagtttttctatttaataaaattttggcttggaaattttggctatgtttttgcagataaattcttggcgcatggtcatatttataaaattgaaaatgacaaaaaattactgataaacttgctgaaaaatagcaaatttatattcttgatatcattcgataactctaagagagttcatgattagcttgtaaaatttcaaaaatttcgttaactttcaaaggggttatggccaaaggaaatcacaaaacaggtttttcgcatatttttagtcataactttttgatcgtttgaattttttaattttttcaaaatttttattttcatttttctaagtttttttaattcatttcaattttttgaataatttttttaagttaatttcttttttccaaatgtatttcataatttttttaaaattatttttaatacattcatttattttatcaatgttttcctcaaaacccgtttcattaattttttcgatttaaagatgtttatactcgtgtgaactcctttgatagttgcggttttgtggaactggtcacaaacaatgaagctacatgttttcaagaatttttaaagtctgaccgacttgaaacagtttgtgcaacacaacacgcgcagattttggaaaagaccttaagaaaaagttgcgaatatgtttccgtggatcaaatgtgttacattggcatgatgctattttcccacccttaaaacatttaagcactcccagcaatttccccccccccaaaagcaattaaggaatcaaaactaattcaatcaaaaattgtattattagtaataattcacaatccatttaaaacattttgaatttattaattttgattgataaatttgtttttgcattcgtttggagttaatttaatttttattttttaactagcataaaatagggcccgctgggccctgtgaaagtgccgtggccgccgctttcaacactggcgccagcaaggaatacgaagcagcacccaaatttattttcaaacaatttcacacaacttttcatcattcctacacaacttaatttaacaaccttgcatacaacattccgtacaattttcaaaaaagtttaaatttttgaaaaattatgaaagaaattttaaaatagatatttcgattaataatattttgaaaaaaattataaaattttctatgtagaggcaaaaattttcggttttcagtgcttaagtttttttgctaaaaaaatgtgaaatttttaaaagaatttttctttattttttacagtcacagttgccttatgtacactcatttcctcctcactagaaaatttttaagaatttaatttaactaaattatagattttcaaaagaaagatgtttttttctaagaaattttctgtataatgctataaattaaaaaatgttggaaaaccttttgataattaagcattaaaaccactttttaatggttaataattacacatcaatttaaacaatcacttattaatatggtaatgaaacaaactttcgacattttaattacaatttatttttgacctgttgcagagctttaaaatgatgatgtaaagataaaaattttaaatgtatgctttttggacattgtcttctaaacaaattctccaaatatctcatcaaatgacttttgtttcaactttttcttttcagttgaatcaacgactaattttaacgattaaaaaaataattattatgaata

SEQ ID NO: 57812 - DNA, 956 bp, Heterodera glycines
atgtcgtcgtcgattgaccatcttttcgaagaaatgttgggaacggatgagcccaaaaaaggtgaaaaggaggaagcaaacagcgaatctcaaaagaaatttgaaaaagaagtggaaaaattgaaaaaggaaatgaaggaggaggaagcaaaaaggactcaaaaaagactggaagaggaagtgacaaaactgaaaaagagtttggcgaaaatgaaaaaagagaaaaaggccgaaaaaaggaaaactgatgaaatggaagaggaaaaagcgatggtcatgaataaaattaaaaaagtccaaaatctggaagaaaaggaaggaattggtgaaagtaatgaagaaatcgaagaaagaaaagaaaagcaaagaattcggcaagtgcttgtggatgatgagatttatttaaatctcgaagaagaggagcaaatgctgtacgagcctctgaaagggcaagaaaccgagaaattcggattttttgagtcttgcttaaacagagcaaaatcaaaaaccaaaatggaaaatggatcggaaatgataaaaccgaaaaaagcgacgaatccatttcgcctattaaaagcggaaataaattcggcggaaatggatattgtggggagacgaggagaagaaattcctccggaaggaaagaaattgggcaatgggtggaaaagtgaaggaaatggaaatgaaggggtgatcaaaaagttgggggaaatacgacaaatggcgttgtcaatcaacgaagaagtgcaaaacgttttgggtttaattgagaggaagggagagatccaacattggcaagaaaatggtgcttggaacagacgcggacgaggacgtggcggaaacttttaccagcacggaagcggaagaggcaattggcaacaaagaggcagaggacacattcatcgtgcggactggacgactccatgcacatcacgatcaatgatgaatgaatggca

SEQ ID NO: 57813 - DNA, 1072 bp, Heterodera glycines
atgaaaaggaaattaagacaatcacagaagctaattgaagaaaaggaggagataaatgaagacacaaaaagggaattggtcagaaaatttgaagaaatgcgaaaagaaaaaatttatgggtttaaattagaaaataaaaacatagcgaaaattgaaagagaaattgcgaaggatttgggaattagtcggacaaaaatttacaaatggaagaaggaatttggtataataataataatatcgaataaaaagtggaatcctaattaactaattaattaaaataattaattttacccaccactttaggggtggtgagaaaattctcaaaccagcgaaaaattgaaataattgagaaattcgaaaagtgtaaagaacagttagaaaagcaattcaatttgaaaacaactcagaaaattgaagcaaaaattgcggaaaaatttggcgtcagagtgaggacaattttcgattgggggagaaaactcggacaattcatccgtaatattttaatttaactaaattatatttaaaataaatattattttagcaaaacagaaaaaatacacaaaaactgaaaaattggaatctgtggaaaagtttgaccgaatgaaaaagaaaaatccgaatttgagtggtgcacaaattgccaaaaagttggaaattcgcatgagaaatgtaagaagatggaggaaacaatttggaaccgattgaatgtaaaagaaaaaaaacaccaaaattatataaaattgtcacccaaattctcttttaaattagtttgttatgtagatatttaaattctcttttcttcaattttaatttctttgtgggtcataacaaatttgcctatttttcattttgtttataaatattttaaataatgtttgtatattttaaatcattgaagataaattattcaaaaaaaaaatatatattttattcatttattaaaacatttaaaaaaagatttattgaagaaaattttgaagtttaattattcattttccaatttcgttttattctgtcccatctaacgcgtgcccggaaaatgagtcagtgataaaaaatattttaaaataaa

SEQ ID NO: 57814 - DNA, 940 bp, Heterodera glycines
atggacttaagaattgttactcatcgtcagccttttcaacaccaccgaccgatttcttatgcgacggagggaatagtcgaatatccggcccaagaatatggggagatacatggacaaataatgaacactccgtctggaaaccataaaatacttgtacaggatgaggaagtgattatcgaagagaacgatgaacgagtttagaaagggtgcagacttcccattttcaaggatcgatcttcgattgattgctgacaatgaattcacttaaattttttatataaaattttctcacttgaatatttctctcgtttgaattaaaagttagtttatttcttcatatcttgtatttgattcatgacatcattaatcattatgcattttaagtctttgattctacaaattgaagtcgttttttgtgttaaatgggttcgatttttgatgaaattgttcaaagggctgaaaaattgcacagtgatgttcgtttgggcggcgtcacagaacttcgtcttcccgattcgtccattattcctaccgatgtacattaatggatcattcttttcctatcgtttttatttattccatcaattgcagagaggaaacggcacttcgtgttccgctgctttgttggacgctggtttagacgatgtattcagacgcagtgaagagatttggtcgagaaaacagtcactgcggccgacggccgtcggaatgggcgcttcgctaaagacctaccaggacttagttggtggaactgttcattcactgtttaaagattaattcaaaataatcattcagagtcagctttcatccacccgtctcccaatgtcaaaagttgccgaaaagcctccgtcggctgatgcttctgaccgttacgaggatataaacactgatgttttgaatgaacgatttacggatgcggaaacaaacaaatttgtgcaac

SEQ ID NO: 57815 - DNA, 885 bp, Heterodera glycines
atgccagttgttgctgctgttggtaagaggaaattttttaaattctctgaaatttttttatattttttaattattacagtaagccttgctgttgtggctgtacctgtgtcgggccgtgccaatgttgtaacccaccactgctgatcaaattgccaaggtctaggcaatcgatgttttagaaattgtttcctaatttttcccgaattttcaggacttgcccctgctgttgcaaatgctgtggctgttgctgttgcaggccatgtaaaatccaaaaagtttttaattttttaaccaaaaaagttttaggctgttgctgctgcggttgcggcggcggtggcggacgtaagaagcgctcaattgtcctccgctcggccattgaagcggccaaaaccggaaaacgtgagaattttcaaaatatattaccgtattttccaaaaaatatacatggcatttcaaaaaacgcatacatgataccttaaaaattcgccggtgaatttagtaatttaaggcctttatttttaatctccctcaagtatgggaattaatattaataaatattttaaaaaaaaattagggacttacggtgctttattttaggaacactaaatagggtaatcaggacgacatataggttgaagtaatacggtacttgtttttttttgtcacggtacaccaaccccaagcctaattccaattttgacggtaccaacctgctcttactcagaaaattaaaaaaaaatttaatttttagctgctccaccagccaccaaaatgccaatgccatcacagccatgcccaccagcagaagatataaactgcaaacccacaacagcgcgcagcggcgccactgagtgccaaaagtgtgcagcaattagtgccaataaa

SEQ ID NO: 57816 - DNA, 1851 bp, Heterodera glycines
caacagtgaatggggccgtaaaatgcaccaagatttgttggacggtgttgacttcttggtgagcaacaacattgcggaccgacgccaagtggccataatgggtgaggcaatcaatttaataattaatattaaattaattagattctaatccgggggaactcagaatttttgtatatttttatttttacttttttatatgtccgtatttctttgtgcattttgaaaagcctcactcaggagcttgttaagagctttcgaataataccaactttgttggctttgttcagcaaagaaaaaggctatgatgatctaaacttggctcagacaaaagtgccgaaattaacggcatagaaaaactttgattttgtttttttaaattcgcaaacttacactcgcttcacaaataatttcatatttttttcataatttaataaataattgggtccatttttatcaataaaataatttatattttttatatttattattttttaaaattaggtggcagctatggaggttatgctacattggtcggaatgaccttcacacccgacatttttgcgtgcggtaataaatcaaagaagaaaaataaaccaattaaaataaataattgtcaattaaaattaattcgcgaatgaataactcaaatagaatgaattatttaattaattcttctaatttaaacaataatagaaaccaatgcaattaaaataaatgattaattaattgattaggggtggacattgttggaccttcaaatctgatcactttattggacacaattcctccgtattggctcggcttctacaacgacatgatcacaatgcttggagctgataaaaacacggaagaaggtgcatagttttatatttttatctttaactaaaaatttattcttttatataaaattcatttaaatttatatcatttttaaaattttattccctcataatttttataaaaattgtcaaatcacaccaaatttaaaagctactaattgactttaggtttagctaatcctaaaattatgcattaattttgctgatttcaaggaaattttttggggggtgggagtaacaatttaaaaaaatttaaaacccactaaaaaatcctctaaaaatttaataaaactcaaattattcataacattaaaaattactttaaaattaggccgtcgttttttgaaaagccgatcaccactgtactttgcaaatcgggtcaagaatccactgctgatcgtccacggggcaaacgacccacgggttaagcaggccgagtcaggtgtaaaatgtttcaagaaatttcaaaaaaattttaaattataattttaagaccaatttgttgctgcactaaagcggaaccacatcccagtgacatacattctgtttcccgacgaaggtgtggtgaaaaagaaagaaaaatatgaatattttttaaactttgatattttggaaaaaatttgacgattagtttttcaatttttatttaaatttcttggaattttttggttttttcatttaatattttttcaaaaatttttttttggaccttttgcttaaataataatttcaaaacataaaataacgctttatattcgtttcaagaatcatgaaaattattgtaggaataaattttccaaaaaaaaattctaggccatggtcccagaaaaccgcacaacacattggcaatggccggattcattgaggaatttttgcaccaatgcttgcacggcgatattgaaccattcaatttgggtaaaacgatttttggttcataaaaattatttaaaaaatttttaatttcaggccaatataactcgaccgcaatggtagcttttgtccataattattt

SEQ ID NO: 57817 - DNA, 1292 bp, Heterodera glycines
atgaaggttatggccgatgccaaaacgtcaatcactgggctgaggagccaagcaaaaaatttcaatgccgaagagcgacaatttcatgacttgaaattttcacattcactgcacatgaacccaccagatgcatctgcgggtgtggataaaaagtaagaaaaaagactatttaaattttatttttgaaaatttattttttctcaaattctgtcaacaattttttttcaaaaaattccatttttctaaaaaaaaatttaaattaaatattcataaaattgaattaatttttttttcataatattgttttatcatcgtaattcgtaaaatattccctattttaatgatttttaaccaattttttttccaaaaaattccatacctttttcaaaataaaaaaaaaattttatttcataaaaatttaattaaaattttcgaagcactgttttatcatcgtattttcagttttttctcttaaaatactgggaaccgcccacttaggcgccggccattttggcgcagaacgaatcatatcatttttatttaccaaccaaattaaatagtcttggtatgattttaaatggcttgatagtgcctattaacctgaaaagtttaaaataatttagctgagacacaaaaaagttatggccaaaaaacctcaaaaaattgcatttttctggccattttggcgcagaacgaatcatgtcatttttatttaccaccaaactaaataatcttggtatgattttaagtggcttgatagtgcctattaacctgcaaagtttcaaaaaatttagctgagaaacaaaaaagttatggccaaaaaacctcaaaaaattgcatttttctggccattttggtgcagcgcgctatatcttttttaaaacctaatataattttttgaaatttgcaggctaataaagaacatttagacctattgattaatatcaacattattttatttggtcgaattaaaaaaaagttatgaatctttaaacttgtctgcgcaaaaatgaccccgaccctaaaatactaataaaatcacaaatttcctatactttgtgttgaaggccttaaaaaaattttttgaggccttaaaaaaaattcaggacctcacccattgcggacagagaagcggaaggaaatatgagatttcgtgaaattatgcaacagagggccagcaaattgccgttgggaggtgaagagccatttgccgcactttgatcattaattggacagatttttaatttctttttattttattgtatgcgttaatttattttatcttaaataaa

SEQ ID NO: 57818 - DNA, 377 bp, Heterodera glycines
atgattttgttcaaccataatgtaagggttcgaacaacagggtttcattaaatggaagaatttcagcatttaggtttatagtccttgtttataaggactgtcattatttgcttacaaaattttgtttataaatatctttacataaatattttagagaaatcattggttatttcgtgaaaacaaatgctctgtgattcctggtgacaaaaaaaaagctctcccgcgaatgagacagaaagatggctcccgtaaattaattcagcattcttttttgtccttattcataatgacggtccttatttaatttaatgtatccttataaaaactagtattttttaaaatttctctttttaaagattttttattttctaatttta

SEQ ID NO: 57819 - DNA, 1435 bp, Heterodera glycines
tgcgaccatcaggaacaccagtcattgaaagcatgaggtctttaggcccataaccagaaaattaatgaaatttattaagaaaattgacaaaaaataatttttttaaaaatacacactaaattatattgcaatttttatttattattattttaagcatggacttcgaaacatggctggtcagcttcatctctgacgatcaaccgtttgagtaacattttgatttaaataaattttaaaatgaaaacgtttcgaaaaaattaggaaaattttttgatttaaatttattgtgtacataaaaactcatttagatattttctctacaaaagaagcaaaaaacgtgctgattacgttcgtttaaaaaaaaaaaaatcattttttaaatatattcatttaaatatatttttaattattattaagtatttttatatattatttttttgtgaaaattgcagctgttcaccactcgtcctgagttggctggacgacccctaagcaaaatgattgggtttgattattcggcacgggatggcttacgcattcaagcatatttaagcttaccaccacaggtaaacaaacaaattaccctaaatattaatttatctatttttaccaaatatgaaataaaatgccagaaatttgaaattttcaacaacaaaattttctaattcatctagagattttcattgaaaatgtttcaaaaataagtacagtatttaaatgaaaaaattaaataatttcatacaacacggcaattcattttctttattaaaattagaaaataaaaaatctttaaaaagagaaattttaaaaaatactagtttttataaggatacattaaattaaataaggaccgtcattatgaataaggacaaaaaagaatgctgaattaatttacgggagccatctttctgtctcattcgcgggagagctttttttttgtcaccaggaatcacagagcatttgttttcacgaaataaccaatgatttctctaaaatatttatgtaaagatatttataaacaaaattttgtaagcaaataatgacagtccttataaacaaggactataaacctaaatgctgaaattcttccatttaatgaaaccctgttgttcgaacccttacattatggttgaacaaaatcatcttttacaaacgagttgtacttttagaaaataaggactgtccttggaaataaggacaaaaagtttgttgagttcaaaaggttcaagtgcaaagatttcccatgagctcagaccccgttgttgtcgccggcacaagtgcgtggggacaagctggagttggcacgccagggcatgttgccacgacggccccaaaaattgattgtgctcgtccacgggggcccaaaatcgcgcgatttcttcggcttcgccgccatcaacgcgtggctgaccagccgaggatacgctgtgctcca

SEQ ID NO: 57820 - DNA, 1252 bp, Heterodera glycines
  unsure (1)..(1252): unsure at all n locations
agggacggaagtgagtgataatcttttggggtattttgtgcggggcaaaaatgggaatagtgagtggaaaagggaagaaaatgaccaaattagggcaattacaaagcattaatcacatattacnacagagatgttcgctgccaaattggaggtgtgcggaatggcggcattgaacgcgctgaacatggtggccatttgtcgtgactttttcgtcccattcattaatccttttcccaccgaatgttctcaaaggattacgttgtgctgagggcggccaacaaagcgaagttgggccatttctgcgctttggtcgaccggggaatgattaaggaccatttcaaatttctcgtcatggacatggcaattagtgtttgattgttcctaatggtcttttgttgttttttagttgggtgacaatttgttcaaattgcgactccaattccaacagcaccgtttctcggcccccacttcgcttcggttggctttggagatgctcgagtccctggaacagctccactcttttggctttgtccatcgcgacgtaaaggtgaacagaaagaagccaaagtgaaagcaaaatgacgaaaaagaaaagagttattaattagggaaaaggaaaaagacaattcgaggccctaattaattctagcattataaaaagatgttctttaagccaaccaattttgctctgtccgaagagaatggacaaagtggcggccgtgtaattttgttggactttggcctttgccgacactttcagacggccaccggcggaattaaaccgcccagggagaaaacgcaattcaggtgagaagagagggaaagcactccatggttggccaattaaatggccattcatttggccaagtgttcttctccccaccctcaggggaagtgttcgttacgcttcgctggcggcgcatcgcgcgatggaactgtcgccgaaggacgacttggagtcgtggttctagtgagtacagcagctcattgccacatttaattactgtttagcgtcgtcgtcgagtttatgtccggtttgtcgcctttggcaccgattggagtgcctttgttttttttttgtttcccctcaggcgatctcccatggagccatttcagcgcagccgaaagagactcagtgaaaagggcgaaggaaaatgcgaggacaatggacggaatggttggccatattttgaagaaacagcgtaaattaatctcactttttaaggtccatctgttaaaatactgcccaagg

SEQ ID NO: 57821 - DNA, 185 bp, Heterodera glycines
ggacaattcaatggccgtattttcaacaataaattgaacaatttgggattccccactttcatcacttttgcggtgagctttttcattcctaaagccatttaaaaatgagcataattaagcaattaatggacccaagcagaggattttatgacaaagacggggacaaagtgacattggccgttgat

SEQ ID NO: 57822 - DNA, 1806 bp, Heterodera glycines
atgtccaaatattcatcttcattttatacgcctgcaaccgaacccaactgccactgcgctagcattcgtaaattgggcatttgcgcttctgccgcatttacgggagctgccctttacattaaccttgtggaacagccaagccgtctgcaattggaaaccgctgccgcgttgaaacagtttaaagagagttacacacgtgcgattcccatgcaagtatgtataagatgcaaactaatgcataattgaagcagaattttccctcatcgaagattaactattctatatttcttaggctggtttggcaattctttctggcattgttggcatcggtggtacaattaagactggcgagaaggcttgggcttttggcgctgctttaatgttggccaatattccatacacttttctatgcgtttttccagtcaacaaacgtttgctggctaccaacgtaacaaaataaattggaattggaaggggtggagcccaaacaaaaaatacaaatttaactaagggagaacacttatggcctggttattatatgtagttcattaaaatatcgtaaaaattgagctgaacacgaaccatttaatagcaaaaatcctaagatttttaaaacccagaggtggaatttttttttttgatttctctcctctccccgtaaattggactgactccgccaaaaggtgtaccgacatttcgccaacttgacatctcgccaactgacatctcgccaactgacatttcgccaactcagccaaaaacattcatttcgccaactcaaccaaaaacattcatttcgccaactcagccaaaaacattcatttcgcctactaagccaaaatctgacatttcgccaactgacatttcgccaaatagttaaaaaaattaaagaaaaaaaagtaaaaagagtaaaaaaatgctgtgttaatatcaaatacagccctattccagtttacacgtccaatcagtgaccatcatcatttcttatgtcctgttcggcgcgcttttttcaactatgttcagcgcggcaccgctggagttcaaggatggctggcgtatttgccaaaacctacattggcaccactcaattcgagattgatcgcggggcggaggcatttgaaccgcatgctgatgtcggacactttcttctgcgtcgcactcgaagcacaactcgtaaatgcacctattctgtcatgaaatttatgaaatttttcaattttagcgttcagtatttcccaggcatccataatgacaggcagtggaccaatacaattcggactgcattcgccacaaccttcaactccaaccattccattgtcagaagaatgcagcttattccacgctgggaacaagacatcgtctgtcctccacgtttcccgatctcgttttggaatgtatacaccagggctcaaatggcaattgagcgaacgaacaacggcatggaagccgcgcatggacaatttgcagtaaaaaatttcatcggaaaacattttttggtattttcagcgtgatctcaaccatcatccatcattgagtgacttcattgctgcattcatgaaggacatcaacaaacagttggacatcggacgcgcagaacagctccagaaaagcactaaacgacgacaacggtacgtcatcaaagaacaaaatgtggtgcggatccttgacgaggccgactttgaatcggaagaaggattgacaaacgccttgcacctgctcgggatcgtgatgcaaggctttgcggagggacttcacgtccgtggaaattcagagaatggtgaagaaactgaggccgatgaaaattga

SEQ ID NO: 57823 - DNA, 256 bp, Heterodera glycines
tatggcacccccacaaagtgtccaagccacggaatgtccaaaagagtaaaaacccacgaaatgtccaaaatttttcaaaatttataaaaacaaaatgagtctaatttaggatttttagggttttcggggtcgctgaatacgaatataccctttatattaccccttgcctaaccttaggcccatctgaataataaaaaactcaaattcgagacttggacatttcgtgggctggacattttgtgggtcagcgtatttt

SEQ ID NO: 57824 - DNA, 741 bp, Heterodera glycines
ttggatttgcaacgacgtttggatggacattttcccatcctttgaccgtcctcaactcggcctcaaaatggcacttctttcgccacgttttaattcgctggtggacaaacatttcgatggcaaaagcgaattgacaatttggagaccaatcgaaatttttccattgcgcgaccgtccgctgcccagcaaaattcgctttaaagaccttcggattgagtaatttaaaatcagagctgtcgcaataaaagctttccttccatttttaggtacattgatcactccgtcatcgcttttcttcgttcaaatcaccaaattttcgacaaaagaggcaccaatttagatttgtggatttattattcaaacaccacggatggccagcggatttgggatgtttttgttcgtgaaatttggccaattttttctgaaaacattcgccacttgggcttttacgatgctgttaatttggacaatttgcttcgtcgcacttcgtcgacaattctcactgatctcaaccaattgaattcaatcaatttatttggtctgtcgcccgctgcatttggtgatgattttgatgtgccaaattcaacaatttctgctggccaagcattgtccaaatggttgcactctccgagaaaagatggccaacccaagcgattgcgttgcgataattacaacgcacaagggaacactgattggatcaacaatttcaaggaggtgaccataataacgacaaattactga

SEQ ID NO: 57825 - DNA, 1278 bp, Heterodera glycines
ttggatttgcaacgacgtttggatggacattttcccctcttttgaccgtactcaacttggcctcaaattggcacttctttcgccacgtttcaatgcgttggtggacaaacatttcgatggcaaaagcgaattgacaatttggagaccaatcgaaattcgtcgcaaggacaaaggaccagaaccgaaactatctgtacgaatcgattacaaatttgtggaatttccattgcccgaccgtccgttgcccagcaaaattcgctttaagaaccttcggatttagtaattaaaaatcaaagctttatggcaataaaagcattcattccattttcagttacatttatcactccgtcatcgcttttcttcgttcaaatcaccaaattttcgacaaaagaggcaccaatttagagttgtggcttccttattcacataccacgaatggccagcggatttgggatgtttttgttcgtgaaatttggccaattttttcggcaaatattcgccatttgtgcttttcccatcgtgatcatttggacaatttgcttcgtcaaatttcgccgacaattctcatcgatcttaatcagttgacttcaatcaaatcatttggtctgttgcccgctgcgtttggtgatgattttgatgggccaaattcaacaatttctgctggccaagcattgtccaaatggttgcactctccgagaaaagatggacaacccaagcgattgcattgcgcagacaaacaaacgaacttcgattggatcaacaatttcaaggaggtgtggcccaacatttttgtgatttttgttttcctatcaaattgtttagcaatttctccgtgccaatgccatttcttccgtcagttacgaaattcatttttatgttcgtacgccgtcaatgccaatggtgccattcgaattggtgaacgaatggacaaaggaaaagctgacattagccaaagcaaagggatgggacaaccgatggataatgaaacgatgcaaaattattggggagacggcagtggtcaattgggaagacggaaattgggacaacaattgtaacagtgtcttcgtttggctttttcgtaccactaattgcatcgggtgagcaattaaaaaaggcatttaattttgtttaaataattaaaattttgcttaatttagcccattgtctccgccaccagcagaagaagccggacaaaacatcacaaaagggccgtcatctgaactgacaatgagtgatggacaaacgaagaaaaacagtgatcagccgcagaaggaatga

SEQ ID NO: 57826 - DNA, 475 bp, Heterodera glycines
atgccaatggtgccatttgaattggtgaacgaatggacaaaggaaaagctgacattggccaaagcaaagggatgggacaaccgatggataatgaaacgatgcaaaattattggggagacagcggcggtcaattgggaagacggaaattgggacaacaattgtaacagtgtctgcgtttggcttttcagtaccactaattgcatcgggtgagcaattaaaaaaggcatttaattttgtttaaataattaaaattttgcttaattaaggccattgtctccgccaccagcagaagaagccggacaaaacatcacaaaagggccgtcatctgaactgacaatgagtgatggacaaacgaagaaaaacagtgatcagccgcagaaggaatgaatgaattgagaatgatcgaccgagcataattcaaatcagtgatcaaatgtatcttataagaaaaaacctctcaaatatgtatatgtaa

SEQ ID NO: 57827 - DNA, 1738 bp, Heterodera glycines
atgtcttccactgtccttcaaaatgccctccgtctgttgttcattactctgatcattttcaactgttgccatgggtaaacaaaaaaaagcacagcccaaacggcggatgttctattgcaatttccacgaccttaaaactttcggttttctccaagttttaaaaaaaagaaacaaatgtgaaaagaacgagtttttaaattccgtttaatttatttcccgtgcaattttttaaaggtcgagaaaaatgcaatagagccgcctcaattccgttttctgattttcctatttttccagcgcttcgactcgtgttaagcacaagaaaccaaccgatgagacgacttcgacaaatgaatttgctggtctcagtgtcaagctatggatcatcattggtgtctctgttttgctcgtgtgagttttccagggctttcattttgccaatgccatcatcaatcaaaatcatttcccgttttccccctttttcagcctcgttgttgtgtgtgccattgttgtgatttgctgtttgtgccgcgaacgccgtttcggccacgacaacgatgagctttcgacagcagtgtcaagcagttactacaaatcgcggcagggaccaacggattcgagggactggccgccgacctcagcttctgggcatggccatggtcgtggaggacgaagcggtggtggtgcgatcacggcggtgccaagcggaatgatgtccaagatgccaacaatgaagacgaagcagccgttctcatttcgaatgctgatgccgaaaagcttacgctcaattggaccatcacgaccagcgccatcaacagcaacaatggaacgaggcggggcccagacaaaattgaagacgacgacaatgctcggaggaggagaccagacaaaagtgaagacgacgacaatgctcggaggaggagaccagacaaaagtgaagacgacgacaatgctcggaggaggagaccagacaaaattgaagacgtcgtcgacagtgccgtcgggaggagaacattacacaacgtggtgatgcgcaatgaatgaacgcggcggacggcgatggcattcgataataatggacgaacaatttcgcatttaattgtctgtcgtgtgatatttgtgtcccccatttttgatgtgttcattcattcatttcctgtgtatgttaccacatatgtgtagtattgtgtttgtatgctgccaattcggtttgtatgtggaataatgtgtatatatgtataaaatatatatgtaatcctttggaattcggccagttattgctagggttaagatttatgtttatgaaaaatagtgtgccctattctattcattttccttccacactttaacctgttaaaaaacggatttaagcgctttgccgcatattttttgattttacaaatctttttttaacacctaagaaaacctataatttttggctctgggccatcaaatacaatttccgaattgggggccacatattcaaatttcgtcaaatcttgaacactgcaaatccaaacggatccattcgatgatttttagcctaaattgttgcttttatgcctcacaaattgctgaagcgctatttttggatatttagcgaactctttattgacttttttaaagttctcgacgagctaagtctaaaaatcaaggaattaagtcgaaccggcgccatttaataagcactgggacaactgagtcccaatgaaaatggaaacttcagtaccaaagaaataaa

SEQ ID NO: 57828 - DNA, 155 bp, Heterodera glycines
atgattgcccgtaattgccgaaaaaattcgagaccaatttccgaatgttgaccgactaattgcaaaacgaaagccgtctttgtcaaagcgccttaccgagtcaaaaaatttggaaatgtatctcatatgcaatttcaaccaataaatttgaagaa

SEQ ID NO: 57829 - DNA, 2192 bp, Heterodera glycines
atggccattctgacgccgatcaaaggacaaccgacggaacaatcgcatcagcaccaccaccatcagcagcagcagcagcaacaaccgacgcaacacgtgcccatccagcgggaagacatcgcaacacagacggaccaacaagcggacgaagaagcggcgacagcaccagcactagtagcagcagcggtgacgcaggcgcaacatcagccgaagcagcagcaaccgccgccacaagtgaccaccaccaatgcgaattcgacaacaccgccaacgccgcaagtggagacaagcaacaacaacaacaaacggtagagttttggtgccattggacgggagggggagaggatgccgtcaaccaacaattttggttgatgataatgccatttttagacatcccaaattgttttctgcaggttttaaccccgggaaaccctaaccgacgtttttagcaattttttttaaagatttcagagtttggccctcctccctttgaattcatgggcattctctgttttttcacataaaacagaaattacgcaaaaaattttcctgcttttcagtgatccaaatgtgatggtggacgaccagcagcaacaacagccgaaacaacaacagatggtgccgccgccttctccactgcaaaacatcggacaaacgatgcgcaaagtcaaatcggccactaccccttatgaagcgctgagatgtgagctgatcgatgcgttggtggtgcagcccaaactacgacaacagcagaacaacaacggcaacaacgacggcaccggcaacaacgacggcaccggcaacggacatcgcggagggcttcgcaggcaaaaattcaaatcaatttgtcaccctcccccattttcccctctttttcaggtcaatttcggtgatcggtgacaattggttgtcctacgattgggttgaaagcgatcagccgatggaccaaattgagtaaaattcattcatttcaaattgtttggcactttttaatgcttttcccctttgtttaagcaatcagcaagagcagccgatcatcgacgatcccaacaacaacatcaacgcggatgaggggggcttggttgaccaaatcagcggcgcggtcgcttcactgtccacaatcaaccttggccctgtgtacaccgctgttggcaacggggtggactactttgggcacctgtggcagtatcgggtgagccaaaaatgccaaatttgacggatttaattgaatttcccctcctccgtttttcagctcttccgtttcgccttcatccttctgtgcttctactttggcatgggcttcatggaacggttggctgtcgcgatgatcgccgcatgcgtccgctgggcttggccaccggtgcacttcatgctcggctcgtcacggggaacgctgttctatttgacggactggttcgcatggatggaagactttttgtcaagttgggtgtgcgacatggccaacaggtgcggttttacggtgtgggggcacacggtcgataccgtaccaacactactaattccccacaccccattttcagatactgtcatcaatacggtgtgatgtgcgacagtcagtgttcctttgtcagccgaacgcagcgcgcagcttccttcaccggacgtcgcttctgaaggatgatacgcgagatgaaatgaattttgataacgatttttgatggcgacattgatgtgtatgtattgtatattctgtctattatggttctgctatttgagtacgtccgtgtatattgtatatgtactgtattgtattttgtatccatatggcatattcaattccaattttaacgcctaattttgtatacccatgttgtgttgcatgcgttcataaactttgtaaaattatatgtactcaattttatcagtgggctataaactattttttaggcgttttttgttattttttcatgactacattttccaagttttggactacaacttttttcattgttgaccaaatctaacaatcttggtatcattcgaaagcccttcacaagccctattagccttacaaaaaaccaaaaaaattttagcttgtaaaaaagttattaagaaaaaacttccaaaattttggtttttttgttatttcatgttataactagggatgccaaaaatatggaccaaaaatcgcgaaatatggacataaaatggcaaaaatctcaaaatatgaa

SEQ ID NO: 57830 - DNA, 4842 bp, Heterodera glycines
atgctggtgcagaccggactgaactcggagggcaattcccgcccgcccgaggctcgtaccaaaaccaagcgaaagccgaagcgacggacgaacgacccggccattcaatcggagaaacgaggggaacgatcccttggcactgatcaacgggcattcacagcgatgggcgagagcctgccggcttacctgatggtatgccccgtggtagcggccaatgacgacatcacgcgtcagcgtcctaccgctctgctcttggatccagggagtcaggtggattgggtccagacaatcctgacagagcaactcgaactaccaactgcggggtcagccccgcttgtcgtgcaagtgttcggcggatcaaagaagagagtcccgtcgtccaggcaccggctgaagctcaaacgattggacggagggtgggagccgctggaggtgtcatccgtgcccaatgtttgcacgcccattcaaaccaagctggttgggccgggaactcccggactgctcgaaccggtgggcgcgacacttcagccccaaatcgtgatcggaatacgcaagttttgggactttgtgattggtttcaaaaaatcggccgagggggccttcctaattgatacagtcttcgggactgtgctttgtggagagcatttcggagctcacttggggcaaccagcgccccataaccacatcctcatggccataaccgatgaagacagcggatggagtcgcatgccggccccgtcggcagttgagcagttctggtcactcgagacgatcggaattcgggacgacccgaccggagacgccgacaccgaggcgatcattcaattcgagaaatcagttcgacaaaatgaagacggccgttattcaattcggctgccgtggcgggaccccattcccgcgttgcccagcaacttcgctgtagcctacaggcgcctcaccagcctgatcggccgattacagcgaatgcccgacgtgttggagcggtaccgggcagtgatcgaagagcaattcagtaccggcatcatcgaaaaagccgcgatcggggccaaccagcgggaacatttcatcccgcatcaagccgtgatcacgcccaagaagctgcggattgtctacgacgccagtgctcatgccaaaggagctccgtccttgaatgactgcctgctacggggacccgtgtggctgcctgatttggctggaatgctgttgagatttcgggcttgccaagtgcccgtgattgccgacgtcgagaaggcctttctgatggttgagatcgaagagacggatcgcgaggtatgcaaatttctgtgggttcgggatcccacgaggccagtgacgacggacaatcttttgccgctgagattccggcgcctcgctttcgggctgacgccaagcccgttctgcctcgccgctgtagttcgtcatcatctccggaaattcggttcggacttcgcggagcagctgatccgcgacacctatgtcgacaatgtgctcatccccgcggacacacgagaggaagcggccgaaaaggccagcttggcgaagcgaatgttcactgatgctcggatgaatctgagagagttcctcagcaatgaccagaatctcaatcgggaattcccgacggacgactacctcgggaagacgacaacaaaaatgctcggccttgaatgggattccgagcgggacgaaattcggatgaattacccggggatccccccggattgcgccacaaccaactctcgcaggtccgtactcaaaatgatcgccagtctcttcgatcctttggggaccttggcccctgccactctcgcagccaagcgtttcttccaacgcttgtgggacgcgactcacgattgggactctccactcagcccagctgatcagcgagaatgggaacgaatcaccgcaagttgggacggggaagtaaccctgattccccggaaagtgataagtggaaccggactgtcattatcccttcacattttcacggatgcgtcggagttcgcctacgccgccgcagtgtacattcgttccgaaggacccgacgggatcttttcccgtctgctcatggccaagtcgcgcctcaagccaaagaaagcggcggacactttcactataccaaggatggagttgatgggcatcctgctcggcgtgcggttggcggctttcgtccgtgcccaactccaccgtccggtcgctgaacagcatttatggagcgactccatgattgctttgcactgggtaaggaaccacacaccccaaccgcagttcgtagccaatcgactgctcgagatacggacggcaacggaatcaccttccaccatgttcggtcggaggataactccgccgacattgcaacgcgcgggatgcctcccgctgaacttcacggcagtcaattgtggtggaatgggccctggtggattgtctcacccaccgacaaatggccaaaagagttggagttcaaggtgtacaaggaggggacagacttccccctggaccaggacactcctagcacaatgctcctcgcctccgcgcaagacgattcgttcccgacagctttcctcagaaagtgcggccagtggaagcgagcggtccgtatcatcgcttggtcgctgcgattcggcagaaaggcaagaaaggggggggacaaatgaagtccgaatggagagagaggggaaacgtgatcccctgtgcactgaggagttaaacgcagcgcaagagaccatcatccgatcagcccaaaacgagggcaaaatgccgcaagggattcaaaccgaggtggacgagaacggtacgagacgcctgcacagccgagtggagaattgcgctgaaacggaactcagcagaccaatcgtcctgccgaagcattcaaggatcggcattctgctgatcgcggacactcatgagggactgcgccattctggtataaatgcgactctctcccagttcttgaaggggtactggacccctggagcccgtcaacaagcgagaaaggtgatcaaatcatgccggaagtgccgccgaatggaagcggcgccttacgctcttcctccaatgccaccgctgccagctgatcgggtcagacgtcggctgccattcgaatcggtggggctggacttcttgggccctacggcggcgttggatgagtcggggcagcggcgcaaagcctgggtgctgctgatcacgtgcttgacaactcgggcaatttatgtcgacgccactcgagacctctcagctgacagcctgatcacgcttctacgccgattcatcgccaggcgaggggcgccttcacggatcctcagtgacaatgcgccttcattcactttggtaggccgaactctttcatcattcggagttacgggtaacgaccccgtggcattcactgattctcgcggaatcaagtggcgattcactcccagccacaccccctgggcgggaggagtgttcgaacgggcactgcagaagacactcggaagctgggtgatcagttatgacgagctgatcacgcttctggcagaggtggaagcagcggtcaatttgagaccgctcacttacgtcagtgacggagccggcgatccgctaccgatcagaccgatcgacttcatccaggagaacggccgattggggattggtcccctgaacccagcctcagagctcccacccgatcggaaggaccccccgcatgttcagctcgagaagcgatggaaggcggcgcagcaacggacagaacatttttggaggcggtggcactccgagtacctgctgcagttacgggagaaagccggctggcagcatcggaacagacgggtggtcgccggcgggacaccaaaagtcggcgacgtcgtgctggtggaggacaaaatgcagccccgcaatgtgtggcagatgggccgaatcatcgaactcaggggaccaccggatcagatcaggagtgtgctaatccgaatgccaaatggccgaatttgggggcgcccggtaaataagatatgccccctcgaggaatcaccggaatcggaacgggacgggacagcagaaacgtgcgagagcggcgacatcaggggggacctcattcccccgggcccaatcatgcaacagacggaaccccaggatgaggacaacgccgaaccaacgcagcaggaggcgggcacaatcggggagtccgtgccggccagcgccgaagaaacgaccgaagtcgtcggtcagagcgggcaggacaaggaaggagcgcaaatcgaacgggaaaacaatcccgtggcccttcgacggtcacagcgggaccggaaaatccgagaaattcgtgacccggagtggtcaatgccgagaaaaccgcaaaagcggaagtttggacaatcccgcataggactgacgctttttgccgtgctaatgtggaccgggaccgtcgtcgggtgccaacccgccccccgaaactcgagactgacggcgctgcgcgactcgaatgacctcaagaatccatgcgagatgagctgcgcggcgcgtggagtgaccgtgtacagcgacgaatcggtggacaaactcgaaatttgctgcgcggatgggtgttgggcaacttcgcccaagaatcccgagactcactacgaactcccggtcgagcctccagccgccgacattttcgggaaaaccggaggattggacgacattttggtcgtatttcaagcgggcagtggacgacaagcccatcccgggcttcgaaaagcagcttcttctccttcgctgcttaaaggaaggatccccagccaggagggctgtcgaggtctacaccccgtcggacgggaattatcccgtggtcattcaactgctgagggaacgatttggggacacggatga

SEQ ID NO: 57831 - DNA, 60 bp, Heterodera glycines; identical to SEQ ID NO: 52045

SEQ ID NO: 57832 - DNA, 1250 bp, Heterodera glycines
atgaacaaccagaaaaaaagtggaccgatgggaaaaggctctgaaccgaaaaatgggtcagattttgaagcggaattttttacggccgaggaaaacaagcttttccgacaacttttgggccgattacgaacatttgaggctgcagtttgcagccaattcagacaaatggaaaacgaaataagtaagaggacaaatgaaacatccacgcacttgggaacaatggaacgatcgatcaatgagacgaacgcgagtggggaaattgaaaattttgagcgtgaggaaaaaattgcaaagttggaaggagaaattgataatttgggagataagtgggcagaatacaaagaaaatgcccaaagggaattgagtgaattgtcaatcaaaatggaaaagaattttaatgagacaaaaagttctattgatggggtgaaactaaaattggaatcagtggaaaatgagttgaaaaaatcaattgacgttgtcgaaacaagggtcgaatttctggaaatggaaaatgctagtgatgaagacatgtggattgataacggtcacgaggatgctaattttacggacggaaatgttcagaaaaatgagggtgaagacgaagagatggacgaaagtgaagacaaaaataatggagaaatggaagatgaatctggggaaaacgaagggaacaaagacaaaagttgtgaactaatgatggccgatcctttttttatgaatgtagcacccccgggagtatacgatgggaatcccgccatgccgttttcacgttggtatgagaaatttaaggacttacttttactgtgcccccaactcaacgaagagcagaaattaagccgattgcgtgtatgtttggccggacaagcacgaggggaattggactcaatgagtccagcaccggaaaccctccaggcggcaattgatcatttgaaacgcaaattcgaaaatgaaaacacaaaatccattgctaggcaagccatgtcgatttgtaagcaagccccaggggaaaaagttatgaattcgcgaaccgactgaatgaagcagttaggactgtgcttgccggagagacccaaggggtgattcaaaaaggcttttagaggaatttttagaccgtttgacccctgatctccaatttgaagtaaagtcgggaatgtcgacagattactcgagagcctatgaattggctcaacattttgaattgttgttggcggctagaaggtctacacaagtctctgtagccgaattgacaa

SEQ ID NO: 57833 - DNA, 251 bp, Heterodera glycines
atgaattttatttttcttttaaattttttgttcgtcgcaattgtattttgtggcgccagtgagttttaatgaatttttacaaattaaattaattttttaaatttccatttgagggaaactctattatccggaatgtgaaaataaaaaaatgttcaaaggccaatggaattatacatattctagttatggaaatgatctttgtcatacgcaagctgaacattttcaatgcattgaatttaaatgttccatcg

SEQ ID NO: 57834 - DNA, 168 bp, Heterodera glycines
atggtagtgaacaatttgtccttttgaatttaaattatttcattcattttataggataggacgggactgggaattttgagaaatctggggacagtgaacccggttctgggccataaaccaacgaaaaaaggaaagaaatctggtacttgagcatttcctgataataaa

SEQ ID NO: 57835 - DNA, 1965 bp, Heterodera glycines
atggtcttccatggcccaccggttagtgagagcgaacctgaaccggaaatcatcgtcacggaggaagtatcgtcctcagagcttcaagaggaaaacgagcgacgagtccagagagcgggacacactcccccatcagcaccgcacattccagaaccggaagaattgcgcattgaatgttaccaacaaagctggccaaaaggagaacaatacgtcggttataacattttaaccgaatgttctggtgaacgtcacgaaagttgtgccaaatgtacgtatcggcaaattgcttcaacacgcaaaaaacaattgaacggattcgaagattgcaaagcaaattctctgatgaacgcaatgcttttcgacttggtccagcgacttttaaatcttcgcagcgaaacagtcgtcctccacgaagaatacgtaatgccgtccatcttgacaccgaagcagttggctgaaaaattttggaaagaacaattcgtcaccaaaaatcggcaactcgttaagcaagcatcgctcatggatttgttgaagcaatggagcacttcgtgtgatcactttggagcattaatgcagctgaaccaatttgagccaataaagctcaggccaatctcaatcgaagggaaagaaacatcagaattcgagaattggctcgaaaacctcaacaaattcaccgcaaatgtcgcttctcgaacaaaggcagccatagcaaaccagcactacagtaaccacgaaattatttgcgttggcgatctggcggcagaagaattggcgaacgcatcgaggactcaatggttcacgcactacgcctcggacagacttcatctatcccctgggcccgatgtacagcacatcattttctgctacttggccaatgaaagcgacttaacaaaaggcatcaccccgtacatccgagaactcgcaaagacggacattcaactaacaatagtgttagcaaaaacggacgacaaatcctggctcaaaaacaagaatgaatgctaccagttggctaaggcggccaaggcaggctttttcgtctaccaccggcgaaccggtgaagcaagacaattaaccgacatgatcttggcgcgagaagaagacgaaatcatggaagttgatccgacaccttcaacatcagccgcaagcagcagtggacttatgtccagaaactcaataaacacgctgatggtcatcagcatgttcgcgctgatgttccttcagccaacagcagcggcaccgttacgcattcatcgagcctcattaagccaaaatgcacaaagattcctccaaatggtatccgcgcattacagcacactcacaactgcaccgccatctgaattaacaatcactttgagcaccgcactccgaccagtaacttcgtcgtggtacagcacaataactcgaactgaaatgatgaccaccacgaagacaaatccatggacaacgacaacatgggcatcgatgacgaccaccaagcaaagatggactccaatgatgtcaaacagcgcatcaacttggacgacaagacgaacccgaatactatacgtcacgaaagcaagaagccaacaaactgacgcaacgacaccttccggcacgatcaaatcagcaaaaagagacttgggaacgaaccgtgatggagcggacgttttctggtgttccgacaggggcagtacgatttgggaactcaagggccccgaaagttcacctttctgccgtcccccgccaacactcactgctcaatggcacaatctggcaatagagctcttcgcgaaagtcataaagccagagcaaatcgcattcgcatggcattgctccatcaaacgcaccagtgaacgttattatacaaatttgttggccgataagttcgtcaccatcgagaaggaatttccaccggtcagcaagcggatctgcaatgccggtatatttacaattgtaacagaatttccggaaaatgcgcatttgtaa

SEQ ID NO: 57836 - DNA, 355 bp, Heterodera glycines
atgtctattatccccggcactagtccggaaggtgtccgctatgctggtgtgaccgtcttttcgaaacatagaacctacacccaggcccaaaaaatggcaatgataacaatgaagatttgccctcgtttgtacgaaatccagctttttggcaatgcattaggggtagaccacgacacagcttcagcgcgggcactcgcaagagaagtttaaattatgccattttttatggataatttatatagattgttgttgaacaactcggagcacgtcaagtaagccatcgagaaatggaacaaagggtggacgaggtgatgaaaaaggcaaaaaaaaagccaataagatactgggaaataaa

SEQ ID NO: 57837 - DNA, 865 bp, Heterodera glycines
atgtctattatccccggcactagtccggaaggtgtccgctatgctggtgtgaccgtcttttcgaaacatagaacctacacccaggcccaaaaaatggcaatgataacaatgaagatttgccctcgtttgtacgaaatccagctttttggcaatgcattaggggtagaccacgacacagcttcagcgcgggcactcgcaagagaagtttaaattatgccattttttatggataatttatatagattgttgttgaacaactcggagcacgtcaagtaagccatcgagaaatggaacaaagggtggacgaggtgatgaaaaaggcaaaaaagccaataagatactggaaaataaacggattctaaaaaaggtattgacaggtctctctaatgtaaggttttatttcatatattacagatgggagctcacctgctggacaaaaaaattgacattttcagatgcacataagtaacagataattttaaatttaatttttaattcttcttcacaaatataaatggataagtagtgtcggaatttccattccgatcgctaatcaatgatcagcgaatcgttgaaagagctcgtgccgaaaaagaacggctttacaatcaatacaacgctgccatagactacgccatacaaaatccccttatcaacacgcctggcaggacttcctggcacgaagtcgcccatggcttttgcggttgggaaaactcagatttcatcggagatttagaatatgtaattatatcataaaatataacaaaatgattatactgtctatttgagaccggattggcacggtgaccaggcgggcttttaccgggcggcccggtcccgtcccatttttctaaattcaaataaa

SEQ ID NO: 57838 - DNA, 1265 bp, Heterodera glycines
atgccaaaatatggacataaaatatgcataaaaatgccaaaatatggaaatatggatataaatcccgaaatatggaaaatatggatatggaaacccatcctagaagcttcaaaccaagctaaaaacatgtttttcgtgcgtttcaggccctcaacagtccaggaaaaaaatatggatatccatatgattggcatccctatttatcaatatcaaactatccggtcacgtcagttaaccctcacgtttgggccccagcatgtttcggttataatttttttcttagttatccaaagccaagattgttggtatcattcgaaggctacatgtttagaaggtattataatatatcgcttcgcgattggacaattgctaaaaagttataactagaaaattgcaaaaagtcaaaacttttgaaatttttcttaaaatttttttatatgctacaaaatctttttgttttttgtaaggctaatagagctagatgaagaactttcgaataataccaagaatgttggatttggatgactaagaaaaagttatatccgaaacatgcagtggcccaaacgtgtggggcccaattgacgggttccgagacaatcagagaaaaaaaagaagcaaattcagagtttgaggagaaggttaaaaaattcaaagaaattatgggcgaattttctaaagcgaataaacaaggtgaattttaaatttaaaaaaaagttaattaattttctcctcccaacaaaaaggaaacacaaaaaggaaaaggtaattagtttaattaagaaaaaaatatgagaaaaaagtaaaaagctttttaaagttctgatcggccaaaaaagcggcgatttaaacaacggatcgaaagcgtttgcgatgaagaaagacgaatgtcgaggagcagaagcatcacaccgaggagagagaagaccaattacaaacaaatgatttttaaagcatttgtcatgtatttgtcggtttacggcgaacgaatggacgcaaaagtgttttataaaatatttaaaaccgtttttaagtgttatttagaaatgccaatacattgacgcaccacaatttttgtctggcccaaatggaacaacaaactgtgcataaaaaccagctgggtacttctggcgaagaaatttatcacttttctaattacctaacataaaaaaacacaaccatttttcagagaccgaacaattaaaaaaatttaaaatgttcagaccaaagacgacatttttttattcattacattttttctgaataaa

SEQ ID NO: 57839 - DNA, 1020 bp, Heterodera glycines
atggacaatttgagcggtggtgagaagactgttgcggccttggctttgcttttcgctattcattcgagcaatccgtcgccttttttcgtgctcgatgagatcgatgctgcgcttgacaacacaaacattggaaaggtgtgtcatttttgatttcatagtaattttgccattattttaaatttgattatactttttaataaataaatttccaagaatctcccttggtaatttgttaaattagagtgaattactaaatttggcttttccacaggtcgtgcattacatcggtgaacggtctcggaccgacatccaattgatcgtcatctctctgaaggaggaaatgtacaacaaggccgactccctcattggtgtgtttccccgttccacgcagccgtgcattgcgagtggcattttgacatacgatctcgaaaactttagccaaatgctcgaagagcaataaacacttttcctctcatctctctgagtttttgcttattttctcacacttaaattaccttgcattttgattttgatgtaaatttctatgggatatttaggcataactgttcaaatattttgagactgaattaatccagcaaaaatgcgcccaaatatcccagttatagttggctatttaatcttttcgacttacttatgctattttctgacgtttacctgatgataaacttaacctttgattacttatccacattcttttcaatgttttaattcattttggcttactttcttttaattcttacttttttcataatccgtcttaggcagcagatttggagatgagtcaagaagtgagttcggaaggcggcttccctaattacaaccgcaaccaatattttaaaagcattagtaggttttgttttgggtttaggtaattgaccttaaatattttcagtcgacagtttgtcacagaagggacttctcgaagcgaatcgtcaaccgcccatcagtcactcgacactcagttttttgatggaaaggaaaaaggacccaatgtcgtaa

SEQ ID NO: 57840 - DNA, 1231 bp, Heterodera glycines
atgtcagacaatcggaaagaagcggaggcaaagatggaaaaagcaatgtaaaattaaaattaaaaatgctaattttcaattttcaattttgaattttattttttttcagtttcatctccgccgattgttggctttgtgcgttcgatttgctctctccacgtaaacttggacttggaattgcattgatcagccacggatttgacttttatgtggacgaacatttcaaaactcgtaaatggacattcggaattattcgaattggaagcaaaatcgggaagaatggcaccaaggaaatggatgttgtcaattgttatcaacgaccaatgccaattccgcaaaatccgttgccaaagaaagtcgtcggattcaaggccatttcattagagtaaaatgaatcaattattgtcaagtggtaatgagtcttcatttttttcagttacatcgaccgcaatgtcatcgcttttctccaccgttttcgccaacttttcgccgtctgtccaattaatttgtccatccaaacggcccgtgatgattatcgcatttcggagttcattttgcgcaatatttggccaatgcttggaaaaaacattcatgccattgaaatgtccgttagaattttcaatcatttgcgtcaattcgtcccgtcaattctcaacgaatgtccaccacttcgcgttgtctccttttctgtcgatctcttcatcgcatttccgaccgatgacaatgccgcggcatcggatggacaagcggtggccaaatggcttttcactccgcttcaaagcaacgtgccaaaggtgttgagaagtccgttggacatgaatgatgggtttttggtgtcggacattgaagacttcaaagcggtgatttcgaattgatttatttggcattttcaatttcccccctcatttttaggcatttgcctcggcttcatcacccgtcaatttcattgttgtcattcaatttccgccgtcttttgctaattccgttgtgccatttgtgatgaccaatgaattaactcgtgaacatttggcattgaaaagaacgaaatggaacacatcgtttttgttgatccgttgtccaattgtgcgagatgaaagcataattttcaattttcaattttgttttcccttttctccagtttcatctccgccgactgttggctttgtgtcttcgaattgcttcccccgcgtcagcttggctttggcattgcgatgatcagccaccgttttga

SEQ ID NO: 57841 - DNA, 1050 bp, Heterodera glycines; identical to SEQ ID NO: 27136

SEQ ID NO: 57842 - DNA, 62 bp, Heterodera glycines
atggcggcgactgctcaaagaatggcacataaaagttcgctttgcggaaagtcgggacgaag

SEQ ID NO: 57843 - DNA, 117 bp, Heterodera glycines; identical to SEQ ID NO: 53938

SEQ ID NO: 57844 - DNA, 249 bp, Heterodera glycines
atgtccctccgcaaatgtccgtccgcaaatgtccgtccgcaaatgtccgtccgcaaatgtccctccgcaaatgtccgtccgcaaatgtccgtccgcaaatgtccgtccgcaaaagtccgtccgcaaatgtccgtccgcaaatgtccgtccgcaaatgtccgtccgcaaatgtccgtccgcaaaagtccgtccgcaaatgtccgtccgcaaatgtccgtccgcaaatgtccgtccgcaaatgtctggtag

SEQ ID NO: 57845 - DNA, 476 bp, Heterodera glycines
atggtgccatttgaattggtgaacgaatggacgaaggaaaagctgacattggccaaggcaaacgaaaatgaatgggacgacatttggataatgaaacgatgcaaaattattggggagacagcggcggtcaattggaaagacggaaattggggcaacaattgtaacaatgtgttcatttggcttgatagtgacactaattgcattgggtgagcaaataaaaaaggcatttaattttgtttaaataattcaaattgcgcttaattaaggccattgtctccgccaccggcagaagaaacgggacaaagcatcacaaaagtggcgtcttctgctgacgatgaatgagtgacggacaaaagaacgaaacaatggtgattagtggaagaagaaatgaattatttaagaatggccaaccgatcataattcatcagtgatcaaatgcaatttatgatgaaaacctctcaatttcggtaaataaa

SEQ ID NO: 57846 - DNA, 100 bp, Heterodera glycines
ttcttaactttttaattttttatttcttacggctagtatcttctacaataatttgtcagtttggtcggatgtgcgtcaaacggaaaaaataattaaaatt

SEQ ID NO: 57847 - DNA, 803 bp, Heterodera glycines
atgaaccgacggtaaaatattttaaaagtcaaacaaattagtcatttatttgactaaactgtttttccataatttcagttggatttgcaacgacgtttggatggacattttcccatcctttgaccatgctcaactcggcctcaaattggcacttctttcgccacgtttcaatgcgttggtggacaaacatttcgatggcaaaagcgaattgacaatttggagaacgatccaaattagcaaggacaaaggaccagaaccgaaactatctgtgctgatggattataaatttgtgccatttccaatgcccaacgaccgtccgttgcccagcaaaatccgttttaagagccttgagatttagtaattaaaaatcagagagctatgacaataaaagcattcattccctttttgcagttacattgatcacttcgtcatcgcttttcttcgttccaatcaccaaatttttgacaaaagaggcatcgatttacatttgtggattccttattcaaacgccacgaatggccaaccaatttgggacatttttgttcgtgaaatttggcccatttttgcgccaaacattggtcatttgaccatttcaaatgctgagcatttggacaatttgcttcgtcgcacttcgccgacaattctcatcgatctcaaccaattgaattcaatcaaatcatttgatctgttgcccgctgcgattggtgatggttttgatgggccaaattcaacaacttcggctggccaagcgttgtccaaatggttgcactctccgagaaaagatggccaacccaagcgattgc

SEQ ID NO: 57848 - DNA, 239 bp, Heterodera glycines
atgagttctgctggcgttacggaaactctcatttccccctcgtcttacatagaaaaacagtaagggtcgtccattctccgtttttcatttgttttcttttttgcatttttagcacattgtctgggttgctgactgaggatgtgcttcattttgccattggaaagaatataacgattaatgtggaagaaaaggcggtgccgcgggtgcgggacagtgcccgcgcgaaatggaaaaagtag

SEQ ID NO: 57849 - DNA, 1518 bp, Heterodera glycines
atgtgcgtcatttttgaacagacggatcgaacgcgcgaaatcgtagtgaatttgcaggcattttctgccgtcggatatagcgaagctacgcaaaaaaatatgcaaaacggaaaatattacaaaatttttgtgcccgattttattttattggatgttgttgagtgcaagtttggcatttttataaagccaaaagagcaaaacgaaaatggtaatgagaaaaaggggaaaaagaaggcaattattgttgaaaaccaaatggataaagatgaacaaaaaatgtggacaatgcaccgatcagtaaagcttaatctgagcgatatacacactttgatgaagaagccaattgtggtcaatttgggcaaaattggtggccccgagctttttttgaagcgacgaatttttgtggagacgaataacgatttgggcaattaccatgcatttttgtacgcaattatagagggaaatgaacagaacgccaacgaaatgaacgaaaaaaaaagaatttttattggtcatgccccatttgtgaaatttgatgaggaagcatcaagctcaagtcaagcaaatcacaagaaaaaatctttgctcaaaaatttcttatccggcaaatcaaagcagatggaaaaggcattgcccgagggacaacaggtgaaacagtaattaaattaaattattaaatagttttttgttaagttaattgaatatcatttatcaattccaattgaagagaaacgcatgtttggacataaaatttgtgatttaattttggctatttttcatgatcaaaaggtatgaaagttcggagtgatgtacgagagtggaaaaatctgtgaaatttcaatccgatagcataattatttcaatcttttcggaaatcccttttttggattcccgggtttatttatcagtttcgcatctgacttaaaatgggttatttcttgcttatctaattgaaattcagggggataaaattgaagaagttttaaatgttacgaattttgaagaaacagaaaagtgggaatgttcaatttgcaaagatcaattgaataatgaaaaatcgttaataaaaatacacgggcaaaacattcaggtgcaaaaattataatttctttaatttataaaatttttctagcatttatttcacaaaccatgcatctttaattggtaatttggaaataattagtaagattttttaatttaaaaaaaatatatttttataggtttgaagcacaaccaaaaatacgctgcccaatttgcaattggcaaccaacatttgtcatggtcggtatttgatgaatgaatctgcatgctttttaatcagaaatttaggatgctagattgaatgcaatttttgatggacctattggattttcttcgatttttgccataaattcgctgggcattttatttaaaattgccaacggtcaactggaaattgggcaatttaagcaaaatcaggcacaaaactttattagcaaaagcaacggaaatttaaaaacatttgagcatgagctgaga

SEQ ID NO: 57850 - DNA, 56 bp, Heterodera glycines; identical to SEQ ID NO: 52733

SEQ ID NO: 57851 - DNA, 123 bp, Heterodera glycines
tccaacgcagaataaagtacaggctatagggaagctattcccgaaggattcggtctccccataaatctgggcgcatcggttcgggggggactgccccgaaaacaaaaaaatcgatttttttca

SEQ ID NO: 57852 - DNA, 211 bp, Heterodera glycines
atgcccgacatggttcgaattatgggtttgcttgcgccattgtcaattccttcaactccaattccggacaatttggtccgcgttataagtgtcagatttgagtaagtgctaaaatattttaaaatttctccactttcttatataatttaggtgccttaataacaacgtgctcactgtgatgcaccactttcaccgtctatttttcacttga

SEQ ID NO: 57853 - DNA, 2358 bp, Heterodera glycines
atggatgattcggttggttttcctagcataataaatcttgcttttgggtggccgtccaccccttatgacagtaaaattagtctgttccgttcgtttacagttatcctctcgacggctcccttccgacttctccttctaaaaatttcatccaatcttctgtataatttttttctatttccgtatgattaacagctgtaaattcccaaaaattcatcctccaagtttgtgggaggggaattcaaaaattgatatggattttgaaactgaaacacagggtagaacattttggccgacgaccaaatgggaaggaaactcccagccgaacttttgttcgaaattgttctctgtgttcgaagagaacatgcccacgcgagcatttgcctctcgtcccttgttttatgcaatttaatgctacctcgtgcttcattatggcggaaaatttgggtttcagtatgattttggatgtttccgcttttttttttaaattttcgttgttgctgtttggacttgtctttttatttttgcactaacaattctgttattttatttttggtatttatttaaacgtttttgtctgaatgtggtgattaactcttcttccttccttttctcatttccattagtttttattggtttttttgtgcgtttccttttgtgttcggtgttcgctgtttgagcctttttgagacggtttatttgaaattcaatttaatttaggcatttttcaagctcaaagagaactatcaagacgcgatagcagctggacaagattggaacattgtgagacagacggcgcgtgatgatatcgcatgcaacaacgttatggtggctctggacagactgatggatgtgccgcaagtacgtacagtttgagggaattactcgcatcaacatgaatttctaagaaagcgacactgaaaaggagacttaattgttttcatatttaacacttttccttaacaggcacccgacaagaaggcaatttgcgtgctcgcaaactaccgggcagactcaaaagagggtgtgggaaccgtcgtgtttcagcaggcaatttgcttttattaaaataatccaaaataaattctaaaatttagaaagatggagagtatgtgcatgttacggttgtaatcagcggcctcgggccggaccagcagcatgcgctgacgatcaatcgttaatttgttcttagattttctgacaaatggtgtttttttcagagttcggcgacctttctgtgtcttcgggcaatttccattcagttggaaagcatttcagtcatcctggccaaaaacatgggccaccggaggttttttgtcaaattatttaattcgtgaacagcgacaattctcaaacttcactttgatgtgtttaataagtaacctgttttgaaatatttacaggccgtcagtcgtcacgttggagatcttggaaatatcaccgctgatccgaagggagtcgccaaaagtaattggtctgacaaagtgatctcactgtatgggcagaataacatcattgggcgctcagtcgctgtacatgcacgaaaggatgactttggtaacaattccagtgaattcatttattttttgcttttacaattttaggggaggggacacaggacgtgataaggagccgcgagagcggaaatgccggtcccattttgtcgtgtggtgtcattggccttgcttttgatacgaacatgtcaactcgttcggaggattttcagcgcgtaagttttattgggaccgccgtattagagcagggtgcggatcgaaaattaatcaattaatatgtatcaaatttcatattttttgcctcctatgatcatttttaacaattttggtgaggaaataagcaaatcatttatttgaattcaatcagctcaaaaaatcagatttttcagactttttgggaataagtggggcgtaaggcgggcggtaccgataggcgccgccgggaaactttttgttgaaaatttgagttaaattagttaacagattttgtccaaaaattgtcgaaatttttacgtcataaatttacaaatttttgatgcattttgttttaaggagttccttcaactgacccaggcatacagagctgcggagacgactaaaaggtggaatatggtggtgggctgtgcgagtggtgacgacaaatgtggagctctgatcaaatcgcttcaacagctcatggaactccccgtggtaagttttgacaagaaaaggaaattaaattgatttacattctctgtttaagcatccgcaacagtgtgattcgggtcccaggaaggctgtgtgttggttggcatgcccgaaaatgaaggacacgaagggggccattacattcaaacaggtctgttga

SEQ ID NO: 57854 - DNA, 210 bp, Heterodera glycines
atgaaaaagattaagttgaacccgattttggacattggcgcgaatgaattggtaaccgtcacaaaacactcattgtcaaaggcaatgaaaagggtggccagtcacttggatggacgttgccatgctggccaacggtcccatgaacggatcggtgctggaaaagatgagaagtgttgtcagacagagcagaaaagtgcacaaaaacgctaa

SEQ ID NO: 57855 - DNA, 1034 bp, Heterodera glycines
gctttctctccctgctctgttctctgatgctttggttcaccgcttctgtccattaccaacgcttttaccttgttttgggttgaatttcgctttatatttaactcttggttactttttagcgtttttgtgcacttttctgctctgtctgacaacacttctcatcttttccagcaccgatccgttcatgggaccgttggccagcatggcaacgtccatccaagtgactggccacccttttcattgcctttgacaatgagtgttttgtgacggttaccaattcattcgcgccaatgtccaaaatcgggttcaacttaatctttttcattccctaatagcctaaacatttattatttaagtgatagaaagtgattgtgtctgataatttgatagttaataaattgttgaaaattcagaaactattcaaaacgcagaattaatgctcctatagaagattgtgttttctaaattttaatccttttaggctatagggcttcaaaaaaaaactgttttaatctgattttggcatagacgcaaatgtcttgacacggtgtgtgacagccttattgcaatttgcaaaattaaatatttcccgggcacaaataatctcgatttgatttgactgttcatgtcgttcaggttgtccttctcgtttacaccgtcattcccctgcctctgtacctttgcattctcatttgtgcaatttgtgagttgttttttggttttggatgggttttttccatattttcggttcattcccccacttttcccccacagattcgctgctcttagaattgctcagttccccccaaagtccgtcttcctctttcaccgcccttctccgtcccggcacaaaagcgacgctccatttctgtgtccatttgctcggcattcatttgtacattctgacccaagtgcggcagcggaaaacctttctgaaggtcggccagtcgttgttggccaggaaggacttggagctgcagacgcagttcaaggaccacatgatccagtctgtgatgccaaagaaagtgcgtttt

SEQ ID NO: 57856 - DNA, 619 bp, Heterodera glycines
gctcgcattgccgtcagtcgcaactgcctccatcacaaccgttgccgttatatgttccgccagtgattacgggggtcagtttattaaaattttagaattgtttaaaaaaaatgtttttccaagtcaattagaattaattcaaaaaaatttcccaggtcaatcgtcaggagcaaatggaagtccccgcaatctctgtggcagtggtcaccgaagtgccaaaagttgagcaacagggtggagaggatgagcaggaattggacttgcgttaggacatgtaaccagagaaaattttagataaggggaagcaactgggtggaaaattgtggaaaatatttttgaattattaaaaaagaattttctctacaatgccaatcatggacaaaggttttaagttgattacaggaaaaaaagataaaaattggaaattgttgaaaaaaaaaagtttttaaatttacgacgatagtaaaacagatttacgatgtatctttctctggttacatgtctaatggaaattattaatccgttaaaaatgctattttttcattggttatttaaagcatttaaatattcaacgcctttacttatttttaacattaaattgatatgctatcattaaaca

SEQ ID NO: 57857 - DNA, 294 bp, Heterodera glycines
  unsure (1)..(294): unsure at all n locations
atgcgcccaaagtcagcgcccaaaatgaaaatgggtaattaatgcaataataattaaattaattaatcaattaattaattaaaataattgttttcctatcattttttagagaacattctccgaaaaaggttcatgtcgagctgccagcagttgacgaatatggcgatgacccatttgagggcgtcagcgaatggcccctgcaggaggaggggcagtaaattcggaaaaattcaaatttattatcattattggcattttgtacaaaaaatttanatttcgcgaaaaatgattaaa

SEQ ID NO: 57858 - DNA, 742 bp, Heterodera glycines
atgcttgtgccattaatcagtaatgagcttttgagtcgccaatttcggatgggtattattgttaaatgctttttgactgagatgacaattaactgccgccgcttttcggctgttgtccctcggctgatggccataaatcagtcgtcgtctcggagggtttggggactttttggaccaaagaagggcgatgggaaggcaatggcaatgggagagatttatccatccccgaggggcacggggaaggaaaatgttattctaaggccaaagcacccgaagaagcgatcaatcaaaagtgagaggggcgaaggggtgggagaagtcaattggcggggtagcaaagtttgggtgggggaaaaggaaaggtaatggggaaacggggagaggggggggggagaaaggatcggttctagattaagattttatcgaaggcatttgcgcctaatgttagaaaatacctaattacgcaatttcatatttttatgattttagacttttttgctcgtgaattccctttgctgtacgactcctactatttaccaacagtatgttcagataaaagtcgaacaaaaattgacaaataaatgtgattgatgatgatgatctccatagatagtttgagaaaatttacaaagaaaattgtaccaaaaatgtaatttcctcaatgatttttaattggtgattgcatgtttgaaaagagaatcgcagatcatctcttcatttttggctattaacctgaaataaa

SEQ ID NO: 57859 - DNA, 1029 bp, Heterodera glycines
atgtggcacgtgacaagcgctgttgaagaacgaacttatcagcagcagccgttgttattgtttcatgaaattagtgcaataaaaataaatgattacgaaaatgcggataatgagaaaaggcaacgaccgagggtaattagtagcaattaacggatttatatttaagcataaaaaagaagaagaaagaaagcaagactttagcagaaatgaataagaaaaattaaaattatttgcaacaaaaactaaattctaaaaaatttgatatttatatcgcaagtttaaaataattttaaacaaaatgatattgaaaaaggataattagttaaaatatttcattaaaaaataaacaacccaaattagcaaaaattaatttggtagttgaattgatgcaagattatctgtgtataaaaaaataaattaaatacaatccgggacaataaacgcaaacttaaaaaaaagtttaaattttccacctatttattattataaaatataattgaaattaaatgataatttaaatcgacaaatttggaaagttacacaaaaatattttggttgataaattacaataaaataataataattttttcataaatgatccgtcgcccaatgaactttcacactcaaatgcacacactgaattaatttgctcgccatttctgtcaattgatcattttcacctcgcgcacattctgtccccttttggtcgtcacacgcgccacggtcattcactccgtcgtcacattaaaaaataattacagaaaaagtcattaaacaaatgccgttcgccacaatgcgttaaggcggttggaggggttggttggctgatgcaccaaacaatcgcgcacattcgttccttcgataattgggcgcggatgattagcgctaattaatcgtaattgcatagattgatgcaaagaatgtagataaacacaggcatttattcaattaataatgtgatcatgttatgcgttgaacgaagaaagagtgaatggaaaggagattgtttgcatgcatattgtggtggaa

SEQ ID NO: 57860 - DNA, 601 bp, Heterodera glycines
tccacattctgagccgtacggtgcaaagcatttgtacaacgggcactgttggcggcacatttgactatgaccagacatggatttgcgcgttgtaagtttttctcatatttgccaaaaatttcgaaaataaattttcaaaagaaattctgctcaagtggttggcacgaaaaaatttttgagttttattctgctagttcgtttttaaaattccttaagtgccccacgccaagagagtaagaaattgattataattaaaacaatttaattaattaattctatgacatcgaaaataaatattcttgaagtcaatcactcgacagttttagttcttaattaccctgtaaaatctcaaaagaatttgacaaattccaaaaaaaattgtgctaaataaaattcaacaaaatatttgacaaattttaatttttaaaattcgatttaaatttattttatttcttttttttaatattcaatttgcagatgcatgctgaacacggtgcagcatcgacatgtggccattgcgcgactgtcccatccgacaaatttgggccgtaccatgcaagacttgcgcttcatcattattgtgattgcaccgtccagagcg

SEQ ID NO: 57861 - DNA, 658 bp, Heterodera glycines
atgttgggcctcaaaattcaacggcattcccttggcaattggctgaccaaagtgtgccgtcctttggcaaagtgccgttcctcgacccaccccttttactgcggccttttcctcggcttactcttcgacttggccatcgtttggcttttcctcccctctttgtctcatgcgccgaccaaagaaaggcaatcgtcgatcagtgaaatggcaaaaactgtaaaattgccaaaacaactgatgggctacgaggcgtatttcaacaaaaacttcacttaccctttcgattgtgagttgcttttgttctaagcggattaattgtccgggaagtttgcccgatttgccattttttgcttaaaagaggaaatgaaaaataatttaattgtgttcagcccgagggaccgttgcgcaggaaattgcgaggaaagtgcgcgtgttctgttggattttcacctacgaaaatttccacgagagtcgcgcgcggcacgtgaaagcgacgtgggcacagcactgcaccaaattcatgttcttctcctccaaggaggacagcacacttccggcgattgacctgcaaattccgctcggaaggcaattcatttggcggaggacgaagaaaattgccaaatatatttacaaggaatatttggtgatgggaaaatga

SEQ ID NO: 57862 - DNA, 2382 bp, Heterodera glycines
atgtgtcaagtttgccgtggttttccgaagatgtctctgaacgttctgggagttcttctgatgtgagtgccacccagtgatacaccgctccttaatgtatttacttgctctgtttgtatatttctgtgtatttgtgataacactgctccttaatgtatttacttgcctctgtttgtatatttctgtgtatttgtgataacaccgctccttaatgtatttacttgctctgtttgtatatttctgtgtatttgtgataacaccgctcctcaatgtatttacttgcctctgtttgtatatttctgtgtatttgaataaatttcatttaatttgttttgactaatacgtccatgcgtgatgaaatttggccaaatttattgacatttccttccccattcaaacaccgaaaagtccttgccaaatgatttgcaactagaggcgaatgaccttttgaaggcgggggccttaaatatcaataaggctatacgccttatgacaagcgagatttctgccagcactgatgcttggaagtcatcgcacgtgcgaaagaggccattgatttgccggaagacatcactttgtggtaaattttggaagtgcggcaaaagtggggccgacttttaatgattcattttggtttccaaaatccattggtatttccaattactatcagttttcatttttggcacttttggaagtacggcaaaagtggggccgacttttaatgattcattttgggttccaaaatccattggtatttccaattactatacatatttagtaacctttcggacatcagacaagattttgacctcacgaccaaactggcaaacccagtgtttgaccagacgatggtggaaaagcccaaggacgcagccaaccaggttttggaaggccccaaggactcagccaatccggtttttgatggccccaaggactcagccaatccggttttggaagggcccaagaactcaaccaatccggctttggatggccccaagaactcaaccaatccggctttggatggccccaaggatttggatggacccatggacgcagaacattcggaatttttggtaagactaatttttgaattttttttgaacttttgaattaaggaaaaattgaaaattatcatcgaccggaagacgtcgcaccaagttgatatggagaaagttcatatcttcaacgaaataatggacaaaaaaaaaaatttcgcgccgtgctgtatgcagcacattcaggaaaaaatttgtgccgcgtgaactctccatttggcgccagttggaccatccgaacaccgtccgcatgcacagggatttccgagagtctggctatctgttcgaggtgctcgactacgcacagaaaggcaacctggtgagttcgatcaacgcggtggtaatcactacactggactgtttgaaaatttcagcatacctacctggaacgacacggcccacttgacgagacgatctgccgggcgtggatgcggcaactgaccaacggagtgtcctatttgcacgaaaatcgaatcgcgcatcgggacttgaagccggagaacattttgctcttcgaacgtagcgttctcaaaatcaccgactacggcttcgcgaaacaggtaatgaatgccacgcttcaacacaaacgttcaatttcctttttcagtgcgatgatggcgacatgtcttcaaccttttgcggaactaagctttacaaggccccggaactgctgcagaaacatgaatatgacccgttcaaagcggacgtttggtctgtttttttttcgtttccattcgctgcttttttcatcttcccttttcatttcaggtcacttggcgtcatttgctttgttatgcggaccaacacaatgccgttcagcagaggcgtgagccgaacacacatggtggaggaacagcgaaacagtcaatatcgattcccttctcacttggtcatcagtttgcagtgtcgcggcgccattgacacgattttgacgtttgatccggagcagcgtccggtgagcactttttttgtgttttttgaattttcaatttcaattccttttttcagagtgtcttcgatgtgtcaagtttgccgtggttttccgaagatgtctctgaacgttctgggagttcttctgatgtgagtgccaccagtgatacaccgctccttaatgtatttacttgctctgtttgtatatttctgtgtatttgtgataacactgctccttaatgtatttacttgcctctgtttgtatatttctgtgtatttgtgataacactgctccttaatgtatttacttgctctgtttgtatattgctgtgtatttgtgatacacctctccttaatgtatttacttgcctctgtttgtatatttctgtgtatttga

SEQ ID NO: 57863 - DNA, 676 bp, Heterodera glycines
atgccgaacgacctgccgggcgtggatgcagcaactgaccaacggagtgtcctatttgcacgaaaatcgaatcgcgcatcgggacttgaagccggagaacattttgctcttcgaacatggcgttctcaaaatcaccgactacggcttcgcgaaacaggtaatgaatgccacgcttcaacacaaacgttcaattttcttttttcagtgcgatgatggcgacatgtcttcaaccttttgcggaactaagctttacaaggccccggaactgctgcagaaacatgaatatgacccgttcaaagcggacgtttggtctgttttttttcgtttccattcgctgcttttttcatcttcccttttcatttcaggtcacttggcgtcatttgctttgttatgcggaccaacacaatgccgttcagcagaggcgtgagccgaacacacatggtggaggaacagcgaaacagtcaatatcgattcccttctcacttggtcatcagtttgcagtgtcgcggcgccattgacacgattttgacgtttgatccggagcagcgtccggtgagcactttttttgtgttttttgaattttcaatttcaattccttttttcagagggtcttcgatgtgtcaagtttgccgtgttttccgaagatgtctctgaacgttctgggaagtcttctgat

SEQ ID NO: 57864 - DNA, 2071 bp, Heterodera glycines
  unsure (1)..(2071): unsure at all n locations
atgagccttgctacatccagcnccattgacgacggctcagttcgacaacgtgcatcgattgctgttgacaacgacgattctgacgacgacgacgacgatgaagaattgccgcttcgtctgtgcttctttgacgctgagacgtcacaggatacgccattacagctgaacaaccgcaccgtccagaagcacgtgccgctgctcatcgtcgccgaagtcatctgcgaacgttgtctgcaggctggtatcagcgtgagcgatggccttggaagacgggctcctggctgcgtctgcatgacaggaatggtgagaggtcaactgtttcgccagtggtcttcgccaccatttgccaatgcaccgggagacaacagcgcttcgccagttggagcaccagcgttcaaccagcgccgcttcttcttccattcgtttgacaacgacggcaacgacccagtggaccaatttttggattttttgctgcagcatggcccaaagaaggcacacacggtgtgcatcgcccacaacggtggaaagtacgatttccatctcgtacttgaggcactacaccgccgaaaccgtccacccaagcatctgtgcaccaccggattgaagatctactcgatgcgtctgtccgggcgtaaccaacgacgaatcacgttcaaggattccatcaactactttttttgtgccttggacgcgttggtgaagagcttccaagtgccggaccatctggcgacggtgaagcccttctttccgtatctctacatacgacgacaacatctgtcgcagcgcctcaacggtctaccggctcaagagttctacgcaccggacacgatgaaggcagagaaacgggcgcaatttctccgttggcacgccgacaacaacggcaatggattccagctacgcgagcagctcataatgtactgcgtcaacgacgtggccattttgagggagtcggtcatccgattccgccaactcatcgccgacaatactcaaggcctcgacccattcctccacgcgtcaacagctgctggtcttgcgctggcaacttttcgccgctgtttcctgcccgccaatcgtctggttcactcacccgagggcggctacttgcgcggacgccgtgcttcggcagaatcgcagcgctacatccgcttcttcgagctggagcacccggaggcgcaagtgcagtgcgccagctggtccgttggtgaagcgcacatcgaagacagtggctaccgcgtggacggactttggcgacgagaagcgcctctccgtcccctggccattgaatggcttggatgctattatcacggtaattaatttttttttcgtttccaaaatatcttaaaattgaggctgtcgtgtgtgctttcccgaccggcagcaacaattggcggcggggcgaacagcggaagatttgtacgaacggacggagcggcgcctctttgagctggagcacgaccacggctgcgatttgcacgtggtgtgggcctgtcagtgggcggagcggctccgccacgatccggacctgaagcgccgttacgatgctgtgttcgtcccttgcccgctggacccgcgcaacgacgcgttgaggggagggcgcactgaaccgttcaagctgcaccacgtgtgcagtgacgacgaggagataatgtgcatcgacattgtcagcctctacccatacgtcatggtaggtttttcttttaaacattcgcatattcatgatgaataccagaaagccaatcgcttccccgtgggcaacccacgggtcctgacgcgcgaggtgctgctgcgtccgccaacggtaccgctcccgtggaatgcaccggaaaacaacatcttccgggggctgctgctcgcccgggtgctcgctccacgcaacatccgggtgccgttgctcggctaccgcacaaaggacgggcgattcaccttccctttgtgcgcgtggtgtgccgaccgtcggcagcagcggccgtgccgacatgacgacgacaagcgctcgtgggtgaccgcctacacgcacgtcgagctcaacaaagcgctccagcttggctatgtggtcaccgaccctatttga

SEQ ID NO: 57865 - DNA, 694 bp, Heterodera glycines
gtgaagcaggctttcccggaattcctggcgcaaaaggtgaagctggcttcccgggtctgcatggcgccaagggcgaattgggattcgatggattgcctggccaacccggattgcaaggtgggtggccaatttacagacgtttcgataaaaaatttgaaaaaaaattcaggcccacctggactgccaggttttcctggcgaaaagggtgaggctggcacacccggctacggcgtgcccggcttgccgggcgagaaaggcattcccggaattccgggaaaatcgggcagatcaggaccacctggcgagcgtggcatggacggaccacacggattcactggcataaaaggagaaccagtaaaaataaaaaaataattatttaaatttcattaaaaattatataaagcaaaacttgtttctattaatttttctaattttaaagctttaaaaattttataataattaaaatttcgtataattggttaattctcataaaattatgtgtataaagaaaatttttattaattttaatatttaaaattaattctccagggttttcccggccaagacggactgcccggacaggatgggctgcccggactgccgggcccgaagggcgatgctggtctgcctggctttcccggcatacctggccaagaaggacagcccggtctcgtccgccctcctggacttcccg

SEQ ID NO: 57866 - DNA, 753 bp, Heterodera glycines
atgtatgaagattgcaacaccgtttttgcacggtcccttgacgcgaagaaagcgcgtctcttcattactttcacgaacaacagggaatggcctgagttcaaagagaatttacacaaaaacggtcaagtatttactgaccgttttgacatgtggatgcgtgtctggagcagcaaaatcgctgagttccaagaagaactttatgacaaaaagttcttcggaacaatccttggttacggtgaatcaatggagttccaaggccgaggaggcccacatgcccacattgtggcgcaaacagacctggacgcagttccatatgtcattcaggaatacatatgggcgcacattccatctttgcctgataaagatgacgacacgcccattgcaaaaatgcatcgcgaaatccgcgaaacaatgcatatgcaactgcacagatgcagtgacagttggtgtggtcctagcgacccaatttacgggcggtgcaagaaggggttcccagccccttactcaaaatgtacgattttgcgcccggacaggcccgcgatgtatttccggccttcaccatctgatggtggtgcccaattagaggtaaacggcttaatatacgacaactcacatgtcgtgccgtataatccaggtccaggaaaaatccaggttgccgaaaaatggcctggacctggacctggatccaggaaaaatccaggcctggatccaggtccaggccgagctctaatcacatcattttcggtcacataa

SEQ ID NO: 57867 - DNA, 60 bp, Heterodera glycines; identical to SEQ ID NO: 52045

SEQ ID NO: 57868 - DNA, 786 bp, Heterodera glycines
atgaacagaaaaataatgtacaccgaccggatccgaacttgccccccgccccctcaaaatgatgcctcagaatccccaatcacacagggattctgaggtcttaacgatgtcaaaagtaaaatctgattgcgtattcgtgatcagcggcccaaataacccataaagacatatttttggatgatttttgatttttaattaataaaaatatgtaaaaacagcaaaaaatacaaagaaaataatttacacagtccggactcgaacttcgcccccccccccaaaaaagatgcctcagaatccccaatcacacagggattctgaggtcttaacgatgtcagaagtgaaatctgattacgcattcgtgatcagcggcccaaataacccataaagacatcttttttgaaggtttttgtgagaaaaatttttccactcaaaaatcctggtcacccaacatgatttaaaatttaataaataaggaaattttttttattaaatattaaaaataaaatgcattttaattttaaattattaataaaaaacaacgttgaaaattaataatatttattttatttaaaatgaaattaatttttttacaaattcagaaaaatattaattgaagcaaaatattcgatattttataaactttaattttgaccagaagcagtttcaagcaaatatgaaaagatgtttatcttattatttgttacatgaatttataaaatgaatggtatttttaatattaaaaaaaatgagtacagcagttgattcataaaaaaagtattaattaaa

SEQ ID NO: 57869 - DNA, 148 bp, Heterodera glycines
cattaaatattacagcataatattagaaagaatattcgcgaacgaagtaaatgggaggaaaacaccacagaagcagcagcaagatgagggcggacctatctaatccaaataaatcctacccccactcttttcataaatccatcttctc

SEQ ID NO: 57870 - DNA, 174 bp, Heterodera glycines
atgttcaccaaattggagtggttagtttaaatttatattcaatttttcaatgttcggaaaattgcaggagcgataagcattcttttgaagatcaggaagaggccgctgctgggttagcgaatggtttagcagatggaaattaatatttttttacccatttttttagtaattaaa

SEQ ID NO: 57871 - DNA, 1071 bp, Heterodera glycines; identical to SEQ ID NO: 27178

SEQ ID NO: 57872 - DNA, 624 bp, Heterodera glycines
atgcatccaaacatatcagtactccgcggcgtgagttgcccggcacttcctcccatttgttgcgcaatgacactgggcttggcgtcaatgtgagcagcaccgaatcggtgaaggtaaattatggccaacaaaaccaggaataaaaatgcctaaaatagcgcttttgatgaattttattaattctaagtataattccatatttcagatcattgcctcctccccctccgatggtcgccaatttgagtgttgcgccggccaatacgtcccgatggaatgcgtcgcttcgtcggcggaatcgattcgcgagatcaactggcgcatgaaggaggaccagcgccaaattcagctccaattggcattttccgacccggacacggaacgaacagtgaacatcgctcggacggagaaacagtgcgtccatttgccaagagaggcggattcgggtacgaatttgtacaaaattggaatattcattccgctcaaatcattaatttttatttcattacaggtaaaaaatggacatttgtcgtggaaaccgtgaaggaagatgctcgtcatgttgttacgctgaagtcattggttacggttggtaaacaatcaaaatacaaaacaaatcatttgtga

SEQ ID NO: 57873 - DNA, 1145 bp, Heterodera glycines
ggcaatttgcgtgattttctacgttcccatcgtcctggtgcggaagagaacaaacaaaaccgctctctgccaaccgctgaacagtatttcaattgggctgctcaaattgcggacggaatggcctacttggagtcgttgcggttttgtcacagggatttggcggcacggaattgcatggtaagccaatcccaagtgctaaaaagtgccaagattattttgatttgttttccaggtccatgctgacgagtctgtcaaaattggcgacttcggaatggccagggacatttattaccacgagtattacaaaccggccgggaaacggctgatgcccgtgcgatggatggcacccgaggcgctcaaagatggcaaatttacgctgaaatccgacgtttggtgagtgtgggttggctaactgtgtccatttttcacacgattttcaggtcctatggaattgtgttgtacgaaatgttgacacttggtaagcgataaaaatttttcaacaattttacggaggaaacataatgcctccgctcaataaaaagtgtattttattctaataaatgggtttttcattaaaggacagcaaccgtacgctgggcttggcaatgaccaggtgttcaactacaccggtgtgcaaaggcacgtgttgcacagaccgacggattgcccagacttttggttggtcaatttgaatgcatacgcaaatttcatttcgaatttttataatttatttttaaggtatgcgctgatgctgtcgtgttggagatacgacccacgagaagtaaataagactcccaaagcaatggcgtggtcaattccgtgcctctgggaggcatccatggcgacgaattttttctatatacaaaaaataaagaacttaaggggtaaagcactgtgcctataggcgtagccggaaaactaagatttttaatccattttaaaatcctcacaattttcaactttgttttctaaattcaagacattttttgggccccaaatcccctgacaacgccatttgtcataacagccatttaagaagtttaacaaacgaatcacatttatttttaaagcgtccatcattccgtcaaattgtcagacacctcacaaccagttgttcagattttattgatgaagagttcaaagtg

SEQ ID NO: 57874 - DNA, 736 bp, Heterodera glycines
atggtcgacctgtaccaaattgtgatggaacggctgctgaaagtgctggacggttgtgacctgttacagattgattccagccaattggtgtgatttgcgaagatttaaaacaagtaaataatctttttccatttttaaaactaaggcaagggcactcgtcttcgcactgcaccgaacacaaaacagagagctgagggaaatgattggaaaatgtgttggcaccatcggactgctcgaccttgacggccgaacagcatcctctcgacgaagcaatcccattgatgatgatgcaaatgcgactgcaatggccgaaattgtttctgttgacaacaaagtgcaggttgcgtaacggtaaatgccaaaatagtttaaaaaatttcgtttttcagttcaccgtcaacttcatccatggcattttctcaagattggacgaatgcgaacagtccgagacggccgtcaaactgcacgccgtcatctcctacattctattggtgccgctcaaagagcacgggatggacgaacaaatttggaagaagttggcatcgaatgtcgtcgaggcattgaacgcgtcacggcaaaatccgttccaagtggaccaatcattcaaaattgacgacctcttcaataaaaacattccaatggggggacaggagcagcaacatttgtacgcactttaatttaaaatgtcgccgggttctttcaaaaagccaaaattttcgaattttttgtaaatcaa

SEQ ID NO: 57875 - DNA, 3255 bp, Heterodera glycines
atgatcatccaggctttggtcgaacaaaacgacgcaattcttgacaaagtgagagagaacacaaataacttctgattaagaaaaagtttgatcgcatggcaaactgctgcctcaaaaatggctaattcggatagctaatctgccattttcgagttttttttttcagtttgagcaggaggcacttgcggtgttttgcgcggtggttggaggccaaatttgttgggccaacgacgcgatggtcgctatttgtgccatagtggacgcaatggaacgcttctttgttggccgcactgctgctgcaattgttggcacgaggccaaaggacaaagtgagttttggacgaattttgatcaaaagtgaatgggactgatcagagaataatccgcaggactttttctttcatcaggcttaatatttcagtaattaataatactgaataatgcttttcataaaaatccaattttaaagttgacatgtttcttccaggatgtcctttccgaacggtttgatgcgttgatcagcaaaatccttgcccaacccaacccggacagtctgacggtggtgccgttgagtgtgttggccgcccaaaagtgcaactaccactttcggtcattgcgttggcttgaacaattcgccgcgtcacccaaaaacggcacagatggcgacaacggcaattttcgacatgacttttattttcttttggaggtgcttccactttgaccccccccccccgtcgtaagaggcctcggacacccccctcccccctgtcccaatcgtccgtcgtatggtccttgggtgagacaccccttgtacatgtatgttatagcatgagaaatgcaaattgaatgggtccaacacatctccgccggaacctcgccgcaaaaaaaacttgctttttcattgaattcttagttaaaaaaaaaaaaaaaaattaaattaggcttgataactaaatttttgatttttccttgatttttttcgacgacgatatgttctttttgtccagctctcaaattgaatacaattgaaaattcatgaaagaatccccaattttattcacccttcatccattcattgcccatgttcttttatttttttgacattctctctgttcagcgactgtattcccacttgggcaattcggacggagtgttgggcaccttccaaatgattcgcaaccgaaccatgccggagccatttgagcaaattctggcactgaaagtgcagggcaattatgtggacgcgttgccgttgtgccaacaattggtgggacaggaagtgagtggaaaagaattcgaaactcgggataaatgaatctttgggcgtagaatttaggagaatttacctcccaaaataatattcagaccaattcgaaaaatcaaaaattattggacaaattttgtatttgtgccatttaaacgttaaatatttttgcctgttccagaatgagatagtcaaatgtttgttgcgctccaaccaaccgttgttggctcaaacattcattgagcgcacattgcgacacattgaacaacaacaacatccgaaccatgaaaatggggaggcaattggcgccactgacggggaaaatggtgccgtaaatgctggagatgatgccaaaatggccgcaggcgattgcagcaaaagtcggcgactgcgcgagtatcaaatggaggcggtgtgcaagttgggcgactgggaccagctcgccatgttgcatcacaatttggtggaggaaggtcgaaacagaaacaacaacaacaacggtggaccatcccaaaatgtggaaagcgatgcgcaaaacggtggcagtattgagaaatggggtgcaaaaatggcagcaattttctgtaatttgcgccaattcgacttgaaaagctttggtgacggcattgaacgggcacgcgcttcgctggtcgatgcgttggagcgaaccacgctggaggactcgagcacaattgcgcaggcgcaccggaacatcatcaagtgattggacgcaaaataaaattttttatttaatttattatttgcatgttgaaacgtaattcaaacgccattaaattttaaaaaattctaaattgacaagctgcttcgctatatcccaccttatcttcttattgcaaactgatagactttgattatttgaaaatgcaatttgctatttcctatatttagactgaggtcgctgtacgaagtggagagtgtgcgggccgtgctctactcgggcggtgacaaatcagcattgttgcggaagaccatcgccgattgggaggtgcgtcggggttggggatgagtaacccaatggacgttgagttttacctctgtactacttcaactttttggccaccaccgctttagcgccagtccgacaattcgctgtccttcgccggtcgttcggagcgtgtgctttcactgcgtgcggaactgttgcgcgtcatcgacttgccaaacactgcgctcacccaatgccgtctgctgctccggtgctccgagttggcacggcaggccaactatttgcaacggtcgtggacatacattgccgaggcgaaggcactccgccgaacgtcggcggtgatggaaaacaccaaacaaacggagggaatggaagcggacacggccattgacatggaggaggccaaatatctgtttcaaaaggcaaaaaatggcagaaattcatgaggattttttaaacatggagcagttcaattttcccatcaatgaatttttaatttttttaactaaacaactcacatgcatttaaatttaactaaaattagtaaaaattgggttttcttttacaaacttaaggaaatttaccaaaataagaaaaatattttttccttcaaattccttttttgaaaaatttcaacaacattttaactttaaatttcttgttgatggggaaaagttcaattgcccctgacaaaaatatgcatttaattttcgacgattatttccattttcgaaaaaaactgttttcagggtgaacagttccaatcaatcaatttgctggagaagaccattcacacaaattttgcggaactgtgcaccgaactgaacgcacttaaagtggacatcggcggggggatcagcgacggcagtgccacggcgaaaaggcttaggaaatgtgtggtgctacaacagaatggggaacaggacggaggaggagcggacattgttgaggttgctcaaccgcaacagcagcagcgcagggaaaattttgttgaggtaactgtcgtcaatttaatgtttttttaa

SEQ ID NO: 57876 - DNA, 156 bp, Heterodera glycines
atgctgctggccgagttcaatgagcgcgctagtgccaaacaaatggacgacttgctcaacacgtacaaacggttggaaaagtttgggcagttgaccgagtctttctactaccgatatgcgaccttctacgacgtcaagggcgagtcggccaaggag

SEQ ID NO: 57877 - DNA, 1412 bp, Heterodera glycines
atgaaactgaaccaaaagtaatttatatattcaatagccctaccaattctctatttatatttacacttttaaaaaatctcattgacgctcacccaatatcagaacaaaaaatgctgacttaagattttttgcaatttatgagacaataactctttctatcttaagtaagaaatcctgagaagagatcgtattgctgatacaactctatgaggactatccaatgctaccatagaataatatttagagtgaactactgaaaccctatgacttattacgcgttatcccttgcagtgttttcttctacaatattttttcttagcaccggcatcacttcaatcttgctgtgatgcactaacctctaactatccccgcaaacgttcccaatagaacctaatccctacatttaatagccctatgctgaatgcttgaataaattcttatacccactaagtacaccgcattgacaccctgcaccaaggggtagctcgagacggcgcatccgggaaaactataggttttttggtccgaagtccaactgagtcccaccggcgctaaaactgactttgctggcagtctcagtgttacgaaaatttttcctttagctcagatcgaaaaacgcttgcaggtaggaaactaagttggactatgcctgacattattgccagcaacccctaacccctacctctaaccccctggtctgtacgtttctacaactttttgaggtcagaaatgtacacttcagtaccaggccaatactgcatcagcgtttgatctgagcggagggttgccagcagacttattgtagagttcaaaaagctcgattttttgaaattttaaaatttagaaaattttcagaaattttcgagttaggcctaaaattcggttttttggtttttgaattttatgattttttacagatttttccgagggaaacggagaacacattcaaaacatcgtttttcgagccctatcgattggtgggatttttagaaaaatttcgattttttcccggaaatagaaaaattttttggcctaagcgggacatttgagtcccgggcccgtaactctttaaggttcggttttagccaaaaaatgccttagaacaaaattgtagagcttttgaaactctatcgaacggtgtgctgtatgttcggaaattttcagaaattttcgagctaggccccctagaaattttcaaaaaattttttaaggtcgaaaaggggagtgaaaattatttttcttgggtaaattatggtgctgatcacgattatgatgtttgtattaagtttcataattttttaaattttttaaaaattctttatttttaggaaattttttggcccttggaaatttgggttaaaatttgaaaattcgtaactcacttctatgttggacgattttaatacaataaa

SEQ ID NO: 57878 - DNA, 1181 bp, Heterodera glycines
tcccgcttatcattcggcacttgccgacggcgtcaaaggctacccgggcataaaggcgcggatgaatccccgcacttttcaatacctttcggacattgccctcggagttctcagttagttaactaaaaattgtcaaaaataattttatatttgcaatttcagactaccaaataaagcgagctcgtctccccaacataaatcagtgccttccgcaggtaaaaaagataattttaatttaatcaatggcaattccaactttggcttaatgttcaatatttccaatgcttcatctccccctcccttcagttgaacggttgtgtccaggtgtacaatttgtatgtgtcccgctaccgatgcccccaaagtgagcatttcgccacgattgttttggtcaatgcctttctttcctcccccatccctttgtaaggggtcaccgtttacccggctcccccgaatctcattgtgttggatgtgcaaaatttggacattgggtgagttggggttcctctggcactattttcctcgactgagttcatccgtgcctcgcccccccccccttaagagtcacgggaaatctcggcgggcaaattgtcattttgttgccgttggcattgtttggcattatccaagtgaacgcgtatcaggtgaatggtttagctaatgcttcatttaacagtccgtttttaatgtgttaactaacagctgaatattcgcgtcggcatttacctcgtccgtggtcccaccggatgtccgcagattcgcgtggccagctgtcagtttgggagctattttatcattttaaaaatattttaacaaaattttccatttgggtaaggtgccgccagtgttggttatgtcgatgtttacattcaaaacggcggtcttttgggtgacattgccaacagtcaatttcgagtgaatttgtttcttttttttttgctcattttacccatttaaatttcaaagggtaaaatcagcgaaatggtccgccaacaaattccgggacaggtgccatttgccattattattgccaattaattagtgataacatgataatttttgcagatttgccaacgtttaccgtccatgttggatgaacaggcgaaccccaaactttgctcaaagatccctcagtttatccctgtccggaaaatgctcgaagtggcgatcagtgccaccgg

SEQ ID NO: 57879 - DNA, 259 bp, Heterodera glycines
atgaatgaggttggtccccccgaattcagcgcattgatcggttgtctttctttcatttgtttctctttgtcaggtgccctcccgcgattcgcccttcgtccgcactttgctcgtccgtcgtctctgtcctccgacccttcgccatttgtcgctgaacgctttggccttccaaattgtgattcgctggtcacaggaaatgaacgcgcgcaaaatggcgggtgccccggaaagtgcggccgggacacttggccgaagaatg

SEQ ID NO: 57880 - DNA, 158 bp, Heterodera glycines
  unsure (1)..(158): unsure at all n locations
tgcaggtcacnnttttacacttgtggaagcgcagaaaaaggtcgagtaatgaatgcatttccatgttttaaggttgttttcttttttagattctttgtttcggcggactcgacaccgccggaaggcctttgagcgacctttgggagttggacatcgcg

SEQ ID NO: 57881 - DNA, 829 bp, Heterodera glycines
atgacaaactccttttactatacaaccgaagaattgttcatcaatttttggtgattttttttttaatataatttttgtgacatttcaataattgaaaatatatatttttttattaaatattaaagtttaacaaatttaggtggacacctgagcgtggccaattgtcttggtcaccagacccgcgtaccacggagacaccactccatgatttacgtggacgcatttggaccgatcgtaaattggaattggagccagaaaaatggtcaaatattttcgcaaattggcaattaaattgaattttttgaatattttttaatttaaatttaaaatcttcttaatcctttaaatcatcataatcttccagggaaattgtcaacattttaaaatttctgtcatttaaaccccttattttttggacttatttataaatttgcatgtccatgcttaaatttcaaattttcataagttacatattccagggaatattcaaattttgaaagtttctttcatttaaatcttaattttttattatttttttttatttaataattttttcaagtccatgttttaatttaatttctttaattacttttctaatttacaaaaaatacatcttaatttttttttgtctttttaggtaccctttcccctattactaccgtccctttcggccctaccgtatcacccgcgatttgaccataatgcccggtgccacactgaccattgagaagaatgtggaagtgcatgtgtggccaaatgtgcgcattttggtgtacggaaatttaattgccgatggcacactttggcaggtgccgtggagtggaaatga

SEQ ID NO: 57882 - DNA, 736 bp, Heterodera glycines
atgaaatttccattgcctgaagaacaatccatcgctgttgtggacctcaacttggaaactttaattgatgatgccatccactgggctcatatcaatggaatggtcacaagaacgaaggaaaaccgactcaagtataattaaataatctaatataaaatgaaacaatttagtttttctcgaatttttattgttcgagtcggtacttttcggtttcggggcctagaatttgatttaaaaaagcaacggtacttttcggttttgttcctacacctcaaaatttaaaattaaatattaaaaatttcataaaatttttttattaagattaaatgtattaattaataaatttggtactttgcagttttgttcttacatctgaaaattttaaaaagccaaaaagggcgtgtggaaagccatttttagctcacgccgctattttggaggcattgacaaaaaatttcaccaaaatattaagccatttaatgatgctgcatcaatttaattttgcttttttggaatgaggatataaaattgagtgccgttttcagtccaaaaataggataaatagaaaaatgaaaccgattttatgcgtgtcttttgttgctgttgttgttttatgcattttgaggtgtaggaacaaaaccgaaaagtaccaaaaacaacaaaagacgggcagaattgcaaaaatattaaattaacgaaagggcatttgcttcccacttcactattctaattgaaa

SEQ ID NO: 57883 - DNA, 137 bp, Heterodera glycines
atgatacatagaaaagtaattatagaaatctccacctttaaaatacttgctaatttcagttcctaccgtatgaactggctgcgcttgttcaaaaattacgcgtggaaaaggcgttaggaacagtgaaaatggcttaa

SEQ ID NO: 57884 - DNA, 54 bp, Heterodera glycines
atgagggcacagctacgcgaacttgctgagaaaatgacggacaaagatcctaag

SEQ ID NO: 57885 - DNA, 347 bp, Heterodera glycines
atgtctccccctgttgatcagagtaggtaggaatttcgagcccaaaaatgtttcgaatttccataatttttccagggtcgaaatcgcttttcataatttcactgttctcccagcaaattaatgtccacaaatgccgatgagtttcgttttggcctgccttccctccctttcccctccccatttgtccattttcatcccttcttcttcttctatctcacaaaccacagaattctgctcctaatgctaacgtgattttttgattgtttttctttttttcattttccttttgtccgatcaaaacatttaaatcacaaaaatataatctaattgagaatagaaacaagcaa

SEQ ID NO: 57886 - DNA, 163 bp, Heterodera glycines
  unsure (1)..(163): unsure at all n locations
tagaggagtgatcagaaggactgatcagacagacggaccaatcactntggccaacaaacgatcactcgaattaagccattaataattaataatccgaccaattaattaaattagcatgttgtgtataagaattagcagtctttacgcatttacttcacagaaa

SEQ ID NO: 57887 - DNA, 710 bp, Heterodera glycines
atgaaacagtgttcacacaacaaccttgtccgcttgtttgccgtttgcactaacgaggaaccgttcctgatcatcacggagttcatgccgaacggaagtctgcaaagttatttgcgcgcacaagagacggacgagaagggcgtgaacattggtcgacccaaaaatttgctcagcatgcaagcgatgatcgacatttgtgcgcaggttattccgacaagaaaaattaaaaaatatcttcggtcgtttcataaaaaccaaaaaaaaactcttgttcagtttgtgcgtacaatagacttatttttagttggccaaagcctacatttttgtcataaatggaaagcttaaagtctcagaaatttataaatgcaagaacatagcaaataatggtattaagaaaaaattacattgaccaaatcaaaccatggaacttgaatttttcttttaagcttttttttattaaattttattttgttaggcatttcaagtttgttaagctgaccaactcaattcatttcaacaactctaccatagattatttttttatgacgattgggaaaggattaattgttcattaaaattggatgaccaaaccctttgattgatacaatacattaatttttcaaaagattttttttcaggttgctaacggaatgaaatacttggaggagcgtaaattggttcatcgcgatttggccgctcgtaatgttttg

SEQ ID NO: 57888 - DNA, 81 bp, Heterodera glycines
catattctatcgcatgaatttggcaaagggtcgctgtgcaatcggtgtgattgtcccgggttcggacatgcacttttggcg

SEQ ID NO: 57889 - DNA, 713 bp, Heterodera glycines
gtcacttggcatggcaatgatctcatttttccaattgccgaaaatgtgagacagaaaagccgtgtaaaataattgaatttcaaaaaaaataattttcagccaaaaccaatcgccgaacggtcggccaaatatgacaccgaaattgtctaccacggctcatttctgtgccaacttgatggccaagtggcttatcagccaacacccggcaccaattggacacactattttatattggtgcacaattttggacctaagtttttccgaaattttcgattaagcccccccccttccccctcatgagcgacggttattttttgctcatcggtcttaatcatttttaccgattttttcacaaaaagttctgccggaagggctggggtccggcagtggctttgggctccgccagagaaattttttgacaaaatttattaaaaaagagatatttttttataaattccattaaaaaaattcttcggttcggggaacgagtctttactcccccctggctataaccttagtgtcgagagtctcgatcaagttagtattgattgattgatagataggtttttccgtttgaggttgaaagtcccgtggcggaaactcacgccgtccgcttcagtcccggccaaaccgcagttgtggacgcatttgtcaagcattcgatgccaattccgctggagggccaattcgaatttgatgcgtggcacagaaat

SEQ ID NO: 57890 - DNA, 945 bp, Heterodera glycines
atgccaaaaagaaaaatgccgaccgaattaaatgtcgaaattgtggcggcacttccctttgatattcgctgggcaaatgtgcgaatttcttttgcatttgaccattttttgtacaaaaaacaagcccaatggatcagaaatgaattgatcagacaaaaaattgtggaagaaaatgttttttcaattaatttttaatttatttaaacaatttttttggatttagaggcaacggcttggacaggcaaaacgtcggattaaattaatgtcgttccgtctgtttgaaaaccgcttgcgcaacatgagggatcgtaagttttccagtgctttttcttttttacagtacacttttaccgtatttttggttatttactgcttacagtatcattcgactgtaatttgccattactattatgacaaagaaataattttccatattttcagacatcgcctctcacttccgtctcgacaactcttttggcttgacagaagtccaatttcgcggggaacttactccggagattttcggaattcaatttgacgccatttttgcgactattgaccgcaacaatctccaggacatttcctgggcacaacaatgtaaaaaaatgccaattaatgagcgataatgtggataattaagtcatccaaacgcttgccaattactctgagggctatgtggacgaatatgtgcaggcaaatcagtagcaaatttaagatggtttgatgtgaccttgttgacatgaaaatgctaaaaaacgatttttttaaaattttcagtgttgttattttaaaattaaaatttagcattttcttagtggtgtaaatgcagactaacggtgcaaaaccgtcgctctgatcataaatttctcaaattgtttgctaatcgacccacaatacctttcttctgttcctttaacgttgcgctgcttataaatgacaaataaa

SEQ ID NO: 57891 - DNA, 647 bp, Heterodera glycines
atgagggatcgtaagttttccagtgctttttcttttttacagtacacttttaccgtatttttggttatttactgcttacagtatcattcgactgtaatttgccattactattatgacaaagaaataattttccatattttcagacatcgcctctcacttccgtctcgacaactcttttggcttgacagaagtccaatttcgcggggaacttactccggagattttcggaattcaagtggacgccatttttgcgactattgaccgcaacaatctccaggacatttcctgggcacaacaatgtaaaaaaatgccaattaatgagcgataatgtggataattaagtcatccaaacgcttgccaatatctttgagggctatgtggacgaatatttggcggcaaatcagtagcaaatttaagatggtttgatgtgaccttgttgacatgaaaatgctaaaaaacgatttttttaaaattttcagtgttgttattttaaaattaaaatttagcattttcttagtggtgtaaatgcagactaacggtgcaaaaccgtcgctctgatcataaatttctcaaattgtttgctaatcgacccacaatacctttcttctgttcctttaacgttgcgctgcttataaatgacaaataaa

SEQ ID NO: 57892 - DNA, 1364 bp, Heterodera glycines
atgacgataatttggtgccgttccgtcgttttcttttacgaggaaagtgccatttccgccgtggtcggtggtgccggtgatgccgacgatggttcttcgtcttcggttggcacgggcggcggcgatggccaaaattgtgtgctgaactccgagagtggggacagtgcgccacaattttttgtggacgaaaccgaggcattggtggactacgcgtcgtttgacgactgttaccaattgggcgacgctgctgacgctgacgccgacgacgccagcggcgttcaaggcacagtcgctgctgcggccgcgacggcgactgctggcgagaagcgatcaatggcggcgagtgggacggacaaaatgggcatggacagcgacgccggcgggagggcggcgagcaatagcagagcggacgtcgcagagtcgcgcagcaggccgcaaaaggcgattgcactcgacaggaaggtacggtatgccgaaaggaactatacggtaaattgctgagaataggtgccatttagtaccggaaaagaaaattctcaatgtttgctgtaactgttaccgtaaaaggtcaatcccaatgtttaccgtaaccattaccctactaaaattgcaatttgtccagctctaatatatatttgcagaagagcgcttccaaaattgcacaaattgcgtctattccggaggagcggcaacaacaacaacttcaccaacaacgattgttgcttggccacgatcacgacgaggctgtgggcctgaaaaacattggactgaaatggccgcgacgaatgggcggccaaaaaattgtgtttccatcggacaaaaatgtgcagcaacagcagcagcagaggaagccaattggtgctggtgatggccaatttggcacaaacaccgctaatggccgtgggcaggcgccattagcagcagcaacagtagcatcaattagtggcaaacagccaccgccgagggcagcagcaatacaattaacggcccctgtggcggagtcggcgacggcggcggcaaaacatcaaatgggcaaggcgatggcggtacaacatcaaaggggtaaaggcggtgaaggggggcaacaacaacaaattgtggccgagctgagcgccgtctattcagtagaggaggaggaaggggcgagaaaaattaataatgataatgataataatgatggtgtaagcgggagagtagcggcagtaacaaagggtggtgaaggaggagaaagacaacggcatcagcagaggcagcagcagacgatgagagtggaagggcagacaaaaatggcacaacgccaacggcacaggtcagagaaagaaatgcctgcggcggggatactaggagagcatatttatccttga

SEQ ID NO: 57893 - DNA, 332 bp, Heterodera glycines
caaattgtccttcccgtcagtgcgcggctgaaaatttccgctccgtcagctgacaatttcaacggaacttttataaaaagttcaaaaggagaagaaatggaagcgccgaagtcgaaggaggaggagggacagcaaatggaagtgatacggcagggaatcgcagttgaaatgccaattaatagcaacagcggcagaggatgaagattttaatgatatgatgataatgatgggtaattacaatagtaaaacaataagagaaaaagaaaacaattatgcagagattggacaataacaaagaaaagactattaaatgttaattgaaatgaaaaaaa

SEQ ID NO: 57894 - DNA, 441 bp, Heterodera glycines
gcggccgacttttataacatcaatcgtttgatcaacgatgattacattgacaatgtgtacgaaatcgtaaaagtcaaatggatcaatggcaaaacgccgcaggaaattcgcaaggcattcggcgtcaaagagccgtacccaccgggacatccggaatgggcacgagttgagaaggagaaccagtgggaagaatcggacgaggaacgtgaggcacgccatgcaaaggaacgagaggaggaagaggagcgtgagagaaaggaagaacagaagcgtaaggaaaaggaagcggaacgcctccgtcaggaacaactgcaacaacagaatcaggaacaccaacctcagcagggagaacagcatggtgaaggacaaggacacgatgaagacatgaatgatgagtgggaagaggaagatgatgaggagagcgaggaagatgatgaatga

SEQ ID NO: 57895 - DNA, 1380 bp, Heterodera glycines
atgcaatttccttcttatgcacggatttctgactggaaaaagggtacacttttgatggacattgaaaaagtgtcggaatttgcacgagaggaggttgagagcagtcggcacagccagaaagtgtacataaatggaatgccatggaaaatattggcacaaataaaaacgaaaacgggatacactgacaatgagaaaagtttgggcatttacctttcgtgtgccgttcccaaagaaggtggatggaaattaattcttaattaaataataattaatataaatcgattgcattgagcagaaaattggagctgcaaatgttctgcaaccattcgaattgtttcacaaaagtgcggtgtggcggatttaaggagaaaatttgatggaacatttataagcaatcaaaatattgactgtggattctattatttgatttcctttgcggtgagtgccaattaaactttcggtgtaaactttcccctaatattggcccaattatgaacaattaaggaattgctggacccgagcgaaggcttttacagcagaagcaaggacaaagtgaaattggccatcaattttattatgcaagaagcaaaaagggaggaaaaaacaagcaaaggcttttacgacaaaagcgaggataaagtgacattggctgttgatgtcattgtggaagaagcaaaaactgaggacaaatgataatcaatttggcatattatctatttgaaatctccattaatgtcacttatcataagggccgcgatttttagtgaaaaaatatcgaaatagttaaactaaaatagtataattctcatccgaaatcggataaaatagttttaaaatttttgtcaattttggaaatgaattttttaagaaatttttcatttctttggagtgtatttttctgaaatttggggggggggccgattcttaggagtgcgattttattttttattacatttttgttgagaaattttgagtaaaaaatagtaattttcactaaaaatcgcggctttgatccaatcaattgacaatacctgctttctatacatcgtattcgaacaaacccaatctttttggtattatccgaaagcacaaagtctaaataatgtaataatacaagaagccaagagaattttaacatttaaagaaagttacaaacgaaaatcatcaacaattactaaatcaaatccgaaaatatgtattcttcggttttctgggtcgctaatcacgaacatatctgagaaactgatatatctgaaatattctgactttgggatagtgaccaaattttgttctgatttcttaaatatagcgtcaaggttacactcttcatcatgggcaaaagaacattaaaaattggggccaaatacaaaaatggtagaa

SEQ ID NO: 57896 - DNA, 94 bp, Heterodera glycines
atggaagaactcgtggcgctctcccctgaatccgcgtcggccgctggacgatcacaaagaagctgggcgccggagcattcggagccgtctacct

SEQ ID NO: 57897 - DNA, 174 bp, Heterodera glycines
ttcacggacactccgttccattcaaaggcgatcaagccaatgcttgagaaaaatgtgccgaatttgttggcatttgtaaagcgcatgaagcaacgcttttggcccgattgggacacaattttggacagtttggcactcaatccgccggtgtacgaagaaaagcaaacaaaatga

SEQ ID NO: 57898 - DNA, 669 bp, Heterodera glycines
aagacacgccaacgaaattgctgaatgggaagtgcgcgacaacggcaaaccgatcagtgaggctaaagccgatgtgctttcgtgtgccgacacttttgagtgagtcgcttcgattggttggttttgtggcgaatgtttccattaatcattcaattgcaggttttatgctggtgtcaatttgtccggcgaacacattccgtacggaggcgaactgtcggggcgttttgcgtacacgcgacgcgaaccattcggtgtggtgggggcaatcggagcgtggaattacccaatacaggcaaacggaaaacaacgccaaaatggggctaaacgggcgcagatttgagtacttttcggttttgttcctacacttcataattttcaacaaaaaaaaaggacaaaagggcgcacggaaatcacaaattttgcctaattaccatagcacaaattggttgggcgacaaaacaaaatggatctatcaatattcctacgtgaaaatggcataataaattgaaaattttttgtgtaggaacaaaaccgaaaagtacacagatttgtttacaattagcactctccgtccccccttttcagaccgcgtcgtggaaaattgcgccggccatcgcttgcggaaatgccattctgtacaagccgagtccgttggcaccgatcacaagc

SEQ ID NO: 57899 - DNA, 1765 bp, Heterodera glycines
atggcattttttattttttccatcagtaagaaactgctttccgcaccaatgctttggtttggcctttttctgtcgctgtttgcggcaataaacttatcgagtggtcaattgggcacaaacgatgaaagcaaaaaaggtttgaacaatattttcaatagaattttaaatattattttgttttgtttttaggtctttttttgatggcaaacgaatttctcgaatccgggaaaatgcttctcgacgaactccaaaatcaaacaggaaacaaacaggaggagaatgaatctgatgatggacttaaatcacaaaaagcgaatggaaaggcattggaagagaaaagtgacaattttcagcaaaaagcctttgagtttttgtgtggaatcgaaatgaaagcaaaaaatgatgagaaaggaaatgagaaaacaaagaaagatgacaatttgttagcttttaaagaattagaagaaaagcgactcaatttttgtcaaaattggaaaaatggcaaaagcatttggaaaggatggaaagaggcagggatttcaatagtaacatcagtgaacaatttgaaactgaatcagcaaatatacggagaaagtcttcgaacattggcgaaaatggaaattttcaacagcaaaaacaaagaagaatttggaaattttgcgaaatttggcatcgatttgctaatgaaagtaactgaaattcttaaaggtaaccaattaagttattctaaacaaagaattttattccaaatggggtaattaaacatttaattgaagatgcgagaattagttcactggctctggctgatcagtctgatcataaccaaaggaaaggcaacaacacatcacgacgaaggaaaagggcttttcatgggatttttcgccgagagtttagcctggaaaagtgttttctgtacttgctgttgacttgcatgtccgccggccttggcactgacatggtcgttcgtctcgcccagcacaaagtgcgggtcgtttcatttggcaattcggcgcctccgcctcccttttctaccgaaggccatcacacaaccccgcttgaaggatttgagattttcgtagctattttttgcttccttaccactttgattagtcttccaatgacaatcattgaaggctttaaaatccgtcgacactaaaaaggcgcgccgcctttgatttttttttcagttgccgagtgccgtgtcaaaaataacaaattacctaaattttgttgtgatctgtttttggcgctacaaaattagcccagtttattaattaatgccgttctgagcataaaatttagtaaaaaaaaactcagagcaaatttttatttataaatggcacggcattggaaaatcatttggtgatcatcaactaattttatcttttattcaatgtaatgatcacaagggttatgtttttttctattttttgcattcctttaacctttcctctgttcagcattccttcatttccttttctaatggagattttttttattatcggattcttctcaagaatttgctttatctggagataacctaaaattctgtgtctgacaggtcgggccgaaacagaagaatgtttttgaggaaggagccaggtgatagtcgaagagttcagttgcataaaaaaaaatttctttgacaaattggcatttgttccgttaccttttgtcgcagcgattttaacagtaaatttaatttcagctgtctaagcgttaattaatgtttgggtgttacctgtcaaaatgcactttgattata

SEQ ID NO: 57900 - DNA, 956 bp, Heterodera glycines
atgaaatgtaattttaataagagcaaaaaaattcaaatgagttttacattattgattgataatttaatacatgcaaaaataaaaaaccgtaatcagttattaaaaattaattaaaaagtggtaaccatattacttagtacaacatatttgaaggaacgagcgaatcgcacggacacacaccacaaactactatttgaaataaaaataaatgtttaataagaaatttatacaaaaataaaaaaatattttgcaaattgttgtttgaatatgtttaaaaatgtaaataaaaattaatatgattttgcctaaatttatgtaagaaaaactgacttattcaaaatgtcagagagctcactaaaatcctttattttaaactatctattcaataattcaaaaaaaaaaatcggcttacatacattacctcaaaaatattactacgttaaggcatgtcaaaaattaatacaaataaatataaaaaattattaacttgtgaagaattttataataaaatttctaaatattcttattttaaaattgaacattccaaattgaaaattatatcatgaaaaatcattctcataaatatttgcttatatattgacttttcaataatccattaatagactacttctatacatgaggaatgattaaaagacataatatgataaaaataataaaataataatacaatttacagatgaacaaaagcataattaaaggtataaatattataacactttcagtgatcgcgctgtttgtttccgcatgcattttgctgcttcgttggcttaagaagcgtttatccaatcggtcgtccgccttttttctctgtttctgtgttggctcgatgtccggctcagccagcttccatcttaattaaaatatttttttataattaaacaaataataacaaattaaaaacaacattcacattataccaagaaatacaatcaaca

SEQ ID NO: 57901 - DNA, 343 bp, Heterodera glycines
aaaaattgaagaaaagtggaaatttcaatgggaaagtcaaacaaaaattgagaggaaaatgaaagaattcattgaacgatttgatgaatttaaaaggttgtataaaggcaaacaaaaaggatttgcgaaggaattgggcatttctaaagaacattacgaagatggaaaaaagaattgatgccaaaatatcataaaagtgagagaatttgttttttaattagtttatctttatttttaagtacaagttaaacattcaaatgaggacaaattaaaaaagatgaaaaaatattttaaaatcaaagaaagaaacctaaaaattagcgatgcaaaaattgcaaacata

SEQ ID NO: 57902 - DNA, 377 bp, Heterodera glycines
atgcttaaactttgcttgacaattattttggttaccatcggatacaaatcattttcgttgtctgagcatatttcagaattttccgaatgcggcatttccgactttgaacccgaatttcccattgcaccaaaagtggaaattggcacaaatcatgtaaaaataactagtaattaaaataaattattttaacaaatacaatagatattcaaaggaaaaacaattgtggatgacaaatcattgccgtggatggcaagaattttaagtggaggtacagttctttttaccattcgagataaccttaattcagggtgaccaaatgtcctgatttttcagatcctgaattggtgggtacctatctgaaaaacaaattgtcctga

SEQ ID NO: 57903 - DNA, 1443 bp, Heterodera glycines
  unsure (1)..(1443): unsure at all n locations
atgagtgaaaatggaagaaactttcggcatttgcttatcgcgacaaaattttgggcaaaaagtaaattaattatntaaaaaaacatttattttttgaaattattcttaagacaattacatttactcaaacaaaatgggctttttgaacggaatatctttggccataatggttgccaaaattgggctgctctttccaaattcgtcactccaatttcttctggaaaatttttttctcatttatttgacacggtaattttaaatttttgatttattcttatttattctttggcttccaaatttcactggtttttgaaagtctgattgatgttgatatttttgtttttgataatcgactcataccgaaatttttaaaattaaaacattttagaaaatatttttataggaaaacaacgtgaaaaattttgaaatttcccgattatcttgcattaccaaaattagatattttcataaaaatctttttttacccccttaatttttacgttttgttggaaaccaaaatttggaagtcataatttattatccaaatgttttttcggtttgcctttaggcctcaacaaattccgattcaattaacaaaaattgacgcacacaatttcaatttgtttgttgcaatgaatgaaaaagaattggaaatgcccgtcctcacgcccgaattacaatttcacccgctgcaaaacgccacgcgatttgtcacacattcaaatgccaaagtgattcgacgtgaaatggcacaaggcgaattttcatattttcttgcgaatttatcattttttaatttaataaatacgattttttagcgctccaaaaagtaaattcattgaaaaatgacaaattcaatttgggagcatttctgagtgagcccattccattcacagagaaggtaaaatcgaccaaatgaacttgaattgttatgataaagcaatttttgagcaacgaaattttaattaattttttttaaaagaactaaataataataattgtttgttgaatatcaaaaataattatttaatttaacatttaatttaaatttttctttttcagttccaaaatttcctcgtcattcattgcatctccgagcagaaagaattggccgattccttctgcgattttgtcgagtggagaatgcgtctgcaaatcatttttagcatcgacaaaaaagacgccggtggccaatcggtggcgacgcatttaaagccgaacattcaccgggaaaagtgcaatttgacaacagcaaaactgctgggcatctcatttcggtaaaaaaagtccaattaggtctcattttcaaatgcacgaaaagaaatcaaattaactaaaattaacaaaaaatactctttaatggggtcaagacaatccgtcagttatggacattccgtcagtgacaattcgtcagcaaatttttttttttttgagaaatattta

SEQ ID NO: 57904 - DNA, 128 bp, Heterodera glycines
atgggggaaggtataaatttggtatttctcattttcccaaattttcagggtggatgggaggggatgaatatgggatttcccattttcatgaacatacaatttcattttttattgattcaacaaactaa

SEQ ID NO: 57905 - DNA, 597 bp, Heterodera glycines
  unsure (1)..(597): unsure at all n locations
atgccgcagccggaacgggcacagatcactcacatgagccgagagggggacaaaatgccagagaaagaaaaagtgccaaattcaaaaatgaaaatagaaaattaaaaatcataaattaattaggcgaattccaactccgacactgctgaacaacaaccaaagcatcagcacgaactcgaaattggtcagttcagaagtccgacggcggaggaaaacgacggaagcgaaggattcgaagtgataacgcgagaagagaacggaggacaccaaacggaggagggagaagaggaacagaaggccaacgaaggcgagaaaatgccaaagtcaaatggaaatgccgaaaacacaggtcaaggagaggggactcagtcggctgcgaccaccacaacgccgacattggcatcgacgacaacgacaagcggaactgaaacggcaaaacagatggagcggacgacagagcaaccgcaatcgtccccaagcgaagaaggcgcgggcggaggagcggccaacggatccgcggacacagaagtggacattttggcagctcggggncctcccgccgcgggtttgncagaaaccaagaaagggacaaattaa

SEQ ID NO: 57906 - DNA, 235 bp, Heterodera glycines
atggcaacacaaagtaaagacgagaagcaaagtgccaatggtaaaatgatcagcagaagagctttttaattgtgatgtaatttactataatttagtaggcgaaagtgaaaaaaaaagccaagggtcgaacggagaaggggaagaaaaagccattgttttcccaacagaaaacgcagaaaatggcacaacgccagccactccagaaaaggcatttttggcacttttccaagattaa

SEQ ID NO: 57907 - DNA, 1424 bp, Heterodera glycines
attcagccgttttcgttcccttctgatcaatggattatcacttcaatttcactaattgtcgatttccaaaagaagcagaagccgtaaagcccggggaggcgaattaattagtccaatttgtctttttctttcaggtcaaacccatccgaaccattggacacaaatgcaatggcccaggaatttctaatgcaattcgccaacacggtattcaccgtcggccaggaatctcccatggaatatgtgcagcagaagcggggcaccggaagaggaaaattgcctccgggaaaagtaaatctgttggacaacaacaacacgacgacgacgtacacactgaaattggtggtggaacggatggaaggcgccatcaatctgaacacggcaccggaggaggttctgatattcaattaatcgatgacctagagggtcgtttgtttgatcattagttcacttaatttacatattttagctttcgttcggtccgcttagtccgaatgccgtggtcattttcgatcggcctgaaaattcacagatgaatttgatcggccgtagtatagggtgcctaatctcgttcagtgctatttcttgatcatttcccttttcagaaagtcgtcccatcgtgcgctggtcaatcccgattgggactttcaacagttgggcatcggcggattggacaaagaattttcctccgttttccgccgcgctttcgcctcgcgcgtttttccgcccgaattcattgaacaaatgggttgggtgatttgtgccttgcagttttttggattccatttgtaactttgtcttcagcgatgaagcatgtccgtggcattttgctctacggccccccggggacgggcaaaacgctaatcgcgcgacagatcggcaaaatgttcaacgcacgcgaaccaaagattgtcaatgggcccgaaattctgagcaagtccgaccgaaactgttgacatttgtaattagaccagatagatttgtcggcgaatctgaggctaatatgcgcaaattgttcgccgacgctgaggaggaatggcgacgatgcgggcccaactcggggctgcacattatcatttttgacgaaattgacgccatctgcaaacaaagaggatccatggtaaaaaacagtcaatcaccatttcggcagtgaaagccattttatccgcttaaacaaacggatttgtacaaatttcttagggcggatcttctactggcgtccatgatacggtggtgaaccaattgctgaccaaaatggatggggtggagcagctgaacaacattcttgtcattggcatgaccaaccgcaaggatatgatcgacgaggcgttgctgagaccgggacggatggaagtgcaactagaaatatcactgccggatgaacagggccgtgtccaaatcctgaacatacgcacggcaccgatgag

SEQ ID NO: 57908 - DNA, 441 bp, Heterodera glycines
atgacatatttgttgtcgatttgtccacaacaattcatcgaggcgcatggaacggccagaaatactgtaagaagcgccgctacaaacgacacgaaatgcatcttaccctttagcaattatttaaaattaaaattgtaattagagaaaatttatatttcttatcaaggcatatccggctaatttattagtgagtgaatttgttgtttttaaaaacaaataaacaacaaaatcacatccggtgaatattaattaaatttgaatatgtatctatacaaattaaatgtttagatgtttttcacatttatattccctataaaatgcatacagctgaaagaaattggaatcgaaaacataaaatgtcggtgttgcttctattgatgcaggtcgaatctaaaaataccaatggggcgaacctaaaaaagcagcactaatattaataaa

SEQ ID NO: 57909 - DNA, 576 bp, Heterodera glycines
atgtatgaaatttcagctgacccaactgacaaaggagtgaaaaatcgtgtcatctatacggataacggtcaatttaagtggaatattaggaatgctgtgcgagattttgacactaatgccaagattacggtgctcttgtgtttgggcgatgagtaccgtgtgtatggccaatttgcggattatgatgcgatggaagatgagatgggtgaacggttccacgaagtgtttcaagtggtgtacaataattaccccatttatgagattgacgaaacggtgccaattgaacacgacgtgccgattgagtacgaagacgaaggccattcgacatgcacaattcaaaagtcagtttaatcaaattcaaaattaaattcaaattcaaaaattgttaagcttattttttaggtgatcgaatttttgacaaatattaggaaaataatttagaatctttaattgaaaaccaaagaaaatgatgtacaacgaacggattattcatttgaaatatttaccccaaaatgagcatggatttaatttatttcatgtcattttgtaaaaattgtttttttttactctatgata

SEQ ID NO: 57910 - DNA, 217 bp, Heterodera glycines
atgtttccgttccgttttctcttcgttttcgctttcgctttgctcactttgtgcggcttttctcacatgacattggcacagcccggaagcaatgggccaattggcgaacctaacaaaatgttgcgcatccgccgttagtgattattaagcgacgaattgtaaaaaattaattaaattaaaaagtttttcaggggaaaatgaacgcaaggaaaattga

SEQ ID NO: 57911 - DNA, 839 bp, Heterodera glycines
atgccgaaacaggcggaagagaccaaaatgttgttggagcggaaaatgcgcgagactgaaatggccgcacaacgaatggctgcgcttcagcaccaacaacagcaaaaacagcagcaacagaatggcatcacaacgcccgggacggcaacagttgcgcagcaacaacaacagcagcaacaggtgttttttgtggttgggcacaaattgcaaagcaaattagccacaattaatgacccctcaaactgaatttgatcaattaaacgtggtctatcggaatcttcacagatgcagcagccacctccgtaccaagaagtggtcgagaatcggcaacaaacgcagcagcagcaaatgccattggccaatggtgtcggcgccgcagctcctgggaccgtccaagtcaaataaagtaattttgttctctcatgctgaaattttcacagaatgcttattaacgaaaaaaaatattgaattcgattgtaaatgactgctaaaatggtgtaattatggagctttaatgactgagctttttgtacaaaaaaatcacaatcatacgtttctattggggaattgaattaataagcactataaaaattaaaaagagcaaaattttgtaaaaaagattattcctattttcctaaaattgaaggtccctccggcttcataaaaacttaccactccctaaattaaagctcaaaaatttatttaagttatagattaatccaagtcaccacccattttcatttgctgttcatttattgccacattggtcattagtgatcaaccttttgattttataccaaaacaccaccctaaaaagtaacaatgaaaacggaatttaa

SEQ ID NO: 57912 - DNA, 175 bp, Heterodera glycines
gatcttttaggccaaaccaaaatttttgtttattaatatattttgtttattttaatttttatttacaacagtgtccaattttccggtgtccaaatttccattggtgtccaattttctagtgtccaattttcggtgtccaattttctggtgtccaatttaccgggagccacaattt

SEQ ID NO: 57913 - DNA, 1205 bp, Heterodera glycines
atggttcagttctgcgcggtagcggtccctctcctgctccgcctgcgcgcgctgctcacgctcgcggtgcaaccgcacctgctcctcctgcaaaggtttaaaaaaatcatacaaaaaataatttaaaaccccggatttaatcagggaactttttgctttatgagtttctgctatatcatttttattgcttgtacaataatcgcttatttgttagcaatagctaatcattaataaaatgccaaatccaaatgaccatcaaactaatctttgatcagtgtttttttattggtcattttccactgatcactttttgctgatcgactgttctctgatcagttttgcctttaccattctgcgccttcgctgctcgtctgcctgctgcttcatctgttgcacctcgagcaggtcgggctgtcgtctgcgcaggtaaaggttatgcgtgccaacacagaggtcgagaagtgactgaaacatggggagggcaaatatttaaacaagcttcttctgtgatccgctggaaattgtggctcccggtaaattggacaccagaaaattggacaccgaaaattggacactagaaaattggacaccaatggaaatttggacaccggaaaattggacactgttgtaaataaaaattaaaataaacaaaatatattaataaacaaaaattttggtttggcctaaaagatctttatcttaatctgcacatatgttgtttataagcgtaaataatatggaaatgaatttgttattatttttgtaacatcagcaggagaagaaaaacatcatatcattcataaagaaaaagttttattacccatttttcgtgcattatttggcacattgatcaatcaccccccatttttggtgcattcggagttagagggaaaggaatgaagcgcaaacagctttatattgagcaagatgaaaatcttcgggaaatatttgcaacgcgtgccgatcgtcatcccctccaatatttgagggcaattgcctaccgaatgcctgatccactctaagtgccttaatcatttatccacaccatttaattttcaacctaattcctgggtttattttttaaaagcgaaatttggtgtccaattttcctttagtgtccaaaattccggcggtgtccaaatttctgtttggtgtccaattttccggtgtccaatttaccggtccccggaaattgttccaaatta

SEQ ID NO: 57914 - DNA, 1223 bp, Heterodera glycines
atgggccgaatgttggaatggctaactgagcatggaaagcctctcagagtgaaggtgaccacgatggacgctgacctgaacgagctcagcattgaggtcaaatataattatttttatgtgaatatgcgattttaaatttaaatacgaatattaaaatctctcatttttcagagggattcgctgggccaacatctgttcgacaccgtatgcaaaatcatcggccttcgggagatatggtattttgggttgtgcttcaccaaccgcaaaggcttcacctgttggcttcaaatggacaaaagggtattcgcgcaaaaaagcgaaaaataaatgttttatcaaaaaaaaattttattgtttccaccgaaatccagcaaaaattccaaatatatttttaaaatgtttaagtttccatgataaaatcacggcgattaattataattaattaattggctttgcatttgcccattttccctccccaacagataaaagaccaaagcgtgccgaaacaggaggacggctcgctgcacttcctcttcctggtcaaattcttccccgagtcggtgaaggtcgagctgatccaggacctgacccggcatttgttctttctccaaattcgccagtccattctctccatggatttgtactgtccgtcggaggcggtaaaaaattgctttttagaatttcaattttggttttcttttcttcttttacatgcgtagttcacccgccccattggtttaaatattttttttattattgtaatgtcaaccgggactggtcccgggacccaggcttttccggtcccggcccccctagatcctaatcctggctttcaatgttcctgtgaattcgggcactgtttttccaaaaatccctatcccggctaactctgccattttccaatgttctaggccattcttttggcttcctatgcggtccaggcactgtacggagacattggccaacaacaacagcagcagcaaccgcaacaacaacagcaggccgatcagcaacaacaacaacagcagcaacagttggatttggccaaactgttgccggtgtcggtgctgcaacaatacgaactgacggccgaaatgtgggaacagaaaatccgcaattggtgggccaacaacagcggactttcaaaggaggaggcggaagaggagtttctgtgtgtggccgaggagttggacatgtacggcacacaatactatccgattagg

SEQ ID NO: 57915 - DNA, 1367 bp, Heterodera glycines
atggaccaaaaaaccatttttaaccaaccgtgcaactcattgtcgatcctttccctttgtcgtaatgtgccccgaggcaatgaaattcgcatatttgaggccctgtaacttttgaaggaggcaaaatgcaccgctaaaattaaaaattcacaatagaagtcgaccctgctctatccaatgatatgtcatttatatgcattttcttagttacagctcggaatgttcccctgtgagactgacaatgaacaattccctcccacttcccgcactcatgcacagcccaattttgtgcttctgctttcgttggtgttttgtttttgctcttccaatttccgcttttttggcctttccctccccgaggggatgtgtggtggcggcggtggacggacatcatcaacggaggacaacggggattccccccccccccgccttcctattctttctttgctctgctcatccatctactaccaccacctttccaactggtgctaggtcgatcctaaaatagtatcaatggggcgttcctaaaatagtatcaatgtgggcgatcctaaaaaagtatcaatgtgggcgatcctaaaatagtatcaatgtgggcgttcctaaaatagtatcaatgtgggcgatcctaaaaaagtatcaatgtgggcgatcctaaaaaagtatcaatgtgggcgatcctaaaatagtatcaatgtgctaggtcgatcctaaaatagtatcaatggggcgttcctaaaatagtatcaatgtgggcgatcctaaaaaagtatcaatgtgggcgatcctaaaatagtatcaatgtgggcgttcctaaaatagtatcaatgtgggcgatcctaaaaaagtatcaatgtgggcgatcctaaaatagtatcaatggggcgttcctaaaatagtatcaatggggcgttcctaaaaaagtatcaatgtgggcgatcctaaaatagtatcaatgataataattaattaaaataattattattcaattaaaattattaaatttaaattatttttaaataatgtcaaattacagtgaataattttaacattttgttaaattttttgcataaattttggcttccattagaaatacgtcattgtttgagttccgtaataagatacgaaaaaatgcggcgaaaaaaaaatgctaaaaatgggtgggaaaacaaacattagcgtttcaaagtgcatatagaaatctgtatgcctttatgcataagttgtccatgtagttcatcaagtgtctttatttcctttttttcatagcttttgacaagtgatattgcttgaggattttttacgaatccttcaaatccggatttatggccttcaaaataatcaagtaaaattaagggaaaaataaa

SEQ ID NO: 57916 - DNA, 701 bp, Heterodera glycines
atgtatgtttatcagaagaaaaacaatctgcaaagaatatattttgttgaatggaaagaaggtatacttgatttatttaaaattttgagaaaacaattttttagaagttaaattttttatgctaattaatttgaaattctctaaatacttggattagattatacattgatgaaaaaaaaatcaatctttaaataagaatataacataccgtatttgctctaattatccaccatgggggattatttttcaatctcctcagaaaggggtggataattagaaaaatacggtatataccttgaaccataatcaatttaaatacataaatttaaaaaataattttatatttaacttttcaatatgaaatgaaaattcattaaatgttgattttaaatcagggcttacaattgaatttatttctcaaaattgtgctcgaataaaaaaaccataaataaagccatttttttgtacaaaacgattcataaaaatagtgccaaaaatttaaaattttcaaaattagataacgaaacacattcatgctgggtcctaactgaagacactgaggcacttgaactggtagccaaattcattgaggagtgctcaatgagttcggcacttgatgcctttttgggtgctccagtaatgagccacgtggcaaaactacttcaaaaaaatgacgaagcaatttcatgtacttaaataaa

SEQ ID NO: 57917 - DNA, 498 bp, Heterodera glycines
atgtgttagtccgtccttttctttaaaaagctgtagcaatcattggtaattttatttatttattgataaattaaaaaacattttttgctttcaataaagattaaataatgtaaagattttaatttggagattccgcatatagtttaaattaattaaataactgaaaaaggttttgaaattcttgtcttatctaaataaaataatattaaaatttaatcaattaaattaattttgtaaatttaagctaaattacaaaattatttaatttaaaaaaaataaatttaatttatagattcaattggaccgtttccaatcgggtcggttatcggcttttcgattcttaaaagtcggtcaaggtcccatggaccgggtctagaaaaagccgagtatccgggtctggcccgggtcagctacatggactcggaattaaaattaaaaatttagaatcgttttttaatagttattttacaatataatgtataaatttttaaaaataaa

SEQ ID NO: 57918 - DNA, 132 bp, Heterodera glycines
atgccttatgtggatactgtacgccgaatcagcagagcgagaagtgaacggggtgccaagcgagtgcttgtccagaaaggcgcaggatttggcggattgttcgctgccctattgacacccgttctaatggaa

SEQ ID NO: 57919 - DNA, 657 bp, Heterodera glycines
atggcaattaatatttgcgacaagaaagcgcttgtgaatcaaatcctcgggcaagcggacattacagtgacaacaagcggcataaccgtgagtgggccacgtctgtccacaccacggttcattccgttcgatgaatgcggccgttgccgcgcatgtaaagctacagaggttgaggtggacacaatggtgaccaaagaggggatcaccttgtggtgcagccgggtcagcaagtcccaattcgtcccatttgatgccgtttatgatctgccgggccactgcttcttccgtgtgaaaaacaaggccagggtgttcaacgtaccctacggtgacctgccctccgacacgtgcaccactcctactcccaccaccaccaccactacaacgcaaggaacggaaaccgatatgcagcagcaggacctgaagcgcaaagctaaggtagcacttgatttagtggaagccgggctaatggcccgatgccatgcaggacggcgtgcgttggaagaaggccaaaaccgcaatcagtgtactcgggaatctacttttagcggaatcgttggacaacaaagtgacaaacagtcccgtggaggaacagaattatgtccaggaagagcccagaaaagacgaagagaaaaacaaggaggaccttggcgacattga

SEQ ID NO: 57920 - DNA, 126 bp, Heterodera glycines
atgagagagtgctggatctcagtcccagtcatacaaaacatttttgatgaaggaggtagagaaaacaatttcaatagagagcgcaatgggaagggagttcatgtctcttcttcgctgattcttttg

SEQ ID NO: 57921 - DNA, 100 bp, Heterodera glycines
atgacgattggatcatcagtcattacctacgtaatccgtcatgacggaaaggcgcaggaaaaaccagacgataggataacccgtaatccgtcattacgac

SEQ ID NO: 57922 - DNA, 777 bp, Heterodera glycines
atgtcacgcggtgcaccgttcatcccgaagaatgcggtgctgatacagaacttgaaagcagcgatggctgccggcacattggcagcgttcggctcaattcccaacaatgcgttggaggaaattgacaccctgctgactggcgcattcaaaaaggattttgcagcaatttatcgtaattcgcgaaaagttaaaaccaatgcactgaagctggccgaattggacatagaaaatctcattgccaagcatcatccgctcagcaattttacatggatggcaataccatttatgctgccagccaacattgtgaggagagcggcgcgggcaggcaccagaggagggctggtcccagggggggggggggaccctctccaaaaaaatttgctaatagagctaaaaacatccgaccgaaaacaatggtgtttggctacaccattggtcccgagcgacatccgcgaccatttcattttttgaaaattctacaattttgcaattaattagttggcaaccgccacatcggccgcaatgattccaatggaaattgccgacgcggaagagaaaaccgtagagaatgtgctcagactgatcagaaacggcatattagccgggccaacccaggccaaactggagaaagccaaggaagagttagcggcagaggagaagtggaagcggagaaatgtgttcagaccgatcaacatggtcaaagaaatcataaaaaagcgtaatgaggaaaaagaaagaaagacaatggtgaggaaggagagcaggaagaggaagtga

SEQ ID NO: 57923 - DNA, 2509 bp, Heterodera glycines
atgtggagtacgcacacaaaaaatgagtccaatgcggagttgatagaaaatgtaatcaaggagcatccggaaatgctgaccgaacagaaaagaaatgaaattgaaatgaaagcggacaagtgagcgcgaacagaaaatttgtcccatagaaattgagagccgaaaaattcagttcctcaaaaaaggatcagtagaacaatttaacacatttgaaaaatgcccaaaattttgcacaaaaaaacacggagcagggcaaaacaccgccgccgaaattccgccaaaaatttttaagaaaaaaatattagaaaaattttttcttagaaaattcgaagaaaaaattctaaaaaatttccagcgattttttcaaaattaatgatgaaaaacaaagttttttcaaaaaaatttcaaaaaaatcgttggaaaattctttgaaaatatttttatcttcggattttatgtgaaaaaatttttctaagatttttttcttgaaaaatttctaagtttgaaaattttttgcccggcggagttatgtctcggcggaatttcagcggcggaatttcggcggcggagatgggagaaccacaactagagacagggaaagatataaaagtcggtggatcgggaccgagacgtgaaactatcggctcagggttcgggaggggacgaataaaagttctgatcggggtcctggacgcgaaaatattgggtcggggttcgtgtggcagcttccaaaaaaaaagttcgtgtcgggatttgagacgagaaaatatcgggccgaggttcggatgtgaacgtccaaaaaggctcgggtcgggctttgagacgcgaaaatattgggtcggggttcgggtggcagcttccaaaaaaatttcataatttaaaaaacttttcacagaaaaatcgaaactttgaaaaaattggaaaaagtgcaccaaacaatggaagaggagcaaaaaaagttgagaaaggccatggagtttctacggccgcagaaggtgcacccgttcgactttttggtcggcactgttggcattgataagaaaggcagtaaaatcccaattggtggactacggcacaaaataagcggacggagcgtcaatgaaaagaaatatttggaaatgttagacatgccgagagccaaagaagcgatggagagtgagaatgagacatgccaagcattggccaaattggtggaacagacactgtacatagatgacaacggtgtggtcgacccgcaagtgggtagaaaaaaatcaaagaattttgaaaatggaaaacagtcaagcatagaattggcattttaaaaaaagcctgacatggagctggattccaagttggacccggactgggatttctagacaaaattccagcaatattccatgccaaggaacagccttgttaaagcctgtacccaggcctgaacctggggaaaaacacagtctcagtaaatcctgccttgttaaagcctgttgtacctatgactggacctgggaatttttttttcactagttttcgggcgaaaaagatacgggcgagcggaggggatatatgtattttttgaaatttaggcctgttcctggtaaaagatttttaaatgattgtacaaattttagggcgtcgaattgcgcggccgtttgggtgcgcaaattgtgaactatgtgatcaataagaaggatacagtcgggttgctgaagcagttgatgtggagcgtcattggcacatcagcaatcgcattgttcttcgatctctttttgtggcctacaattatcagtaaggatttatcattgaattgatcactactgattagtgtgaattaaaatgtcgggtacttttgcagtttacctgacagatttcacatacattttcaaatgcctataaatgtgttttagaaattagtgaaaataagttttaaggggttttgggggtcgctgatcacgaatcatccgggctcagatcagcactaccgttcactacaagagctgtacaaggacaaagaatttataggcttactgtaccaataataccctcattggcaagatgcccatgaggatatcatccatacaaatttagaattttatgattcatttaccaatgttaccctcattggcaagatgccaatgaggatatctatcatccatacaaattttctaattttatttttgttcgagtccgggtcaggggttcgaaatttgcaaaaaatatggatttattcccacaaatacatggaaatccatatttttttcctggactgtgggaggcctgaaacgcacgaaaaacatgtttttagcttggtttggagcttctaggatggatttctatatccatatttttccatatttcgcgatttatgtccatattttcgcattttcgtccatatttttgggatttttccaaaaaacctctattagaacggctcccagcagctaaatttgcccttttgagcccaaaaaccgaaaaattttacaaaaaattattttttcgccaaattttctcgagaatattgaataaa

SEQ ID NO: 57924 - DNA, 1674 bp, Heterodera glycines
atggcaaatccatcggttcagcaattgatggacatggttaagcaactgcttgaagcacagcaaaatgcgccaccagcaggccagcaaccatccaatgtgccgtctctaccgaatgtggaaaacttcgaatttggagagcaaagcaccgacatcgaggactggctgcagcaattcgactttgctcttgactgtgccgcaccgaatttgcaagatatgctgaaggtgaagcttctcatgacgaagctcagcaaggaagcgtttgccgaatacaaaaagtcctgcataccgaaaaatgtgacagacttcgacttcgcgaagactgtggagcagctgaagagtttgtttgccaggcctcagtccatttggattgacagatacgactgcctgcgtgcatccaaactggaagacgaggaattcagagcatttgtgaaccgacacaaaaggctgttaagggatttcaacttcaagaagctgaaagaggagcagtttaactgcctgatgcttctgatcgcaatgaaatcgccgaaggacgcggacctcagaaagcgaattttggcaaagttggcagcagatggtgacctcgttcggtacgacaacatggtggaagacctgcaagtgtacctgtcgaccattgccgaggctaaagcgcttgagcagccggtgtcttcgagaaatgtttatgctttgaaaaagaagcataaaattcgaaagaattccgactcgtcgaaagggagcagcgaatcgtcagcaagccaaaggagccatggatcgcaaccgaagtgttggcgatgcggaaaatggcactctcccaagcgttgttcgcatggaaagtccacctgccgaaagtgcaatgaaattggacatttggagagaatgtgcgagaagcacaaggcttggcttaaaagaaatggggagaaaaaggatggaaaagccgtaaacacatttcggcttggaggaatttttctgccggactcagaaagtcggagaaaattgatcgagatcccgctgaagatggatggcactgaagtggaatttgttgctgattttggcactgaaagaactgtggtcacgaaggacgcacaccgccaaatcggaagtccatggttgagccgttgcactgaacgggcaaaataccacgacggatccactcgccctcttttgggaaaagggcaggcaaagttctcgatcggtgatcgctcatgcgatggacaattctatgttgccaaaggaacaaagaatttgcttggcatagacatgcttcacagtttgggactgttggatagcttcaggaagagcctggaagggaatgtccaagtggcagaagcaaacacgaagtccgattcaactgatgctcaaagtgaaaacccgaagaataaacaccgcggaaataagccaaaatttgctttgggagcaaaggtcattgctagtttgggactgcaaccttggcgcgctggatacgtcgttaaccgtcaagggacgatgtacgaaatccgttttccagatggaacaaccggcaaattcccagaaaaaggtgtagaggcatgtgttttggactcggacgaagaaatttttgatggtttggacctaagagaggcaccattcgatggaaaaacgtcgaagggcttggtcggcattgattgtgaccagcgaaagcgtgaaaacgtgatcgcctga

SEQ ID NO: 57925 - DNA, 1103 bp, Heterodera glycines
atggcaaatccgacggttcagcaattgatggacatggttaagcaactgcttgaagcacagcaaaatgcgccacaagtaggccagcaaccctccaatgtgccgtcgctgccgaatgtggaaaacttcgaattcggagagcaaagcaccgacatcgaggactggctgcagcaattcgactttgctcttgactgtgccgcaccaaatttgcaggatgtgctgaaggtgaagcttctcatgacgaagctcagcaaggaagcgtttgccgaatacaaaaagtcctgcatgccgaaaaatgtgacagacttcgacttcgcgaagactgtggagcagctgaagagtttgtttgccaggcctcagtccatttggattgacagatatgactgcctgcgtgcatccaaactggaagacgaggaattcagagcatttgtgaaccgacacaaaaggctgttaagggatttcaacttcaagaagctgaaagaggagcagtttaactgcctgatgcttttgattgcaatgaaatcgccgaaggacgcggatcttcgaaagcgaattttagcaaagttggcagcagatggtgacctcgttcggtacgacaacatggtggaagacctgcaagtgtacctgtcgaccattgccgaggctaaagcgcttgagcagccgatgtcttcgaaaaatgtttttgctttgaaaaagaagcataaaacgcgaaagaattccgaatcgtcgaaagggagcagcgaatcgtcagcaagccagaagagccaccgatcgcaaccgaagtgttggcgttgcgaaaaatggcactctcccaagcgttgttcgcatggaaagtccacctgccgaaagtgcaatgaaattggacatttggagagaatgtgcgagaagcacaaggcttggcttaaaagaaatggggagaaaaaggatggaaaagccgtaaacacatttcggcttggaggaatttttctgccggactcagaaagtcggagaaaattgatcgagataccgctgaagatggatggcactgaagtggaatttgttgctgattttggcactgaaagaactgtggtcacgaaggacgcacaccgccaaatcggaagtccatg

SEQ ID NO: 57926 - DNA, 1206 bp, Heterodera glycines
aagctgaaagaggagcagtttaactgcctgatgcttctgatcgcaatgaaatcgccgaaggacgcggacctcagaaagcgaattttggcaaagttggcagcagatggtgacctcgttcggtacgacaacatggtggaagacctgcaagtgtacctgtcgaccattgccgaggctaaagcgcttgagcagccgatgtcttcgaaaaatgtttatgctttgaaaaagaagcataaaacgcgaaagaattccgaatcgtcgaaagggagcagcgaatcgtcagcaagccagaagagccaccgatcgcaaccgaagtgttggcgttgcggaaaatggcactctcccaagcgttgttcgcatggaaagtccacctgccgaaaatgcaatgaaattggacatttggagagaatgtgcgagaagcacaaggcttggcttaaaagaaatggggagaaaaaggatggaaaagccgtaaacacatttcggcttggaggaatttttctgccggactcagaaagtcggagaaaattgatcgagatcccgctgaagatggatggcactgaagtggaatttgttgctgatatgggcactgaaagaactgtgatcacgaatgatgcacaccgccaaatcggaactccatggttgagccgttgcaatgaacgggcaaaataccacgatggatccactcgccctcttttgggaaaagggcaggcaaaattctcgatcggtgatcgctcttgcactggacaattctatattgccaaaggaacaaagaatttgcttggtatagacatgcttcacagtttgggaatgttggatagcttcaggaagagcctggaagggaatgtccaagtggcagaagcaaacacgaagtccgattcaactgatgctcaaagtgaaaacccgaagaagaaacaccgcggaaataagccaaaatttgctttgggagcaaaggtcattgctagtttgggactgcaaccttggcgcgctggatacgtcgttaaccgtcaaaggacgatgtacgaaatccgttttccagatggaacaaccggcaaattcccagaaaaaggtgtagaggcatgtgttttggactcggacgaagaaatttttgatggtttagacctaagagaggcaccatccgatggaaaaacgtcgaagggcttggtcggcattgattgtgaccagcgaaagcgtgaaaacgtgatcgcctga

SEQ ID NO: 57927 - DNA, 160 bp, Heterodera glycines
attttctaagaaaaaataggagttttgggggcgcggcggtgccgataggcgccgccggggaaaaaattggaaattttgatcatttataaacagtttttcactgaaaattagccaatttataggtaaaattttgaaaaattttatgggaatttaatccaat

SEQ ID NO: 57928 - DNA, 704 bp, Heterodera glycines
atgacaaaggctttgcgaatattaacaaaaattttagccgcggtaattagtttcgtttaaaattaattttcatttttatttttattatagcaaagtgtcattggcttggctaacggttcctctaatcatccttgtcaatctacaaatgtagcagataaaaaagcgtgtcacaatgctttaaacctaattccgagtcaatgtaaattttgcataaaaaatttgcttaaattgagaattacatattcagacaaaaaaaaaattgctgaatgaaatcattatagatggaaaaagacaattttttagaaaaattatttttgtggtttttttgacaaaatttacctaatttatgagaaatatgtttttgatattatgagaattttttttagaaacttttctgtctttatgggtccaaggagctgctttaatagaagggccgttttaaaagagatttttttttaaatttacaattctgcagataaaatgtgcgcgaaatgtctaatatctacaaatatgcaaacaatgcatataaaaatccaacccaagcaaaaaaaattttttcgtgccttttaaactgtatccaatgcagaaaaattgcatgagtaattccaaaacctacaattactctttatatatatatatatatatatataaaaaaatatttttaagctaactttcgaacaatttattctattcactatgaataa

SEQ ID NO: 57929 - DNA, 486 bp, Heterodera glycines
atgtcgtcaaaacccgaaactttggtggagcggatgaagcatttgttgagctcgggcgatgacgcggacgttctctttttggtgggggaaggagagggaaaggaggcgagttttaaggggaaattgttacaaatttaataattttaatttaatattgttttctttaagcatgtgcccgcgcacagagcgattctgaattcggcttcggacgtttttgaagcgatgttccgttttgacaccacaaaaaatgcgactgacaatgaatcagcgggtggagaaggtgtgaaaaaacaacaaaaaattttatatttaaaaaaaaaaatttaatttgaagcgaagggtcccgtagaagtcactgacatcgatgcgcatgtgttcaaagtgatgctcaacttcatttatgcggatgatttgagtgaattgaatggagacaacgcaatggcagtgctttacacgggtcagaaaattagttttttattatgttga

SEQ ID NO: 57930 - DNA, 860 bp, Heterodera glycines
atgcttggctccgctggcggcgccgcgtcggcggtggcgtcgcgccaccgacgcatcaccacggagcggtcgctcttgccgctgtccacggacattgcaaagaaccgcgagttctaccgtacccacgacgtgcgccctccctacacatacgcctccctgatacggtaggtgattacggtgggagtcaaaaaggtttccgtaaattgcgtttggctctgatcaggatcagcagcagatttaatgaaacaatttgccgggttaaatcagaggcccctggtcgggttagacacaaagttcaactttttggaaaatgcgggatttgcgtgattttgcgggattggtccctgcgggatcccgtcccgcaataaatttgagttccaatcccgcagtgggacccgcaaaatttgaaatttcctggctctaactgtcagatcagacgaaaattcacccaaaattccccttttttaaatttttgtccataatattaaccgcttcaaccagccaattggatttccatcatttgtttgctttttgtttcaggcaggccatcaccgagtccaaagagtgtcagctgacgctcaacgaaatttaccaatggttcaccgacacttttgtgtactttcggcgcaacgcggccacgtggaaaaacgccgtacggcacaatctgtcgctgcacaaatgtaaacaaaaacgaatgaatgatgtgccatttttggggctctttgttctccccgagtgtttaatcattcccgaaattcgcttcccgaattataggaaactgtagaaattatttccccttactcgataaatttttgtcataattcttcacgcgttcattcccgacaattatgtagccccaa

SEQ ID NO: 57931 - DNA, 487 bp, Heterodera glycines
atgccctcactaatcgatgttttgttgctcgtccttttcttttttgtcttaattggacctccgttccctgatgagcccgtatttgagcggggtcttcaaaattggatggatgcgcgcattcaacatttgcaaaacagttagttttgtttgtatattccaaaaaatgaaaatctatgcagccattcacgcgccgccaccgccgcctccccaagcggagggggaggaacagggcgaggagttggacgagaacgactgggccaacccatggcccgaaaattgggatccaaagattttttggtaataatgttatcccctcccccatttcaaacaaaaaaaaatttagtgagatggaccgacgaacgaaatggggggacatatcgaatgatcgaaacagaacgacgagtgatcactggtgatcaatggtaatattatttattaattatgaaatttcttactttttctccgtttgtttttccttttgaataaa

SEQ ID NO: 57932 - DNA, 2816 bp, Heterodera glycines
aaatcaatgaagttgtcataatccatgatgagaccccaagagcaatgtggaaaacaggaattattaaaaatgtcataacaggaaaagatggtatcataagaggagctaatgtcgagttaccaaacaaaaatgtcattaaccgtccattaaaattgctatatccgttagaaattaacaaaaatgacggtgaggagaatgagactctcacaaatttaatcactgatcacgaacaaattggtacagttcaaaagagaaaacaagcaagtgtcttatcatcaccaaaattaagcaaagtatttttaaacacactcacgtttcttctattatttatgcaaatcttaccgtgcttatcatacccatacgaatgtccaagaaataatgaaaaatggagaactaaatatacaacattttgtgtaaaaaatggatttaccatcagacaaaataaattaacaatggaattttgttaccgtaaaatattttgtcacaatcaacacatcataaaaaatcatccaccctattgtggaccacaatgcaaatgtcctgattggacaattttttgtagttttgcctcatatcaccgaataaaaagagaaataactgatcaggagaatattcaaaatattatttcattctttaaaccaaacgtttgttcattcaataaaacggtaaaatgctccctaatggataaaaatatatttagttcaataatgctttatgataatagcattcattcagttaaaagtcttaatttacttcatacacaagccaattctcgaattgattatcgttgccttggggagggcaatctgacgattggtacacaaaaattctgtcaagaacacgaatgcactgacaaacatggaacaaaattttgcttttacgagccacacgaaaaaacttatcttgtgaaatcagaccgagaaattatcccaataaaagcatggggaagcatcgaaagaattttttatttggctaatgacacattaatggatgaactcaaacgtaaaaaaagagaattcgatccgttcgaaaacgaacaaatatccgctgaatgtataaaaggtggaataaaaataaacccaactcatgctaccacggaattagaaattttggttgataaatattttatcctaaaacgaagtccacagagtgaagaatttatttctctacctacaaaaattactatgaacgagtataaaccagtcattaaatttattaaaggcacaagctcacctgagtacaaaaacttaacatgctctccatcaccaatctgtgaattaattatatgtcgtttctgcatggaatacattcgaaacccacaatgcgttggtcaaatgcattgggctctgatactaatcatgataatgctcacactttacgtcattactctttgtcttaaaattataagaatactataccgcttcatcgtttttatttttctatcagtctacaattgctgtagaaaaagaaaattaaagaaaataaaaataattaaacggaaacaatttatttatttaatcatgattagccttttactcaattcaccgactattttttcatgtgatgaagtcactaacatggtagcaggaacaaacgactgcgcaattgatcaaaacggaaagattgaatgtatttacgatcaaacaacccaaatttcaatcacaccggaacacaaaacgtgtctaaaacttgacaatgaaaaaatgcacagtacgatagagacaattgaattatctgttgaaagtctgacaataatttgtgcagagagatctgaatattttatgcgagattatgaattactatcgagttcgcaaaagcgatgttcaggcgccggaaaatgcaccggtcaaatatgtcaaactttaacaatgaaagaaaaaaatcctgaaatcggtgaccatgccaataaacaaccaggatattcctattgtgtgccttcctgcggtggttggcactgcaaatgttttcttgtcaccgatggatgtttattttatagaacatataccgagccaatcaatagaaacatatatgaagtggtcaaatgtccgacttggacgattttagctacaatcaaaatttcgcttgatccaaaaaccatacatactgtggaattaaaacctggtgtcttaacacatgttaaagactcgaatttatctctgacactcacctcaacttcaattccaccaacgccactatttggatcaaaatttataattgatcgttcaaacgcaaaagctgtaatagttgataatgagaatttacttaagaatagcctacggtgcgaaactaaagaaaaggcgacaaaattcagttgcacattcccaccagaagcttgtcaatgtcacggaggtgactccgttgttcactgcgaatgtgagaaaaacccgctcactgaaatgttcacaagaaaagataatattttgcctctcgagacacaaggaagccaagtattcttcgacactttattaagggcaaaaataaaattaacaacttcactacaagtgcaagtcacgctaaaaggtcacaaagtcaaagcaatttacgacaaaaataattgtactgtaaaaacaaaatcgttagaaggatgttactcatgcaccaatggagcagaatttaaatttacatgtacaactaactttggtaccgcattggcaaatgtaaaatgccatagtcagaattttcaaataccctgtgacacaaaagggaaccaacagcaaattcagctttcctttaatcaaccgagtgtaaaagaaaaatgtgaagttatatgtccagatgaaaaaagtgaaataacaattgaagccactctgaattat

SEQ ID NO: 57933 - DNA, 566 bp, Heterodera glycines
ggcaggacaagaaaagaatgaagttgatgcctcatgaaactcggaattggttatgtttagtcgaaaatatccttacataatactcataaaaaatacaaataattcaacccacctattctatgaccacattctgaaaaaaatcccagaaatacgaggaaagatatgcttggtcacaataaaataaaaaatggctagtatgtaaaaatttgcggtcacaaataaaataaaaaatggctaatatgtaaaattggcgtcttgaaatttttagactaatccgaagcaaagcacgaatgaattaaagaggcgaaagaattcacagtatcgtttctaatagggaaatattgacaggatattcggctaaaaacgggtttgatcatttttagcgcatttttaggtatacatttgagacaattgggcaggacaagaaaagaatgaagttgatgcctcatgaaactcggaattggttatgttttgtcgaaaatatccttacataatactcataaaaaatacaaataattcaacccacctattctatgaccacattctgaaaaaaatcccagaaatac

SEQ ID NO: 57934 - DNA, 983 bp, Heterodera glycines
atgcttctcacatttttgaaagatcgaacggaatttgagcaattgtgtaaaaaattagagacacaaaagcttctaaaaaacattgaattggtcgcacaacgtaggggcaatggtgtgtacgatattggaggtactgtagaatatttggcacaaaaatacagcgcttattttggcgctgtgtcaatgatgagagataaatggcaatgcgacgaaattgagcaggaaaaacggcagaaagaatgtgaacgatttaagaaatatttgacaattttgtataaacatttgttcaatgtgtacattgaaggtatgaaatttgaaaaataatttaattattaaaaaatttaaaaattaaagtttctgaccccgaattggcgcaacaaattgccgcggtaaggccaaattttcaaattgccaactcgaaaaaggctgcaacaattgtcgatgttttggacagtttgtgccaaatttgggccttttatttcggcacgaaaaacggcgaaaaaaacgaaaataaattggaaaatttattcaaaaattcgtttgaattgaaattgctaaatgagaaggaattggaaaatgagaagccaacatttgggcaaaaaattgaagaaattgttgaccaaatgaacattcctgagggttttaagcaaataattaagggcaccaaaacaaatggagaaaagggaaaaagcgaatttgaagaaagggaagggcattttggaacaaatgaaagccgaataaagtcattacgggagcaatttgaagaaaagatgagcgaaatgacaaaagatcgaaaaatataaatttaaagggagggaaaaattaatgaaaacaaaccaaagtaaaattgtatttgtatctttgtgtttaattgaactgtcaatgcttttttatggttttcaatggctttctttctataagcactttttgtttcctttttgttgtctttttgtaataatataataattattctttttaataaa

SEQ ID NO: 57935 - DNA, 599 bp, Heterodera glycines
atgccattggtccttctgtcctttgtccttctccctctgtttccctttctgattgtcgtcgctgtttcccgattatactttaaccgaaggcggtccgttctcttttcttttaaaatgttttcccggaactgaatttgaactatcgaaaaaccaaatttcacgaatttcgcattaatgtataaaaccagtcaaatcgggactcgcaaatgtacttattctctgtaagatttgtgcttatttggagtgaccaatctaaaaatttaaaatacccctatttctaattgtctttattttgaggggctggttaatcattttgattttgttggatttttaaaatttatttaaattatttggtttggccattttttcctaaaaacacctttttcggctttctaaaattctattttagggtctctggcagttttgccttttttcacccgttttgtgacgcgagcggaggcggagaacgtgttttgtggttggcaatcaacgcactgcagaaaaagttaatcacaaaagcttatttttcaaatcatatttagttactttaagtttgcgcggttgtgaattttaaatttattttatattatcacattaaa

SEQ ID NO: 57936 - DNA, 789 bp, Heterodera glycines
atgcgaaactctaaaaatttgaaatttcgactttttgttcgaaatcgggtccatggttaggatttgggtcgaaaggatatcagaatcggattcgccgatcctaaaaacccataaaatgactttaatctctagaaaacaatttctttttttcgaaagggggggggaaccattggcactattaccgggctctggctggttaaaagtatatacagtaatcaaattctgctagtctaattttggtcgaacacttctaaaatgaaaaatgtttttaaaatacctaaatgataattgtaagcaatttgacgcatatgaaaaaagggatacttacgtaaatttatttcagtggtataaaacaaagttggaaaatattgatcataggccccaaactcaaaaatgcttaaaaacggtcagaatcgatgtaaaaaggttcgaaatgggttggaaaaatagaattaggggcgcgcttgccctttttcaggctgaaaaagtgccggaattggagtgccaaactcagctgggactcaagtgaccgcactataaaaagcactcaaaagacattttaaataatctttctatggtaattttttttcgctgatcacgaatatgacctttattttgcaaaattccaaaccccgaacccaaattcgaacaaaaacttaaaatttttaaattaaacgaaaacatattatagggggttttgaggttgctgaacacggttatgacatccattttgaccaaattcgaaccccgaaccctaattatgagcatgttggtcctcaaaatcattaa

SEQ ID NO: 57937 - DNA, 1080 bp, Heterodera glycines
  unsure (1)..(1080): unsure at all n locations
atgccaaaatatggacataaatatggaccaaaatgccaaaatatggaaaaatatggaaatatggacataaatcgcgaaatatggaaaaatatggatatagaagcttcaaaccaagctaaaaacatgtttttcgtgcgtttcaggcctcccacagtccaggaaaaaatatggatttccatataattggactccctagttatcaacggcataaattttctaaaaaaaactattttttgaaaaattctgagtgaaaattatctactcaaaaacaacgtgcctccccccgtggtcgaaattcgaaaaatcgttttattttatttcatacataggctaggcataagctttagacctaggcttaggcctaagctaggcttgtttgggcctacataagattaggcattatttagtaaaaaaaaacacgaatacacatatttattttacatatatgcaaccgcgcgaaaacgacccccgcgcgaaaacgacagcgcgaaaacgaacctggcgcgaaaacgtcagcgcgaaaacgacggcgcgaaaacgaccccgaccgcctcctttcgtccctaaaaacgagaggcgagagtccaaaaaatggcgagagttggcaagagacgagaagcgagagttgtcccgcccctgttatgatgtacatatttttatacattttttggagtctttcgtacatattttcattttttacatattttgagatgatacatatttctggatttttgtacatattccatatatatttgtgggttttttttatatatttatattctgtaattttttttacataaaattcccatcccaataataatgctaaatgttttcttttctatttttaatcagtttatttaattatccttttcaatttgatattttagtctcaaagcgaaactttgtcagttgaacatttcgccatgctcaccatgtacatcagtgagaatacgtttanatttgtcaatttcattcaaaatacacgcggggcagcgacgcgcgtncaaaaactaattggagcagcgaaaattaaatcaaattttatggaaacatttcagaagaaacttcgaaatccattat

SEQ ID NO: 57938 - DNA, 156 bp, Heterodera glycines
atgattgcacataattgccgaaaaaattcgagaccaatttccgaatgttgaccgactaattgccaaaacgaaagccgtctttgtcaaagcgccttaccgagtcaaaaaatttggaaatgtatctcatatgcaatttcaaccaataaatttgaagaa

SEQ ID NO: 57939 - DNA, 6389 bp, Heterodera glycines
aaacggcgtcgttttatattgcggcaattatatagcagcagcacacttttgtcgtaagttgtgattgcaacaaatgtcaaaacaaaaaatgatgtgcaaatttttgtgcttttgagtgagattcgatggagtataaaagcgatgcatttgttcccttttcccattattcattctccgcttcgttttccgccagtgctgccgccccccattttcggcaatggtaacagaattttttttctttaaattcttttgaatgcaaattattttttctttttcaactttaaggaaaatgttgttgctcctgccgatgctgcggtcgacaattttgagcaacgcactcgccaattcttcgccttcgtcaacgagggaaacatcggacaattgcgtgcgctggtcgactcgctggatgcggacgaactgagcaatttgctgcggatgaaccaaccgaatgtccgaccgcctcgacctgctctcattaacgcaattttaaagcagcacacggaaacggtcgttttcttggtaaaagaaagggtttagtcttattcggcagcgattgatttcccccatttttcattcagttggagaagggcgcagatccgcatcagactgtgcttggccgactgaacaatttggacatgagtgagcagcaacaaaagcggaattccgcctcatttataaagttttgtccccaattttgcagatgtgacgccgctttggactgctgtcagtatgaccaatttggagatgtgccgtgcgctgatcgcccatggtgccaacatccacttggggacggactctggcgagtcgacgctgctctgcgcatgtttcgaaggcaattttgagattggtgcgtcaaatgcatggatgatgctgccgtgtaattgccaatgttttcccatttctcagtcactcttctcgtcgagaatggcgccaacgttaatctcgcggacagcgacggaatgacgccactaattgccacttgttactttaccggaaaggtgtgcaaagttgttgcataatttgtgactgttttttcgcgttcttagattgacattgtgcacctgctgcttttacacggtgcaattgttggacagacggatttcacgggtgcaattagtctaattgccctaaaattattggattaatattcccttttttcaattttagggatgaaatttgctcttttgggagccgccagggcgggctatttggaagtgtgtcagctgctggtgaacggatgggcagcggatgtcaaccagcaaacaatccacggcaccacagctctgatacgcgcgagcggtcggggacacgtggacgttggtgagaaaaattgtggcaaatttgaaatgtttcctcattttcagtgacttttctcgtcgaatatggcgccgaccttgaccacaccgacattgacggatacaacgcgttgatgtgcgcagtgaagaacagaaggacggaaatggcacgtcatttggtgaccatcggcgcgaacactgaccagattggcattgatggtgagcagaaaagtggttaaaccgcacggcttttatgtaattttctcgcatttacaggcaaacgggcgcgcgacttggctgaagaaagcggacttgccgaaatgattgacattttccgtgccgcggctgagcagcgggaaaacgccgatgggtaaaataggatgttttttgatcaaaaaaacaacaacaaattttcaggcatcagaacgaacactaacagcggatgagagggaatcgcggctcaaaagaattggacggatgtgccattcggaggatattctcatgcacttatgtattattgcagtgtatttgttcatatttgaattcacttgtcgtgtttgtctgctctgattgtgtacataaataacattgtttgtatgataaatagggatgcaatttttaggttttttttcggagctcccgtggcctgaaatgcatgaaaaacatgtttttttgggctgttgttaagctacttttcgagttattagtgcctattttctaggcttttatttttagagcctaaaaagtagagttgagggtaatggtgaagatcattggtcccataaaaaagggaaaaaaagcccgattttaatgattttgcacttcacccgggggttatcgagggtgctgagcaagaatatggtcatatgacgacatcaaatctatgatttttcgacatgtctatgatttttcatcaagtattttttccaattctaactcaattatttagctcaaaaatgagctcagcttgtttattgcacgaaaaatgcacgatatttaagcattgacaacataaaactgaccaatatggtcaaaaatattttcgaacgccaaaagcgttttttccccataaaactggcgccacatatattcgtccatgtatcctggcaacaaatcacgttgtgtgcccgacatcgctttattcttcattttcaaattcttccaaaagttttccacgtgattggtgtgagtgccggtcaatggatcgacaaagttttgagcatggttaacggactggtggacatacggcgggacaacgggaattgcagctattgcgcctcccatataaggagcccactggtcggagtgtattgtggtgccagggaggacatattgttcaatgatagggaggagagtgttgcgcgtacgatctggtacaagttgcacaacaccgacgtgggcgtgcacgtcgtacatgccgaacacccattgctcacgcaccctccggcccctatgatatttccggcgagcgacgagactctcgtctatttgaacaatattcccaataccacccaaacttaaagatcgccggttacggtagaaatacaaaaaagtataccggatgggatgcgcaagcaaccatcgactacaatccattgataatttaaagtaaatgctaaaagaatagcaaaattcttaaaataattttgtggtgaatgtcggggagatgcagtatgttgtgatattcatagtctcatttgcatgtaaacaacattcattatttcaacattccattgtttaccttttatgggaaaaaaacgcttttggcgttcgaaaatatttttgaccatattggtcagttttatgttgtcaatgcttaaatatcgtgcatttttcgtgcaataaacaagctgagctcatttttgagctaaataattgagttaaaagtggaaaaaaatacttgacgaaaaatcatagacatggcgaaaaatcaaagatttgacgtcgtcagatgacaaatctgatggcatattcttgctcagcaccctcgataacccccgaatgaagtgcaaaatcattaaaatcgggctttttttccatttattatgggaccaatgatctccaccattaccgggttttcgcaggcgttgaatattaatatgacatccatttcgacctatttcgaatcctgaacccgaattcgaacatttttttgtaaaattttgaaaaattgtcaaaaaagtctctttggttttcggggtcgctaatcactaacctaacatcagttttggtcaattgcgaaccccggacccgaatttaaacaaaagtcgaaaattaatttttcaccaaatttcttgaactctgcttatacatatctgttttagcgtttatgaattttcttttatatcgtcgtcaacaattacttgctgaaattttggctgcaacccgccgactcaatgtgtttgatgctaacttggcgactgggaacatgggcacagaggaacgtgagcaagccatcgccgaccgtgaacaactgtttgaattcgtccgcgaacttttgcgacaactcgacgctgttcgggactcagaaaggcagctgcgagagagtcagagagacaacgacaatgacaaaaattctgaggtttattcacactggttttgggttcctctagtctgactgacttaactaattgtttccaccctttttttgacaaaaattagttgtatgaaaattcggggttgtccaatttgcttggccaaagactgttgcgatgagtgagtcaataggctctattcaatttacgcgtccaatcagtgactatcctcatggacaaaagcaacatacaaaaagtttttcctgaactaacccaaattcaaacaataagtcgaaaattcaaatttttgaacttcttaatattgccataaaagtgattaaaaaagctaaaaaataagctatagttagaaaacttcaaacattttaaatgttgtttttttcaacagggaggaccgggttcgttacgacgaagcaggagccattcgcaatgaagcggcgacagaagcgacaaaattgaggtttgttcgcattattttgaagcaaaatgccattaacagtacaaaacagagcaaattgacataattaaaaagttaaatctatcaaatttgaaaaaaatatttaaaaaaaagcgggcggttgataaaagaactgtaacgagcaaatttgggggcataaagcaataatagtaaccaaaacatgtaaataaaagtcccaactttttttcgcaaacacaaaatgaaaaattttttccttctcattaaaattttagagctatttacataaaaaaggaagccctaataatgaatggtccgagactaactgtctcgggaaggaaaagtcccgcattgattgacttatctcgatttgagcttaaagaaaaataatttctgcaattgcagcaatcggacgggcacaaaagagggcgatgtgttcagttttgcgactatttgtgtggagatggtgaacagagagacggtttggaatgggacggagagggacgacgacgtggacggtgggcaatggcattttagggggaattattgggagctgaccaaagtcgagttttcatcctaattacggaccacaattctaaattgagtttattggatttgttgtgccgtgcccattcattcctttggctcatcgactttttctcactcctcagaaatcctttatcggctcaaacgcaccaacaacacaatccctcaccgtcctcagctccgcccccgcgaagacaccaatcaaagtttggtacgatttgttgctgctgatcgccttttctttccaattcatttgtgcttttcctcaggtccatttgatcagagactgttgggctgaagtgccggccgaacgcccgcgcatggatatgatgcggacgatgcttaagcagatggtccaggacgggtgggagacgcaggagaagaagaagcattgcccttttgatgttcagaaaccaaaacctgatggactacgtgttcggcatgctcgagcagtacgccagttcactggagcaggaggtggaggagaagcgcaagagcgacattctgctcaatcggatgctgccgcggcaggtggcggacaaactgaagctgggcgaggcggtggagcccgagtccttccaaatggccaccattttcttctcggacgtcgtctccttcactactttggccggcaaatgcacgccattacaggtgacaaaatcagtgatcactgtctgatcagactggggaagctgagtgatttgggcagaagaaatgtagttggtgataacgaatgggattagtctgactattgtgatcaacatccattctgatgataatatgattcttacgtcctccccctctccgccgtttaggtggtgaatttgctgaacggactgtacaccgcctttgacggcatcatcgacacccacgactgctacaaaattggtcagtcagcggccgatcacttccattttgatcattttaccaacgcatttccccgcacagaaacaatcggcgacggttatttggtgtgttccggcattccgaagcgcaacggcgaccaacacgcgaaggaaattgcggaactttcgttcgctttcctccgcacggtgtccaacttccgcgtcgaccacctcccctccgaacgcgtcaatctgcgcatcggcttccattccggtccctcccctcccctcccatttcaaatttggcattttcagggccagcagtcgctggcgttgtcggtctgacgatgccgcgctattgcctttttggggattcggtgaacaccgccagccgaatggaatccaacggaaagggtaaaattgggggggggggggagaaaacaaattcatttcccattttagccggcaaaattcacatttcatcaagttcaaatcgcttcttgaccagcgtaatcggaggatatgtgacggagccaaggggcgaagtgattataaaggtaattagggggggggggggaatttttgttaataaattgcctgattaattcattagggcaaaggtgtgatggagacattttggctgttggggcgaattggcgaagtccatttgccggaggggccatccgtgtcggaaaatgcgggacggaagagccca

SEQ ID NO: 57940 - DNA, 521 bp, Heterodera glycines
atgccttctcgcccgtgtgttgtgccccgcatcagaaatggcctcgtgctcgatttgaatcgtaagcttggcattttgcgcttccgttgcaatttcgggttggcatttcatatgttctttcttcttttagctaatttttttaaaatataatcatttttagttttgctccattggaagtacatcagtcaatttgcaaatcgacgtcaggcgaatggatcccgaagccaaaatgtgttggtaatgtgtataattgtcaatttaattccaataattatttttaattttagcgattcgttgtgccttccctccgcgcattgcgtcgccaaatttggccaatttccctccgtctgatcgtttcgtgtcggcaattctttctgcttcaatccccaataattcggacatttccttcggcactttggtggcatatgaatgtgccaatgggacggtgccgaggggaggacaaagtgtggcacaatgcgcagcgaatggccaatggacaaaggtggcaatggcatgccaaa

SEQ ID NO: 57941 - DNA, 293 bp, Heterodera glycines
atgacaactttagcgatcttcgtggtcagagtataaaaactaaaaataagcctaaaaataattgattaattttgactataaaaaatgaatgggacatttaaaataaacgattgataaatgtttaaaataatttggaaaatatataaatactttcagaaattattaattttcttgaaaaattatgttaaaactgttcataaactcacatagtttaattaaaaggaatgaaaaaaatgattaaatatgcagaatatattatatgatagacatcctattaacagcaattaaataaa

SEQ ID NO: 57942 - DNA, 582 bp, Heterodera glycines
atgaaagagtttttcacaaacttttttccacagtttattctgcatatttcgcgatttttttgcatttctttcatggcgattgcgaagaaggactggtaaaagttccgttatgtcgtacccctataaaaatgtgatgatcccgacaaaaatgaaagcacttttctgttgtaattttaggcactaatttgtaagcaagaatctgggatcaatactgcaaaaatctatgtttgtatctatgattttcatcaataaatttgtcgaaagctttttaaaaaaagccaaaaaaatatttttttagggggtaacgaaaaaaaacttattggaaacaattaaatattatatataatttttctctaattaaattcgcccaataatcaacaaattgtcccgccacccatatttggtatatacacatttaggtttgttttccttaattatgaatattgtttcgaatcttttgtctctaattacgccccgtttgccccttcgccttcctatgccctccttttttgccgtgccattcatcaatttatttgctggcgattgacccgaccaatgcgacccctccccatcaacaataaa

SEQ ID NO: 57943 - DNA, 1245 bp, Heterodera glycines
  unsure (1)..(1245): unsure at all n locations
atgcacttgtcattctctgatgacatcgacttggatgccattcggaaggtgaacaatctttcaaaaaaaaaaaggcaaactttctacgttttcactgatttctaacttcggcaaataggtaattaaaaaaacatttaaggacttcgaacgccttaatccgctcccatcggccgctaatgaaagtgaagtttttgctcgactgcgctcaaccgccttcagactgcacactcagaacgctttttggtgccaatttgatcttagcgaggaaacaaaggcgaagatggagcagtgccggatgggcaacaacccaatggcatttgtcaagcgatgcattgtgctgcaggaattaaaaaagtccaccgaagcaatggagcagaacaatgaacagatgccatcgcaaatacaactcgatttccatgtcttcacacttccctatgtcctaccgtaagttaccataaaagcaactctaagaaaattacagactttgtttagacattacgcctgtttatcgttattcgacggagaaattcatcacggcgcaattgcaacctcaaaacaaagggcgaagatcagttgtgcagcagtgttatgtgaagtgttggtgaagatgggctgggcggatgtgaaaagggccaaaaagagaaaaaacgccgacggagagaaggcattgaaaaagaaaaaacggaagggagaaaacggacagacggaagacgttgaggaggtgagtcactcacgaaaggccaccaaaggaaaaggggagcaactcgtctcccccggaaagaatttaaaaaactaaagttaaagcaatgaaaccccaaaggcaaaggggggtacaccccaaatttcgccaccgaattttttttttaaatttccaacatcaattgaaacttcgtctctgcgaaatttcagcggcaaaattttgtcctgttccgaaggcaaagcgtcaaaacaaacgtatagatggacagttgctattaatttataaattatcttcccttttataagaaaataacttacaattaactaaaattgcagggaaatgtccgtttgtctcatcagttccttttgacattgcatccaaatgaatcgcttgacccaagaacgcattttttccttgcttcgtctgctaaaagcccaattcaattgctcaaagaagtggcggatcgtgaaagctttgaagtttcgtatacgaaagggaatggacgagtactttcacaagcacattgtccacgtncacacaattga

SEQ ID NO: 57944 - DNA, 969 bp, Heterodera glycines
atgcatctgccgcagcagcgctttaagcagtgccacggtgatcagctgatcggcctgcaacttccgctccgattgaatgtgctcatcgatctgccggacgattactcccaactgatcaaaatgacggtcaacttcaggtgaatgttttgggaaaataaaatgcccaattcttaattttttttaattgcccagaaatttcgacccctcgagtttttcccttcgtttttttgttatctttttgaataatattgattttatcagatgccccgagatcaaagagttgactaacacagtcgcgacactttgtcttaattgcggacaaatgctttgtgagtttatctctttgattttaatttacttaatttatatttttttaggctcacaaggctactgttgccaaaaagtggtcagtccacacgaacactaatttaaaggcttatttctccatgacgattttccgattaattatcttcaaaattaatccaaaattaattctcttaattttgttaattgtctttgcaattttgtttctataggtcaatggtcgtaatgttggtgcgtgcaccgcccatctgagcaaatgtcgcgggtcgtctggcgtttttttgcggtgcgtttccgaagagcgaaatcttttgaaaataattgctttgttttcccgccgcagaattcgcgagtgccaaatcgtttgtttgcttgtgactaacggtggggagctcacccgcggctgcttcaaggcggcaccatacgttgacgagtttggcgagactgatcccggctttcggtccgtacttttacaaaagccttacaattagccctctcacaaaaatgctttccttcgcttcagtcgcggcaacccaatgcatttaaatcgtgagctttactggaggatacagcgcctttggttgtaccaagaaattgcggaggaaatcatcaaccaatacgagctcagcagcaaccgcaacatcg

SEQ ID NO: 57945 - DNA, 1242 bp, Heterodera glycines
  unsure (1)..(1242): unsure at all n locations
atgctggtggtgcggatgcttatgctgacgaggataggtaataaatacaaatggtacctacatctgtaaaagtcttatgacaacataaaataactacttactcaagccctagttaaatttttccagactacgatgaagtatttcacaatgtcactgatgcatcatcgactgcactaggaggacttttactgctccatgatgccgagacgcgaaaatcccaaaccgatcatcaattggcacgatggctcattgaattacaaaattatcaggtcaaaattgtccacgtggcgggaaaagccaacactttggctgatgcactttctcgtgccgctgaagacaagcccttgtcggagatatacaatgtggatgaactcgaggaaattatcgaatttccggtctgtctcgctttggcagcacattccagggtggtcgcggacccatttttgcacactttgaccatccgacacgaggatggaaacacttacgaagttaatttgttggaagagcaggcaggagatcctgaagccgcagcctacattgcgtttgtcagagatggggaatttccagctgatttggatgagaaagaaaaagagttatttggtggactcatttttgaatcacttcactcgtctctttttangtggtggtcatttgaattacaggaaaacaattgccaaatgcaaaaaatatttttggcccaaatgtactctgacgttttaacttgggtcaaattgtgtgtcacctgccaattgagacacaatccaacacccgcgtaccgggaagagatgctcatggtggcaggcgacacactttttgccaaagttgggctggacttggccggcccctttccagtcactcaaaaagggaataaacacattttaaatatcgtgtgttggttcaccaaatatgtgatttctgtcccggtccccgacacaaaagcacaaacaattgcccacgcttttcttaccaattgttacttaaaatacggtggttgtgttgaattaatcaccgataatgcctctgcctttacttccgaattttttaaggaattttgctccatgctttacattgacaaaaagtatgcctgtcctcattggagtcaaggcaatgcgtcaactgaacgcacttttcggacatttcacaacatcttggccaaatacatttcgaagactcagcccgacttcgatgaatttttggatgctgccaatttttgctacaacacgtcagtgcatgcttcaacgg

SEQ ID NO: 57946 - DNA, 429 bp, Heterodera glycines
atgccaaaagaaccttcgtcccgcgcatttcttttcaaaaaatgggtttccaattacatgaacgatgtttacacaactgattcaaagataatttattgtcaagcatgtcaaataaaggttttaaggaatatgcatttggaaattaatactttaaatttatatttgaagacccgggatttgatacaatttgcgatattggaaaaattctttctggtcaaaaaatcaatttcggtatgccccccaatctgatttcactttacaaatacgctcccttgacttcatgtgatgttgaacgatcattttcaatttacaaatctattttgactgacaatcgctcacgtctatcgcccgaaaatcttgaaatgttacttatttgcaatgtgaatctcaataatgatttggcataatattttttgctttttgaataaa

SEQ ID NO: 57947 - DNA, 1269 bp, Heterodera glycines
atggccaagggcagcgacaacactgatggaggaaaaatggatgaattcatcaaaaatgccaaaactatgcgtgccaaaattagaacaggtaaatttccaagccgtcgccaggggaaggaggaaattttcataacaattaccattaatatttccataaaattttaaattcggtcctataatggctacaatgttctagcgaaaaaggctataattgcctgttttcgaaggattttgagttattttaaatggcaccaaaatacattaatcattttaaatcgtacttttagatttaagtagatcaatttatgaaagcgaactaacggtgcaaaactgtgatgaaaagctaaaagaatattttgaatgtaaaggcgcagaaaatcctgaatttttcaagcagttttttggtttaacggaaatgaacgaacttttatcaaaccttcagaaggtaataataataataatttgtacacagaaaataatatgtactaaaaaatcataaaatttgaataaaaacttctttttaagggaaccaattggctaccaaatttgctagcaattgaaacatcggaaaaaatgtcggaattaaaaaatgttgcggaatcgaaaaaagtagtggcataatgtcgtacgggctctgttgcaccttttggcgtccaattgctttttttcaactacattcagagaaataatttttgtttgttgcttttaagcccagaatttaggtaaagaaaaaattctataaacttttagctttcgtttgaatccaagaatgttggtataagaaaaaagaaaaaatggacgcctaaaggtgcaatagacattcgtagtaacccgttggtggtggaatttgtgcagagagatattggggtagcaaaacgatgaatcttgtttgggagtactactggggatcagggatggacgaaatttcgtttcgttttcgtttttgtctaccaaagttttttcgtttcgttttcggttttcaaaattttgtttttcttttcgtgtttcgttttcggttttcaaaatttcttttttcgtttcgtgtttcgttttcgtgtcgaatgccctttttcgtttcgcgtatacgaaaaattttttttgtgattttcgcacatccctgctgggggggggggatagggatgagaagcaggggtgggcaaagctcggcttagtagccgaagccgaaggcgaagcccaatttttattcgaagccgaagccgaagtttttgaaaaaatattttgtaacccaaacaatttatgtaaaataaa

SEQ ID NO: 57948 - DNA, 911 bp, Heterodera glycines
atggacttcccatggcatttgtggcctcgttatgttgttcgtgtttttgtgcgcgtggtccgttttatgaaaaacaagaaccaaaaagaaactaattattattcttttaggtatgatggcaaatttaatggcgaatctgccatgccggcaatttgggcgggaattatgtgcgaattttttgcatacattgcattaaacaaaatgtgagataaaaacttgaattacttgcaaaaaaatattattgtaatataattaaacaattttttttttactttttcttcagtttatccgttgctgaagggcatcaaattgacgaattggtgaatgagataaacaaatccgagctcgatgtgaacgctcaaatcggaatccaatttagggaagtgctcggaagaatgcttatttcttatacttaatttatgtctccgaatcttcatttttaaattggtttatttctaagattgtgcttatgttcattcttaaagaaatttttgaaaagtttttcatctttgaacaaaattgtttcaataatattcaaattacccggcgggattcattcataatcgaggaaatattctttttttattttcatttgacggatttttattcaaaatcataataatttcaaaaaaaattttttttttgtttatttgttcttataaaatagcaatcattcgattcctctcaacatgtaaagcattaatccgaaagaatttttgacaaaaaagaaattgacaaaagctatgggtcctcaaaagcgttaacttgttgataaacaagttcagtcagaaaaatgataaaaagtcaagtttaaaagattgagttttgattattgcgctaaaaacaaggcatatgcctcaaaccccggtctttaattatatgcaatattatagtttcataccaactataaa

SEQ ID NO: 57949 - DNA, 1209 bp, Heterodera glycines
atgcgcggactgcacttggatttgcaaactggcggagcagtgcaatggcgagacgccgctggtggttacgaatacgcaaaacaaacactccttaattggcaaccgaccgatttgaacaaaattaaacgtaacggaatgccagacggcacgctgatgtacccggactttgtgctgagacgtattatttacatatcattttcgcaataattcgcttttcaagctgttgatcaaacggaattttttgttggatttgttcaaatacatttatttaccttcaaaaacactatgaatggtctaaggaggaggatacggtagttgccccccaattggctgcggttggcttggcaattgcctacattggcgcacgggggaacacgaaagtgcaaattggcaaagtgttgttggatgcgggtaatcattttttaaattttgagtgggatgtgaatttttgggaacccggagatagcaaagtgccggaattagcttaattttgtcatagtgacattcgcacaataatcaaaaaatatttattaatttaaaaaagaaaaattttaaaaatatttgtaatacaattttaatacaagaataatcttaaaaaatatcttaacattaaatcttttattaaaaaagtaacttcaaatatttataaaaaaaatctccaaaatataaaaatattattgtacgaataatttgccatctattctggctgggccgacagagaattcaaaaacattcacggttaattcctggcaccgtgcgaccaaaaatttatttatgttggtgcttcattttgtaacattaaataaatcgtttagattcgtctgaacaattaatgcacgataacaaccgtcaatttctccaagaaattcaattgatttcttctaatgatgtttttaaactgaaaatggccagcaaaatgtttttgtcgggttcatttgaagttttggacaaattcaattcgaaaatcaacacattttatgggagcaattttgagaaaatcaactttcgtgaaggaatcgatgcggcaaatgtaaaagaaaatattttgcatataattaaaatatttttaaatattttatgcaaaaatttgtaaccggggctgggttctttaaaattagagtcaattctaaaaagtttaaaattttctatttgggggtagcacctaaagaattttcggacgcgaaaaatttcttaagaaaattcaataaa

SEQ ID NO: 57950 - DNA, 917 bp, Heterodera glycines
cccacccgacttattcttttggcactcaacgggaattttttgatttagaaactgggccaggtatttagtatttgataaatttatttaaataaatattttaaggccgcctaataaatgttgcggctgacgggaattgcttttataattctttatcagttttgcttactggatctgagttgaaagaaaatgctgggattatacgacgcgcgattacagagtatattgaatcagaggttgagcttaacgaaatgggaattccatggcacggatggtgggaaatgtttcatcccggacaaacattatatgattcaagtgggaatgaggtacagtatttttttaagtttgataacgaaatctttctatagataattagtatacgtacatatgtccagaatcataaggagccggcaaaatctgcctccgaaagacataagtggggcagcaatgttgattttctagcagctgcaaaattattccaaattaatgttatcgtatgtagtccaaaccctcagagaaaagaagattttggaatacaatatgtatggaatatttatactccggatatgctggatacggtatccatttaaatacgataaatcaaaatattaggcatatttagatgcttgttggccagtcgagagaatataagtcaatttttatattttttgaattgggacatttccaagcaattatagatcctgcggagttaaagcaaaactagcttattataaaattaaaagcatttgcataaattttttaaaataataacaaaaatttgctccttaaataatcaagtataattttattaaaatagtaaattgatttgctttttaattggttgattaatcatattcaaatataattagttaaaagattaaattaaaaaccaatataaaatatttagtttgcttaataaa

SEQ ID NO: 57951 - DNA, 49 bp, Heterodera glycines; identical to SEQ ID NO: 51181

SEQ ID NO: 57952 - DNA, 446 bp, Heterodera glycines
gtagcaaatgtgtatttgtgcccaattactgccggagcaacaccaaatgtcgagactgaacttgccgagcaacgcaatgttgccgagtgcaagcagtactcaaccaacctgtggtatgacttctacgagatcaatggggttgacaaagctggcgaatatgtgctgaaattgaccgaatccaccaaaccttcgttgatttatgtgtacgaacagaaaacggtgcgattttttttttaatttattgaaaatttcgaaaatttaaaccgaaataattacaaaagaatttttatgaccataatttttgtgaataaaaaaatattatttatttgtttaaatttgattttttgttttacaggttcttcaagagggcatccgaattttgttcatcaatgatgaagccaaattgccaaaccttgagggaagctaccatttccgtgctccatttg

SEQ ID NO: 57953 - DNA, 77 bp, Heterodera glycines
atgggcagccgaagcaattgcgattccacaattattcgagcccaccaaacaatgaatggcacaacaatttcaaagag

SEQ ID NO: 57954 - DNA, 556 bp, Heterodera glycines
  unsure (1)..(556): unsure at all n locations
atgagtgccaataccgacgggcaaaggctttctccttcgccggaggaccagctgcaattcgacgagatcagtctgaacatggcgcccgtccacccgatgagttacgtgctcactcccgcagaggatgccattctctcctcgtcgtccgccgaacaatcccccgcctcgggcacttctccgaccgcgacagtgccgccggtggcaattgccgaaagaatttatcactgccaacagcagcagagacagcaaccaactgaggcgacagattccgtgaagattgaggcgacagattccgcaaaaggcaatgttactctgccggagacattgccaaatcccagcagaaacactcagcaaatgcccccagcgcaacagtcgccgcccccaatttactcggccatttacccgcccggcactcacccggccgtcccctcggggcacattccgcaattggccaattgcactccgacgtacatcatcgacgcgagcgcaattcgaagtgggagggcgactgattgtgangtgtcgccgacatttttggtccatgggactgcnggcg

SEQ ID NO: 57955 - DNA, 355 bp, Heterodera glycines
cacttttgtgctgctgaatgtgcccaactacgccttccgcctttacgaggccgtgttcgacgtgcagcagacccacttgtggcagttcgccttcttcatcacttacctcctctattaccttcaccatgccgtcctcttctacatgtacatcttttggaggtgcttttctctctgtgtttggccttttgactcattcgaaacattcagtccccaaatgaaaaagcaacttatgccgacagcactcaaacttttggagtgttactgcttcaaaactgtgcctgaatttggtcatcgtcagtcccaaatgtcttttcatcccgcgcaacattcaaaattggtcgccaatcgctcttaa

SEQ ID NO: 57956 - DNA, 804 bp, Heterodera glycines
atgaaatttacaaagaaaatgttaatgattcccgaggcggaatatttggctctacggagtgtaatgaatagtggtgattatctccaaaatgaaaaagcgagtttagatgcaaagatttctcagaatttacaagaccccgacataaacgaggaactcaaggcgaagagacatgattggctctataaagaaagacgtacggtaaaggggatacttgaaaatagaccacagaaggtggtgattgagaatcatgtacccggtccgaacgttgcaccatatctaggcctcaacactcaatccaaaccacaagagaccgatgaaccacggaaaataattattcctaggaaaagacttaaagagcaaactcctgatcctgaatcagatactgatacacttgaggagttaactagggaaccccaaacaacacacacattaaaaacacccattccgatcaaaactattatacacccgacccttttaaacggtctttttaggtacgtaaaggaaaacaaagatttatttaaaattacggcggctggaaaggtccaatcgaacatgaatttgccgattgaaaacagtaattatagagatgttttgttgtatctcgcggggaagaaagatgaaacgccgcgcggtgcaaaatttctcaaagatcggttactgaaggatccaacagtaaaagacatggttgataaatcaaaggtcatgtggggacgtggaaggaaaaaggcaataaaatctataaaaacacccgggatagcacgagagaagaaacccttcaaaccactaatatgggcaagactgtag

SEQ ID NO: 57957 - DNA, 556 bp, Heterodera glycines
ttgaaaccaacgatccaaatgccttttactttacatttacgttgcgtaaatatgtcaatgttaatgaaaaagaaaatcatgaacaaaatgtcgaatgtgtggactatgccgaagctaaggacccaaagttggagcagttgtttctggagatgaagaaggggttggagcagttgtatctggagatcaagaaggtcgagcagaagtttgacgcgtacatttatagcaaggagaaaatggaggaggagcttatccccaaaatggaggatgttgtgccgaaaacggaggatgttgtgccgaaaattgaggaggttgtgccgaaaattgaggaggttgtgccgaaaatggaggaggtagtttcaaacagatgttcaacagcagcccacggtaggtgagggtctggaggcaatttagttttgcagtggaactcggacagaactagcccaaccgcagtgggacatttgcgacggacatttgcggacaattttggggaaaaaaaaaaaattcgtaaagaaattttaaaaaatttctgaaaatatggaatgggactgaaaactaa

SEQ ID NO: 57958 - DNA, 2621 bp, Heterodera glycines
atgaagacgaactgttgctggtccaagcggtacattcattcaatattttaccaattaataataaatttttctttttttaaattgtccaaaaattttttaaaataattgttttaattatttatcgattaaatgggaattgcgattctttttcgatttcactaattatagggccatgggatataattattaaaaaaaatcttctatcaaattaattagcgctaatggctaataataaattgtaattaaatttggaattttccagaggcccttccaaattctcaaatccctgtatttgtcccgaacaaatgatcactcaccttgacataccatttcttgatcgcaacattttacagctgtggcgccatggcgaccgttccccgcttggcacattcaaaaacgatccgaaccaagaggacgcatggccccagggatggggccaactttcagcagttagtcattcattcatctattaattgtttgccaaattttttggcatttggcagtgccaaatttagacctaatcctggcagaaggaggatcaggtagtttggttatggcacagcaaaaacttttggcaccgccgccagttttctcgtgatcccgatcccgttattctcatgggttttgtttggttgcgaatcgagtccagaatttgaaaaaggcgggatccggatttgggattggcaaaatgctgcattgcctctaagtaccccataaagcctcgagaaggggtggcgggggggggaggggtgagtaaaaccataggaggcttagaaacaatacggtagcaccaattctttaaaaaatttctatacagtagcgcttaatttttaatggacacggtagaatcaaatcctgtacggtagcattaatttttatttatactttttaacggatatggtgcagcattattgaatttaaaacatttttttacaataattatatgcccattagtagggatgggatttttaggtttttacctttttttttttgcggcttagttatgatgagagatgcccaaaaatagcattttctcctaacaattttcgatttagagcgactttttagcacctaaaaacacctattttggcgttttggcacctaaaatagtttacaacctattttggcatttttcgaatttttagcacctattttgggattttcccagaaatttcatagtaaaaatgcaataaaaacgaaaaatacacccctaagaatcgatcccaaaaaattttaaaaatatacccctaaaaattgaccaaaatttcagaaaatattcccctaaaaaatgaaaaattttctcaaaaattcgtctccaaaatttatttatttattttcttgaccagttgcaattgtgcgggcgaaattgataaaaaattagtcacattttgaattgttgtacataaaaacactggattttttcaatttttaacacctattttggcctttttggggctttttagcacctattttgcacttttttagcacctattttagtacctattttgggatttttagcacctaaaaatcccatccctacccattaggcacctgaaaaaaatgaatgccttcagaaagggatggcccaacatgttaagcttggcgccaagctgaaagcacgttacattgacgggcttaactttgtcaaccggcgctatttgagcaaagaaatttatgtgcgaagcaccgatctgaaccgcacgctgacaagcgcaatcgcaaatttgatcggcttttttgaccgcggcattgccggcacggattacccgagtgagcggcaggcacagtggtggccacacgggtgggtgtgtatcagggatgttgctcgtcttgtgcctcatattctcgtgtttttgggggtgtctcgtctcgtctcgtatctcgtattttgtttttgtctcgtttttctcgtgtctcgtattttatttttctattcgcaacatccctggtttctaaataaagcggatatggaacgcggatgcggaacgcgcaacaacaaaaaaaacggggaatgcggtctcagtccccagaaaaattttaaaaattgattttttataatggaaaacattcaaaaaatttcataaaatttaaaaataaaaagatttttcaattttttaccggaaagaggatctgcttaattaaaaaattaggggacgcgacacgcgaaaaaaaaacacaaaccatatatgtaccagaaatggaacggtattccgatttccgatcgtttttaccgtacatttttcaaaaaaaaaaaaaattacgatacttagcaacttacagtttcacaccggtggccgtgcacacccgtgaagcctttaaggatcacatcatcccggacgtgccggatgtgccgtgcccacggcaaagcaaaattttgcagataatggcacggacatttgagtaccgacagctgacgaagcaaaagaaagtggggaaatttttggaaattttattaatatttttaaaattttacagcaattttttgccgatttgtccaatttgacaggcgaacaaattgacctgtttaacttctatttaatccccgacacacttttcattgaggtcaaatgcaccagggatagaagagaattataggggggatttaaggcaaattaaaaata

SEQ ID NO: 57959 - DNA, 1389 bp, Heterodera glycines
  unsure (1)..(1389): unsure at all n locations
atgggttggtgagtgatcagaaattgttgtgggtgatcggtcattttctcgtagggttgacacgattttctgnaatttttctattaaaattttttctaggttttttttttttgaaaattttcgctntgagccagtaaaccaaaagtaaatccagattatataatctgtgacccatcccccggtttctcgaataacaatgcttttgtgatcaagctacccgcactacactgcttgtgtaacggttgagctatggcggaatgtgacgaatggaggggagccatatgtgaaggtaagggcggcaaaaagtgcctccggggatttaatttgttagcatttttgccaaaaaattactttttaatttgtgctaatcgtcgccggggatttaagcaaaattcgttagaattttttccaaaaaaaaaacttgctaggcgccgcaggagattttttagcatttaaaaaacagctaatttttgaaaatcgcagctggaaattttgacaatttttgtccaaaaaaaattacaatacgctaaggcagacatgaatttgaaaacaatttttgttcttttttttacacataaaaacgaatttttgcgccaaaacgcaaaaaatatcaatttaaattaaattttaggtaatttaaaaccgattttttttattgtccattttggaattaattttaaagagaatttcaattaacttaaaattttgcatttaaaaatattcctttttattgtctttttagggaatttttcgttagaaaattttcggtaaaaatttcttatccctgaaatgccattttctctatatgcccacaggttttgtattggccacccgaattggccggcttcaaggacataacgcacaacatcaccgggtgcgaaacaaatgccacattgaaccaatttgtggcacgttcgcgcattttcaagccgatgccgtcgccggatgagtactgcaaggacacatatttcccatcaaatactattgttgatccaacatttgatcagcaactgtgatcaaaatgataaagtgtagggctggcaaaattacttgaaaatccgggattttttaaattggattttgggaggtctaaaacccataaaaaccgtgtttttagcttgacaaaaatttaacaaaaatgtaattgataaaataaccccataatatttgcaaaaatggtgaaaaaaagctataatattttgaaaatgttgaagaaaaacgaaaaaaaattatatatggtatatgtttttgccactttttggtccaaattttgctattttatatccattatttaattgccagccctaaaatgataaaagttgcactcgcaaaatggactaaaaatgaatacaaagaacggagaaattgttggacgaaaaattgtataaa

SEQ ID NO: 57960 - DNA, 837 bp, Heterodera glycines
atgaagtcgctttacaacagtacaaatgggctcgtggtgatggccgattccttcgattcgactcttttcaaacagacattccaaaaagtgtttgaaaaggacgctgatggaaatttgaaaatgacttttaacgccactttagaggtgacgttattatttttattttataaaaatgattattcgggctacaggtcaaagttagcaatggactcaaagtcgaagggattctcggctgttgttcttcgatcaatgccaaaaattcgatggtttcagacactgaagttggcattggtggcacaacacaatggaaattttgctcccttacccctcggaatacaattgccgtggcgttcgaagtgtctggacaggttcgaaattatcagagaaaaacgagttactccgcataatgaaaagataaatttacaataaataaaaaaagtattacccctggcgggagtcgaacccgcgtcgccggtttaggagaccgacgccttagtccactaggccacaggggctccggttgagacaattttattttttcctaaatcaatcttttttttcttcctcttttagcatggcaccggcattcctcaaggtgcacgtgcgatgctgcaatttatcacccaataccaacattcggatggacatcggcgagtccgagtgaccaccacttgtcgttcatgggccgacatggaagcgaataaacagtcgattgggtatagctttgatcaggacgccggcactgtttttatggctcggttggcttcttggagagcggctaatgagaatgattcgccggacacattacgatggttggacagaagtctcattcgattg

SEQ ID NO: 57961 - DNA, 300 bp, Heterodera glycines
atgagatgggaggaaacggacgacgaggagggcgaggaaattgagacactcggcgacgatcggagcataatttttggtgatcagggtgagtgtgacgagcacccattacttttgttgtttgaataactaatgattgttttttcaataatcacttgtctatctaattatcagacacaatcactttcaatcgcttatttaatgctgcttaggctatttagggattgaaaaaacttaagtttgaaacccgattttggacattggcgcaaatgtcgggtaacagtgagcacaacggcaattaaa

SEQ ID NO: 57962 - DNA, 1238 bp, Heterodera glycines
atgggcgttagtcaaaaaaccttcaaatgaaaatattttttcatataactttgctcaaaagcaaccaaattttaaaatcatttgtttcattcgatagtcctaagtttttttttattatcctacaaattttcaaaaagtttcgttaagtttcaaaatagttagaccaaaaatgttcaaaacttgattgttcttttttgaaacttaatgaaattctatgaaattctgcaggataatagaaaacacttagggctatcgaaagatatcaagtattttaaaatttgattcattttgggcgaagtcatgaataattttttgtcaaaaatttccaatggtttttgatcagcaccgtcaaaaccgtcgacccaacagatcatctcacttgttgaaccatgctatagacatatgttctattcgtaaaaagcatgatcaacgccttttaattgatgctatgtcgttttataaaacccatcaaaaagagggcattatatgaaaaaaaaaaccatcaaatggaaaattttaacaaaaaattattacccataattttgctcaaaaacaattaaattgtttaattcttgatataatttgattgccctaaatgtgttttctaatagcctgaaaagtttcaaaaaattctccaattttgacaaaattatggccaaaaatacccagtcaaccagcaggttttcaaacatttttggccttaattttttcgaaacttcgccagatttttttaaactttgcaggctactagaattcaattagagctatcgattgataaacaaaatttaatttgttagttttaaaaaaattttgatcagaatttttgatggcaaaaatttcaattaaaaattttaaagccctatgtgttttcctaatagcctgcaaaatttgaaaaagttggctaagtttcaaaaaagttatgagaaaaatgttttgaaaacgtgactccctgtacacttttttttgccataactttgttcaaacttgacgaaatttttgaaattttcaggcaattagaaaacatttagggctaccaaatgatatcaatcaaaaaatttatcattcagaggcccctaagtggcaaagatatgggtaaaaatttatttttgaaattttataacgccaaccccctttttgatggattgcttacaaaaacggcataacaccatagcaacaacatctaacacaacaagcgcaaagcgtaaacaccacatgataaacaagtacaatgagagtga

SEQ ID NO: 57963 - DNA, 57 bp, Heterodera glycines
aattatcagaactattcggacgcttaccagaattttcagaactgttctggtctgtaa

SEQ ID NO: 57964 - DNA, 1060 bp, Heterodera glycines
tactcatttaattattatgggaccatcaccaaagaaatttacacgctggaacaatgacaacattagcagaaattcgtaaaacatattaggatccccaaaggaagaagaattgttgaccaaataaggaaacagtgtttctattgcaaaagatataacgcaaaaccatatcagcaaccaaaaatgccgcagttgccaaaatcaagagttcaaataacagagccttttcaaaacgttggcctggattacatgggtccacttcaagtaaaaagtttcactgaaaaatgttggataatccttttcacatgtttcaccacgcgtggaatacacctcgaattagtgacatcattatcagtacaacactttctcaatgcatttcgcagatttatttcaagaaaagggacacccaaaaatatttggagtgacaatgcatcacaactgaaacttgcctcaaaagtattacctgaagtcctaaaattaaaggaaatgcttaaagacgaatccattaaaaattattttgaaaaggaaaacataaaatggattttttcaatcgaattagctccttggcaaaacggagcaattgaacgtttaaatcaaaatgtaaaatcagcaatgaaaaaagcaattggaaggaaattgatagaatttgactcatttcaaacacttatttgtgaaattgaagccttagtaaattcacgaccaattacattcatttatgacgaaataaattcgtaccaaattcttagaccaatcgattttatactcccgcacaaaaatctatgcattcccccaattttggaagtaaatgaaactaatgacccaacatatttaccaaaaccaacttattatgaccaaacaatagagttatggaaaaagacaacaaaaattttggatgactattggaaaatttggatagaagaatatttaccaagcctgagagaaagatataaaacagaaaataaaaatccaaagaattgtgtaaaatcttttccagaaatcaatgaagttgtcataatccatgatgagaccccaagagcaatgtggaaaacaggaattattaaaa

SEQ ID NO: 57965 - DNA, 1908 bp, Heterodera glycines
atgaacgagtataaaccagtcattaaatttattaaaggcacaagctcacctgagtacaaaaacttaacatgctctccatcaccaatatgtgaattaattatatgtcgtttctgcatggaatacattcgaaacccacaatgcgttggtcaaatgcattgggctctgatactaatcatgataatgctcaccctttacgtcattactctttgtcttaaaattataagaatactataccgcttcatcgtttttatttttctatcagtctacaattgctgtagaaaaagaaaattaaagaaaataaaaataattaaacggaaacaatttatttatttaatcatgattagccttttactcaattcaccgactattttttcatgtgatgaagtcactaacatggtagcaggaacaaacgactgcgcaattgatcaaaacggaaagattgaatgtatttacgatcaaacaacccaaatttcaatcacaccggaacataaaacgtgtctgaaactcgacaatgaaaagacgcacactacgatggaaacaattgaattatctgttgaaagtctaacaataatttgtgcagagagatctgaatattttatgcgagattatcaattactgtcgagctcacaaaagcgatgttcaggtgcaggaaagtgcactggccaaatatgtcaaactttaacaatgaagggaaaaaatcctgaaatcggtgaccatgccaataatcaaccaggatattcctattgtgtgccttcctgtggtggttggcactgcaaatgctttcttgccaccgatggatgtttattttatagaacatataccgagccaatcaatagaaacatatatgaagtggtcaaatgtccgacttggacgattttagctacaatcaaaatttcgcttgatccaaaaaccatacatactgtggaattaaaacctggtgtcttaacacatgttaaagactcgaatttatctctgacactcacctcaacttcaattccaccaacgccactgtttggatcaaaatttataattgatcgttcaaacgcaaaagctgtaatagttgataatgagaatttacttaagaatagcctacggtgcgaaactaaagaaaaggcgacaaaattcagttgcacattcccaccagaagcttgtcaatgtcacggaggtgactccgttgttcactgcgaatgtgagaaaaacccactcactgaaatgttcacgagaaaagaaaatattttgcctctcgagacacatggaagccaagtattcttcgacactttattaagggcaaaaataaaattaacaacttcactacaagtgcaagtcacgctaaaaggtcacaaagtcaaagcaatttacgacaaaaataattgtactgtaaaaacaaaatcgttagaaggatgttactcatgcaccaatggagcagaatttaaatttacatgtacaactaactttggtaccgcattggcaaatgtaaaatgccatagtcagaattttcaaataccctgtgacacaaaagggaaccaacagcaaattcagctttcctttaatcaaccgagtgtaaaagaaaaatgtgaagttatatgtccagatggaaaaagtgaaataacaattgaggccactctgaattatgtgagccaacaagacaaaataattaacccatcgaataacaaaaaggaaacacccgtacttggaacttccctcgaacaattttccgatatatttaatttcatatatacattaatcaaaacaaatctttttaattttttaactatactttttactttgattgtgatgataacatttataatttgtatatgtccaatgatttacccacttctttttaaatactttcctttccgtcgcgggaatgtcgcgactacgcgaaataggattatctatatataa

SEQ ID NO: 57966 - DNA, 378 bp, Heterodera glycines
atggacaaaaatatattcagttcaataatgctctatgataatagcattcatgcagttaaaagccttaatttacttcattcacaagctgattctcgaattgattttcgttgccttggggagggcaatctgacgattggtacaaaaaaattctgtcaagaacacgaatgcactgacacacttggaacaaaattttgcttttacgagccacatgaaaaaacttatcttgtcaaatcagatagagaaattatcccgataaaagcatggggaagcatcgaaagaattttttatttggctaatgacacattaatggatgaactcaaacgaaaaaaagagaattcgatccgttcgaaaacgaacaaatatccgctgaatgtataa

SEQ ID NO: 57967 - DNA, 314 bp, Heterodera glycines
atggccggcaccgccgtgggctccgccgccactccgatgataaacggcgcggtgcgcggcgaacttttggtggaggaggaaatgcgacggagggaagaagagagaagagacgctcaaaaagcattggaaaagctgaagaaagaggcgcaaaaagcggcggagagaggcggcggggaaccgccgcagcaattcccaattccgtgggcattggtcattctgctgatgtggacgatgctcagcgcggcactcttttgcatttgggagaccgagtggggctacatgacctccatctacttcttctttatcgcgatcag

SEQ ID NO: 57968 - DNA, 411 bp, Heterodera glycines
  unsure (1)..(411): unsure at all n locations
ggaaataatcttaatagggcctagttaaactgtaaaaaaaattggggcgatttgaatgagaatagaaagagccaggttcgatgaagttttggtaaggcaaaaaaaatccaaacatttaaaaatctataaaaaatttaaaaatgagaattcatgcgagattttctggaaataagcttatttgggcctagttaaactgtaaaaaaaattggggtgatttgaatgaaaatagaaagagccaggttcgatgaagttttggtaaggcaaaaaaaatccaaacatttaaaaatctataaaaattttaaaaatgagaattcatgcgagattttctggaaataagcttaatagggcctagntaagctgtaaaaaaatttggagcgattgaatgagaatagaagagccagttcgatgaag

SEQ ID NO: 57969 - DNA, 211 bp, Heterodera glycines
atttgaaagagaatagaaagaaccaggttcgatgaagttttggtaagccaaaaaaaatccaaatatttaaaaatctataaaaaatttaaaaatgagaattcatgcgagattttctggaaataatcttaatagggcctagttaaactgtaaaaaaaattggggtgatttgaatgagaatagaaagagccaggttcgatgaagttttggtaag

SEQ ID NO: 57970 - DNA, 387 bp, Heterodera glycines
atggcaaatggcacttttgctcctcaacagacgccgtttgtcctcccgcactttgccaattcggacaacattagtgttcagacagttggcacagatcaaattcacttgggcacagcgacaacacggacaccgcgtcagattggagtccgactcggagtcgacaattatcctgaaaattcggggcaaagttagtttaatttttgaaaaataattaattcagttttatttagtactccatctgttgtgaggtcgagcaacagctcgattccgactcgaaattggcgcaactcagccgaaactgttgcatttcatagcgctggagaatgccagcgacagaagccgggcttaatgtcgttggttggggaatggacgaatgattttgtgtag

SEQ ID NO: 57971 - DNA, 196 bp, Heterodera glycines
gataattgtcgactccgagtcggactccaatctgacgcggtgtccgtgttgtcgctgtgcccaagtgaatttgatctgtgccaactgtctgaacactaatgttgtccgaattggcaaagtgcgggaggacaaacggcgtctgttgaggagcaaaagtgccatttgccatctcatccagaacgcactcgccgacgaa

SEQ ID NO: 57972 - DNA, 1783 bp, Heterodera glycines
tcgctgcttcaattttgacatttgtcagaattgtttttcagtcaaaggactgccaaaagtcacaaattgtctcacccgatgcaggaatattgcacaccggtgccaatgagcatttggccaaactgagcaaatgccaaccattcgttcctttagacaagcgcgggcgatgacatgcgtgacttcacagtgatcatcaaaaacaaagtgcgccagggcaaaagtcgaattggctatttgccggtcgaacaaataaacgaaggaccgccgctcgaatgcaacgaccaaacgccacagaacgcggaaacagaggcaatgcaccagcgaatgcagctgatagccgcgagattggacaagcggcaaaccgaagcggccgaggcttttccgaatgccattgtgccgtctgaagaaggtcggaaaatggcaaattgggggaagcaaatcggcaatgatgacatatcagggaaagtgaagaacggaaagggggacgaagtggcggcgcaagtcggccaatttggcactcaaaatgcgcaaatgccaaccgcaataggcccaaggaatttgccaaatggctcggcatttgcatcggaaagccaacgagccaatttcttggcgcaccaacacgaggcgaagtcgcccaatcagttgatttcgcaggtggagcaggcgagcaaggaggagctgggacagatgctgcagaagctacaatacgaacatgagtaaaaagaaaagcacaccaaataaataagaaaattatcattggaacagcgaattgaaaagggcaattgacgagcggaagatggcactgaaagcggcgggaatgccattcccttccggaacgaaatccacgccgaatttattctatcaacgaacaccaatgatgggacaaagcataaacggaacagcgtaagaagaagcatttggtcctaatcacttctcttgtaatgaagaatgccatcggatggccatcagtcactcgaaatgggcgaagaatcgcggggaaggacggcggcctcaggtggaggatcaaactgttcagcgactgatcggatcatataaaattggttttcagtgccgcgcagtttgccgcctcagaattcgtcgtcggcttttcccgtccagcaacaaactgtgcttccgccgcccatccaaaggcaaatccccgcctctattcatcgtcaacattccctcgcggacgcttcttccacggcttttgccgcctccgctgtgtttcctgatgggcctcgttcgcaagcggaccaatggcaggaaatggccgtgctggcggaggcacaccatttgagacaacaccaaaaaaggctggaagagagagggattgtgctggaagatcaaaacagacaattgcaaatgcaattggaaaggcttcagatgctaatggcaaaggtggacaaacccaaaaaaggaagggagagaatggaaattggatgattaagaagggaaacgccctccaaacactgccaacaacagaagagcaacagtctcacaatcagcccggctttatctcctcaaccgacgcggaagacacggacatggaaatgcttgcgctggcgatgccaatcagagagattaaagcgatcggaataagttcaggccaattgggcacggaaatccgtcgcaatcggatggacaggtgaaaaagtggggaaatgagagaatggaaaagcattgaatgttaaggctgagagagacggtggacgaattgaacagggccatggagaactttgtggttttcacgcaaaattgtgcccagaaggagcagcagcag

SEQ ID NO: 57973 - DNA, 513 bp, Heterodera glycines
atgctcaaattctgtccatcattcgaaaggccaatgcgcaacgttgtcaaatgcgcgtgatcagaaggaggtgatcaaaggatgactgacttttcattttccatccaaatttgcaaaaaaattccgttcgaatttcgttctatgactttggcatttacagaacaacgggagaaagccgtggcagcggcacaacgaccagcgacggaggcggacggaatggtttcgcgggcggagtcattcagccgaaacagtcgctgctgaaaggcagcacagcgcagcagcagaaaaggccaactcagccgccgatcatcagaaggaacgagcgcaaatcggcaacaacagatgaaaaagcgaatgccaaaggcactgaaaacggaaatgccatggcaatacgcagcttctccctccaccagcacgagacgggctcttccctctcgaatgcgttggactcgcgctgcaccaaaatggcggtggttacaatcgccgctttcgtggcattcaattggttggccg

SEQ ID NO: 57974 - DNA, 1077 bp, Heterodera glycines
ctcaacttggccctaagaaatcgctagaaaagggcaactgcagccaaatggccggttgacggaccaccgaacaacagacattcattttggtttttcagattgtgtaagcgtcaaaattctgaatgccggagcatggtcgaggagtcgagaccgttcgcacctgactttgccacgggaattggaggatttgatcccggaagttgaggacttctacaaaaagcagcactgcggacgaaagctgaattgggcccaccattggtccacggggacggtaattagcaaattaacattgaaacaaagttcacaaatgccgaaggtttcgttcaccagcaaagcgggaaggttcgacttggaagtgaccactcatcagatggccattttgttctgttggaacgacagacccaacgacaaactttcctttgcgacgattcgtctcgcgactgaattgtccgagggcgaattggcgagaagtcttttggtccgttctccgttttggctgcttttcactgctttcctttctttcagactttggtgaatttccccaaagtccgaatgcgactgatcctttgcgaaatcgcccaacaaccgttgatcccgaaaagcttcaacgactccactcttttttggcttaatcacgagttttgcctgatcaaagtaaaaaaaagtaacaattgacggacgatgcgattgatctgtgcattgtcagaatgagaagccgcaaagccggggaaagattaatctgatcggccgattgcaactgaaccaagacgcaggcattgagcaggagcacgaggagatactccaactgaggactttccgggttcaagaagcgatcgtcaagataatgaagacccgaaaaaggctgaaccaagtcagagacacgagcaaagggagggagggacaattggcacgactaatgacccaattaaggctcaattgcaaacggaattggtcgatgtgctcaggaatatgtttttgccctcccggaaactcatcaaggaacaaatcgagtggctgatcgagcagaaatttctgaagcgggacgacatggacatgaacactttcatttacgttgtt

SEQ ID NO: 57975 - DNA, 772 bp, Heterodera glycines
atgtttgttgttgtacttttctgcttgtggtaagtgtttgttgtttaacggtttggaggtacaaggagtagcagtgacagagttggccatcggttgggcttccgtcgtattgcgggaaatgacaaggaagatttgaataggaaaataaaataaaatttatttttatttaaaaattaaaaaaataacatgtattaagtggtttttgatgtatatttaattaagtaaatttaaaagaaaatccgacaatccttaattcagatttaaagtttcaaaaattttgtataatttctatttttttcgcaaattagtgctaacacaaaaaactcgaagcacatagatcaatttcggaaaattaaaaagaagaagaatcaatagctcaaaaaatgaatgaaagaaatttaaatatttttacaaaaaataaattatgaatttgtggctttttgaaatacgcggaaaacataatgccaaaaatgtatacaaacaatctttagtcactcattggcaatccgtccttttttgggccagtttgaccaactccttcgtggaggcactgcggctggccggctcattcatcccgtcatctccatgggtaaaatgtcaaattgttaattttaaaaataattatagcataaaaaaggaaaataaaactttggcaaattggagtgcaattgtaccaaatacggttctcagctgcttgctgctaattaatgagttttttcaggcgtccaggccgcgtgtcgttcagtctgccagtgccaagaaccgtcactga

SEQ ID NO: 57976 - DNA, 642 bp, Heterodera glycines
  unsure (1)..(642): unsure at all n locations
atgataattattgttttaatatgctatgtgattagtaatgacaaagaaaaggataaagcccatacgagcattggtaatagtaaagctcataaatctgatctatattctgataaatctaatcttcaacctgaggatgctcaaattaatcaacaacatcttaatgctaatcgagatagtaacaaattcgatcataatcataataatggaactaataccaattgtgatgctaatcaacatgaccaacatcatcatgctaatggagttgatggtgattcggatgataatcagcttgatcagctttatgcaaatcaccaactcgttcaattacatgcaaatgggaacaatgatcaccccgaaaatgacaatctttatgataacaataacagtgataagtcaaaaatagttgaccttgacgatgaatttcgggatcagttccctgagctcaccaaattgccagaattaaatggagtagagtttgttgggaatcatataaaatacaccaatcaaccaaaaagcgacacgcataaagacaaggaaaattataacagtanaagaacttatcttagagaatttaatatttattnagttttcgtaagatggacggacacagcagaatcatttgacattgaaaggaagaaatag

SEQ ID NO: 57977 - DNA, 1140 bp, Heterodera glycines
atgaaggcaactgaaatgttggagaaggcacaaatactctacaatgggctgatcaccggtaaaattgaccgtaattcggctactgtatgggtcgaggaaaatgcaatggttggcattttatgtagcattgaaatcgctgatttgaaaattgatgccaattttcgggaattgttaatgaatttgtgtcaacaattggtgcaaggaaatcatattgaagccaatactgtaacaaatttggacattacagtaacccaattgctggaaaatgttgacgttgaccatataattgatgaattgaagcagaaaatcagcaaaagcaaatttattggcgacaaaattaaagaaaatttaaataaacttttggcacacttcaatttggcgttacgcatctttttaagtagtaaacaggtaattaattaattatattttgtaatatttcaagatttcaaaaggtgcacattatattaataaacatatttctgttaggctaatacctggaagcccatttaaaaaagtcttaaacaggtaataagtgcacaaaaacaaaaaataacacgcgaaaatcgaaaccaaggctcacaaacagcgctaattattttagataaaatccttgtataaatgccaaaacccatgtgcgatgccaaaagagaaattgtagtctcccaaacagcgcaaattaaaatattcaaaaaatcacgaaaacgtattcggcataccaaaagctaaaattgacccccgaataagcgatagcgagactcacatacaggctaattaattaaaacaaaaacttaatcaaaatgccaaaacgttttgcgtcatatcaaaagtaaatttaaaatttagaaaactgtcaccgccgcctcaaatgccattgcttctggtcaacccatggctggcgaacgtcgtcaaaaacggatgaacaacaacaacgataacgggaacgattggtttcggcgacgcctctcgcttaccgtgctgaacgtgcacgaccgatcggcgggtggaagcgatgacgttagtgattggccggcttgggtgaaatgtgccttccgtgccttggtctgtgccgtgttacttttggccgtgatttacgtggaacgccgtcttggtgccgccactgtttcgacgagtgttgcgtaa

SEQ ID NO: 57978 - DNA, 249 bp, Heterodera glycines
atggagaaggcctgcaaaatttggagagattatatcgattttagtgcgctaggttagatgaaactttttaaaatataagcctaaactttttggcctgtttaaaaaggaattaaaaatttttaaaaattttattcatctcccttttgatagaaaaagcatcagagagccttatttaacttttaattaacatttggtgcgtttcagagcagtttctgataaaaatttatgaattaattttgcaaaaataaa

SEQ ID NO: 57979 - DNA, 399 bp, Heterodera glycines
cggtctctccataaatctgggggcatcgcttcgggggggcagccccgaaaacacaaataaatcgattttttcaagtgtccgtttggggtactcaaacaattatggggagcaaaaatccaacgcagaattaaagtacaggctatagggaagctattccggaaggattcggtctccccataaatctgggcgcatcggttcggggggactgccccgaaaacaaaaaaatcgattttttcaagtgtccgtttggggtactcaaacaattatggggagcaaaaatccaacgcagaattaaagtacaggctatagggaagctattcccgaaggattcggtctccccataaatctgggcgcatcggttcagggggactgccccgaaaacccaaaaaaaaatttttt

SEQ ID NO: 57980 - DNA, 759 bp, Heterodera glycines
atgcctgcaccaaacgacattccatctctgcgatcatttcttggtatggtaaaccattaccaacaatacgtcaaaaacatgcggttcattcgaaaaccgctcgacgatttgcttaaaaaggaaattgattggagttggagtgaaggatgcgaaaatgcattccgaaaaattaaggaaattttggcatccgatttgctgctaacgcattatgatccaaaaatggacatcattgttgcagcggacgcttccgaattgggcatcggagcggtcatttatcacaaatttcaggacggaaacatcaaagcaattgcccatgcttcaaaatcactcgcccctgcggaaaaaaattattcgcagattgaaaaagagggcttggcgttaatttttgccgtacaaaaattccataaaatgatttatggacggcatttcacattgcagactgaccataagccccttgtcagcatttttggcagcaaaaagggaattaggcagtgcagtgccaatcgtcttcttcgctggtctttaatcctgttggcctacgattttacgatcgaatacatcaacacaaaggattttggccaagccgatgcgctctcgcgcctaatcgccaaaggaaatgagaccgaagacgagaaaatcatcgccatgatcaatgccgaaacggattttgaaacaaattttggccaaacaatttcaaaattgccattaaaattttcggacctagtcgctgcttctgagcgcgatgaaaatattattcaa

SEQ ID NO: 57981 - DNA, 1429 bp, Heterodera glycines
atgactcattcaaagtttcctccaaatttacagctcatcgaggaactgaagcagaagaacaccgaaattgatgagctgcgcaaccaattggccgagtcggacggtgagaaatttctttaattttttcaaaaacaaaattagtgaaattttagaagtgatcagtggcctcgagagggaacgcgacttttactttgtgaaatttgccaaattcgaaaaagaaataataatttctgtcttccattttaaggccaaacttcgaaagattgaggtgctttgtcaggtcattgtgcacaaatgggggaaaatcgacgaaattttccctttgaaaaaaaattaaaatttgcttaaggacagtgaaaatgtcggcagtttggaggtcgcttcggtgctgcaaattctctacgagacggaagaaggtgaacatattttgagtttagagttgcgttgtttttagaatcattcacatttcgaattcttcaactcctcaatttttaatttttatttaatcaaatttacagcagaaaatttcaaatttgcggatcctgttgcaggattggaattcaaaaatttttgcaggaccggatccggccggattaatcctgcattttaaatttgcaggatcccgcgcaggattgcggattcttagaaattttgaaaaaattcgaatgaaatttccaaaaaaaaaatacctgacaagaaattgtaggggttggcgggatgcgttaaaagggcgactaggatttttcgaatgggtcagacggtaaaaagagatcggaaatcaaatctgttaatggtcaataaatttgactattttttgcttttcaaaaacgctttttttcagcgcaattttttcaaaaactaggaacaaaggggtccgtctatgcagataggcgccgtctgaaattttttttgaaaattttatcaattaattaactgattttgaccaaaaaatgaccaaatgtcacaccttttgactcaattctacaggattaatgtcgatccagtggtgtcgataggcgccgccgggaaatttttttgcaaattctaggtgaaatttgagatgaaaattgaatttattttgattgattttattataaatttattcaaaaattttggtattccgtcttttaaaattttcaaagaatgtatgcggatcttgccggatcccgcacaaaaatcaaatttgcgcatcctgttgcaggattgtaattcaaaattttttgccgggccggatccggccggattaatctgcaaatcctgaattttccaaaaaatgcaggattgcgaattcgaattaacatttatttgccgagaaatgactgactcaatccacgcattttttgcaggatttgcccctccgacggatgacggcacaaatggcaccagcaacgacgaaagcggagacattggcactcagctgaaggactga

SEQ ID NO: 57982 - DNA, 1661 bp, Heterodera glycines
atggcgctagtcacgaacattccagtgagttttttgaacggaagtttcccacccaaaaatcttgagggcgttgatgtgcgggaatttccgaatctcgacttgaaaaaaccggttctgctgttttcgtatcccgaaacatcccttagacagtgagcgggttctcaatttcgaccggctaggaaaatctaatatttgtgtatttttcagttaacctccgcaaatgttgagcccctgtcacgccatgaaatgttgacgtgggtcaacctcagtttggcggtaaaattgggtgaattcttttggcatcaatttttttttacattttcagtccgaatttgccaaactcgaacaggtgaccagacaattattactaagcatattcgtttccggattaattaaatgaatcccattgttttaaattcaccgattctttttcagttgcacaccggcgccggctattgccttttcacagataaaaacaatgaaaatttataataaattaaaaaaaaacaattgtcccttttcacagattctcttccccggcgcacttcaactgaagaaggtgaagttcaacagtcgtctcgaattggtaggccaaaattatattaatttgtacgggccattcacttctaaaatatgcttttcacccgttttacgggttgtgcgtctttttgttgttgttatttgccccattttcatgaattttgctggtgaatatttcatatctgtgcacgggggggggtcttagtcgatcataagggttcaggacagtcgatcgtaagaggggggtgaagggagaagaagaaaaaggagtgagagagaaaaaaatccacgaaaaagtcgatcgttaatgtgaaaaaagaaaatttacaaagaaaaattgccttatttttttaacaaacttcattaaaaattccaaatttttacgatcgactaattccgatttgtgaggaaaattcgtcgatagtaagaggagagggggtaaaaaaaatcccaaaattttgcctattttttaaagaattccaaaaaaaaaattcccttgcgtcgcctataaaaagccttaatttttcctaaaaaacttgacttaaagtcgcaaaaatagcaccgtttggtgaaaatttgtcaacaaatcgcactcaaattttcaacatttacccggcggcgcctatcggcaccgccgtcccccccccccggttcattaaaaggtatttggaaaaagcgcgccgcaaaaaaaggtgttttgagaagcaaaaaaaaaaaggtctcactagaaaagaatttgaaaaaatggtcgatcgcaatggaaatgggctctgaccaccccatggggggggggtcaagtcgatcgtaagacctcttggctgacccccccccccttgcacaggtatggaatgtttacctgaatttggaaagatttctttggttttctaaattattttaaaaattggggggaggctcggattttcgaaagaatttatatatttttttaaagttgtttcttaactgtgttgattcccttttcttttcgtaggattggctgtccaattggaaaattgtgcagacttcatggtatattcaaaaaaaaacatacctaacatttatttataccgaaaatttgtttcaggaaacaattgggcatcgaaaaagtgatacccgtggaaaag

SEQ ID NO: 57983 - DNA, 1032 bp, Heterodera glycines
  unsure (1)..(1032): unsure at all n locations
aagccgcccaaaatcattgagggttatttgttcggcgatctgatcggcgagggttcgtacagcaaagtgaaggaagtggtccatgtgcggtcactgatgaggcgagccgtcaaaatcatcaaggttttaccccctccttaaaaaggcactcgaaatggtgacaagaattgtaatttatcgacattttttctgatttatttcaaaataagttccccaaaagcaaaacattttccccgttttttcaaccaatttccgcttttatgacaccgtttccatcaaatttccaatgcttttgaggacaaacggttgcgcaaaattccgggcggtgagcaaaatgtgcaccgtgagattgacgtccttcgccggctgaaccaccgaaatgtggtgaaagtgttcgacattttcaggtcctttgacatttttcaattattttatttaacttctttttcaatgttttgtccttttcaggatagaggagaagcagaagttgtacattggtcagccatcagtcggacattttcaactgatttttcttcaaattttcagtgatggaattttgtgtttgcagcctccaacaaatgttggacaattgcactgagaaaatgctctcagaatttcaggtaaaagcaaaaataatttcttgatttaattttgtttttcaggcccacctttacttcactcaactgatcgatggttggtttttgggttttcagaaaattcaaaaactgtttttgtacataatgtgtttggtcttccgattctgacataaaaatgtgttttttacaaataaatggaggctgcaaaaatggcttctccacaaaatccatccaactttcacccttcgatttttaggtttggactttttgcacaccaaacggatcattcacaaggacataaagccggccaatttgctgctgagtctggacggcatactgaagatatgcgatctgtagggacaaatatttatgtgcaaaaaataataattaaagagcacactcaaattccnaaatttatatttagagttanatttga

SEQ ID NO: 57984 - DNA, 286 bp, Heterodera glycines
atgacaattaatgaagcattttctatttccaaggcacacgacgatgagaatttgcagccacccgttgctgcgttcagtccttttgccattgccgacacttcgcaagaattacattactcgcaaccggcgccgtcgtcagtcgattatttcttttggcaatcggacgaagcgtcgtcatcttctgtttgtgcagaagaaagacgacagatgtacgaacaatacggcggacaaaagcaaatgagacggaccgaaaatgacaaaaacacggaacaatgccaacggaacg

SEQ ID NO: 57985 - DNA, 408 bp, Heterodera glycines
atgccgggattttgcttgggacagccaaattcaatggatctggatccgggattccggagtaaaaaaattcagacggaggaacactgttctagacaatccctagtagtagtaatgctcgagaccgaaaatttcccgagactcgagaccgaggcccaaaaaaacacgagacccgtgacttgaatgtaagcggaatattcagttaagttgaacaaaaaaacattaaattttttcgaggcatggatgcttccaacgttggtttgtcaatgggccttgacgtcctttcaaggatcaaaaatgataagtttgggtgtaccaaaagatcaaattaagttgatcagaagtttttgaatatttttgaatttcaaaataatacagtaaccattgggctatcgaatcaaaaagaataaa

SEQ ID NO: 57986 - DNA, 114 bp, Heterodera glycines
aatctattccttttgtcttaggctacaaaataaaaaacgaaaaaacatgcaaaattatttgctgctgaacaatttaggctaaatctgaaggcttcctgcttagaggaacccaaa

SEQ ID NO: 57987 - DNA, 513 bp, Heterodera glycines
atggttggatagagctcgtcgagctgtacaaaaaagccgcttacaccgacctcctccgatcaaaccccggcgagttattcagccggcgctgaaatggcccaaaaaagtatgcaatttttagccagtttttcggaaaaactgacaagaccttggggtccggtcaagaaacaaaaaaaatccaaaaaagtccaacttaaaatcctatcgaggccgatttttcaattaggcctttaaaaaatttttgaatcccaaaaacggcaaaaaaaatttttaaaaagtgacttttctgggtcccaaattccaaaatcacttttatttctataacttttttcaaaaaagtgataaaaagctaaaataaaatttataaaatagagcaaaaaattacggattttttgagtatattatttttataaaatactttttcagaagggagttaggaatttttttctgaaaaatcgaatttttccagaaattctggaataacttttttatttttgcagatagaaattccaa

SEQ ID NO: 57988 - DNA, 1561 bp, Heterodera glycines
atgcgcggcttctcctttgacctgtcgcttgcctccgtgttcatctttctgctgtcctgtttgctcggcgtgctcggttccgtggtcggctttatgcacgcccagcagcagcaccagcggcgccatcgacggatggacaggcaaaaaaatgaaataaatataaaatgccatcaggaatgcctgccattattttcaaactcaaaaaccgaacaaaatgccggtttctaggccaaaatggcactcccgagagtgccatggggaggaggaggacaccaagatgggccaggccgggttttgtgacaatttatgtacttagtgatgaggttgttgggtacggatggatcagtcactttggcacgggactttttttggcacaaaaattttcaaaaaaaggtcgaaaagttttgaaaaataatatgttcatcaagaattttcagataattaagttctttttgtttttggttttttgaaaaacctacaaaattcaggaaataaatccttcatataaattctttacaaaatatttttaaagttttctctattagcctggaaaatttcatataaaattatcaaatttattatattttcatacattttttcccaaaattgaccaaatttttttaaattttctatgacttacattcccatctcacattatcattatcattaagtggattaattatatacccttattgatatccaacttttgtcctcgttcaattaatccaatttttttttgtgaatttcagcaaaaccttcccgaaaacggagctcagtacagtatcctcgtcagccaatgaccacaacagtaaccaccaccaccatcatcacaacgagcacagtcagctgagcatgaccaacatggccaaccaaccccatctgatccgcatccgtaacgaaggcgccggtgcctcggtgattcgggacaattccatcggcgtttgaattagcgcgctttttcccccatttttggcatatgatcttggcactttttttttgcattggcaactttcatctccatatgtttataccatttattctcttaaaattgtaaatatttctttatttattattcatacatatattcatgagtacatttatacaaatatatttttttggtcctgtcctcccacggcattttttaaaggtctaacaaaatgcaatttgttttggcacatagcaaacttggctgggtctgggatttttgaaaaagccatggccggcatggagccgggatcctagtcaagttttcgggatttgactggaaaatagattaagtctattttcggcggggatctgatccccgaaccccggggtaatcacaaaaactaatgggtttaaatcccggagatggaattttacctcttttttccgtttgcattttcatctttcatttaatttaatgcatttatttaaaaattctttttaaccaagatcaatttgtaaatgtattcaaattgataaattgaaaatcgctttaaattttttttaattttaagattacttacatttttttctattttttaaaaaacgttgccaaaatttctttaaatttttaaaa

SEQ ID NO: 57989 - DNA, 1468 bp, Heterodera glycines
atgggtttttttcctcccacaattaaggcagatgctgaacctcccgctgtcaagcgtaagtgtcagacaaaattgttcagaacgccaaaaagaaattttttttgcgcgctaattcaaaaaacaccgataaatgccttttttgtgttgtttcttttgatcagccataactcgcttcattccccactaaaccgaacaatttttgtatcattcgaaagcttttgaattatagaatttttccttagctaatgctaagcaatttaatgcatattcgaaaatttatgagtctctaaaacttttattacgttataactcaagtcctaaaccactgacttcaaccaaaattttaatatttctgcgccatttttttgagttgaaattcataaaatcgaagagctttttatttttttaaatgtccaaatgaataaaaaaggaaaattgtgcttaattgtaagaatttatttaagaaatatatattccaatgttgaaaaagaagcaaacaatgctttcacagaaagccaactataaatcttgccggataatgccaattttctcgatacaaatctcggagattgggtatcattcaaaaacacaattgaattcgggaaaatggccggcaggtgagacctcgagatctcacagctaattttggggcccatggctaaatcccaatgggttcgaaacctcatgaacgaatcccgggttaatcaacggtaaaagttttagaaaaataacataccacgcaattaatccccttttaatcaacaaaaagtccaatcgccaagcacaaatgcaaacaaactgatcagttgaagaacaaattttcagggagaaataatgtaaataaaatattataaaataattaaaatttatgaaaattataataaaattaaaatttgtcagttaaaataggaaaaatatcataaagaaagaaattgatgaaaaatttaaaatcaaaaaattgacaagaaaattggggggggggatttcgcacttttaaaagggattaactaaagtcaacaacaaagtgaaaacagggccaaatgttgacggacgaaagcgaccaccgattaaataaatatttatttcgtctatttttgttgattttgttggcccaactcacattttgtcaaccatgaaaatattaaattttaaaagtaataaattctaagcaataacaaaataatttttttaaataattaaaaatagcaaaaattatttttaaaaatttaagaaattttggcaacgtttttaaaaaatagaaaaaatgtaagtaatctttaaattaaaaaaatttaaagcaattttcaatttatcaatttgaatacatttacaaatttgatcttggtaaaaaagaatttttaaataaatgcattaaattaaatgaaagatatgaaaatgcaaacggaaaaaagaggtaaaatccatgccatcagaattgtttttcgaattatcaggaaagaaaaataaa

SEQ ID NO: 57990 - DNA, 2426 bp, Heterodera glycines
gctaccggtcttcgtccgtcgctgaactcggacctgacgctgaccgtcacattggaaaatgacgaatttgtgcagtccgattttgactttctcgtcctgcattttcccgacgaattcatgcgaggccatggtaacagttttccaatagatttttttgacgttttagtgattttttttttgatatttgggagtttttagtgggttgtccatattttttggctctattccaaattaatggaatttatgaccgtttaaaaaaaaatattttggccccaaaacggaggcgccgtggcggagggagtcgcacaccaaattctggtggcacaaatgccgttgttgaagaccatgccgtcgtggacatggcctcttctctgctgaccaaaatgaagatcaaagcggcgcgcgatcaaatgagccgtgccgtggcaaagtgagcgatggtgcaccggggacggtcccacgtgaaattatgaaaaaaaataatagacctaagttttttttatcatagtacgcccatcccatccaggcaaaactcacactgttttaacttctcgcaagcacaaccaaattcattttttccgcataattcgatttcctatttctctattagcatgcgtaatgtcaagaaaaaatatggaatcaatttcctgatgaatggaaaaattattttttttcgaatcgggcataactttttttttgaactttattcaaactttgaacttgaattttgtgtgctaatataaaaagtgcaacgaatttacttaaaataaaatgggcgaatttaaaaataagtcagaaatattttaaaattctcctccatatttaaattccattttttgctagcattttcaaattttcgcccgcctcgcttccatgcacttgcaaatccgtcactttggagcggttgccgttgttcatcggcggtcgctattgcaaatactcgcgcgcactgccccagtcgccatggattggcgccagcgatgaagaagcaccgccggcggcggtggtggcgacaaatgacggtggtccagcgactgttgaggggatagcgattccggcgactgttgcggatgagacagcgacgccggcgactgttgaggggatagcgattccggcgacttctgcggatgggacagcgactgttgaggggatacaattccggcgactgttgcggatgggatggagactaaggctgcgcctgccgtcaaaattggcactctgccgacggcagcacggcacattctgccgcacagttcggtgagacaccaaacgagctaaacaaattattgaaaaaacgcttttttctaaaagatttccgagaaaattgcgggcgcaatggtgcgacactttggcgccgatgggagtcgtttcattgcgtccggccgtgaggacattgacgtgcgaatgctgggcaatgggcgaccattcgctgtacaggtgtggtgggtgtgggtgtttttgtgtactgcttgaaaatgtagtcgttttttatggaataggcccagagatttcgtccaacaatagccaaaatacgcttttttggaggacattttaagtaaattttaataggatttgggtccgacacagtcgtcatgctgaggaagtttggattacattagaagttctgtcgcgaaaattcactgaaaattttgctttaaaataatccacccgttttcctcagttgctcaacgcgcgcaaaaccgcgtgcctgcgcacgcgtgcgtctgccgccacggcactgtccgcgctggccgcccaaatcaatgcgtcggaggagcgcacgcgggacatcagtgtgcacgcgctggcccatgtcagcgcaaagcaggcgcagcagctcaatgttggccaagaaggtgagcgttgggggggggggggggaggcgtaggaaactttaaaaaatttcatttaaacttaatggtttttcaaataataagttttaaaaaaaaaattcttttttaattttttttaaatttcttacaattaggaaggttttatagtaggtaaattattttttacaattttcataaaaaggaattaaaaacccaagtttttttcaaaaacaacaaaaaaaaaaataatttttttttaaatttttcttgtcaatagaaaagcgcaagacgtactccgcgctgtgctgcacacgcacaccgctggtggacgacgtgccgttgcgcacgctgcacgcgcacccattccctgtgcaggtggcacaacgcaccgtggtaaaaatgggggggagggacaaggcggcccaattagtcttagaattgaattaggtaattattttttaaaacatttgaaaaggtgcgcgtgctccggcggcgtccgctcatcgaccgcacgcgctttgtgtacacaatgcgtgcgttcgcgttggaccggcaccattttgtgctgcggctggagacccaggcgggcacata

SEQ ID NO: 57991 - DNA, 106 bp, Heterodera glycines
atgacgtatttcctctccgcccacggagggcgatggtttggcggtgccaatgccaacaaatccgcggatattgccctctgcccgatttgcacaatgccaaaagggg

SEQ ID NO: 57992 - DNA, 905 bp, Heterodera glycines
atgagtcactcgctaattaaggcaagttggacggatggaaagccggtggactacttgagcccgaccgagtggggcgcgtacaaacggccgttgacgatggacaacgcaggcggggccggctacaacaaagagaacgaaaactgcgttttccttggccaatggccgcgcaaagtgaaggaatatctgtcgctggagacggcgctggacaaaagcggcgtggatgtgctgtggatggacgtggtgtgcgagaagccggaggagtactgggcaccgcacggcgccgtgtgcaaaatgcgcgccaaggaggaggagaagggatacggtaaagacaagtacggtgcaaaggaggaagaggaggaggaggacgaagagcttcgcaagatcaacaagtacgtcaccatcggctcgggcaacttcatctacgccaacaagaacacgtacatggtgagcacagaatagaaatgttaaagagttcgaattcagaaatgacaagcatgtactgcttgaaaaggatgattgaagacaaagggtatttaatggcatgggattcgaaaaacatttgaattttgaataacgcaagaccaatttgaataaaatcccagcttattaatacaaatcaaattcagattctcctcctgaaagacttgtacggcaagcagttgaaggaggagagcaggaagaaggtgtgcgaattgtacaatggcgaatatgtgaaggtcaaggacgagccgaaggaggcacaaggtaattatttaattattacatatcattacctaattaataatttgaattaattgattggtttgatctttagaatacctggacaaagtgctggccaaggaaaaggagctgtattctgactccagcgaccacatgttctgccgcttcaccggcatcatcggcgc

SEQ ID NO: 57993 - DNA, 67 bp, Heterodera glycines
atgccattcaccgcggcagtggtgcaaaacgcgggggaatcggtcgaggatgtcgaatcggccaaat

SEQ ID NO: 57994 - DNA, 205 bp, Heterodera glycines
cgtgccgtctcttccctccctccctcttactctttgcccatgaactctctctcgcccttctcttcctccgtcccccatttgccaatgccattctcttcctcttcctctccctcttcggcttcttcttctttctcttcttcatccgctgcccctagcgactcccttctgctcgattatcttttctccggctacgacaagcgcatcc

SEQ ID NO: 57995 - DNA, 390 bp, Heterodera glycines
gggccaatgtttgagcggcaattggaggccaataacacaggcatttaaatttaaacaattgccaaggatggaatgaatgtttcattcgtttgagggtatttggtgggcgacaaactcacctgggtggacttttacgtggcgagttttgccgacttggcacttacatttggccgattcgacatcctcgaccgattcccccgcgttttgcaccactgccgcggtgaatggcatttttaattggggcaacaatttcattaatcgggcatagaaagtgccattgtttactttgtttattttctgtgcttttttagcggtgttttcacttccgcaactccaacagcacatcaagaacagaccggacactctcttctgatggttggcgtaacaaaa

SEQ ID NO: 57996 - DNA, 831 bp, Heterodera glycines
atgcgtcggatttttgccacacatggactccctgagcaaattgtctctgacaatggcccacagttcacgtcgggtgaatggcacgaatactgcaattcgcgaggcattgagcataccttgaccccttcgtaccatccgatgagtaatggagaagccgaaaggtttgttcaaactttcaaacacatgatgcagcgtcaaaaagacggaggagtgccatgtgatgaggctttgcaccaggttttgggactttacagagtgacacctcatccagcgacaaatgcatcgccagctgaaaagctattcggtagaaaattgcgtaccatgcttgatttggcacgtccaaccgatgagaacgccgatcagaataagccaaaactcagtccgacatacagagatcgaatcaaaagaaattttgatcggggaactcgagatcgaacttttgaaattggtcaaaaggtttttgtaaggaattaccgagacgggcctaaatggttccgtggtctgatcattacgaaaaacggggtaatttatctcgttcggactttgagaggcgtttggaagcggcacgcttatcagcttaagccggatctgacggtcgaagatcagccggacaacgaatccgtggacagcgactcggacgccgatgatcaacaacaggaggctgaagatgaacagaataatggcccagctcctcccgaccttcgacgatcacagcggaccaagaagaaaccgcagatcttcgacccaagcagcggatccttgataaggagggagggatgtgatgtattcatccccttgttcatttatcgattattttttgctgtcccttga

SEQ ID NO: 57997 - DNA, 416 bp, Heterodera glycines
atggaccagcagcaaaaaattaaaacaaaacgaaacaaagttaagttagaacatgacggcgcactctatgttttcgaccaattgagcacagatggacttaagaaattttggcgatgtgagtttcatggcccgtcagacaaatgcaagggtatgttaatatattattttgaattttgcaaatcttttaaaattcaggccgtttgcacacggatttaaataacgttgtgcagaagttggtcggagttcattcgtgcgacatgaatgctgcgcatgtggaatgtcagcgacttgtaactggactcaagcgacgtgctgctgagacgtgcgaggcacctgcgactattcgtgctcaagtgctgcaaaacacatgcacacctgtgctagcagcttttccgagcaaaagcgccacaaaaaaa

SEQ ID NO: 57998 - DNA, 190 bp, Heterodera glycines
tctgacgggccatgaaactcacatcgccaaaatttcttaagtccatctgtgctcaattggtcgaaaacatagagtgcgccgtcatgttctaacttaactttgtttcgttttgttttaattttttgctgctggtccatattatataatttaaatagccttaatttagtttataaactcattaaattataaa

SEQ ID NO: 57999 - DNA, 306 bp, Heterodera glycines
agcgcgaagcgcccgtataagcccaacaaaatttaaaaatggcgcgagcgtccgttcgaggccgcaaagcggcctaaaagtcccagataattttttaaaaattccaatttccataaccagagctaatctaggtagcgaagctcccaaagcgcgaagcgctttttcgcgaagcgcccgtctgaggcctcgaagctgccttaatagcccaacaaatttaagaaacgggcgcgaagcgcccgtataagcccaacaaaatttaaaaaacgggcgcaaagcgcccgttcgaggccgcgaagcggcctaaaa

SEQ ID NO: 58000 - DNA, 526 bp, Heterodera glycines
atgtctcgttttttgactcggtgtgtttacctgatcttaactcatataagccttaacttcaggttggaagcgcctggatatcattcaatcgttgattatccgatgtcattttcaacaatccatgacaaaatagataataatatgtacttgaatttggatcaattcaaatctgacatttgtctggtttctgacaacgcaatgctttacaataacacaggaagtgtttatttcttggcagcgcaaaaattgaaagttttggcaaaatattatttttccgagaagtatcttttgttcctcgtctattcgttgccctttggaaaagccttaactgaggagcaacttggaatacgcttacggaggaaagaggagcaaacgccgagacaactcaaagagaaaagtggcagggaaaggccgttgccttttctgaggcaaagcctggcctttataagggtgaaaataatgaaacttattttagtgacagtcaaaaaactgaggaaatactaaatacagctccagtcaaaataaa

SEQ ID NO: 58001 - DNA, 411 bp, Heterodera glycines
atgcacaagttcgaagttgctcagatcgccaatttgtgtcccgagacggcggaggaggcaaaagcactgatcccgaggtgccattatttcgactttttttcaatttttcacataattttttttgtttaaatttagcctcgaaaacaaaatggaggacgaagaattggacgaacttttgaaggaattgcacgcgaagaaaacattccaataattttttttgtataatttctctatcttatcattttccctatttttttgttgcgtaaaagtttttagtttttcaaacttttgcaatttttttaatcaaataattgaatcataagttagttgagttgccattttaggagagtttcccgcaattgaggagggacccaaactttcgttccttaaaaatttatgataagccttcga

SEQ ID NO: 58002 - DNA, 1096 bp, Heterodera glycines
atgttcacaggcgatgcctacggcatcataagcagactaatattttttagtttctcaaaagtaagaaaaaagtttaataaatttgttgaattaatctgtcagcaaatcaattcgggatgtcaaaaatatgtacaaaaagtggtcaatatattttgaagtttccagaaaaaatactaagctgagtaagggcaatttttcaaacccatattgcgccaaaagtctttctttcccaaatgggctaaatttagattcatgctctaaaatatacccacaaaaattattagaaactagcccgagagtttcttgtacaatttagtttttaaaattttcctgataaaaatttccattttggagtttctaatgggacggacgcccaaaagaactgtgacggaactgacccgtttcgtaagaattgacccccaaaaaattcagaaaaatattcttaaatcgactttaaaattttcaaaaaaaaacacccctaataaataaaaaattttctcagaaattcatctcgaaaatttatttattttttctgacaagaatttttgattttaaaagcataaaagaaaaataaataaaataaaaaaacggaggtgcgaaattttttgtagttttgcgaatttttagcatttaaaaaaaaaggtttaaaggcctgtcttacaattttatgattgacttggcgaatgtgaaaaaatgatattttagcaattttttctcacaaaagataaagaaatcactgtagtgatcacttatcacaaatttgataaatttctgaacacatttttacttctagcacttttaaaggtaatttgtagtgaattttgttctcttatagatgattcgaatgatttttcatggcaaaattttccaaattaacgtgtttttctgaatttttcaccacctaaaaacttcaatgtatttgggtgacattcattttatccgcctaaagtaaactattaatgggatgtgttcgtgatgctgtcagtttgattcatttgatcaaatgttagaaacgatctaagcctaatgggacttaatttctccggaaattcctgtaaaactcagcacagtctgtcaataagatttatttctgtaa

SEQ ID NO: 58003 - DNA, 732 bp, Heterodera glycines
atgatagtgcgaagtccgccattaactaggcagagagcacagaatgcgggaatcattcttaaccaggaagggcaggaaatctttagagaaaacagaaacaatacggaaaatggactgagacaaaatgaggacgggatgtcagagcattcaaatttttcagaaccaatgatgaacactgaacaaatccatgatgcattgttggacgtgggacaaagaaatgttcgtgatggtgaggaggacaaagaaaacgaaaacgaacaagtggacaatgcaaacggatttggaggtttgaatttcgaaaactttgaaaatttggaagagcgaacttttaatgttcacaacagaaatgtgagtctaacagattttgacgctgggcgtatgtttgaaaatgtgagattagaacgtcagcaaaatttactcccaatttcttttcctattgcgtcgaccccagtggaaaacagggtagcaaaccaaatgggtatggatcaagttcgagaaaattttagtgttattgctagattggaaaaggaattagtgataaacggagaaccgcaaattgtaacacgacagcaacgcaatcctacgtctgtagcacaaccacagagagttatccatcaaatgaatctgggacggcagaatgtacagcatcagaattaccaacatgagtatggtactccgagcgcaccgattcaacaatacgttcagtttgttgaacaaccaaatatgaacacg

SEQ ID NO: 58004 - DNA, 618 bp, Heterodera glycines
atgtgtcagaagtatttgccaactttccctttgttggactgtgccgacttcgacggcgccttcgatgggccgcccaccgaagtggcgaaattgtcggccgaattcgcccgtcagaatctcagcccctccgaacgcgccaaagcgattctccgactcttttccgatttttccaggcaaagcgcggcgcattcatttttatttgtttttcataatcatttcagcaaatggtaattttttgaatgttttttagtgatccaacggaccctagggacgaatttgaggaggaggaaaagccgacaatttgtcaccaattcgtttgtccaatgctttccccgggagaaattgtggacgacgacagcgaaaatgaaattgaatacattggaacagtgaaaagataaataaacgaagttctttccctttgcaactgttataattgtaattttacagtttataattaatttatttccttttgcgatttaaacactttcacttttcagtttgaaaaaagtgtaaaatcaaatgttcaaatgcctttttcgccatgccaatcatttgtttggtcttttatgttttattcgctctctccggccatcaattcccaaaattctgtaaattaaa

SEQ ID NO: 58005 - DNA, 1922 bp, Heterodera glycines
atgaacgaaaaacgacagaaaaaacgccgcaaacgacgaaggtttaggagaaaatcgcaacatttgtcaaaaagtgccgtcggacagccccaagcgatggaactgatcgacgaaattcactcatccgccgaagaagaagaaaaggaaaaggaaaaggaaaacggtgccgaagaagtcgtttttgtgtgcacttcaacaacatcagaaacggaggacgaagcggacgaaatagaacagcaaaggcagagacagcagcaggtgggagagaatcagagagggagcggagactgtggggaaatgagagagcaaagtgtgatcagagtaactgagagggcacaatcgattaaaaactaaagtaaaaaaaaattgaaaaattgaaaatcggtcgaaattttgtaaaaaatgcaagtagaaatttggcgatttgtgcttttatatactgtttaaatcgattatgtcaatgtacaaatggcctagtggctaattttcagtctgtcttattttttccaaccttacaaattaaatatatttttaatccttttttaaattgaaattaaaaattttctctggcggcacttgtcggcccttccttgcccagaatttttttgaaaaattagctcaaagtcacacccaaaattcaaatttatcatttttcgaacaattctgttaacaaatgccattagatttttgcctttcgcatctgctggccgatcacaaattgtgtttttaggtttgatattcaaaactccgagaatagaattgacccgaactcaatttgtactctcttcagcctattttggccttgagcgttacttgcggagtttcccctttatttgcgcctttcccccgaattggtcatcgtttattaatcgtttattaatccttttagtcccaaatcccccccccctctccctttattctcacttttttgcccattcgttcttttctttcccattaatttctctgtaatttttgtttattcattcggtcattcgtagggcgattttcgcagtttttatttgtgttttctttaagccaacttcgttttttgatgatttctaaaaacattccatgaaaattaaaaattaaatccctttttgtgtgaaaaagcgaccacaaatgactgattttatgtgcaatattttttttctctacatttttcttatattttataatttttttttcaattttttcgccatttatttaaaaaaatccgccaaaaaacttttccttgctatcatcttaagaaactttacgatcaagcgaaagagagacatatttgtcagtctttttttagtccatttcattctctttcctttcgtccgtttcatttcccttttttccccgcgagggcgggaaaaaatgcacattttgttggaaaaaaacaatgcaaatgttttatttattttttatttacaaacacaataatttatttcatcgtatttgcacagacaatggaactcgtcgacgaaattcattcaaccgcagaagaattaggaggagaagaagaagaagtgatttttatgtgcacttccaccgcatcagaagagaaggaagaaacgcagcagcagaaaaagaaagagcgaaaggtgaaaaaggaggaaaaggaagaggaaaaggaagagaagggggagaaaaaaaggagcaaagagagaggaaaatgggagagaaagagagtaaaaatggggggagagagcaaaaaatatgcaaattctatcttttatttttttatattttcaggaaattgcatctgctgattgtgagaatggcggcgctttggtaaaatgcgaagcagcggaagagcagccaaaggaacagcgaatgtgaggggaaaagagaggggggggggggaaagacaccccttggccaatggcattttattttccatgggtccaatggcagtggaaacgaaacaaaataaa

SEQ ID NO: 58006 - DNA, 521 bp, Heterodera glycines
atgcctttgattctttgccaaatgcttttatttgcgccttgggcgaatttcagccgacattccgaaaaacatgggcccttaacaaaaagagaaaaaggttggaaaacggcggagtaaaaactgggctcccagataaaaatttcaaaattaatatttgaatttatttaaaaataaaaaaattaataaaatttggttttgttttttggtggaaataatattttgtaaaattgtgaacagataacatcggaattgacgttgatttaggctaacaaattcagtgtttcaatggcattttattttataccaaaatcaaagaaataaacacttaatttttagaaaaagtcacacatagaaaaacaacattcgccataaatttggaaatttgggttttttaaaacagatttttgagaacttttcaaaaaggtacaaaatcagcaaattagcatttaaaaaacagcattgcgtccttaaaaacaacaaaatactgataaatcagcacatctcatctctgggcttcctaa

SEQ ID NO: 58007 - DNA, 321 bp, Heterodera glycines
atgtgtcgacatcaaagaccaaatcgaagaagtgacaatcgaaggacagagaagggaagtggcgcttttggaggtgcggcggggatggaaaaagaagcgaatgacaaagggaaaatggggaaaaagaaaaaggggaaaaagaaaaaggggaaaaagaaaaaggggaaaaagaaaaaggggaaaaagaaaaaggggaaaaagaaaaaggggaaaaagaaaaaggggaaaaagaaaaaggggaaaaagaaaaaggggaaaaagaaaaaggggaaaaagaaaaagggacaaatcaaaaacaaaatgggaaggattgatcactga

SEQ ID NO: 58008 - DNA, 2637 bp, Heterodera glycines
atgttccgttgtgctcgtgtccagggattggacataatggagggccttttgctgtttgggaaggaccatttttacgtggtggacggattcactttgctgaagacgcgcgaaatccgcgacttggactttttgccagaacagtgagtcattttgtcctctcacctaccgtatgtatgttcttccccgttctttgcccctaccgtatcccccacctcccccaaaggttccacgacccaatcattccgtacattgcaatgggctgtcgctcgcggcccctcagcacaaaagtgaaccgccagtgcaacaaattcgcatacgacgacatcaaagaggtgcacaaacggcgctatttgctgcagcaaattgcactcgaagtgttcagcacggacgggcgcaactttttgttggcatttccgcgcaaagtgcgcgaccacgtttttcaggtggagggaggaaatggaatttgtggggggcgaggggccaattgagtctcacatttattttaggccatttatggggggcgagtggaaggaggggccaatttagtaccaaccccactattgtaagactaaatctactccttcaacataaaaacttcttccgcccgcacatttagaagttggtttcgatggcgaagaacgcgtccagcgacgtggcccagttcatgaacgaacagaagaagctgcggcccaccgagacgagttcgtctctgatcgcccaacttctgacgggacagcaacagtcaatcacccacaaatggcagcgaggagaaatctccaacttccattatctgatgtatctgaacactttggccggccgttcctacaacgacttgagccaatacccggtggcattttggccctgttctaattgggctattaagcaactaattagcgctgttcaggtgtttccctgggtgttggccgactacgactcggaccgaattgacctaaccaacccttccattttccgcgattttagcaagccgatgggtaagcgaatagcaataaataaccattaaatttaattggaattggttttcaggtgcccaaaaccctgatcggcttgcccaattccttaaacggttccgcgagtgggacgacccgggaggaacgccgccgtacatgtacggtacccactacagtagtgcgatgattgtactctcttatttggttcgattggagccgttcactcaacagttccttaaactccaggttctctctgtcccatccaaccctttccttctatctccatttttaattacccccccccccccccctaagtgctctaattgttctccccccccccagggcggtcacttcgatttggccgacagaatgttccattccgtgcgggacgctttttggagtgcggccagaaacaacatggcggacgtgaaggagctgatccccgagttctttttcctgcccgaaatgtttctcaacgaaaatgccttcgatttgggcatcaaacaaaacggcactcggctggacgacgttctgttgccggcgtgggctcatggggacgcgtacgaatttgtacgactccatcggcaggcgttggagtgcgacttcgtgtcggaacatttgcacgaatggatcgatttgatattcggctacaaacagacgggtgaatactgaatcggactgatcagccgaagtgatcactgatcattccgttaatgaaaaaggatggtcgtgatcattggttgatcagcaaaagaacagaatcaaaatgagaaaacatttttaagtgatcggactgtagccaattaaaaaaggggcaattaaacgagagaattaaccaaatttttgtcttttcttgtgcaggtgatgccgcacgggaggccaacaacgtgttccaccacctgttctatgagacgagcattgacattgagaccattgaggacccactgacgcgcaacgccacgctcggcttcattaataattttggccaaatccccgcccaactcttcaaaaaaccgcatccccagcgaaagattttgcgtatatatattcacatattgcattttaagtgctatgctttcccatttttaggtgcttctccgcctggcgttcccccgccggtgtcccccgtccccggtttgactgttccccgcctcttttaccattgccccgaggcgttgcgcgtttccgcccgtccggtgaaagaattgcggacggcggtaggtgaaattgtggtcggcgagcggggcaaccaagcggtggtgttggagcagaataaagtgttggtgccgccctgctatttccttgcctggggcttttacgaccgttccgtccgtttcggcgccgtgggcaatgaaaaggtgggcgaactccccaatcattcattctctgtccattgcaattgttccgttcagtcgtcctgcgttttggagaccaacgacgtctacgagatcacctgcatggcgacgacggacggtcgccaaatgttcgccggactgtccaccggcaattctttcgttttgcgcccttttcaaaatgccaccgtattccctccttaggcaccgttttcgtctggtccctctcgctttcccctgctccctcctccgtctccgcttctctgtccgtctccaaatcgttgccctccgcgcgtctcgtgcccaagcgtgcgctt

SEQ ID NO: 58009 - DNA, 2616 bp, Heterodera glycines
agatcggttgccgatgcgattgaacgtgcccaattttgtcccgaagtcattgtgtctctgttggccactattcgtgccacaattcacaggcaatttgaagcggaagagagcggtgaacaaaatgccaacgattggagcacaaattatcccctgagggtgtgtaaagcaaaatttaattttatcaataaacaaataattcagcttctccaactgttcaattttctctaccaaaattcctctcaattctttgccatttgtcacaccgaggcaattaattaattaccctaatgactattttaatatttaattgactaattaatgttaagtctttcgttgtcgttttattctcttcgctccttcccttgccaaattcggcacaaacgccaaattcggagagaacatttgctgaggaatatgctgcttcaacaacagctgcaggaggaggcaaacgcaaaaaaaactaaaaaaattaaataattatttaaaataaaattaaaattattttagacggcaaaaatcgctgtgagaaacagagtttggagctgctgacaaatattctgctgaatgacctttgtttggccaacgaagcgcggacggagcctttgttcgacgcactgatcgaggcaaattccattttcaaaaaacaccatttcgacttttttctcatttacttttgagtgcctttgtttgttttttaccgtatgccattctttaataacttgctacagtatgcccttcccctacagtacatggactgcaatggacccacccacaacaggcagaaccttctgttcaccgagctggtcaacgcctgtctcgaccatttcatggccagcaaaatgttctttctgaactcggcctcggctccgctggtcgttcccctgggggcaaaggcccaactgaaccaatcgtccgagtgcacttccgccagcgtcgtccgctttctgtcgcgtgtcattgacaccgtttggaattgtctgtacaaagggaacccaattcgcattttcaagtgttttctgaaggcactgtttatcacttttgtgataacactttgattattgtccaatgattttcagcttttggccgaggcccacgcctcaaacaaagcggcggctcagctccaatgcaccgacgcgcacatcgcctcactcttccgcctcattttgtaccttttgtcgcggcccattgacaacgtggacacgcaaatgtgtgtgttggacactttggccgaaattgtcaggtgatcgactagcggaaggcaaatgccgagtttggcataaatgttttcccgaaatgccattgtcagaaatcagcagctgtttctgacccccaagtccaacgtggacccgctgttttacgctgcgctcgtccatttggtgtttatgctctccgaccggcctcagttcgacttgcaggaccggcggaatcgcgaattggagcgtggcactgcgcaggtcggccaaaagactcaaaattggcaaaatcattggccaataggtgtccatttgtgcacaaagtgtttggggcattctttggcaacacaaaaaggcagtgctggaggagtggctgaagaagggcaacttggacttggacctgttcacgtcacgcgccaaatgcggcgaggcggcaaaccgcgcgtggcttcaattcgtcgactcacaaacagtcggcgccttttcgcaaagtcaactccaacaagcaggcacttgaacatacatacttttatttgtccaacaaaatgccaaataactgccaatttgaatcggtttgccttcctcgccaggattcgtccgctgtgcgtctgctgaacgcacagaaaatgttgccgacacaactgcagacgaagctgagccgagttgcgcggagtggcctccgcaagttgcgcaagtcaactgccatgtcgagttttgccaacacttcggcggacgacgtcgagtccaagcagggactggacgcactggcgcactttgacgacgcacggcttagggtagagccggagacattttacatgtggatcagggtactgtagtggatcgattgtctgagtgctacggtattcttgtgactgtttttaggtccatatcagtttggtgcgagaattgatcagaaatcgttgccagcgttatcacgaatggcattcgcatgtgcggaagtggtccatccaagaatggcacaacgcggagacggagctgatcagagagcgcggactttggggtccattcttggcacttgaacttcctctttttaaatttcaatttaggcccgaaccacggctccctcctcgacaaatttcagttggacatcacagaggggccgtgccggattcggcggaaacttgtgccaaaccccgacttctatcgccattatccctatcgtccgtatttggaagggcccaacgcgaaaccattgcgtgccaaagtggcaatttcacgcgatgcaaaagcctactgggaacggatgagcaaaacgagagcggaaacgatggacgaacgcattgtagactttaaggcaggattaatgccaagtccgggaggggcgatcactgatcagagcgtggaaggaatgggcagtgatcagtcacaaaacggaagtgatcagcaaccgatcgaatctgtt

SEQ ID NO: 58010 - DNA, 537 bp, Heterodera glycines
atgagagcagtgccaaaggtgtgacgcaacagcgtgcgtcaattggtattgattttctaacagacacagaaaaaaaataatgagagagactgagagataacaaaagttatcggtgcatatcgattcagtgccgacgattcagtgccgacgattcagtgacgacgattcagtgtgaagacgattcagtgccgacgattcagtgccgacgattcagtgtacgttgaaaagccgacaattcagtgccagaaaatttggcaaaaaattttcaaaaaaacaactatgtagatgccaacggagaccggctaatttttgaccataaccgagcaccaggaacttgccagggacctagataatgccggataccgtagacctcagatcttttttccagaaccggaaccagaaaccgcaagaaattccggagaaccgctatctcatccagaaaaattttaaaaattcaaaaaaattaaaaatttaaaaaaaaattcaaatttaatttatatcaagtgaaaataatacaaaattatttggttttttata

SEQ ID NO: 58011 - DNA, 399 bp, Heterodera glycines
atgacaaaatcgataatgactcatgctggcggaggcttctcatcgtcattcattttttacaaagcgttaacgaaaatgtctccaaatgaaaattctgaccgtccctatcaacaaaccgacaatgttcaacctgttcaactgccacagcaacaaccagatgaagacaccgagttgagggcacaaattgaagacgctgaggaggatttgctcttgaactggtggcgtaaagacccgacaatggtaaacttatttcaatttagcatttttgatttcttcaaatttcagattcgttttctctttggacaccgtcgagcacctgccatcgaagctgcgcttcttcaacgcgccgaacgtgaggccgagattttgcgccaatatgccgagaatcaacaacaataa

SEQ ID NO: 58012 - DNA, 490 bp, Heterodera glycines
atgtttcatcctaatttcacacattctgtttcgaactcatcaacggtaaatttttagaatttaaacttttgagttttgttttacatctgattttatcttgccaaaacacctcaagctttcttctaattaatgtttgggttttaattatatttcttctagtgtttagctcattcccatgcaataatgtatataaacattgcttgctttctgacagcattttcatttttcgataaaaaaatttcgtttaaattattttttttgagtgcgtttttttaagaaattgtattttcaattcaaatttaaaattgatatcttgctaattttcaggatatgccttttgaaaattaaaaggtagattattaaggctgtattcttgggcattggattgattcatttatattttttgaaaaatataaaattataacgaattatcatatcacatcatgttttaaatcaaattcattcatttcatgcgatgactggatttgaa

SEQ ID NO: 58013 - DNA, 78 bp, Heterodera glycines
atgaatggtggtggagactgggcgataaacggagattgggggattaatggagattggggaataattagagaaaatacg

SEQ ID NO: 58014 - DNA, 76 bp, Heterodera glycines
atgtcgctagcctcattattaatcgtctcattctttcaactttacttttctcttaccaacaaatcattgttctccg

SEQ ID NO: 58015 - DNA, 500 bp, Heterodera glycines
agattagaaattcgaattgctcaaattcgcgacggagaaggaacgcttgcaattaacaatagacgaaatgatccatgaaagttgtgttaggccgtgtcattgtcatccatttgttctgacgcaaagcttggctgattctgttgtagatcaccagacgaacagctggttttccttttaatgacatttcgttgtggttccgtttcattgttcgcgtgtcgcgccatttcactcaaacactgtgccaatgtacgagctgattccatgtgtgagagtgacagccaactaaagaaagagtaaaaaatgaaataattttgttagaattgcaattattttcaaaaaacaatacacaaatcaaataaatgaaaattagctctgtttaactcattgtcagctattgttttcctggtccatttatgccttttccctttgattggccatgtgtttttgttcacctaataaagctctcatgcgtgcggagtttgcgacgtccggcgacggaa

SEQ ID NO: 58016 - DNA, 309 bp, Heterodera glycines
atgaaccgacggtaaatttgaaatctcaaatttttaatatattaattttcccgaattttcagttggatttgtacggatatttggatggatatttttcctcattttgactgtcctcaactcggcctcaaattggcacttttttcgcctcgtttcgacattttagtggacaaacatttcgatgtcaaaaacgaactgacattgtggagaacaatcacaatttgcaaggacatcggaatgccgaaaccgaaattttttgttcacggcaaatctgagggatttccattgcccgaccgtccgctgcccttatga

SEQ ID NO: 58017 - DNA, 1535 bp, Heterodera glycines
atgatctctaacccaattgagcgcgttatttatgggtacggagagttgaacactaatattttgaatttgcaacgcactggtaaaattggctggcaatgtgccagtcactgtacacagtggcgtccatctgcggaacaggtacgcgattgcgccaaaaaacaaaacctcttgttaatattggatgatttggtggtggggatgagtcagcagtatttggacgcgctcttcacacgcggctcacacaattggggagtgagcgtaattttggtgacccacacctgtttaacaaagagttgcgcgtctctcgcacaaactcacattatttggtgttaatgagaaatccagcggacgcccttcagattcgcacaatagccacacacctcttcccgtcaaggaccgcctactttatggaagcctatcgtgacgcatgcgtaaaaaattttggctaccttttggttgacatgcacccggaaagcccggaaacaatccgactgagaactcatatatatatgatcaaaataaaattgcttacctaccaaaatgagagtatcacagctaatttcgaaaaatactccatttttgcagaacatttgtaatgtcaagaaggcaaaaattgttattcgagaggcgtccgatgaccaaatattatgcctggtcgaaatttgtctaaacattttaaagggccgagttccattggatcctcggcatttgaaaatgctcaaaaagcatgcacaggtgcttcgtcatctcacgcgcacacgctgctctcgatctgcaaagaaagttttgctacagcatggatacggtctatcagccattgtaggtctcattgcgcaattgccctccacttattgcggatgtcattgaaaaatataaatagtttttaaaaaaagttaaaaccaagaaaaatgcagcatacaaagcgttatctgctcgtccccgaagagatctatcaaagtttggctgcaccgccaccatctgacggaacaccaattgggttggtccgtaccagaattaaacaaataaaaaatgatgaccgtataaatgaagaggaaagggcagtcaaatatgagcaggaaattaagcgtctcaacaaacttacaagagacgaggctgaacgtcccgtaggtgtaaaattagaaaatttgagtgatgtggttgacgccgtgctaaaacctgtcaacataaaaagaccgattgttgtggctacgcgtcgccatctcaaggttgggcgtgcacgaaaagaaactgttgcagaactcgaagatgatgacgacgatcaagccccacggtcgtcgaactcaaataaacgacaacccacacaaacggaaatcttaaatttaatttataaaaatgcccaatctctgggtgtatctgcggaaggacaggtcttgagagcgggtgggcggccatttataaccagcattgtagatgatattgttagtcatctgctcaacaaagacaagcgtagccaaaacaaagagccaactgcattcaagaatttgttgaaagggcaaggcaaaatccactcttga

SEQ ID NO: 58018 - DNA, 1071 bp, Heterodera glycines
atgacaaaagtcaacaaattgtctgtggatggcactgggaatggtgccaatgtgcagcagtgcggtgctaccagtggcggtggttgtggcacggaaaatggttatgggctaacagtaagggaataatgcaaacaatgctaagcttgaaataaaattttagaaaatcggattttttagtcaacaaatttaaaactttttgtttattgctattttttatgtatatttaaacttgtgtaaaaacatttattaaattttcgaataatttttcgtatacttttctatgattttctgaggtttttctattaaaatattatagctgcgtaaaataattatttttttaactttaaaacaaattccatgttattttttatttcattatttattaatgagaagggcaattgctgaccctctaaaaccattttttccagaaaatttttttagctctttctgaaactgtttgaatttttggtttatttttttcattttccatcaaaaaaatccaatcgttaaatatgtaattctgccaaaataaatttatctttttttccttctttaaacaggaattcaacagcaacgccaaatacatcgcgcaccagcaccaaaatgggggtgccgcaggcattggccaaatgttgctgaaccaatcgcaggaattccaccacacgccgttcacgttgcaaatgcagaatttggctagctttcatcactgaatttgaagggaatgaagccgaacattggacaagaggaggaggaggcgttaatttaaggaaaatgataaaaaaattaataattattcttgccatttaaatttaccatttttggattcaatcagtgctttgtcttattatttttttttaaatctttaaaaatagcttccccatttgtccttattttataatatctaaatatccataaataatacaaaatatggacttgtaaatttatgaaactaacttgtatttatttatatttttactctcaaaagtgaggaacacaatgccttttatttagcgattttaaatctgatttcgttgagtgttaccactaaaataactaatccgagccaataaa

SEQ ID NO: 58019 - DNA, 380 bp, Heterodera glycines
atgaatgcggtggcaacagttgccgaagacgaacacacaacagaaaaaggtgggccaactgagaaattaaattgaattataacaaaaaaaatttttaattgaaaattcaaattttgaaatttcataaatatatttataaaaaaaattaatattttattgcttttaatttttaattgtttaaaagggaaaaaatatgaaaataaaataaaaaatattctttttttaggaaaaaagaaaaattgaattattttgataggtatattttttaatatttattcagaaaaattgagtatgcaattaaaaaatattctttggtaaatagaaaggtattaaaaatttgttttttaaatattgttttattaattttttattttcgtata

SEQ ID NO: 58020 - DNA, 76 bp, Heterodera glycines; identical to SEQ ID NO: 53709

SEQ ID NO: 58021 - DNA, 872 bp, Heterodera glycines
actctgatcactttttgagtaagtccagccgggacagttttctgttcaaagcaatttgcattaaattgtaattgtaaatatttgaataaagattaagaaagagtcttagtcttttctctatctgtaaaagggacgctcaggagccctttcatacagatcattaagccattgacccacgttgggtcaaagaaaaggctttcaaaaggaaaggagaagcattttcctcctttcaaattgtcccttcagtaaaggagaggaatttcctccctttcatttgtccctttggactctgtgagtttctgtcttttggacagaaattcgctttgcttaaaagactcccccttctgccgggagagtctgcttccccttctgccgggaagtgcaaatttttgtggccttttgcccataaaattggagccccttaggggtcggcttccagtcgtaagcctaccctccaaccaaaccaatccaaagcgcggcctgagcgcttggatcaaacacacaacccaaaggggtttattgtgttttcatcaagcgtaagagcaatgagtgagctcttgcgcatctccattgcaccaatggtggtgcgtctcaagatgtacattgagacagcccaagaaaacttgggcaaagagctggcggaccaaagtgtccgtgcagatctaatcgcagagagacaaaatctatgcaaaacaatttctcttttggagaaatacaacggaaaatgggaagccattttcctgagagtgaagggacaagctcttcaagatgaagagcaaaattacagagactttaagcctgaagggaaggctttcatgcattgggttgaccaagccgcgagggcatgggcgacactattgaaggggctttag

SEQ ID NO: 58022 - DNA, 390 bp, Heterodera glycines
tttaaattattaattcttttcttgttttaatcaaaaggattaaccctcaaattaacaacaaaaaacttttgtcattatattgacaatcagaaaaagttttttccgaatcaaagattttttaaatatgtcctaattattgtactaatagttcagtaaaaattttaattattttgtttttataatgttatttttgcattttaaaaattaaatttaactttgaaattaagttgaaataaactataaattgataatgcatttaaattatataattgagtatgtaataatatttacttttcattctttaaattatttgttttcttaagagaattataacatctgcatatttcaaaacaattattattgtttatttatctcttgcatgaattgttg

SEQ ID NO: 58023 - DNA, 111 bp, Heterodera glycines
gactttttcctgcacattgtctccgattccttcgtggacccgcgcactccaagttggcaaaaggaagttctcaccgttggcattgagtcaaaaaagaccatttctgattga

SEQ ID NO: 58024 - DNA, 970 bp, Heterodera glycines
atgatcagtgatcacttacggtcgtgtgccgtcggcagcaaaatggtgagcacacttcttggcactgctgtggcgggagagcgcgacgacggcatcggcacgcgacggaccccaaatgcgtgcggaaaacgcgcgggctgtgagcttggcgcggccaccagcacatgcacaatggccgtgtcaatgcggtcgatgctgttgttgacgcgatggcgaagcaaaacctgaaaaaaattaaataatttatataaaatggatttaattaagcataaatttcgaattttattttaaaaaatatatgatttatattaattaatatattataatgttaatttatcaaataatttcataatttcaattcattttaaaacaaatttaattgaggtaaatttaaaaaaatcaaattaaaaataatttaaaatacgaatattttgttggcatattttcaatttatataataattgcttacatattagaccaaaataattcacttttaactgttattttaaaataaattaaaattgtctttagaatttaattttattttagcttttatgtaaattttaatttaatcaaaatatttatttaaataaaaaaatatataataaaaattgaaatttacgaatattttgttggcatattttcaaaatttttataaattaataatcattaattatataacatttaaattaatgaacttaaatacaattgaaaataaattagcatttttaaattaaattaatttatttgcaaaaaatttttgattttgattaaatgaattaaatgtgaataatatattttaaaaatatagttactattagagatcggatacggaccggatccgtatacgtacttttacggatccgtagtccgtaatacgtaattttttcggccgatacgtatttttacgtactacggattttccgtttttttgttatcttgaattttgttgcttataattgataataaa

SEQ ID NO: 58025 - DNA, 961 bp, Heterodera glycines
atgccaatgttcgcggagcaagcacataatgccaagatgttgttggagtttggcattggcattgggctaagcaaagtgagtcatcggaattagacattaatgccggaataaatcataaccattgcagtctcttagttttcgattgacgcgcaaacggtgtttgacggactgagtgaggtcagtgccgcgaatgtccgtccttcggtcgttcgattggcttctcctcctcccttttgcttcatcttttcccccctttttcagcttttacataaaccaaaatatgcccagagggcgcttaaacttcgtcatattttcttggaccgtccaatgaatgctttggatgaagcgaattttcgcctctcgcagattatcagacgaagcgacggatcgaaagggaaaggcgaaaaacggagagaattcgttgggagaaaagggacagagaaaggggcgatggaaagctttcatttggattggactttcattctgttggcagtgatcactttcttattccttgacaaatgatcagctgaattcaaagtgcgaagaacacatttaaagggacggagcaattcgaattgaaaattgggaatcagttcaatgcccacacattggcacattgacaccagtgccattcgagacggactcggaaatatctttcgggttttttcaatcttcccgctcataaaaaacatctctcgaactttttcctttttttctgatggaatattcaaaataactagagaccgacttttgagacatatgcctttttttctgcgcactagtttcgatatagtaagcataaataacgcattttccacttggtttgaggcttctccgttgacttttattatgcctttttttgcctttttcgggattttcgtgccttaactgccttttttgacattttgccgttttggtgcctttttggggtttttttctgaaaaattccattaaaaatgca

SEQ ID NO: 58026 - DNA, 245 bp, Heterodera glycines
  unsure (1)..(245): unsure at all n locations
aatttcacccannatttctttggcatccccacaaagtgtccaagccacgaaatgtccaaaagagtaaaaacccacgaaatgtccaaaatttttcaaaatttataaaaacaaaatgagtctaatttaggatttttagggttttcggggtcgctgaatacgaatataccctttatattaccccttgcctaaccttaggcccatctgaataataaaaaactcaaattcgagacttggacattttgtgg

SEQ ID NO: 58027 - DNA, 267 bp, Heterodera glycines
atgggccgtgtggtgtccgcttttgtgaagaaaaagacggacggccaatggcaccgaattggcaaacggaatccccaatggccacaactgtttcagccacgggaagagccgggtgcacacaaagatttcgcaaagattggttaaaaaacgggcaaattttcaggcaaattggtgatcgaaaagggcgattttatggcgggcacttgtcgttacgattcaagcgacaaaaaggaaattgtgccgatgggaagcatgggaatgaacgaa

SEQ ID NO: 58028 - DNA, 202 bp, Heterodera glycines
atgttggaggaggaggaagaggaggacgaagaagaagacgaaggggacactttcggaaacaaaacaccgtccggagaaaggcaggaggagggggaagaaaggaagcggacggatgtcgaatttggaggacagacaatggccgacagtcccacgctttcggagggatcgctggcccaaatgggcaatggaaatgacaaggaag

SEQ ID NO: 58029 - DNA, 1190 bp, Heterodera glycines
atgcgtcaagcctcgttttatgctgtcgcgcggggaagggctgtcggcgtattcaacacctggcaaaagtgtaatgacagcatcaatgggttttcgggggcaaagtttaagaagtttccaactttggagcaggctaatgacttcattgggaagcatcgtggtaagtgatgggcaatgtaaagaattgtggtcccgaattcgaaatatttgtgatcaagcacaaaacagaagtttaatttgtggccatgccaaagaatgggtgtagggaatgggcttccttaattggttgggctcgcaaaatgcatttgagccaattcactcaatagttttgtctgtaaatattattttagaaactctgaattctggcggcaaagtgatttcgaagaaagggccccccgttcgtacaatgattgtaaaatcggctgctacgacctttgctgagagacgtttgacacgtaatacggcaatgtttggggttgaggcatcgaactcattggcagcatccaacttggtttccgtggacgatggatttacgactgttgtctatacggacggcgcttgtagtcggaatggatttgtcggtgcaaaagtaaagcgatgagaattttcgacatcaattagtgatttatgtgaataggaatacttagttttgtcattttcactaaatcctttgtactatttaaggctggcttcggcgttttttggtctgatggacaccccgacaatgtctcagctccggtcaatggcccagccacaaataatcgtgccgaatatttagccgtaatttctgcgttggaaaaggcaaccgcgcgaaacattcggcgtctggtgatccgaactgactctgctcttctgatccaatcggtgcaaatgccatgccaattgaacgtttatgacgtggttaaaatagatgactaaatggctgcccaaatggcgaaccaatggatggaaaaccatcaatggaacggatgtgcaaaatagggacttgctcgaacgtctggacaatctgacgaagggaactattgacgtcaaattcgagaaagttgcgggtcattcgggcgattatggcaatgaccaggcggacctgctggcaagacgtggggccgagatgtacacggccaagaaatgaacgatctacgacgataacatatttttaaaaggattattgcgaaatattatatttaaataaa

SEQ ID NO: 58030 - DNA, 595 bp, Heterodera glycines
ttagtcaataaaccattgcaacatcaaaaaatagtcattctatacagatacgaaaataagtgaaacctataaatttttccacaaaaattttgaatttttttttcgaaaaggggaggttaccaccggcggcggtagtattacataccaagttgaatctcgtgttttcgctgtaagccaagctttccaatcttggaaaaattgaagaataccgccaattttgattttgtaaacagaatcgttcaaagctaaaaattcaaaaaatattgttcctttcgattcctctagggtaaaattgcaagctaagcagtgttaagtgttaaatttaaaaactaattcttaaagtcgcaaagcatcacgctaatggcgagcatgcgatgacgaagcaagtagtggggtgcccgagcgagcggcgccccaattactggccgccgtagtcgagtgtgcggtgtcttggccaaaatgctaagtaacgtcaacggttttctgatgattcggagtaactgggaaacgccaatttttaatgttcagagtgactggtaaacgacaattttaattgaacgatttttcaaaaaaatttacccaatcaaaagtgcca

SEQ ID NO: 58031 - DNA, 216 bp, Heterodera glycines
aattccccccaaaaaaaagaatatttcgttacgtttttcattttttgtcaggcgttcgatgatgcgattgctgagctggacacgctcaacgaggactcgtacaaggactccactctgatcatgcaactgttgcgtgacaacttgacgctttggacatccgacacggctggcgatgagcaggaggctggtggtgaggcgggcgaagctggtggcaac

SEQ ID NO: 58032 - DNA, 906 bp, Heterodera glycines
atggcgccaacagctgatccatcggcgacacgttgtgcacccgcttcattggcatcggcacaactccattccgccaatgcggcgcaacattcggccgaccatttgtgcttttttctctgtccaattgagcagggactgtgccgagtgcaggtggctggagtttggacaaaggtgtgttgtgctcatgattttcgaaatttcgtatgatggaaataacagttttagtatggacagccgggcccactgctgaatggcactgttgtgtcaatgacagcgttgccgtcactgttgcggcaaacgatttgcaacgtggcacgtcgcaaggcggccgaattggaaaggtagggagaatcggatagtcaaatcaatcaaaaataattgaggcctatgatctgcgagaacaaacagctaaatggtttttatatttccattttttagttaccaaatgacccacgttcgacgtcgccatgccattgccgaatttggccgacgatttccttcccggcttaattacaccgactttgttgagcaactgatcagcgacaattgatgcgcagaaggaactgctgctgctgctctttgccaattctttttcgttctgatcagtgatcactttacccaatttctttctctggtcactgttcccaaatacattctccttttatttttacgctagtgccttttcatgtcttcttccgcttcaaaaactttcattttttgttcaaataatacgcatagaaaccgttttgactcacattccgccctctgaattgtgtctcataattattgttttcaatcccactatcatatggtaaaattgttcggtttttaagtgcctaaaaatcccatcactaatgatttttattccgttttacacatcggtaaatgttcaaattgtaaagataa

SEQ ID NO: 58033 - DNA, 312 bp, Heterodera glycines
atggaacaggcgcgactaaccgtccaacaattgcgtcaggaggcaaatttgcagcgaaagaaagtgtgggtgaattactaaataaatatccaattatttatttgatatttattttttttaattccatttcccaattgtttcagctcggaagtggccagagagtttggtgtttgttttttgaatttgaattcattttggcattttgacagtctcgtcgaatattgtgaagggcacaaggaaggcgactgtttgttcaccggacggatggaccacaacccgtaccaggagaagaagtcatgcgtactgatctga

SEQ ID NO: 58034 - DNA, 382 bp, Heterodera glycines
atgcctttgatccgttcacctgacccacaacggctgattggaatggagcaatcgaaagccgacaagagaagtgaagtcgcaaaattgatcccaattcgatgtcaattctttgccatttttggggaccattttttaagattaaaaattgttttgtttctggtaaaatccttcttcaaacaattatttttcttcagcaaatttcccgaattcctcagctgtcatattgaggcgtttttaacgaattcggcgcattatgttattttttttgctaattgttgggtaaattcagttcaaaattgcttcatttttgttgaatgaagaatgtgattttttaaaagaggacattatttataagaaaatcgcatgcaaacagacaaattga

SEQ ID NO: 58035 - DNA, 943 bp, Heterodera glycines
atgtttttgtgctcctttttcatctgtttccaatcgctttacttttgggacaaatttcgccaatcggcgggccaaagaattgcgacggtaacggagacggagggacagcccatgcgacagccgcggttcctcgtctgtgtcggccaacagagcgggcaatggaaaatgggggaggggggaaatggaaaataattaaattaaattaaattaaataaataaataaattttaataaaaaataattcgaaaaaaggtaaaataaagtgatgtgaatttagattattattttatttattttgttctcaattttaaagttcgctgctgcgcagccgcggcgaaagtgttgactttcgccaattggtttacaattatcaaatggaggaaaaattgaggcccgattttattaaacaggcaaaaaaagaaaaaatatttaaaataaaaataaaattaaaattaaaaaaggaacgaattaaaaatcctttttagcttcaaaacgaaatgggtttggtcaacaaattcctcagttcctcctccaattcttcgacgagtgttctccaatgcgcgggcattgtcctctcaaaaaacattcatttgcttgtcgaaattgggacggcacttcgagtgaattttaatttttgatttcgaaaaaaatatttctttcagttcgattacgcaaattttacacttccaaaaacgcccgacgaaattcaggggaaaagcgaaggaatgagcagcaaattacttaataatattctttgaaaatgaattacacatttcttttaaataaattaaatttttaggatttcgtttcgaaaggttacagtacgccaagttacggtcatcattggaccaatgtttggccaaatatttactggacgagatgctccagcaaaacaatgaaaatttggtaaaaaatattttttgtaaataatttaataattttta

SEQ ID NO: 58036 - DNA, 1440 bp, Heterodera glycines
aatcaaactgaatgaaatgttctcattgtcagtatccttattcaaatgtttaattgtttccttaatttttcaattttcaaatggaaacgaagaaaaatttgggcgcaaaagaaaattggaaattcaatcggaagaagtggaaagaaaaaggattcattttggacaggaaaagcatcacattgggaacagtttggcattggcatctgctgacaatgagcagaagccgcaaaatttgcaaaatccgttacattttttatttaatccgccgaccgaaagcgaccggagggaattctgtgaggaatggcactatgtgtacgaacagggcactaatttcggtgccgaatttgactttccatctgaggaatttgggccgggcggagtcgtgccaattgagagcgatggcaactgcggcttccgatcgttgtcgtggattttgactgggactgaagccaatcataggcaaataagggctgacatcatggaatttttgaacagcgaattaattaatagtgaagatgatccagcaaaaagcaattggtggggtaagtgccatggattatttgttttttagggttagggattttcataaatgggccaatggtaaggaaattgaaatgcaaaatgatcaaaggcaatctggtagtgtaatgtgatcaaagctctaattagggatgtgcgagagtatcgttttcgattcccggctcgagaatttctcggatttttcgcttctcggttcaaagttatgggccaaaaaagaagttaatttttcattttgaaatttttttttggatttcgcagcaaatagaagcaaaagccatctgatgattttaagaatgcaaactatggttgaattttcagtaaaattataaaaataaaattttatttttttcatttttccctatttaatggcgtaattaggaaaagaaacaattattttaagtaattgagggccaattaagcgacaaataaataaacattggcactttgttaagaaatgtttttcactacaaaagaggaggcacggcaatatgccgaaacgaaaagaacagcagcagaaaatgtgggagaacaagcgaaatggtttaatgaggttgacgcatttacagcctcaaaattgtacggaattaatgtgataatttgcaaaaaagaaaaagaggacaataatttcacatggcaatattacagtccactaatgacgccggacaatgtgagcactaattacataattaatgaattgattaactaattgataacggaaagttaaagcgatggaattttgaaattcagttggatgccgcccaagaacgcactcgaatgtcggcattcatttacaattccccggcacattttgaagtgattttggagccaaaagaacgcaaaacatttgggcaacaagctttgaacatgcgaagaaaatttgtgatttatgaggaagattaa

SEQ ID NO: 58037 - DNA, 1465 bp, Heterodera glycines
atgacccaggcaaatggaaatggagttggcaagtggacaacggactgtgcgcattgggagggccacggaaaaggcaaaaaattgggggaggaataaaaatagaaaataaattagaaataaaaaataaattaaaatgggggtaaaaaataaatttggaaattgacaaaaggaagcaaataacgccggaggcgatgaacaaccagcaaacatttgattacattttggtgaaaacgaacatgctcgagtcgcacccggacagcaaaatccgcgtctttttggtgcacgaagagggcaccgacgacggtggaggaagggaacggcacacggcaattagggtaatttggtgggggtaattaataaatagaattggacttgtttaaacaggcaaattcaattgaactcaactcgggaaagcacgtggaagtgactctgcgtgggatgtccgagattttggcatgatcactttctaaacgttcgtttgactgatgccaatgccaattaggacgaagactgtgacagcaaatacgagtcgggctgtgtgccgtccaatttcacttattcgcctatggtaacagctgaaaaccaattaatcattttaattataatttgttattattttaacgccacaaataattaattatttgttaagtaattaatcaattgaggtgtgtcgctggtgcaaatccgaagtgcgcaaagcgtgcccatgcacagttaggcaattaaatgcactttgttttgtttttttcatattcaaggctctctttttaataaaatctttttatttccataattaattttaaaattcctccattttaaaatgccgacctctttctctctgaatatattggcgaatctgtgcacaactgttcactgctggaggtgctcaaatgcggacccattcaaagtgaactttaccaaacaggtgggcaaaatcataaaaatttaaaaataattttattttttatttaaaaagtaacgtcaattctttaaatgcttatcattaaagccctaaaaaagcattgtttgtgtttttggtgctcttaatatttggttatctctcactatttattcttatttattttattttaataatttatttttttgaaaatacccttgtccatcaaatgcctttaaaatttcaaattccccccccccccccattagtccatgccattcatttcattcgttcgtaatttgtcatgttttctgtgccatttcagctgattgtcccaacgcgtgtgtgtcggtcgaatacaccgccgactttgcggtccatgaactgacgctggagaagctgaacacgcgggtggacgacgcgatccaaaccaaatgcatggctgaacagcttcaactcgtggacaaattcaacgaacacaaattcccaaacggtggcggcaccgatccgtgggcgagggacggacgacagacaaaaatgtccgagaaaatgatgaaaaataactaa

SEQ ID NO: 58038 - DNA, 285 bp, Heterodera glycines
atgccaattgacagccaaatgtaaaagcatatccatcaatgttttaggaaatgaaaaaagaaaaccgttctctttaaacttatttgttaaataacttttataaagatttatgctcaattaaattatttgttttttatattttttgcaaaattacagccgaaaaagtgttgatttgacgatgctattccgatggacaaaaagtgtaaaagtaaacatttaatttccctatgattttttaattaagaaagatttattgcattataaaaaagagatatttgcaataaa

SEQ ID NO: 58039 - DNA, 370 bp, Heterodera glycines
aggtgaacctgctcaaaaagcgaccagcagtggaaaacaagggcaaactcaagagggtcagttcattggacgatttgtcaagacgaagccgcacaaaacgtgctaaggaaatagcgcggaacctcagccatctcttccgacccggtcgattacttcctaatttcttatttttataataactgctttattttcaggcattccagtacccgaaatcgacaaagttgtgcgccaggcccgtcaccaggccaatttcatctcgcccaaaaaaccgcccggaaaatggaccaaaaagggccgaacaaggagacaagaacgaatcagtccactcctggacatccaagtcacacttgttggatgtgttgatatttaa

SEQ ID NO: 58040 - DNA, 920 bp, Heterodera glycines
atgatgggtacgacgacgatttcgaagaagaacgcgacctcatcaacttcgaactcggaaaaactcaaaagggaggcatttgtctttggtctgaaggtgggaaatttgttagagaattatgaaaagttgtcaaaggctttcggtacactcacgaaaaaaacgaccgatggaggtgcactgtgcgaattcattagacaaagaagaatttaggcggaaattcgacggcaaaaaatactcgagcgcgtgaaagccgaaccccgaatcaaaccgacacggcttctggcggagggcagcctgtgcaatttggcatcaactcgcccgccccctcaacactatcatggccgtcaacagtggaacagacctcgccgttggtgcagtactcattgagtccatcgtcaacgacgatattgcagccaggcacagcaaaacttacaaaattattcttttaaaaatttttaagcccgcccttgggaagaacccgtcgtccgtcgcgaactatttccaattccattttggaacgtgcactcacatgcggcttccgccctcgcaaggaccaacaatggactagaagcaactcaccttcatttctctgtatttattacttataaaacccacaaataaaacaattttagaaaggtctttgtcatcacccagccctttccgatttcatttctgaagtcagcggaagcatcgaccgacaggtcgacgcagcgaggtcagccgggaacttcatacacaaacgacacaaacgctacgtgctgcaggacgcagtcatcatgagaattttagcggacgccaaatacgacaatgatgccgaaattcatgatgctatgacggctcttggtctgcaggtcgaaggatacgcaggaaaattgaaggactacgaaaacatggaagattcaagcatggatgtcgcttaa

SEQ ID NO: 58041 - DNA, 911 bp, Heterodera glycines
atggccataaaatatggaccaaaaatcgcaaaatatggacataaaatggcaaaaatctcaaaatatggaaataaatggcaaaaatgtcaaaatatggacatacatttttcaaaattgagtgcaaaatttcttcaaatttattggttgaaatttcatatgagatacatttccaaattttttgactcggtaaggcgctttgacaaagacggctttcgttttgcaattagtcggtcaacattcggaaattggtctcgaattttttcggcaattacgtgcaatcattttaaaagaaaaaaaaacataaaagctaaaatttattaatttttttagcgcaaaatcaacaacaaaagcgaaattttcgcttttttgcttatttttgacataaatttattaatttttaagaaaatttaaatttattcaatattctcgagaaattttggcgaaaaaatgattttttgaaaactgtttcgggttttgggctcaaaaaggctaatttagctgctgggggccgttctaatagaggttttttagaaagatgccaaaatatggacataaaatatggacaaaatgccaaaatatggacaaatatggaaatatggacctaaatcgcgaaatatggaaaaatatggaaaatatggatatagaaatccttcctagaagcttcaaaccaagctaaaaacatgtttttcgtgcgtttcaggccctcaacagtccaggaaaaaaatatggatttccatataattggactccctatttatcattaaagtcggattttaatgacgaaatagggtcaggggtgggactgcggagggtaaacaccttaaagcggagttctttttttaaattaattaaaaggcatttttaagataaaaaaaataactataaatatatttcacaaaattaataataaa

SEQ ID NO: 58042 - DNA, 155 bp, Heterodera glycines
atgattgcacgtaattgccgaaaaaattcgagaccaatttccgaatgttgaccgactaattgcaaaacgaaagccgtctttgtcaaagcgccttaccgagtcaaaaaatttggaaatgtatctcatatgaaatttcaaccaataaatttgaagaa

SEQ ID NO: 58043 - DNA, 346 bp, Heterodera glycines
atgctgcttcttagcctggccaggcacctggtaaaaataagtccgagatcaattttaaataatatttgaaaattatgtgaaaattgagaaattattgttgctccttacgattctttcaccatttagcagttttctgccctatttaggagtattttctttgttttaatcctggttttcataaacattttcttcttaaaaaattttaacaattttcagaaaaaaattctaatgtctcaatttaactttgctgaaatgaagaaaaaatatatataaaataatttatgtttaaactttttgttgtgccggccgagggcaaacaataattaccaaatttattgaagacaaa

SEQ ID NO: 58044 - DNA, 361 bp, Heterodera glycines
atggtaccacttatttcctcccatattaagcaaatttttcagaggtaattagcgccaaaaaaaaaattttacggtgtttatttttttataacaatttttttcagaacagtggctaacacatctaggagtgttagcaattggcttgcgaaagaaaaggaggcaattgaatccgctaaccagcagcaggatgaaagtagcgaaactgaaactgatgaacaaagtcatgaacacgcaaacaccacgtcaaatagggcagcgcagcgtgcacgcagcatgcaacgccaaacgcaaaatgctgcagcacgacaaccaagtcgcgcacagcggcaatccgctgatgaacggcatggaagcagttcac

SEQ ID NO: 58045 - DNA, 1156 bp, Heterodera glycines
tttatttttttgattaaatttaattctttgaagggtaaccgcgcggagaacttttcaaggtcagttttatcttttacgaattgtttttcatttggtttggagttttcattaaactaaaacaggacattgttgcgcgggaatattacagcgaagccgacgcaaggttttgaattggatttaccagggaatctgatcagtttcttttaagccaatgcatccaacaaattcttgaatcgatcgcctattgccacgacaacagtgtggtgcacaggcaagtcacggcgaatcccacaattaataattgggcattttaagggatttgaagccagagaatttgctgcttgcgagtcgtgccaaaggagctgctgtgaaattgggtcctttgcttaacttattcgcgaaaatacgcatggaatttagctgattttggtcttgccattgaagtgcaagggaattccgaatcttggtaaagatcattttcattacacatattacaatatattacaacctattcttctttcaaaaatttgattagggaaaatcgaatttttattttttttaaccaaataatgtttaggaaaaatttaagtatttatgtaaaaacactatacgcatttcaaatcatgccaatatttaactattctttcattttaggggcgggtatactaaaaaattacttgatttcacatttaggtatggttttgctggaacgcccggatatctgtcgcccgaagtgctgaaaaaggacccttatggaaagccggtggacatttgggcatgcggtgagaatattttgtgtaaaatttgtttcaaagtgtcgtctggttttcccaggtgttattttgtacattcttttggtcggttatcctcctttttgggacgaggatcagcaccgcctttacgcacagatcaaaaacggcgcttatgacgtaacttttcctttttttctacataattcccattcctccacttcagtatccgtctccggaatggtaagcgttcggttaaaagggtacagtaagccaaattaaccaatcaatcgccagggatactgtgacgcccgaggcgaaaagtctgattgactcaatgctaacattgaacccgcagaagcgaataaccgcagaccaagcgctaaaagtgccttggatttgtgtaa

SEQ ID NO: 58046 - DNA, 4448 bp, Heterodera glycines
gatcggtcgcgggtcgcctcggtgatgcaccgacaggacaccgtcgactgtctgcgcaagttcaatgcccgacggaagcttaaggtgagggcttttttggcatcgtacgggagcaaaatttgggaaaaggagaaatgtgtttttttcgcattgaaagtgtgcgtttgagtttaaattaaagcaaatgactttccttttccctttgcattttgatgtttggcgtacatttgtcattgtctttttgtggtgttttgtttttacaattaccaattaattggtttttgttcgtccctttccctccctttgccactaatagtcggagtgattttatcatttaattgtaaggcgctttcgacctttcccctcactaatcgatccaattgactttttccgttgagtgcctttccctttttccctttgagtggtttttttgattcctttccctccccaattcatttgatttctgatcagtgttcgtcttcgcttttattgtaggctgtcatttcggctgttgccattgtaaatcgtatgtcccattgtatgagtcctcaaaacagtcggacgaccgtcccaagtccgtctccatccccaaattcggccgcacagcccgacattggatggagtgtgaaggggccgaccaacaacaacggcatcgccgcttgtgccgattcatcgggtggcacttcagcaaataatggggtgggtggcgttgtgtgaattgtttaattgtttttgcactaatttttctaaaaactaaccaaattaactaataacacactgcaaaacgtccactttcttattcaaattatatttcaggattttgttccaatttctgtgctttttttgttgagtgatttattatttttgtttgtttgtgcgttcgttgctactttctttcttcatttcatttttttatttataatttttggtctttttatgctttatttacctttctttttcttttatgtttctaaaaattaaagtaaaataaacgaaacaaaaagattaattaaaaatgacaaatttcgaatgatattttaatcattatttacaatttatgcttatcacgcttgctggctgtttattgttaattacatatatttttccgtcttgttagtgacctgatcgactcatgcaaaataatatttgaattcgcattcgaaattcgaatgttttagtttattcgaaatgtgtgtcctttgtggtcagcaaactgacaagcagcacaaaaattatttaaaacttttgaaatttgtcatcttttttgtttccagattgtatataattctcgtcgtaatttgaacttgattttcagggtgccattctgactacgatgatcgccactcggaacatgtccagtaagttgttgtcgtccgaatgtcccctgactttctcacgcgtccctaattggtgcattaggccgtaatttgctgaacaaaaaggacgtgccgccaagcacaatcaaagaaagcaccgaatcctcgcaaacaatcgacgaaccggacggagtgggcaacgccgccggaggggacaaaggtgaatttggattgattgactaagcatttgcagtggacgaactcacactgactgactaaccgacccaatcattttcatttcaatgttttccctttaccatttgtcatcacttcttcctccgaactgaacgagccaaaaattcgtcaatattctgcaagaaattcttgtttttaacgactaaaaggaattctttcttttaacgaatttttactcgggtgtttttttgggtagaaatcttttttttgcgtgtgactaattaattaatttaattgcttgctcttcttcagtgtctgtccgttcttccctttaaaattaattcttaatttttaagcgatcatttctatcaaattgtcactgttaattacctgaatggaaatacctttcgagttttttcataaattaaaatcataaatatttcgtcaaaacacaatacccttcaaaatgcacttttgaatgctttttttggttaaagctaaagactaactgtcttaactttgttttcccccttttccccattaattgatttcgaaataattctgtttttcttcttttgtctgacactttttccgcttaatttcctttgtcccaccattagtgcgcttaatccatgtgctgacatttggcgcctatgtccaaaatcgggttgaaaacttaagttctttcaatcctaaaatagcctaatcagcattaaagtcaaacatattcttcgggttctgtttgaatattgatgattttttcaaaaatttgctgctgatcaaattatcggacacactcatttcctatcacttattcaatgctttttaggcttaaagtttgaaaccgattttggaataggcgcaaatgtcatgtaacccttaaataaactgttttggtttcatcattgatcattgagcagttacgctttaaacattggaattggttgccaaatttcgctttcttttggttaccgtattccgccttccaccagttaccgtattccgttcccctttggttctgtttgtctgtccatctgtcactgtctttctgcacaacttaaacacacttttctttcttcgctagcgcggatccaacatgagaacactgtggttgaacgggtccttagcaacagtttgaccgcgaaagcgtccactcagccgcagcaaccgcttgctgtggtgaccggcgccgcttccgccacgttctgtgcccactcgccaatcggcgcgtcggccggcacttcctcgcccgcgcctccgcttgcttcttgcgcctcccccgtcctttccggtgggtgctttctttgttcttctctcgaattttttggctttgtcttttcacgcgggagtggcaaatgcgctcagccctttcctctccttctgtttgctgcttctttctttcttgtgtttgtgtcgttgcttctttcttttcttccttttttgtttgcttgtccattttcggttacttttgtgcttattcgtcataatgccaatcctatgtatcaattgaccattatatccgagttttactaccccttggggctgtccttatgtacaaataatttgtcagtccatcgccactttctccccctttttgtttgctgctgcttcggtgtgtaatttgatgctttgcttttttactttttgcgttccgttcatttccccccccccatttttcttttaattttgcgtccaatcggccaaatcgttcgttcctttcccgtccatttaacttttgttgtgcatgacaaattttagtggtgtttagtccactgctgctccagtggatgcgggtgtaaaagtgtgagagtgttattaatttttggcccctcccttagacatacgccacacaaaattccgccttcagcactttcattccaaacaatccctcattttttttccattggcgccggaaacattttgtggggcggtgggcatgtggctgtgaaagttcgttttatcgattcattcaaagagacgggcatttaaaatttcgagaaaggaaattataaaaaacgcagtgttttaattttttgaaaaatgagtgggcatttaaattattaaaattacgctatcattccatgattaagcttaattggcggatgataaaaaatccaaataaatgctgaagggatttgtcccatttgggccgatggttaactctgaaaaccacactgaccggcctcccccgcacctccaaccttctcccactgactctaatccaaagatggcctccgcagcaaagagtaagggcttaatacataaatcaatgtttattagtagtagcagtggtgtgaacaaaaacttttttgcatgtttttcttaatttgtgtgtttttctctctttcctttctcattattccatttctttaaatgaatatgaaaaattcactgtgtgatgacgtagcgttgtataaaaatgttattattgttaaaatatacacaatccgttgaaaagctctgcgggataaaccatttacaatctcaaaattaagcacaaaagcaggaaatcgtgaaactcactcagcaactgcttaccagccaggactttgactctttttcgtatgtgcaaatgaaccgaacccattcggcaattgtcaaaacagagcgatttaggaaattgtgtgatccaaatttgacatgtttcgagccagaaacacttggcaatttgatcggtaaatgaatgggaagggaatgcacaaaatgcaccaccattcttcattttggcattttcagaagggatggacttccacaaattctatttcgacaacggtgggtttgggcgagggcggccaagggattttcaaagtgttcaacaaacggatgaataatctaaggccctcaaattccactaggcgtaacaaccgccgggatcaaacatcaccaccaccaaatccacacgaccattctgaacccgaatgttcacctgttgggtaa

SEQ ID NO: 58047 - DNA, 1514 bp, Heterodera glycines
atgcgtttgaccgatgaacccaacttccagggtgaactcgagtcttccgaaatgttcggtgaaaacgaagggaagaaaattgctgccgttaaaaagggccaaaacgaatttgtggagtttgtggagccacgtcaacaccaaaacaaccgccacaaagaatggatggacaaacggtgaacatttattgttggccatctctttaacaattctttttttagtgtgccaaccgattcggacagaaaaacgcacgccttttatttcctgaccaattccggcaacattctcttcatgggtttgccacacttaccctttgtcctattttttcaccttttcagcttatctggccgtttgctgttttggcattgtcgcgggcgctgtcggcggtgtttactattacaatcagttggactaactcgaaactcattggcatatttattccctcttttttagtgtccgttcaagtcgaattgacgaccccttcaacgaattcactcgctattcccccgccgggcccacaaaagacaaacttaagaagtcgggttcgcccatattcggtcagagcggcgacgacactttgggtgagtaaaaaacaacggaaaccgaaggagtaatttgcatttttaagcttacaaagcgcaactgcaccattaccagcagcagaaacaggcgaggaattcgaaatgaaaagttggaaaattaaaaagaaagttacagaaaatactgggcacagcgtcggggccggtggtggacaatgtgagcgacaacgaagaagacacggacgaaatggaccacaattacagcgtttttgagtgtccgggtgagcggtgaatcattccattcgcttgtcaatggtcggccattcattccctcctcactttcctttcaggtctcgcaccaaccggtgatctcgaaatacaaaaccccaatttcgtgggcgctgagaagtcggcagccggcgaaacacgccgcacagaatgaagccaaggaattgttacccccttccaccctacatttattattgcgttccttcccaccaattcccttgtaaattaggcctcaaaatccccgtgaccgaccaaaacatccttttccccttccactgctctagtctgaacacttccgcacattccgaagttctgtccgattaaacattcctatttgagctattggatttgaatgtctacgctttggggggcttttcgataaacttgggcgcagtgttgtacagaaattgacgataaaatgttaattcattttctatttgcctaattaggtgtaattataacagagttcattttttatccattgtgatttgagatgataggaaaagaccagatgatagaccgtaaaaggtggcaaaaaaatgcggcaaacaaatgttttggaatactaattcaggaaactaaccccgagggtaggccaaatgataaaattttccatgactgtgaaaagaaacagaaaaagacaaagaaaatagaccagaaataagatgaacatttgcgacaaaaaataaa

SEQ ID NO: 58048 - DNA, 206 bp, Heterodera glycines
aatttatgaatgctataaagtgcagaaaatagtgcgaacaaagtacataaatcaaatcctgttgaaatggataagtacgatcaaacgcgtgtgtttaatggagttttcaggcatgacaaataatttgctgggacgtatccttgctgctgatcagtacagtgtctgtgttggcttctcttcctaaccaaccaccattcattgtttcc

SEQ ID NO: 58049 - DNA, 801 bp, Heterodera glycines
ggattcgtttgtttggcataatccgaaaataaaagtcattaatttactcttatgtggctctttggcttaacagaacattcagcacaatgacagattccgtgttaggtcaaaaagaatgtttgttaaacagtgtcaattcggagggtcgggtgagcggtcgcatcggatgcctttctcttcttggccaggctgacgttgccgttcttcttcagcccattcagcaattgttccttcacatgattatactcaacgacacaagttcggcacaacgctctgtacaattcttgacctccgatcatttctaactaaaatggtcgggtcacccccaacgcatccatagacccaactcatccataacactgcgagtcatcgtcgtggcatttttttgattgtgcggtctgcttcgtggcaattttatgcatggatgagttgggtatggataagttgggtttaccccaaaatggtcttacatgaaaatgcaaaattatggttgttcagcatggattaataatgcatcattaacatgttacagtatgacatgctaaaatgtctgcgtacggtaagtcagaaagctacggtaccaatttaaaaaggaggaaattaattaaataattccctcaacactttattcagttgaatcagttagtggtgtcaaaatgctttcccaccttcgtgcattccgacattcgaaatgtgaatgaggcggactgtccacagcggcaaactgcgcttagtttctcaattttctcagccaaaggaatgagcatcgccacattttggaagggctggtaaaatcaaaag

SEQ ID NO: 58050 - DNA, 1067 bp, Heterodera glycines
aaaaggaaaagccaaaagggaaggaaaagcgaaggaaaagccaaaggaaaagaaaaggaaaagaaaagcgaagaaaagccaaagtaaaagaaaaggaaaagaaaaggaaaagaaaagcgaagaaaagtcaaagcaaaagaaaaggaaaagccaaaggggaaggaaaagcgaaggaaaagcggaaggaaaagccgaaagggaaggaaaagcgaaggaaaagccaaaggaaaagaaaaggaaaagaaaagcgaagaaaagccaaagtaaaagaaaaggaaaagccaaaagggaaggaaaagcgaaggaaaagccaaaggaaaagaaaaggaaaagaaaagcgaagaaaagccaaagtaaaagaaaaggaaaagaaaaggaaaagaaaagcgaagaaaagtcaaagtaaaagaaaaggaaaagccaaaggggaaggaaaagcgaaggaaaagccaaaggaaaagaaaaggaaaagaaaagcgaagaaaagccaaagtaaaagaaaaggaaaagccaaaagggaaggaaaagcgaaggaaaagccaaaggaaaagaaaaggaaaagaaaagcgaagaaaagccaaagcaaaagaaaaggaaaagccaaaagggaaggaaaagcgaaggaaaagccaaaggaaaagaaaaggaaaagaaaagcgaagaaaagccaaagtaaaagaaaaggaaaagccaaaagggaaggaaaagcggaaggaaaagccaaaagggaaggaaaagcgaaggaaaagcggaaggaaaagccgaaagggaaggaaaagcgaaggaaaagccaaaagcgaaggaaaagccaaaggaaaagaaaaggaaaagccgaaagggaaggaaaagcgaaggaaaagccgaaagggaaggaaaagcgaaggaaaagccaaaggaaaagaaaaggaaaagccgaaagggaaggaaaagcgaaggaaaagccgaaagggaaggaaaagcgaaggaaaagccaaaggaaaagaaaaggaaaagccgaaagggaaggaaaagcgaaggaaaagccaaaggaaaagccgaaagggaaagaaaagcggaggaaaaattaa

SEQ ID NO: 58051 - DNA, 226 bp, Heterodera glycines
atgaatcagcgattatttggtgacggattcagcggagccgcaatgtccgcagggcgacgcgtacaaagactaccagggaaattacttcacatgttcggtgagttgggcaaagggtcgaactgtaacagaacgctgaagttgcagaacacgggcaatggcaacacgtgccctgtcaattacgaatgttatttcgacggttacgtgtggggatgctgcccgacaaaag

SEQ ID NO: 58052 - DNA, 729 bp, Heterodera glycines
actgttcgatgtttccgatatggggtcttggaacattcagcggggaagagaccagggcattcgaccttgcaaagactaccgccaaatttgtgggatggcacggctaaagtcttttcaggattggccaggtcgacgggggggggggggggggaaatgacaacaaaaacaaaagaaacgaattgcagaggcaaagggagtcgaagcaaagaaacgcgtgtcgattttgtacaacggcaaagttgacgtgagaattggggagggaacactaaaagggaaaagagaaagcgacgaaaagccaattactactaattgccaaattaggacatcgatttgtacgttggcggtttgatggaggagccggtggacggctcactgctcggccctacattctcctgcattatcggagaacagttcagacggactcgtgacgctgatcggtcggccatttgtcacctttgcccgccctcccccttaattgcctattgccccccccctctctaattaccccttttaattggctcttttccgttcagttttttctatttgaatccattgatgtattcgcctgatcaaatcgcctcgcttcgtcaaatcactttttcatcggttatttgtgccaccggcgaagattttcgcgccattaatcccagcgcctttctcgtcgaagacgggcaaaatgccgtgccatgcgcttccatcccccaattggaattaagcccatggcgagac

SEQ ID NO: 58053 - DNA, 621 bp, Heterodera glycines
atggttttccgcggtcgcgagagctgtcaattttctggccattttccaaagtcagtacgtaatgacaaacgacctttcgaccaaccgctgggtaagtcgcttctgtgatttggaaacggaccatcggattgttttcctattatttgtggattcttaccatctcccgctttgagtgtttcgattttcactggcattttttgtttgcgtcttataattagttttgctaaccaaatggaagtaaaattgctataaaaaagataaaatattttaattatttaacttaaaaaaataagttaggtatgacatactgttcattaaagaaattgcatttttaggcagaaaaaagcgcaacaggcgcaaaaattattattagtaattagtgattactagggtattggtatgtaattgcgcatattttttcatagactggaaacagtctgaaaactttatgtacctagatttatttcctaaaaaatttttttttgcattttttcgaaaaagtcctctattaaagtctcacccctttattaaagcctccctgcatattggtaaatttatgccaaaaataagtaaaaaaaaattgacgttttaggttttacttgattttctcctatcaataaa

SEQ ID NO: 58054 - DNA, 430 bp, Heterodera glycines
atggtccgtttccaaatcacagaagcgacttacccagcggttggtcgaaaggtcgtttgtcattacgtactgactttggaaaatggccagaaaattgacagctctcgcgaccgcggaaaaccattcgaattcactgtaatttctatgattattattctaacgaatcttattttaagattgggaagggcgaagtgatcaaaggatgggacgaaggcgtggccaaagttgtcattttcacatttcaattaaaattttcttttccgcagatgtcagtcggtcagcgggcgaagctgaccatcagcccggacatgggctacggagccaaaggaatccccggaacggtaagggggccgatcccatctcatttacaaaaaagcaacaattacagatcccagggaattcgacgctcatccttcgacgggggaattga

SEQ ID NO: 58055 - DNA, 90 bp, Heterodera glycines
cgacgcggcgaagccgcgtccctgagcgcgaagcgctttccccacggcaccagaactcaactgaatacaacaaagccaactgtgcaccta

SEQ ID NO: 58056 - DNA, 2114 bp, Heterodera glycines
atggtggcaccaattggactgttgcaccgaagacaaattttattggccgatcgaatgattcggattcagaaaatgctgcaattggaaggtcaattccaagcagtgaaagtgatcagagcaattatcaaactgatcacaatgaggtcgaatttttatttatgttaagtaaaatttaatttaaatgcccaaaaaattttcataaatatttcaaataaaaaataataattaaatattgaaaaaggtaaagtaaatttttccgaaaaaatacttgaaagaaatttttaaggatttgattttaagtttaatttggttttcgtcaaatactgaaaagtacgtttgaaaatttttttttccattattttttgcttttagcattccgatagttcaatttccgctgtttcaatgaaaagtgacagcgaaaaatcagacggagaaataaaagaaaaaatggccaaaaattatgcagaacattcattcaacaagaatgaccaaatgttggtgcaaaaatgggaagaaattgaacgaaatttgcgtgaacaatacgaaaaacggggtaaatgatttattccaaaaaaataatatttttttaatttataaaaaaaaagaaaattgccaaataattaggctaatgccgaggccttaggaatttcatgctcacatttttcattttattcccatttagttttccgtttattttcacgccccccttttcgcgacaaatgattgtttaatcactttacgcttttactgatcactccgtggtatcccccacccccctgcatcgttcgtgaagatatggcactttcccttattccctcccctgttgattggtaaaaaccaaattccctacgccggcacgaccatcgcgcacggctgcgcaactccatcaaattagaggcgctagtgtcaaagtgttaacttttgccctaattcggattagtgatttgaaaataatcaaaatagatgtcagatcgtgatctggaactccaaacctcctccctccgtgaacaagttttaacttgttattatctcaaaaaaatttgcaaacccccccccccttaagttttttataaatttcaaatattttgttcctcaaaattatgtaaaactcaaaaattaggcgcagaacactatagaaagcggcttgaaattgcggacccgtacgatgccggacaactaattgtgcgggaacatgggatgaagcggataattttgatcccaagagaagatgaaattgcccggacagtgtacagaattgaaagccgcggagcaggcggtgagatcaaagaaaaagcgcttggcaaaagtgttgaacaatcgtggcgaaatgccaagaaatgtttgaaatttgtgacaagcaatgtaaaggagcagcagggaaaaaatgatcggcaactgtgcaaaatgccaattttgactaatgagcgtgccgaagcttaccaacaatgggcagcaattggcagagagatgcaacgccgaggcatcccacccctttacgaggtaaatagtgacaaatgatcaattagggagacaattaattagtgcgaataattaagcatcccacccctttacgaggtaatcagtgacaaacgattaattagggagaaaattaattaactgcaaacagttggcgcaagaggccataattgacatatttaaaatttaaattgaaaataaagactaaaaaactgaaattttaaaatttggaaaaaaattctcaaaaaattttcgcgaaagaaaattcaaaaaaattcgttaaatttattttgaatttataggtttaaatattttttcgttatgctttcgacttcaattttgaaaaaaaagaaaaaatgaaaaggttttaaaaataataaattttaagagaaatggcgaaataatggatgagaatgaattgatgcttttacttgaaaaagcattcaatgcattggttaatggggagtcaaaaataccacgaatgcccaaaaaagtaaaacgaacagaaacattgacaaagtatcacacaaaaattgccaatgaaaaacgaacaaatgagcagagaatgccggaacaaagtaattaattaaattttttaatagaattatacaaagaaatttataaaaattattaataaa

SEQ ID NO: 58057 - DNA, 2604 bp, Heterodera glycines
atgacccaaatagcagcgaaacaagcagcaaagaaaagtacagtacacctgcttcaagtgtggaagtgttgaatagagcaggaacaagaatactacagtgtttctcgccgcttacttccggtacagatgcctactgtagccagccaagtgatgcaaatagcagtgaaacaaacagaagttcgagcacagaaacttacagtagcccaacaagcagtcgaaatggttaccataccacaaaaaactcatcctcatccgcatctttgccatcattagagacaattacagatactacagtaaccgaggaagaggcgagtgacaatgacgagaaatattacactttaccatcatcgcatgatgatcggacacggtcacaaaagcccaaatttccgccaacaataagtttgacaacggaaaatgaggaggtgagagaacgggggaaaatggaattgaaattttttgaaatttcgaaaacactatagggataaagtccccaagaacacaaaaagaaaattttaatataaaatatcaaaaatttcttcaaaattatccaatgaattattttcatggaaaacggatttcagccccctaatagaaacaaaaaaaaaatagagaaaatcccccttgaaaaaatttaaaaattaaccaaaacttaattaaaatttacacttcgtaaaaacccagatatgggtcctacccgtatacgatttctgatataaaaaaattgaaaaataatccaaaagttaattcaaattaatctcttttattgaaaaataatttaaaataaaaatgttatttttgtgtacatacatattaacatattccaaaaaatgaaatgtttttacagctgcggaaattgaacgatttttcggccagagacccggacttgtggttaaacgaccagcagaacacagaaccgccaaattggcattgcgcaagattaatggtaagcctcttttaaatttaaataatattttctcaaatttttgaccagttttaacaaattttttctcaatggtttcacaagttttgggccgtagaattgatataaaatcttaaaaaataatcatatttcgggaggcattactcaaattttttattttttttattttttacaaaaaagtgccattttcgcgaaattaaattgacattttgagttttttttggattagtctacctgtctcatttctgggtatcaataaatttgtgcaattggcaattttgggctcatttagggatctgaaaggcgcctttgtgaggaatggaaagcaattcaccgtgccattgtgcgcttcatcatattttttgccatcaaaaacgcaaacgcatttgtgccaaaaattgtagttgatgaccaattgttggccactgttgcagttcggccccgattatggccagcacatgcgcaaattgacaccattcaaacgggcattggcacaatgccaaattttggcaggaaaccgccatttttgaatggaaaaccagcttatgaaaaacgcggtggcatggcactcacatttgccatgctacgggtcaaagatgcgtacaaatggcacggcacatttgttgaggacgcgctcaaattcaccaacaaagccatggttgaaaaagttgagggatgggccaattttgtgggcaattttttgcacacaccgacctatgtgtgggcatatcactacaagggcacggattttgaagtaaacgatgtgccaaaggtggaagaaatattgaaaatgtaagcctttttaaatgtggtttaaaattatttttaaaaatagtaaaaattaaaattggtaagggaatcatataaaaaagtgaaaaatataacccatttttggaaaataaattaagcgtaaatttttttaatgtaattatttcaactttcgggaagaaaaagtcggcgatcggagaggaaatttctcgacaaaatttatcgggatggctgggaaaaattttaaaaaatttcggggagcaatagccctaattggggagtttgtattttcaacagaaaattttccaaaacaaaaaaattcttaaaaatccatttaaagacaattcagcagaagatttgggggtgcaacagacgactttcgcattagtccttttttggaaaaacggctacgaattcttgttgttttttttttgctctccggcgctgaaattaaaaaaaaataacagtggagaaaaaaaatttaagatttcgtatttcctcctcggctttgccgaaaaatagccaaaaaattctgtcgctgctttgggtaattaattggtctacatattcatgccaatgaattaattaataattaaaaacaaatctaaattttagtgcacgtgaactgctagtcccaattcttcaaaacaatttggtccttgacggaattgttgatgatgacccaaatttccctgaaccgccattgcctatcgtagtcagaaataccgcaaatacgaaacaaattaagaacactttgcttcccaaaactgatgataaatatgtaaatacattagtattatccatggatatctaaagccacggattttgggaaaacattgaaaatttaagcaaaattataaaaaaaaataatcgaattagcattttccattaataaa

SEQ ID NO: 58058 - DNA, 108 bp, Heterodera glycines
atgcgtctcccatttctgtcgcccgttattcaaaccacatataatatttcagcaagtcacacgcccgatgacgatatgtcgccaccaaattacagtatggcacacatg

SEQ ID NO: 58059 - DNA, 101 bp, Heterodera glycines
aaattagtcaaaatacatgtcagattcgtgattagcgacctttaaaaccccggataacaaattatcatgcttttttatcacaaaaaatttttgcaaaacaa

SEQ ID NO: 58060 - DNA, 282 bp, Heterodera glycines
gtatggcgcgagacaattacgcgcaccgaaacccaaatttatccgatttggacgttccggacaaaaaatgatacctttcagcagaagtttttcaacagaaactgtaattttactaaataattttctttgaggattaaatgcaaaattaagcagtacggcgacgaagggatcaaccaattggacgcgttggttgatgcggtcgataagctgtatcaatcatcgccagaaattagggcattcaaaactgcgccaaaaagggcacaaaagttcatacgattcggc

SEQ ID NO: 58061 - DNA, 639 bp, Heterodera glycines
atgtcgagtgactgtggcctgcataaataccaaattattgtcattgaaaaatcagttttgggattgggctgggatggattttgggctgataattggacggctttttcgttacttctaactttaatagataataaaaactcaacagcaacaaaaaataaaataaattcattcaaaagaccaaatcaaactatgatttggccttttgttttggggctgttaatgtccctcgggcattcggctcccgttgtcaatacccgcaccgaactggcgctgcaccaaagcatcgccaaaggacaaggcaccaccgcatccactgcaaaaagcaccatgactacagcgattgctgtcatcgaacaccattcgaaagtgacttaaaggcttaacaaatgcaagttcgcacactttttttccaaatttaaggaaaacacccgagctctgacggttttcaaacgtgaagaaaagagctggaccagcattttgctgagcttgctcaaaggaattggcgggattgggacatttatcttggatttgggtaaagacattatcaaagacgtgttgaaaaccgtcaccgaaaagttgatcgaccacgcgctgaaggaaggtgttggacaaggggtgataattaagaatatgctataa

SEQ ID NO: 58062 - DNA, 626 bp, Heterodera glycines
atggacccatcaaatggtttttacaacagagaagcggacaaagtgacattgaccattgatgccatcacagtgaaagatgaaaaaatggagaaattcgtttccgaatccaacaaatcggagtggacactttctttggaaattgaaaaaatgtcggaatttttgcgagaactcaaatggactgaacgtaaaagcgaaacagtcacttatataaagggattgccatggaaaatatttgcacaaataagaatgaagtcggaaggcaatgacaatgagaagtggttgggcattttccttttgtgcactgctccaacagaaggttaaaattaaatattaattaacaatttaataattaatttgcattgggcagaaaattggaactgcgaatgttcggcagtcattcgaatcgtttcacaaatattcggtgtggcagatttcaggagagaatttaatgcgcatgttataaacaatgaatttaatgactggggattccccaatttcattacatttgctgtgggtggcatttaaaatgactgttttaattttaaataatttacaattaagaaattgatggacttggaagaagcccttttcaacaaaagcgaggacaaagtgacatttgccattga

SEQ ID NO: 58063 - DNA, 380 bp, Heterodera glycines
atgtacaaagttttgctgtatcgactgctctcaacttcctctcgtgcaaatttggacacttttccaatgtctattattaatgttccaaatgtccaaattcgccagtgtttaggaaattgcactggatacagtaagtcaccggaaatcccacagaaattcggattggtatggtattgttcaatgccgaccacttcttctgttgttaaaatgccgaatggaactggtaaataagagaaaggctgtgaatatactaatttaaatagtcagaaaaagatttgacccaaaaataaatattattttttttaccaatattttcagaaaattcctcttttgagaaaagcggaaagcgaattttgaacaatgccgggccaagcatttga

SEQ ID NO: 58064 - DNA, 569 bp, Heterodera glycines
atgaaaattgatggtaaaaatgtgcacataaatttaagaaattggcatttgccttattttgtgtataaggaaaaagaagatgaatttaaaatggaagaagcggaaggtcatttttgaatatgatttcatatttattatattaattataatattatttaaatttaattaattatataaaaatattatttttttaatagtggaagtgaatatacgaaaactgaatgaattggtgaacttggtaaagccagacgatgaaaaagttatgggtaattttgaaattgttcattatttatatatatgtttttattaatagtgaacaaaattatacaaaaattgcatgtattactaaaattgcaagagaaaaaacgaaaagtgaaaaaggacgaagccgaaggtatttttaaaattatttttaattgattaatttgaatatatttttaatagtggaaatgctgagagaaaaattatggatgagctagaagaaaaattaacaaagcataaacaaaaaaagatggatgagaaaaacaagaattgagccgaaaagaaaagcgagagaataatgagcaaaa

SEQ ID NO: 58065 - DNA, 1258 bp, Heterodera glycines
atggcgattttgctcaaaccgactccgaccgaatacaaccgtcgtcaatgcccggccatctccaagccagtgcgcggtgctgttcaaccaagaccggtcagcctcagctttctcagcctcggccttcttcagccaagggatttggcagcctcgccccgcttgctgcagacgcggagggacaacgctcgccgtgaccataggcaagctctaacgctcaagcgctcggcgagcataattcactcgccacaggtcagcagcagcgaccagcgagcgggaaacggcgccggtgaacaaatcgcttatcaagcaacgtattatttcttttttatatatagttgaaaacattggcagcatttttagatgggctgtaaaagtggcgaggaaagacagacagttagttgcactatgttcattatactctcgtttcttttattcatgtactatatcgcctttttctttttactaattgtcattttttcaaatgaaatgcaattaattcgttgaatgaaatgcttgtatttgtatgcttagggatttaatttactcaatttaatcattgaatagaacgtggattttcatataaaaatacctgatatatttatgtatttaaaatttaaaaaaagttgtattaaattttgtgtgggttgcggaaaatattgattttaactataatggtggtttttaaatactgatttttatgatgttttttaaataacgacagagcacctttgatttgaatcaaagttgattcagagcatttttccgttttgtgcctacaccaggggtgtgatcgaaaatttttaaaataagatcatcaaggccaaaaaataaggttttagggtcaaaataagaacattttgcaacattactttaaatcgcttttgtaacaatttaattaattaataagatcaaaataacaattttcatgggtcgagcaatgtaaaaaaaggttttttttttttttttttgctttccaaaccaccttttttcggcgcactttttccaaaattaaatttttgtgcctttttagtcgtttttgtattctttatgcaatttcaacttttttatgcctgagccctacatattacccatatatgtttttaatccaattgaatgctcaactttatgccaaagatggaaaatgaaattgacagaacccaatttgtccaatcaaagtgtgcccccagggcataggctgtacggttcgccaattttacccattgtatatgtatgctttgcatgggtattggtaaataaa

SEQ ID NO: 58066 - DNA, 1327 bp, Heterodera glycines
atgattcgtctactcgacgattcgtctactcagccaaaaagtgacgattcgtctactcagccaaaaagccacgattcgtctattacacgattcgtactattcaacgattcgaatacccaacctataggagaaacgatcgggagggatcccgggatcgcacatcccgaccgaatcccgatctatcccgaagattttttttcgggatgccgcgggattttcgggatttgctcaaacctattttttttacatttttgtgccaagtttttgttcaaatgtttatctaatatttataattgatcaattcgattgaagaaaaaaaaagagatgtgaatgatatcagatttttatagaaatttttcaaaattggaatatcatgcccaaaaaatcagattttcaaaaatgagaacatttaacaacatagccttaaataatttttttacaatttaatcaattaatatcaatttttgtattttcgcctcagatgatcatttttaataatttagagaaacggaatcaaaaaatcagatttttaagatttttttttgctgcaaattttttcaaaaactttaggggaaccgggggggaggtcggcggtgccgataggcgccgccgggaaaattttgaaaatttgaaatgtaatttgttaacagaatttatacaaaaactgcccatattttgtgattttgaactaatttataagaaaataatgggttcttgggtctggtgatgtccgattggcaccgaaggaaaaatgcgtagacaaaatttttattctgattattggacaaaattcttagaaatcgttgtgccataaaactacctaataaaatttagaataatgttttagaaattaaaaaaaaaattctttttatgaagaaataaaagtgacaaaatggccaacttttgcgtcaaattttgaaaattttagtggaattttggagacctgtaaattttttgggatttttaagggattttttacgaaaaattagcaaatgacaatattttttaatttataattcaagatcttaatttaaaaaatggacattttttgaaaaattatcgtgacttcaatcccgcgggatcccgcgggattggtaaatggtcgggagggatcccggttcgggattccgatgaaatcccgatcccgatcaatcccgatgaatttaaaaaatcgctcgggacggatcccgaggtcgggatcccgaatttaatcccgcgggatcccgaagaaatcccgcgggatcccgatcccgtccggtctctaatatttacctcgtttttgtaatcatttcaaagtaatagattaatattttattcctttaataaa

SEQ ID NO: 58067 - DNA, 207 bp, Heterodera glycines
atgaatgcccatcgtgccgtaaatgcttattcgaatcgtgttcgcaactttatggccgagctggatgaagcggatttgtggaatgagcaaaatatggccagagttgcaatccacgaatgcggccacacgttggtcgtatggtttcttcgccattccgagcggctcatcgaagtggatttgagatttgatttggatatgatttgttaa

SEQ ID NO: 58068 - DNA, 785 bp, Heterodera glycines
aatcaggttcgaattcgaaggccttaaatacaaaggagagcttcataatattattttccgcttttgttgcttagatttggagtacattcaacacatcgccttgccctatgctgaatcggcctttttcgattatttgaggagcgaattcaattgcaaaggagtcaaaatttcggcagtccccgaggtgtttttcgtttttccattttcattgccttccccaccctctttttaagggttcaatcgtttttcctcgtgtccctttgattatcgtcgaaggtcccttggcggtctgtcaacttttggagactccgttgctaaacctggtcaattacgccagtttggtgaccacaaatgcggccagattccgattggtctgttttgtttgtttctcctttaagtgttttcggcttaggctgctggcgaatccatcggtctgttcgaatttggccttcgacgtgctcaggggcccgatggcgctttgtcagcgtcgaaatattgctttatcggaggtggggaggcgaggagagatatttataaatgagaaagattttcaggctttgatagcaccagcaatttgttggccggcaaattgtacggcattccggttagtggaacgatggcacattcctttgtcacttccttcgaggtcttacaattagtgtttatttcttatctcattatcatccattttcagcccgatgaaaccaatgaaacgtccaaaatttgctgcttccaaaatgacaaaatggtcgacctattcccactgtcccaaggaccaaacttga

SEQ ID NO: 58069 - DNA, 580 bp, Heterodera glycines
atgcgcggggcgcatgggtcggaactctttcgagcagcacacggtggctgggttactgtatcgtcgtcattatggttgttgaaggtgttcagttgggcaccaattcgtgaacaaatgccatctatttgcaacaattatatataatacaaagatatttttaattgtgaacattttttgaataagtttaagaggtgaaaatttgtgaaaaaaaatttaattttcgaaagggcttgaaataattcccaaataaattaatccccattttcagaattatcttaaaagccaaaaattcacaaaatgtttttaatagttaattaatttgcatatttccgttatttgttaaaatgttgagattaattattattaaaataaaattttatttttattttttaatttacagacagattgtaaagagaacaaaaccatacaaaaccgacttggacagccaaagttgtactgctgctggtgctggtattggttgttgttgcctcttgacacaaatacgggctgaattggcaaaccgttgggcgggaattgcaacggggccggctgacgatgatgacctatttaaaaaattaaa

SEQ ID NO: 58070 - DNA, 93 bp, Heterodera glycines
atgaaacgacggtcatgcaaaagtggtgttgatgaccaatgtgttgggccaccaattgaatcgcgtccatgtaatgatgaacaatgcccctac

SEQ ID NO: 58071 - DNA, 607 bp, Heterodera glycines
atgccaatgatgccatttgaatgtgtggtgaacgaatcgacaaaggaaaagctgacattgaccaaagcaaatgaaaatgaatgggacatcgattggataatgaagcgttgtaaaattggagagacagcggcggttcagcagcacaaagagggcgattggaacaatgtgttcatttggctttttgctggcactaattgcattgggtgagcaataaaaaaaggcatttaatttttatccgaatttgaattttgcgcttaatttaggccattatctccgccaccaccagcagaagaagatgaagcgggacaaagcatcacaaaagggccgtcttctgctgacaaatgagtgacggacaaacgaacaaaatcaatgatcagacgcagaagaaatgaatattaattgaaaatgaccgagcataattcaaatcagtgatcaaatgtattttatgaagaaaatttttgtttcaaaagttggctaaatatggtgttaaaaattattttagaggaaaaaaacaagacgcagctaatactcatttttagcgaaaaatcaaattgaaaagcgaaattttcgctttttgcttatttttgacataaatttatcaatttta

SEQ ID NO: 58072 - DNA, 379 bp, Heterodera glycines
tttgtcctcgatttccgctcattttcgctgaattggtctcgcggtgtttttctctccaaattattctcccccaaattcgaagtgttgtcgccgaacttttgctttggctcgaccggagtgatcagaagcgaattatcattttggccaaagcacttcgcgcttatttaagcgcacttaacgaatggtttcctaatttgaagccattggttacgaatttgagcaaaacgaacgagaaatatgccaatttggaggagacggaaggggagaaagatggccatggagaggaagaaagggcggagaaagtggacggacacaaaaagcaatgggaaggagacccaaattacccactggtgaaggacgtcgtgtccatcctgaacag

SEQ ID NO: 58073 - DNA, 1040 bp, Heterodera glycines
atgcaattttataatttattttttatattgtcattatcattcataataagtccaatcgacgaaactttgttagttaaatcttttggatttaatgcaaaagtttggccaacttttgatgaaatatttggccaaggatgggaaaatgaaaaaatggataaaattcaaataacaataaaaatgatcaatgaattaaatttcgctgattcaaacaatgttttgaacaacaaccaattggatgatcaacaaaaacgcgaaattgttcataaatttcatgcaataaaaaaaggaattaagaaaagggggaaatattctcaaaaaatttggaatagaattgagctaaaaattgcgaaaaaattgggaattagtcgaaataaaatttataaatggaaaaaagaattaggaataaaaataaaaaatgaccaaaattattatgaaatgaaaagaaaggaatttattcaaagaattgatgagtttaaaagaatgtcagcagtaaatggaaaacagaaacaatttgggaaagaattgggcattagcgaaagaacattccgaaaatggaaaaaggaatttggcataaaatggggttaattaaatttaataaattttttatttttattttttaggaggaaatcaatattcgaatggagaaaaagcaagaaaattgaaaatttattataaaatgaaaaatgagaagaattcttcatttagtgacaaacaaatttctgaattcttgaaaatctccgaacgaaccctcagaaattggaaaaacaaaaatttgtaagaagtagatgatgcagcttatggaatgagagacaatttatgggatttagtgcctatttcaccatttacgatgaatttttccaaaaaaaaaaaaaaactaatctttttttatatacatatttgacatacatattttggaattttttttagatatttatgtatatgttttggccatttttttgtacatattttttccatccctatgataaaaaattaaatatttaaattatttttacagtccattagaattcaaattgtcctga

SEQ ID NO: 58074 - DNA, 1152 bp, Heterodera glycines
  unsure (1)..(1152): unsure at all n locations
tttttgcggacanaattcagcgttcgccgttgactgtgtgctttcccgagtacaaaggtgttgttttttgtcagtatctttgttctcgactagggaaattttttttttaatttttgttgcgtttttttcgaaattgaaaacaaaaaaaaggggggggacatggcacggcatggatgtgtcgtcggaatgccgatttatgattgctgctttccgatattttgagggcgtcggcacaaatctctggtacacgtttcactgcccccaaggggagaaaatcctaaatccaaagacgtcggcacatttggggccaaatttttttaatttaggccaacaaaatcaaacggaatgcataaattatatccagtggaattttgagcatatgaataggtcacggcaacgggaaacttattgccaccacacatgcgcaacggacacaaacgtaatttactagtggccaaatcggaatctcgggacacttggcattactggaaaatcaaagaaattttccgagtcgagacattccgagattcccgaccggtcaacatccattaggagcaattagtgacagtctgtgttcgggactgaaaactccgagtaatattattaccaatcaatcatcatcaatcatttatacgcataagcgtgacgcccaaaaataagaaataatgaaacaatatcaaataaaacaaacaattggtcacttttggagctggggtggcaaagaaatcaacaaattcagatcagatctttcaagaagtttggcaaactcattagaatttagtaatctcgtctctttaggcaaaagtctatagagacgagaggttcgaataaagaacgaattgtatctagcattggttgagcaataagctgttcttatagtgcagggctcccatccgtccttgaatggcaaggacgtccttgaaattgggccctctttcttgaaaataaaaaatgtccttggatgccaaggacgtccttgaaaatgaacatttagaaagttttaaaaaaattcaaagaaatttgagaaatctttgtaattttcaacgatattttgattatattatggcattatgtaaataaaatgcaaattttcaaattttctcatgcttgtgaatgaatttgttacgcaatttttcgcgtttgcgacataat

SEQ ID NO: 58075 - DNA, 525 bp, Heterodera glycines
atggtttccaagcttcttccggtcattctctgctgcttgtttttggtatgtttaagcattcggtataaaatactgtaattcgagtagaaaatcagggagtacggtatctatgatattattaatttctaaaacaggcttaattaaattcagttaaatattttaaataaagtaataaagcttaaactttcctttttaggcttctttcgccctctgctcgcccaaggctgctgatgtgctggtaaatggctcatttttggcattatggaaaatcaaaataatattaatatcttgagacctaaaaactcaatttcacggacatatttgcaggattaggattcaaaatccgttaccggatgaatccgctttattaatccagcaaaatgccaaacaaatgcacacgattgtgggcccaataaaccctacaaattcttccgtctccactattatccatattaaaattgattttttcagaaatttaaacgagaagcggcgatcagcagttgtggagctgtaagacatatttaa

SEQ ID NO: 58076 - DNA, 1197 bp, Heterodera glycines
atggttaacgggttgctttgtacctcattcactgaggctgcaataatgcatggtcttcttgaagacgacaaaatttgggacaaaactctggcggaggcagctctgtcgcgctggccagatcagatgagatggctttttgtgagcatcctggtctatggccagccgagtaatgccatagaattgtggaacaagtacaaagaccaaatgtacaatccgcaaggcattattactccggcacagcataaagtagcagaggatagagccttagccgacattgattggcggctccacaactttggctacagttgtgtccattttggcctgccagacccgccaacttcaattgccaaaaatactgacgcggcaattgaagagtttttctttggcgatgatgatttgaatttgcctccagggcaaccaaatcctcgtccacagccaaatacccctccgccacttaacagcgaccaacagaacgtctttgatgctgttttgttggcaatacagtcgaaccctagggattcgactgtcccccgccgtttcttcatatacggcgatggaggcacaggaaagacattcctgtttggccaaattattaggcgcttgcgaaaggccccatacacctacaaagtgcttgctacggcatccactgggtgtgcagccattttgctgccatatgggaaaacagcccattccacgtttcgtctgggtagagaagtgtcattagacaaactcccaagcattccgctggagagcttctttgcccgtcggattcgtgaggcccaactcatcatcattgatgagatcaccatgcttcacaacacggtgattgaggtcatcgaccgagtgtgcaaagagatggcaattcgccagcacaaggatctcctcttcggaggaaaaacggtcattttcagcgctgacttcaaacagtcgctgccggtcgtgcctcatgaaggcttaaccgctcaggtgacagcctgttttcaaacgtctccgttgtttggtcagttcaccacgatgaaattgaccatcaaccagagactgggccaaggtcagcaagcgttcttgcaaatgtgccgccaaatcgggcttggagaaaccggagagcacttctggattcctccgcagttcctcgttaagagcaaggaagagctgatagattatgtctatcctaacttccaacaactccttggcaaatga

SEQ ID NO: 58077 - DNA, 1251 bp, Heterodera glycines
atggaacagcgtcgaaacaaccccaggtttactggggagaaaatcacaaacgaagatgagtttgtgcagggtcaccagctaaatgagcagactcttgagatcttagaacaaatgatccaagtgcatcatcctgctgcgcaggcatataagcaggcgcgtgagcagctcactgagcttctccaacaacaaactccggaagagcttcgcttctttcgcatgactttgttgaatgagcgcagggctccagctggtctgaaagacccaaaattgcacccacaccaaataatcaccccttctacgggtgaaggaatgttcgctattcatgcggaccccactggtgctcctccgcccaaaggaatttgggtagagaacaaacaagggcaattaaatgaaattgctcctttcagtccgtggactgatagtcttacgtatccattaatcaagccaatgggcgatgatggatacacaactggcgttaaatatgctaagccaccatcgcgtaagcgaaaaggtgctcagaatgcatctggcctatttgactcggaagccgagtcagataatgagtcgtgcgagactcagtcaattgcattatctgatgcggggtcagtcgcagattcagatgctgaatctgtagcatctgtttcatcgcagcaccggcggattgacaaatccaaacaatttatctccctgcgagattattgcaagtattatctcgcaataagggatgaaaatgtggagttgcaataccaccacattctttcatgtggtggaggacttggtcagcgctggatccttgaccaggctgcaaaaattgattggcaaatagcaacatttttgcatagacctgacatggatctgcggatcagcactccaaaaaatctgctgcagtatttggtcaaccaatacaacaggcagaaagcacggcaaaaccccaatgcccaacagaaaactgttgatgacattggcagtgttgttcggctttccgaacacaacgtaaattctctccaatattggaagaaaatgtatgaagattgcaacaccgtttttgcacggtgccatgacgcgaagaaagcgcgtctcttcattactttcaccaacaacagggaatggcctgagttcaaagagaatatatataaaaacggtcaagtatttactgaccgttttgacatgtggatgcgtgtctggagcagcaaaatcgctgagttccgagaagaactttatgacaaaaagttcttcggaaccatcccttgg

SEQ ID NO: 58078 - DNA, 1411 bp, Heterodera glycines; identical to SEQ ID NO: 27382
  unsure (1)..(1411): unsure at all n locations

SEQ ID NO: 58079 - DNA, 761 bp, Heterodera glycines
atgacaaccaaagaaatcgcggaatcggatgacggtcgagtgttcaaagtcgacttgggaaatctcacacaagtgacgtcactgtgcacgaagtggaaggcgcatttcgtgagtttggcatttttacaggcgaatcatctatttctgctttgttgtttcagaccaatgttcgtcaagtgatggaatcaggcggaggcggagaaccgtgtgtgtctactcgtacttcggcggcgggcggtggtggttttccagtttggctgatcgttttgatcgtcgttatcgtgatttggtgagtgctgcctttcattgcttctttcaacctttctcatttttgtgtgttttcagtgttttgggtgctggtgcgggcatcgctgtgtttatggtccgtcgacgaagtgctgaagcagaaggaggagatgcacctgcggatccaatcgggactttcacatcgaaggcggacaaaactgatgaaatggacaacatcccagcgagcaaggatgacgacaccgctcctgccgccagcatgggggtaaaaagaagcggagaagtgatgataaaaatttatcactgcctttttagggaatgcaaatgagctacgccgccatgggagcgtcgacagcgcccgggaaatcgatggtatagagcgaaacggatgcattatgaagtgatgacacaacatatctacgatgacaaatattcgatatatttatatgcgtgctgataccattgtgatgtgtaaattgtcgatatattgtatttga

SEQ ID NO: 58080 - DNA, 468 bp, Heterodera glycines
tgtgatgtgtgtggaaatttcacggaacaaattgctgaccaattcctccgggttgtcagtgattgtctcgaagttgatcggcttccaattgttgatttggatcagacctgaaaaaatcaaatctcttttcaaattgcaatttgattttttttcagtttaattctaacgataatattgtttcaaaatttctatatcttaaaaactacaaatttactgttgtcagtgaacttttttttaattactccctacaaagaattattttaccttttttatttatagttttggcccaattcactccaatgtctttaaaatattcgaattcctttttttttcatttttccccgcgcaaatttctcttttctgtccattttcggcggaggtgcgcgggtgatccaacgagaaattctacaccacaatctgccccagtagatctgtctcaatccaagccggacgaccctttctttgcta

SEQ ID NO: 58081 - DNA, 1028 bp, Heterodera glycines
  unsure (1)..(1028): unsure at all n locations
atgnccaagtgtttgctgctgttttttgcctatttgcctccagcttggtctattggacatggcaattattttggacatcatgaggggttgggcgtgggcttggcacataattatgtcagcaaatatggcattccgatgaatttgaggtgcttctccattaaaaatttaatatttttttgtgtcttattctcggcatttttttaaatttaagtgaaagacattgctaaaaaattacaacaattacattttaaaagttcgaaaaaatttttatacattagaaatatttataggcacattaaaatgaaatatttttgaaaaacggcggtgggcaagcaaacattcaaacaatatattttcacctattcaagtgacgaacaattggatgaactcaaatggcgccccaaacggcacaccaaattggatggcacccaaatgatcaattcttcagggcagcaaaattgctcagatgagaattttattttgtccacattgttgagggattacgacaaatttcgcatccctggcggcggaaatgtgcgcgtggaggtggaggtaattaagagttaattaaaatttttaaaataaacaagtgtttattttggaaagcttagattgaatgaaattttgaaattttattttaaacatattctgttttacagtgcagattattatttggggttgaccgagaatcgggattttttaaaaataatatatcatttaaatatttttaaataaagaattatttaataattttttaattgcgtcaaattttcgccagatttgggtccaggaagtgtccaaaatcattgagatcaccagcgaatttgaactggacatttatgtcactgaaatgtggacagatccttttcttgcatttgcccatttgaatccgtgcaaaaagttttaaatttttatccgattttcaatttaaattcatttttagaaatatttctgtagacggtccgcgagtgttgccacaaatttggaacccattaggatgttttgtgaacagtaaggtggctttcata

SEQ ID NO: 58082 - DNA, 192 bp, Heterodera glycines
gaagaattcattcaacgatttggaagacaatttggcataacggaggaatttatccgctccaactcgcaacgaatgaaggagttcaagcagcaagtcaccgagggaaaacagcgcgaggaatatgccaaattgctgcacgagcaaatggaatttgagtcggcgcgccgtttcagagagaaatatggactctga

SEQ ID NO: 58083 - DNA, 361 bp, Heterodera glycines
tcccatggctatccgtttctttcgtcccctccccctcattaacctaagttttgcgcctcattctcggccttttctttatgtggcgtcattagcaacgtaagcaattagcaaagcacaaatcggagcatcaacggacggaatgccaattaaaatttggcggttcggtgcctttccttttatttgaaaactttttgtgttttccaattctaagaacagtcagtcttttgagagtttgtcaacacattgaggcctctgccttcatttgatagtgttgctttgataaggtgcgaattcgcttcccttttggtcgttcgtttccgccgtttcggcgtgccattggcacttcgttgcgctgttccct

SEQ ID NO: 58084 - DNA, 459 bp, Heterodera glycines
atgacggcgaatcaaacgcatcgccactctcaccaaaagcgacgattttctgttcgttttttgggcgtatttttgatgggaaaagataaatggacgacaacttacggaggagaacaaattgggagccaaaagaacgcattcgaacgaaaggaggaggaaaaagaggagaggaaggaggacaaagaagcgggaggaagacatggagcaaaaagacaaaagggaaacggacaaattgttaaactgaggggacaaaagggagacggacaaattgctaaactgagaggggagagggtcagtctcgacgaagaggaagggcacggattggcatttgaaagggaacagcgcaacgaagtgccaatggcacgccgaaacggcggaaacgaacgaccaaaagggaagcgaattcgcaccttatcaaagcaacactatcaaatgaaggcagaggcctcaatgtgttga

SEQ ID NO: 58085 - DNA, 444 bp, Heterodera glycines
agcagcctcgcgcagtccttttggatctgatccctaccgaacttgtggagaataagcgatcgccgcgacactttgcctttgccaaacgcgccagatcgttcgcttttgcgaagcgaaatgccaacggatggggaagggcttttgcctttgccaaaagaacggcggaattgccccaatggaatgagtgggcatttcctccccttaattagttacgcattttcaattttggtttttaagaaaacgctttgcttttgcggacggcggcgccagccgaaggttcgcattcgcaaagcgaaattatcgaaatttcgcattcgcttaacggagagagaagggaaagggcagaagcaaaggacggcaaactgagaaggacacgcgccgtttttgcaagcgataatatccgctttaatctccacttttatcccctcgtttatccgcccttct

SEQ ID NO: 58086 - DNA, 1486 bp, Heterodera glycines
atggccaaacggaacagtcggatggtcaacgcattgagcaccattctgaacaaacggaaagaattgggcaccaatgtgagcgaaactgtcaatgtttttaccgcctaatggcgccatattttaggatgcttttcgagttcgaatccgatcattggaccaaatgggtacgcttttcaaacacttatttataaaattgacttttcaggcaatacgaattgctacttttcgccggttcagtgttatttctttgaggaacggtaggaaaaagtgaaccgacgatggaagagaagaaaagaattggaacagacaaaatgaaatgattgttttgggaatgagaagcgatgccctttttgtgatttgccaattaaattgcgactcaacgaattttcccgcgttaaacgcccattttttatcaattcgataatttaaacgatttcatcggtcggattggtctgtctttgctgtgctaaatccaccgcttaaaatgcgaaaatgtttcaattcgctgttttttttctttccctccatccgccgttagtcaatccatcactttttttatccaaaacaaaaacagagaaagcgatgtttgtgaggcactgattcactgtttacacttagcaaagagtgatcggaagggttaagcgatcggatgagagcaggcgaagggcggagaagtcgccctttcactgcttaaccaaagacaaatgcccgcgaccgatcaatggccgacaaagcaaagtttggccgccaaatgtgagcagtgagcacgagggattgatcagtgagtgggctgcttgctgatcttctgcttttgcagtgaatgtttcttagctgctcagcaaaggattttcgcattcatcgaatgccaaatccccgccgggctcaaatctttacgcccattgcttttgggtttggccatctgtcacttttcttccgatcacttttattgccatatttttgctgataaaagagagcaaatagctcctcattcattccactcgcttttactcattcatttttaagccaaatatttaaaatggaaaatatcgaaattacgcacgaatggagcggccaacaatgggattggcccctgcaggttggcagtggcaccaaaaaaaacactctcaaaatggcacttttcattttacagcataatgacggggtggtgaaggttcacaacactccggaaaaatgggaagttgggttggacgtggcattcttcacgccaaacgaaattgaggtgggaaacgcaacgaaaaggacaaagtgcgcattttgacaggtgaaagtggtcgcggaccatctgaacatccattgcaaagtgagcggaaaggcaaaaaaacgaaagagaaatgccaaaaagggaaatggaaaaagaaatgattaattattgtgcccttttaagcacgaggctcggagcgatgtgcacggctcagtgagtcgagagattaaccgctcgtataaattgccgaacgatgtgaacaca

SEQ ID NO: 58087 - DNA, 90 bp, Heterodera glycines
atgtgtcgtcttctgccgttgtttctgacgctctttgctgtcctcgtcgcactttgtgtttctgtggaggggcagcagccatccgccgag

SEQ ID NO: 58088 - DNA, 445 bp, Heterodera glycines
atgcaactgttggaaatcattgtttccgaaaagacgtccaaggaggcactcgccgtggccgccaaactcggcctggaccagaagaagctgattgtcgtggtcaaggtgagcgttgcgttcttttaactagaaattttatggtaaatacagtgagtacaggggatagcacggattccgacttccgacattttggggtcgtaatccgattccgaaaattttttgggcctcgggttatttaatcatttacaatttagcctattaaaaattttagaaaaaaattatcttaaatttgcgaattttccgttatccgaaaatatttgagatctcaaagttccgtttacggcttccgcaaaattttgttctcggaatgccacccctggtacgtattttctacatggtcggtgaccacgaatacggcattcaaccggacaattccattccctga

SEQ ID NO: 58089 - DNA, 272 bp, Heterodera glycines
atgcgcattaacataactggttctgacaaaatcggggacgggtcagtgaatgaatgattgaatgcttattcaaaaattcaaatttatttttctgtttatttttaggcttctcaacggattgctcggcttaagtgaatggaagttaagaaatggacgatcggtttgaattaaggaatttaaaaatgatttttgccgtgctcataaaatgttttctttttttgttggaatgatcactttgcttatttttaaaagcactaccgaaaaaaaataaa

SEQ ID NO: 58090 - DNA, 829 bp, Heterodera glycines
gctttttgcagtggtcgaggccaacttttactactttgttgagtgcgcaattgcgttatgctgcagcttcttcatcaatttgtttgtggttgcggtgtttgcgcacggactgttcggcaaaacgaacgctgacattgtgcgcaattattgtatcaataaattaaataaaaattaattgtaccacaaattttatatttctcaaaatctaaccacagggaattttatttttttgtttatttttaattctttagaaaattatttttattttttaaagaaaaaattacttcttctgaaagttactttttaaatctcattcttgctaacgccaaatttaatggaatttctttaaaaattgttaattttttgatttttggtccgttttaagtaattattttaaatggctttaaatttaaaaattatcaaataacttatggaagaaagagaagccataaaaatgggaatcgaacaataaaatgccagatttcatattttggatgaaattaagccactttttacttactctcttcctcaaatggattgaaatttcccaaacagttcaaaacttgcgagaatcagccgctggtgcccgacaggcaactgttcccgaacaacacggacctggtggaggcggacatttacaagggcggcattttcctcggctgtcagttcggcatgttcgcgctatacgtgtggggcgttggcataatggcggccggacagagcagcacaatgacaggtcagtcaattaatcaattttggctgtctgtttttttgatgttctgagaattcctacgatgattaaattggttaattaaattcaacaacggca

SEQ ID NO: 58091 - DNA, 505 bp, Heterodera glycines
atgacaaaaataataaaagatttttctgtttatctaatgactataaattttgaaagtaaatttttatttaattggaatatttaataaatttattaatgaaaggaatgatttctgatcagaatctaggtagcttttatatggaattgttgaattggaatatccagtttttgtttgtgcttttccactatcgtggcgccgctgtgcgtgcagctgaacacaattttcggatgaagcacaacttaacccgtcttcagctgctgttcaacagtggacacataatgtcatcgaatataacctgattgtttagcccaatttttggggttaattaatttggctcaattggctaattgttggaatttgatgactttcttaatggctgttgaagcggcggacggacaaatgatttattttttcatgacaagttttccattaacaaaaggattaaccaactgatcagcagaaactgatcaattttgcctaattaaataagggaaaaagttggaca

SEQ ID NO: 58092 - DNA, 296 bp, Heterodera glycines
atgtctgccttctttgtcgtcgctcttcctgttctgcttgcagttttaactgaagcacaaaattttggcggccaaggaggagcgcttaatgcaccattgccatttggagggccaataaatcccgtaaattaaaaaataaataaatagctcaaaagtttaatttgcttgcctgtaagggctttgtacaggaacagttgccacacatgcttcatcacccaaatttgaaaagcggcgaagacattgaagcagcatttcaaaacggaggaggacaagtggcgggagtacagcaccagcag

SEQ ID NO: 58093 - DNA, 1321 bp, Heterodera glycines
atgttcagcgatgtttggatgggcattttcccactttttgaccgtcctcaactcggcctcaaattggcactgatttcgccccgtttcgatgttttagtggacaaacatttcgatgggcaaacgcgaattttttcaaatttcggtaagtcttttgtttttgctttttttgtaagtgattggtttttttttgtttactttattgaagtcgtaagtttcattttttcaaattggccatgaaaatattttctatctaaaattttgattggattcggtgcttaaaaaggaatttgtaatattttttagaaatttgcgattttacttatgtttcagcatattttatctatgttttaaattattttatttgataattaaaaacggtaacaccttaagggaaacttttttctcttaaaattaaaatttttttttggaaatttgatatttttaatttagttttatggccctttttactcaattaagactaaaaatggattttctatgaacaaattttctcatttaactaacatattttttcaaattttcagttgggtttgcaatgatgtttggatggaaattttgccctgttttggccatgctcaactcggcctcaaatcgggcactgtttttgccccgttttgatttgctggtggacaaacatttcaatggtaaacgcgaattttttcaaatttcgataagcttttttgtttttactttttttgtaaaagtgattgattttttggttacttaaactaatagtgttttaatggaatttaggagccccaaacttttcttggtttcaaaaaatggatgaaaattattatttttccaaaattcattattctttttgatttttttattagagtgtcgggtttttttagggtctcgccgggacaaaatctcgccgcaaaaatttaaaaaaaattcaaaaattgaattttttcaaggaaaaaatcttagaaaaatttattataagaaaatataagaaagaaaattattgttaagtttttcttgaaaattgcgcggccaaatttggaagttccatggcataaaaaagcaattttttctaaattttgaaagtttttacttttaatagaaaacttttggttttgtgtagcagtctctaagagattttggtcaaaaacgttttgtcaaaaacttattgtaaagatttctcattcgttttttggtgcaaaagttccctttttagggtttttgcttttttgttgaaatttattagaattttcacaacagcttagcaaaggaatagtttttttaaatattgtgtgcccaaaaaacgcgctccagttttaaataggctatgaaa

SEQ ID NO: 58094 - DNA, 129 bp, Heterodera glycines
atgacgtttggatggacattttcccttttttggccatgctcaactcggcctcaaattcgcactgatttcgcttcgtttcaatgcgttggtggacaaacattttcaatggcaaaagcggatgctgcgcaa

SEQ ID NO: 58095 - DNA, 697 bp, Heterodera glycines
atgtttggatggacactttccctttttgaccgtcatcaactcggcctcaaattggcacttctttcgccacatttcgagcttttggtggacaaacatttcaatggcatatcgaatttgggcaagtttttttgagtttttgttgtaaaattgaatacattttttggttttttgttgtttttaaggatttaatcccaaaaatgggccttcaatatcaaagaatttttgcctaaaaacccctgaaaataaagatttctcattcgtttttttggtgtaaaagtgccctttttagggtttttgcttttttgttgaaatttattagaattttcacaacagcttagcaaaggaatagtttttttaaatattgtgtgcccaaaaaacgcgctccagttttaaataggctatgaaaataaaaaaactttctgaattcggcgttttttttttgctgcaaattttttaagatttataattttcatgactttttcagcacgtgcgcaatgacgtttggatggacattttcccttttttggccatgctcaactcggcctcaaattggcattgctttcgccacgtttcaatgcgtttgtggacaaacattttcaatggcaaaagcggatgctgcgcaagttttaaattttttcaaattaaccggtcaaatgttttataagctctaaaaatttttgattgcattctgcaatta

SEQ ID NO: 58096 - DNA, 525 bp, Heterodera glycines
atggtcgctaagcagaccggcacgtgcaaaaatctcatcatggtcgcaaagcagaccgataagattttgaaacaaataaatgtgagtctcaaatggggataaggacagaaatctttacaattgacttcaataatatttataaaataattttaagtacacatttaagtttcagtcaagcgtaaagacttcttaaattctatttaggagcttatgcgtgccaaagtgtacgaaacttattcctaaccaacctcagatttgggttagtataactattcacttagtatacactttgccataatttttcatatattacatctaaaaatttttccttgttctattcagttcatcagagatagataaattttaaagatttaaccggccaaacggcaattgcctgtgagaattttttaatttcacaaaaaattaactggatggaatggtttcagcccatcaatgttgagattttcaaaaaatcacaataattgattttcataaaaattaaattgctagtttttttaaaataaa

SEQ ID NO: 58097 - DNA, 977 bp, Heterodera glycines
atgccttctaagcaacgaaatttgcgaaaaaatgagcaagagcgttatcagcggcggacggagaaatctgtcagtcgggatacctcacccgtctcagtcgggagtgcagatgggaatggtgaggcatcagcatctctccggggcaccaccaccccaagtttaagtgctttgcaaataagcacgcctgcttcttccattggaagtaaaaaaaggggaagacccttgaaagcaggagcgaagccaattttggcaacgcaagaaactgtgtcctcaattgacacacctcgaactgctgtcacccaaagtgaccaaggttcgccgtgcaaaaaaagaggaaaggtctccgagtgtgaccaaccaacgtttgccaatgaagctattgctttgacgcctgtttcgactcaaagtcgtggagggcgtcctgccaaaaaaattagaggcccaggccgaggcagactcagtgattccatgagcaaaagctctgaaatggatatcaatcttgaaaatgcgccaattccggcaacctcgcacactgtgtctgaaaaaattgacttcagcactgtgcaaattaatttcgccacatcgcgaaattttgcctgtaaaatttggaaatgggcagcaatcggcctttacgaacgtgatggcgaaacaccgattgccccaagatctggcccaagatacattgagacctgttggaatgatatgacccagtttctcaatgacggctttgctgccacatacttggcatacttggcaaccatatcacaacgaaaagtggtcgttgttgacccaatggtatggagcaatggcctggacagagtcatgccttacaaaaatatgacatttgggtacgaccctaatgttccggcagaagttatacttttgccagtacatttccctggacattggactctcattgtccatgatgtgcaatttggcactcattttgccgattctttgcctaccacatatggcag

SEQ ID NO: 58098 - DNA, 365 bp, Heterodera glycines
atgaatgaaacaatgccaaaccaaatccctgaaagtatttaatcccggtgtttttatgcccctatttccaatcttcaggcaagttttgctttttatcattaaatataattgtttatttttgtcaattaacccttgacagacttggacatcgaaatgaaattatggtagaaatgagccaaaaattcggaaacgcaaagcaacagttggaaaatgcacttagcgaagaaaaagccgaaaaacagctcaatgaagcagcacagaaaggatttgaagaggcgcaacggcgatttgaaattgcaaaacaagagaaagagacggcagaagcggcactaaagaaggcggaagagaaacggaagcaattggaa

SEQ ID NO: 58099 - DNA, 733 bp, Heterodera glycines
atggagcaagtgtcggccatcgacggtgcggagctgctctactgcggtatgtttgtcacgaaatgttttttgggtggacaacgctatgttttagacaccgactccatctactacgtcaacaagatgggtggtccttgtgtagcagagggcgaggcgctggggcagatgaagcgcgaacacaccgaccgacggatcgtcgagttcgttgcgggtggccccaagaactacggcatccgccacactgcgcgggacggcaccgacgagcgcgccaacctcaaaatccgcagcttccgcctgtcctatactgcgcagcagctgctcacctttgaggcgatgaaagacctgacgctggccacttacaacattgacggcccaatgtgagtttttaacatatcattcttttacataatattaaaaaaaattgaattttagcgatgatgctttggacaatgcgacctttacgtgtacggaggcggcgaacatcgtgccatacgcgtcaacttcccgcaaattgatcgcaatgtgtacgccgatctctacacgcatgaggcccacaaagactacaggcccttctatgccaaggggcgcgttcggcctgggatgcagacgcgtccctttggctatctggaggatgatggacagccgaacgaaggacaacggacgcaccgacgaaagagaaattttgtggagcaagatcccacacagcccggacactctgggtggttctgatgtt

SEQ ID NO: 58100 - DNA, 202 bp, Heterodera glycines
  unsure (1)..(202): unsure at all n locations
cccagtgacaatgaccttccccgaaatataaactaggcacgtgactccattcgacaatttacaacgaagggctgggaaaattgttgggtcatagataccacccagggtgttttggagtcgctctacactgattcgctggngcaaggtttgaacaccgacaatgttgaccacgcgcagctggtggatgcacagtgtgatgctc

SEQ ID NO: 58101 - DNA, 1187 bp, Heterodera glycines
ttggagccgaagcgtcaaactcattagcgggagctcaagggtcactaatcatttatgggttcagcccaatgtttggaatgcatccaatgcgacagacagacgctttggtattcgccggaggaaaacgaacggcacattgggagatgccaacgcggactgatcccgccaagtcaatgtgccaacagttcacacacccactgcatatttagctacttcaagcagggagggggtaagcggcaccataggcaattagcattggctaatttacactaattggaaaatttaatggaaaatcaaatcaccgttttgtgtgaaggtcatacagagggataattgagacagaacataaaaagagggcgtaagtgagggatgggatggaagaggaagtgcccacccgcaaaaatgatccaaaataatccaatccatcgttaatttctcggcggcatttttgataaacaaagggagccagcgggagagatgaagtgaacaatgaaaaaataagttggattgggaagacaataggaaggggagaggggaaacaaagaacacagagaatagggaggggacagagaaattagagagagtgattagggaaagtgccatggtgagagagagaggggggagacagagaaagtgggagggggacagagaaattagagagagtgattagggaaagtgccatggtgagagagagaggggggagacagagaaagtgggagggggacagagaaattagagagagtgattagggaaagtgccatggtgagagagagaggggggagacagagaaagtgggagggggacagagaaattagagttgccatttgcccacttctcccccaatttttgttagatttttttgtgcctattcagtgattacaatcactgaacgacgctgtggcactgccgatcaaatcagcggctgcactctgtacaaatcgatgatgcgggccaaaaggcatctgatcgcgggctcagcgattgacgtggaaccaacgaaactgtggagagtgggaaatgtgggacaaagtccgccaagtcatcgcagacgcgagacgaatccattggtggtggaagtgtgcacgggcggatgcaaagagaacggatgtgtgaacggagtgggaggaggaggagaagcgaagtggacgatggcatggattgtggtcatcggatgggtggcatggtgg

SEQ ID NO: 58102 - DNA, 221 bp, Heterodera glycines
cggagtaggacaaaacgtcgtcagccgaaacgtcgtcgaacgaatttttcgaccataacttttttctttctcaaccaaattaaacattcttggtattattcgaaagcattcgaaaaatgctattagcctgcaaattttcaaaaatttttatttatgcacaaaaaaatcagagcaaaaaaagttcgaattactgggtttttgagttccttctggccataact

SEQ ID NO: 58103 - DNA, 707 bp, Heterodera glycines
atgcgtcaatttggtcggcagttacaaatgcgaatgcgaggtgagtgtcagcgtttattttcgataaattttattcattttttaatattttatattttttagggaaaataaatttaaaattttatgcatttttaatcattttaagtttggttacaccggcgacatgtgcgcgtcacggatcagttattgtgatgatgaacaaccgtgtcaaaacggaggcatttgtcacgaccaattgggccactacgaatgccgatgcaaatttggtaatattttggaaaaaaataatttttaaaataatttaaaattgtttttaaatatttgttttaggattttctggcaaaaattgcgagtttcaacatgaagaaagcgcgaacaaatgcgaattggactgtcagaatggggccacctgccaaaatgcttcgtcagaacagtgcgaatgtccgccaaaatttggcggcattttgtgcgaaatgtaaacaaaggaaaataattaaattaatcactttaaaatatctatattaaaatattttgggtaatatgaagaaatattaaatttaatttaaaatattatacggattgccttcttattatctaaaaacacaattattgcagcgaaaagcccgacccctgcgaatttaaaccgtgccccgaggggacaatttgcacaccgacaaatgactataagtaattttttggataattaa

SEQ ID NO: 58104 - DNA, 1350 bp, Heterodera glycines
caatgacagcggcgtcggacttacggacagatcgggaaaagggggtttgagaagagcgaaacctaattaagaagaaaacaattaaaccattgtaattttaaagactccaaaaatgagagcacttcgacggaagagacggccaatttgagcagcggcggcggagacgaattttcattcagtggcggcacatctttggcaagtgcgacggcatcgggggaaggtggccaattcaaaacagaaaatgaattggatagtaattaaataaaagcaacgacatttcagattcaaaatttgtgccctttcgcccattcattcgttccgtttccatccacggcgtccaacagtaccacgacttggagctgatcaaatacagcgatgtgagtttcaaatttaggaacgcattataatattggtattttgacactcttaaaaaaatactactcaatttgattgaaattgatggagcctaattagtacggaacgggccaactccgtttggccaactccgtttggccaactccgtctgagccaactttgagtcaatataactcttaaagttattgactgaatcaaacaatcttgatatcattcgaaagctcttcacaggctctattagcctactaaaaattacagaaaatttcgaactataaaaaaagatagaaataaaaaactttgaaaattctgtcttttttgcggttttaaactgacaacttttttgagagctgattaatcactgagaaatagcttataaatatcttctaaacatctagggctttcgaatgataccatgattgtgaagtttggccaacaaagaaaaaagttatagctttttgaacattgctgagacggagttggccagacggagttgacccctaccgtaattagtataattattttttccacctttttaagacgcccgcccgtctcgcccttctgggcaacaccagcaaatacccaatcactttggctgaaattgttcgtcgcgtcagtcccccggagtgtctgaacacttcctttttgagtggcattctcagacggtcaaaatgccaaagaaaaagtgttttaattcaattttaaaactttttagagcaaaaaacaaagacggcgggaagcgatttcgcacggaattgcaacagtttaattgcggcgtcgatttgcagacggggagaagaaagacgggcgcaatcacaacattcaccgcactttgtgaacgtatgaaaatgaatttggaaattaaaatggaaaataaaataattaaatcgtaaaataaattaaggagaatctgttcaattggccaaagactttgacaaattggcaaaggacgaatgccatggatttcctgaaaagtaa

SEQ ID NO: 58105 - DNA, 370 bp, Heterodera glycines
ttacggtaggggtcaactccgtctggccaactccgtctcagcaatgttcaaaaagctataacttttttctttgttggccaaacttcacaatcatggtatcattcgaaagccctagatgtttagaagatatttataagctatttctcagtgattaatcagctctcaaaaaagttgtcagtttaaaaccgcaaaaaagacagaattttcaaagttttttatttctatctttttttatagttcgaaattttctgtaatttttagtaggctaatagagcctgtgaagagctttcgaatgatatcaagattgtttgattcagtcaataactttaagagttatattgactcaaagttggctcagacggagttggcc

SEQ ID NO: 58106 - DNA, 1089 bp, Heterodera glycines
atgttaatgctaattgtaagccaaatcaccaatccgttgcacaacgcgtgcctcaacagctgcttttccaccatccctcgccttatttgcgtagggttaaactgccacgacttcatctcacagtaccactcaaaaaagtaccattttaaaaatcataaagtttaattgcggttacggtatgcatgactcattcctttcctgcccaattagacaaatgaatcgtcccatttatccgtttatattataaattatttttttggctttatccgccctttaaaataatttttttgttttcagtgttattcgccctgtgaatttgacgatgatttgccttctcccgacgaattatctgctcgagtggaattcattaatttaaaaaatgcccaaatcagacaacagttggtcagtggtgttaatagtttttttttaaattttaattttcagaaaaatagggccaatgaaattaaaaaagttgcagaacaaccaaagccggcacaaatacggttggtcggcattaaaaaattaaaatgaaattttataaaatttaataatttaagcgcttttttatgcccatcaatggctgaaattggaaattgcgattgaacaaatacacgaggaaaaccaatgaaaagcaggcactgttttgctgactaattgcaattttaaagtaattaaattcttaattaccgactatgttcttacacttttaccaaaacaacaagagaccgggggaatcgatcttttatgtatgttttctactcacttatttgttagttgaaatttaataatttagatgcaaaaattgaaaaaaattattttgtacgattaaaattgacatttttattggctttgccgatcggaatcaaaaatcacttggacaaaatcacgctcattcaactcattcattgattcaaaagtgtgtgaaatggcatatgtattgtaaatcaaagaaatgtgagaaacattttcgggtgaatttgtagcgtaattaattaattaatggggcgaaagtttacacaaaaatggaggggaaaagaaagagcagcgaaatgaatgaatggatgataaaagttgtgaaagaaaaactaa

SEQ ID NO: 58107 - DNA, 865 bp, Heterodera glycines
atggcgatgagtgccgccgttttgggcggcttagtgggcgcggccggcggatacggcgacgcggcgctgtgcggcacggcgagggagcggacgacgcatttggcactgaaacaaccgcagcagcaacagcaggagatggcacaagcggccgctgcacaactaacggcggacgaacagcggcggcagcaacaacagcaacaggtcgaagcgcagagaaaaagcggggaacggcaaaagcagccaaggcgtagtcatggggggaagctggtggctaagggggctttttttaatcaatcaaatttataaattgaaattggcatttataaaaaattattaattcgacaagaattccaatgcgatggttcatttttaaacatttactaataatagaactgataaatgagtgatcgatcagttggcatttgcttgcctttcgagttttcgtccttttcagtcctcttcgcccacccgaccgttgggtttggggaggccaagcgtcgccggaggggtcggcggcaacggcacgcgccattttcaacgatcgcaacagcagcaaatgcatcagcagcagacgaacatggaccagtgttgtgccggggataacacttcgccaatggcacacgcgcagcagcaacaccaaatgaactccttcaacggattgctgagggcagttcagtccaacgataggtgggtgtagcaattagcggcaaagctatttttggccttttgcagtgccgcggtggacggactgctcggcctccgcggttccatggcaatgaaacaacagcagcagcagcacggccattccgggatggagctgaacgaacagctccaacttgtcagtgcacagctgatgaaccgatga

SEQ ID NO: 58108 - DNA, 59 bp, Heterodera glycines
aaagtcgggaccgggaccaagtttttcgaccgggaccgcgaaaaaacccgggaccggga

SEQ ID NO: 58109 - DNA, 283 bp, Heterodera glycines
tctcaacgactttgagcgcaaggagagggccaaggcggaacatgcgttggcgctgaacttgctcgagtcggccgtgtacgactacagtgccaagctggaagaggaggccttcaacagttttggcaccgatgaagagctggtattgatccgtgaacagacggcaaagctgaaggattggttggacgacatgccggacgatgttggggttgacgagctgaagcagaaacgacgcgaatttgtggcacccattcgcaagttgaagaaccgacagcgacagaaggag

SEQ ID NO: 58110 - DNA, 760 bp, Heterodera glycines
atggccgaggctcatgccaaaatgcatttgcggaactttgtgaacgatgacgacgtcagtgtggcgatgaaaattttattgcaatgttttatcagcacacaaaaggttggtttcaaaaacttatgttaggcattttttatttgtgcggtacctcgaattaaaaaaccgaaaagcagaaaatatgtgtgatgaggtccacaaaaatgtgtatgaacagtgtttaaattaatgtttttaggcatcggtcatgcgccaaatgaaaaaggtaatggcaaaatttaatatcgaaaagcaaaaacaaattaagaaattctggaaacaactgagttataaacgtgacaataatgacttgctgctctttttgcttaaacaattagtcaacgaacacattgtgtacgaacgtgttcgacacgggggcggtatttcggaaagtgctgacattgacacaatcgccatcccggaaagcgagttccttgaaaaggtaaccaaataaatcatctgttctgtttttttcataagcatttcaaataatttaggcccaacaattgaagatcgattcggcaaataaattctataaaagttgtcaatttactgcaaacaatttccaatttgatgcgcaacggaaaatgattgttaaatcacttatctaattgctatttttgtctatttatttttccagttaaagtttttacctcatttgttgttcattcgtgatttaaacggtaatagaatggatggtaccccagctattttttattga

SEQ ID NO: 58111 - DNA, 758 bp, Heterodera glycines
atgctcatcaccaaaccggacattgaggagacaatcggtcaaataatggccatggcttacctttacccgtcccatccgcggatgaccgccttttggattgggcccactcctaccattatgatttactctgccacgctgctcgagtcaatcaccggcaacacggaccatctgaacaaaggattttcatacgaatttttgaggccgtggctcggcaatgggctgttgaccaggtggggctgcactgtttccaataggaaattcccacctttttcagttgtgccgaacaatggaggcccaggcggaaattactcaccccgacatttcattacgacattctgaagcttttcttgcacattttcaaccatcagtcgagcattctcgtacagaaattgcacaaaattagtcaagagaacaagttggtagcgaatggcgaacaaacattttaaattatgccaacatctaggggattagttgcagacgtttcgccgttggtcagtctttgtgcgttggatatcatttgtgagacttcgatgggtcagtcggtcaatgcgcagtttgagtccgactctgaatacgttcgtgcggtgctcagaatcaacgacatcatccaacgtcggcagtgcaacccgttgatgtggctggacacacttttcaattggttcggtgacggaaaagagcactcatgggctttggaggtgctgcactcattcactcataaggtgcagtcaaatcgccaatttgccaaatcaaacgaatga

SEQ ID NO: 58112 - DNA, 363 bp, Heterodera glycines
atgaacagacggtaagcacaaattcgtcatttatttacctaacaaaacttttttcagttggatttgcaacgacgtttggatggacattttcccctcttttgaccgtcctcaactcggcctcaaattggcacttctttcgccacgttttgatgcgttggtggacaaacatttcgatggcaaaagcgaattgactatttggagaacgatcgaaattcgcaaggacaaaggaccagaaccgaagctgtctgtacaaatggatgacaaatgtgtgccatttccattgccggaccgtccgttgcccagcaaaatttgctttaaatggcttcggattgagtaattaaaaaacagttttatggaaataaa

SEQ ID NO: 58113 - DNA, 1982 bp, Heterodera glycines
atgaaccgacggtaaaagaattttaaaagtcacaaattcgtcgtttatttgactaaactgttttcccatttcagttggatttgcaacgacgtttggatggacattttcccatcctttgaccatgctcaactcggcctcaaattggcacttctttcgccacgtttcaatgcgttggtggacaaacatttcgatggcaaaagcgaattgacaatttggagaccaatcgaaattagcaaggacattggaacaaaaccgaagctatctgtgcggatggatgacaaatttgtgccatttccattgcccgaccgtccgttgcccagcaaaattcgctttaagaaccttcggattgagtaattaaaaatcaaaagctattgcaataaaagcattctttccatttttaggtacattgatcactccgtcatcgcttttcttcgttccaatcaccaaattttcgacaaaagaggcatcaatttacatttgtggcttccattatcaaacaccacgaatggccagccaatttgggatgtttttgttcgtgaaatttggcccattttttctgaaaacattcgccacttgggcgtttgcaatggcatcctttttgacaaattgcgtcgtctcacttcgcattcaattctcaccgatctcgaccaattgaattcaatctattccggtgatttgttgcctgaggcgtccaaatggttgcactctccgagaaaagatggacaacccaagcgatttcgttttggcagaaatttgaacgcacaagcggacttcgattgggtcaacagtttcaaggaggtgtggtgcggagggaggggggagcaggaacaaatactgctgaaaatccccgaatgagaaatttctcgagcttttttgaactatgagttgggttcaaggggtaaaccaaaaatacgtttaatggtcttaaatggcgttaattaaaaggtataatcattttttggcgtaaacccaacgatttcatagtgaaatacaattttttgtttaccgaaaaaatggacaaaataggacaatttagccttttaaaaaggtcaaattcagacaaatttacggtaatactaccgatggtaccacttcagaatgtttccatgtgattacccatttttagacgaaaaatgcaaaatttgaacttacgaaattttgttcgggttcggggttcgaaattagtcgaaatggatgtcatattggtgatcagcaaccccaaaaaccccagggaacattttttcacggcttttgaaaacaaaaattttttttttcaaaaaagttgtggtaccatcgggtagtattaccaaatttagtatcattcgaaagctcttggtgagttaagtctaaaaatcaaagaaaaatgtcaaaacgggagccacctaagcacagggacaactgagtcccattgaatatagacagttctgtaccaaaaaataatgaaagaaattaacaattaaaagtagggttgtacggaccggggcgggaattcccggtcctccgaggtctcggcccgttttacgccaaaaaatgatcataccttttaattatacgccatttaagaaccattaaacgtatttttggtttaccccttgaacccagctctagcttcgaaaaaaatattctataaaattcgaaaaaatgaggcccaaaatttcggaaattggaattccgaccccactcaaattgtttagcattttcttcgtgccaatgccatttcttccatcagttacgaaattcattttcctgttcgcgtgccgtcaatgcaaattgtgccatttgaattggtgaacgaatggacaaaggaaaagctgacattggccaaggaaaatgaatggggcatcggttggataatgaaacgaagcaaaattattggggagacagcggcggttcattggaaagacggaaattgggacaacaattgtaacaatgtgatcatttggcttgatagtgacactaattgcattgggtgagcaaataaa

SEQ ID NO: 58114 - DNA, 1772 bp, Heterodera glycines
atgacaaaagaaatggctaaattttttgttgacaattttttactgaaagtgatcggcaacaaaaaagctgtagtgttgcttgactcatggcctcaatggaaaacggccattggtggagcagcaccaacaggcccatcatcatcaactgactttgccagggacaacatatgtctcgagacaatacctccagggtgtaccggattcgtacaaccatgtgatttgtatttgttcaggtggggtcccaaaacagatctgacttctaatttatttaaagaacttggaagtcaattgtcagaaaaatttcggatcgcattgtgcttgacgatctgcctgtaaatctttaccatcgtgatgaaattgttaaacttcaaagtttaatccatttccaactttgtgctccaaaatttcggtcatttcgtcgttattcttggcataaggggggctacattgaatcacaaaatgatgaattttccaacttttctcatcccgttaaatatttattcccaacaatttttcctgatcactgtcaaatcactttttgttcggaatttataatgattagatgtgcatggtgtgacaaattcctttgcttcactcatttctaccaaaattatcacatgtgccaaaattaatgtcgaataaaaatgaaaaaaatattatgttcaaatttattaatattaaaaagcttaaaaactaatttggatatgaaaaaaaaacaaaataattatttacagggttggggaattgaactttagaagaagaaaaaagtatggaaggcacaaccaccaggccaccgacgctcacattggctttacattctttgaaaatgatattgaaaaggcaaaaaggaaaagcttcatatctcggccagaagcttcatttagcaaaaataaaaaaaaatttataatacaaagggggggtaatctacctaccctgaaagtttcattcggaagtcccatggtcacttgggtacctctcctttgttaggcctatttaatggtatcaaaattattttatttggttggataagaaaaaagttataacactttaaagttcgcggcgccaaaatggcccgcgccaaagtgaccccgacccccacccgccgcagccagcctgactgtctggctacgcttctgaaaaatttgaccaaaaatgtggatacaaacccaattagtacccagtgacgaaacatcagggagccttacgagttggcatagcacgagttatgtatgattttccattttaatcgtttagatagtttgacttttatcataactagggatggtaaaaatatggactaaaaatcgcgaaatatggacataaaatggtaaaaatctcaaaatatggacataaaatggcaaaaatatggacataaatttttctaaattgaggggtaaattttcaaaaaaacccgaccaaaaaaccgaaattttccattttttgcttatctttcacataaattaaccaatttttaagaaaatttaaatttaatcaattttttttgacaaaattttgctaaaaaatgtctttttcggagcattttctggtctttgaggttaaaacggccaatttagctgatgggggccgttctaataggggtttttttggaaaatgccaaaatatggaaaaatatggatatataaatccatcttaaaagcttcaaaccaagctaaaggcccccagcagctaaattagcctttttgagcccaaaacccgaaaaatttttcaaaaaatcattttttcgccaaaatttctcgagaatattgaataaa

SEQ ID NO: 58115 - DNA, 155 bp, Heterodera glycines
ttcttcaaatttattggttgaaattgcatatgagatacatttccaaattttttgactcggtaaggcgctttgacaaagacggctttcgttttgcaattagtcagtcaacattcggaaattggtctcgaattttttcggcaattacgtgcaatcat

SEQ ID NO: 58116 - DNA, 362 bp, Heterodera glycines
gcctaacaaaggagaggtacccaagtgaccatgggacttccgaatgaaactttcagggtaggtagattaccccccctttgtattataaatttttttttatttttgctaaatgaagcttctggccgagatatgaagcttttcctttttgccttttcaatatcattttcaaagaatgtaaagccaatgtgagcgtcggtggcctggtggttgtgccttccatacttttttcttcttctaaagttcaattccccaaccctgtaaataattattttgtttttttttcatatccaaattagtttttaagctttttaatattaataaatttgaacataatatttttttcatttttattcgacattaat

SEQ ID NO: 58117 - DNA, 367 bp, Heterodera glycines
attctctcatataaaataaaaatgaaaaaaatattatgttcaaatttattaatattaaaaagcttaaaaactaatttggatatgaaaaaaaaacaaaataattatttacagggttggggaattgaactttagaagaagaaaaaagtatggaaagcacaaccaccaggccaccgacgctcacattggctttacattctttgaaaatgatattgaaaaggcaaaaaggaaaagcttcatatctcggccagaagcttcatttagcaaaaataaaaaaaaatttataatacaaagggggggggggggtaatctacctaccctgaaagtttcattcggaagtcccatggtcacttgggtacctctcctttgt

SEQ ID NO: 58118 - DNA, 342 bp, Heterodera glycines
gcgattattacggagagtgcggtgttttgccgcgacgaagagaaccatcgaactatggaaaaacgaacggacgatcgcacgtcgaaagcgttgtccattcgccattatgaggaggccgtccaacggaatcggggctacgcaaagcgaaaggacattttgttcggacattggtagaaagggttttttattgtcgtcctttctccctttctgatgatgttaccacatacatttatttttgcaatgttttcttacatacttcacaattttatccattcactttgccaatttttatttcatgatgaacatgcaatagtaggtaataagcaatttggaaaaaataaa

SEQ ID NO: 58119 - DNA, 596 bp, Heterodera glycines
atggaaaacccgcgccaaaagccatcaaaagtattggcagaaatccgtgcaaacaccaaggacgaaacctttgtttccatgggcactgacctcgcactggtggcagtaatgagaaggtacttctcttttgatacgtgtattcctctttcactcttatttcaaaatttttaggcagaaaaggaagatttacggcaacatggaccgtgtcaaccctttgagtgttgtcttacccgatgccctgcttattaaggatggcgaaagcacattgttgtatgacagccgagcgcatcgccaaggagaatcggatgtggtcttggtctttgcacacccgaagttaagttcattcatttcatgttcaatttttcgcttttgttttcagctgttggacgttttgaagcgggcgaggaaaatttcagttgatggaacattcaaagtgtcaccagccgcatggacgcagtgtttcgtgatcggcgcttttgtcaaccggcggctcgcattatgtgtgcatgctctgttgcctggaaagcaacgaaaatactacgaagaggcgctcaatgcggtcaaagcggtgatggcacccaacaccccagcacata

SEQ ID NO: 58120 - DNA, 1004 bp, Heterodera glycines
cataaagtacatcaacacgtcatcctttagacaagccgatgtactgtcccgcttaatcgccaattatccccggcccgaagaagacattttgatagcaaatatctgcacagagacagattgctacataaacgtcatcctccaaactgcaactgatcaattgccgattacggaagcagaaatttcagaatgaacgccaaaagacgaagtcctccgaaaaatttctgattacaccaaaaacggctggcctcaaaagtgcaccgaaccagatctctcaccttattttcctaagcgaaaggaaattttagagattgatggagttttgctctacggaaagcgagtgatcgttccgtcccaacttcgtgaacgcatcatcaaggctttacaatggcacaccccggaatcgtgcgcatgaaagccctcgcccgtcagcacgtgtactggcccggattggacttggaaatcgagcgtatggtcaggcaatgcgaagattgccagagcgcccaaaagagtccacccaaagcaccgctcgctccatggacgtcttgctcacgaccattccaacgcattcacattgatttcgccggtccctgctcagatggccactcctatttgattttgattgactcattttcaaaatggcctgaattataccgaatggaccgaatttcgacaccagcaacgctccatgtcctccgatcaattgtctaccgactcggatttccagaagaaatcgtgtcagacaatggaactcaattccatgccgcagaatttaaggaattttgcgacgaatttggcatcaagcataccttcaccccgccgtatcacccgcaatcgaatggccaagcggagagattcgtcgatacgttcaaagggccatgaagaaatgcgccaaagatggaaaattttgggcagaaaagatgcttctcgcctacaggacaaccctgaattcggcactcaacggactttcgcccgatcaattgttcttcggtcgaaggcttcgaact

SEQ ID NO: 58121 - DNA, 1662 bp, Heterodera glycines
  unsure (1)..(1662): unsure at all n locations
cattcatgagaagtgcggccgagtccgagcggttggtttcgcgccggacatgcaaattgtcagcattcaacaggaggacagtgtcattgtaaggggaagtgccaatgaataattgtcatttttattcagccaaaaagccaatttattcatttcgaatgtcattctttttattaaaatgaccaataaacgaagtgctgtttttacaggaatttgtgctgctgcaggagggcaaagttgtgggcacttttcggcacaattgcaccgcaaaaggcgccgttgtgctcggcgtccattggctgtccaactcccaagtcgcttttgtcaccgacttgggctgcgagttcttttgtgtgtacgcgtacaaacgcacgctgaaaatgacccaacggttagccatggccatccattggttcagcttttatgtgagcacaccgaacttttgtttttggatccataatttaaaaatgggccatcataagcacatcataattttgaacaactttttctgtttcggatgggtcacacttaatctcactccttcctatcgtttctccccagaaaactaaaaaattggtaaaactgaattttcaaattatttatataattttcttgaaaaacgttagaaaaaattatgtttttttaaaagaccgctaaaaaatgtcttataattttcttagaaaatgacgggcgaatgacttcatcccaactttaggtcttgaaattccaattataaagtacatattgccacatttttccaggctccctcaaatttgtttgtttgtgccagcggtgtacagaacaacctttttagtttcgtaacttttcaggtgggacaaaacggagaggctaaaattgaaagcatttcaatttagcaaaatgttccgcacactttgggcacggctgaggttgattttggctactcttccgcaaagccccgtctgtggagcgggacattgccattgcctcaatgtttgtgagcaaccccgagagaatgtctttntaaaaataaatcactgttttaaaccccagttatggcaaactgtgcattttggtgctcaactttgagtccgtccacgggttcgccactggactcagtgtgtacgaattggtgccgtcggggccacagaagctgctgaaactgaactgtttgctgggtttgcacttggtcggcctggttgggctgcacgttgttgacaatttggtgctggtccatcataaagtgagctgaaagtctttattctcccatgacacattcctactttttataaatcctaaaaagcatattgtttatttgtttggagtaatgtccgatttgttcattgtcagaatgtccaatccactctgatctttgatctaaaactgtgcaccgatcgtccaatttgttcaacaaaactttgtctcccatctgtgccaaatgcgttgtccagtgacagtgtcaatgccgacgatggcaatgaaaacaaaagtgctggtgatttgccacacaatcaacagcatgcaaatcgtgttttatcaatcggtgatgcttttctgtacaattcggcttggaaaatgtgcatgccggacgttgtggtggatttgcaatacgaattgttcacccgtgtacagcttcaactggagagtgccgaacatgcattgacgggcgaaggagggcacgacttg

SEQ ID NO: 58122 - DNA, 826 bp, Heterodera glycines
aacgccggaccttggcgttcagctgctgatcagttggggctttgtacggaacagtccccgggagttggcactgttgttcatggaacggcgcgggatcagcaaacaaatgatcggcgagtacctcggcacattgcgctcacaattccataccgccgtgctaaagtacatttttacaaatttttttcagtaaccatagttagtttaaaaaaaactcttggcgaaatgaggaaaattgcgaactaatttagaatccaataaatttttgcacatttaaagttgtttcatcgaacaaatttcaatgtacgacatggaaattgacattgcacttcggcaattgctcaaacacattcgacttccattggaagcgcaaaaaattgaccacattattcaggcaaatgctttttttattgcaattttggagatatgaattttgagggttctctcaaaatcaaaacttttgatcaattttaaaatgtttaacctaaaaaacattttgctgtttcagcttgggattgttgttttcttgcttcaatttttgtttttttttgtcaaattcacaacaaaatctcgcattaattaaatacagtctcattttttttatctttgacattcttcatctttaggcctttgcacaacattacgttgcgtgcaaccggaacagactgtgcgcattggacacgccggactcgatgtacattttggcatttgctgtcatcatgctgaacacggatttgcacacgccgtcacttaaggactcgagacggatgaaattggacgaatttgtgcagaatttgtaccgacttgaggaggcacgacatatggacag

SEQ ID NO: 58123 - DNA, 1047 bp, Heterodera glycines
atgtcgaaaacagctcggcattgcaggtgccgcaaaagacgacgacgacggcatcattacggtgctcatttcgcgcgttattttcgcgcagacggcaaacggttggtgaggcatcgattagtccaacattttgaaaacggcactgagtcctcgcaaatttattagaatttttgtatttcacaaaaatacattaaatgattgcttactttactttttcaccaatttttatttatttatgggtgactcaccgtaatcaatttcacttcttcacccgtgtttactgtatgtaaaatctctcattattgtgtttttgttttgcaggtgtactgtagtgcagtgggccataatcatccgctgatttgtcataatggagcagcgcaacttagaaagaaaaaagattttacaccgcaaccgccgattaaggtgtgtgacagtgacggattctgttccgtgatttttagcagtttctatgtcccattatggtacttaaaaaaacaattttgctatcccgttaattctcagaaagatgatttgagaaagctctttttccaataatttaacttttttatttactggctttttggtctcgattaagaagcctggataaataacagcagttcaaataatttaaaatattttcaacagcttgaacgtagcgaatttgacgaggaaaatgaaatttcgccattcaaccgccagcaacagttagcgcctgaagcgttcgcttcggttgcgcgtccgtgccacaacaccttgcgcgtgcggcatgcgttggctgatgcgcgcgcattggaatgtgccggaatgtcgcacaaaaaggcggaagtttgggtcagcgttcacgcgttcaaacggatgatgagaaaagcggaaaagaatttgaaagtgaagaaagaggagacgaacgcaaaacaattcgccaaatgaatcaattaaaatggcaacaaaaagcatgtgattgattctccttttgtccaattaaaaatgccaatacccaacttaaatcatttaaataattatattcagcattgaaaaataattgaaaaa

SEQ ID NO: 58124 - DNA, 361 bp, Heterodera glycines
atgacccaaccccagtctatccccacgcccatacttttgtcacttctcctcaacaagtacatagatgttaaccttttagggtatcctcgtgaagtgacacaaggagaacgctttgagcaagaggttggcccataaatttctcccaaaatgccaattttctacaaaatgccaaattttttggatccaatcgcccgttttggtcatttatttcgaggccaacgatgaaacgctggtcaagcggctgatggggcgtggacgaagtgatgacaacgtggagacaatcaaaaacagactgcacacatttgtggagtcaacaaaacccgtggtggaccattacggaaagcagggcaagctagtgaag

SEQ ID NO: 58125 - DNA, 719 bp, Heterodera glycines
atgataatcaccttgaaaatcagaatgttatcagatcagcgtcgagttgatggtaaaattgagttgggaaatagatcaggaatttggctgagcatttgatcaattagcgattgaaaatattattaacattgcatgtgacatgtttaatgataattttgattatcgtaattaggcaaagccaaatcatccattttttgcagatcatttaccaatcaaacaatgtccgctatgttctgctaaacttgatcagccatatgagcaagagttggagaagcatattgcagaggtaattttggcacttcaatgcatttattacttattaattgcctttaaagacacacaataattaattaatgaattaattacttagtttaataattgcttttaaagacattttcattaattaatttaataaaatgttgtaatttaaacccatcaattaatttgctttttgtttaaaggaacacaaaattcctgccaacattgtccaacgactgatcaaaacggaaattgatgaccaacacaatcaagcaataatagatcaagaagaacatcaacaacaacaaaagtcgccaagtgtcggccatccaaacaggtaattaatatgtatatattattattaattagcacaaagccaatatataattttaaaaaaaaacttgttaattggctaactcaatcattcattttccttcagctttttgtcactctccatttga

SEQ ID NO: 58126 - DNA, 2058 bp, Heterodera glycines
cccctccggtgacgacggcatgctgaacaacatcatcgcagccctggccaataatcccacgactccgccaagcagttcgacagcaccggcaacggcggtagatgatccaacagcatcatcatcatccaacaattttggtgcccaactgttgccaatctttccgcaccaatgccggcactgttccatcgcttttcgtaccgcggaacatctgcaggtggtcgtcgctgtccaaaaacactcttttgagtcccggactgaatttggaatgtttgcgcacttttatcttgtccaatcaatctcgaactcagtcccgaattaaatgctggatttacccgcccccaaataaaaagtttaaaaatttttcagaaaaataggcaaatttcaaaaaaattttttgaaattttcttaacaattgcatcgaaaacgagttcctgctttttctccccggcgctgaaattttgtaaatatcactgtaaaataaaactttggaatttttggctcaaatagcacaaaaaaggtcttcagattccactttccgaaatctttttttatgtatacgggccctgtggtcccgagattaacctcgtaccatctctaacggctcttaacattatcgcttcgattctccgtcccctggggtgtcaattatccgcctaaagccaaatttctgcaattgacactactagccgtgatgtagggtcgtaggcctccggagatttatcacagtgccaaaactgatcaattttttccaggcccacgcattggcccattcgccggccaaatttcgcctttggcaccgctgcgatgcgcctccatgcgccaccggcggcacagattccgacgcggctggcacaagtgccgacaacatcgcggaccaacaaacgacgacggcatcggcacttttccccacaaaacgggccctggagcggcatcagcggacaacggcacacgccggaggcgacgacggcaccgccggcggtggcggccatttttgcgacatttgcgcggacgggcaacgctttgcgtccgacaccgcattgatggcacacttcaacacggagcagcacttggtgaaggcacgcggtggcagtggcggcggcgcacaaaacggggtgggtatactataataattgggcgatacgtgccattcatatattgtaaaaagaacttgatgttacgagacagaggggttggaatgctttaataatgcaatggcatttttatttggcatagttcattataatattttagcaagattagcaccaagaaaactaaatttctatgcgatgcttactgtaattttgattatacggtaatctcacaaaacttgctccacaagaagatatatgtgtatttttggatgggactaaaatttggtgaagtttaattgtgcctttgtaatctcgttttccaattccatttccaattcgggataaaaccagggaactaaagatagccaaaaatcaaaaaacgggcaaaattttctatggcatttttttatctcgaatctcggtttgatggctttcttatcaagatcactacgggtgcactaatccccccgccgacaataaatttgagttttttctttttctaaatttcttaagtagaagttttttcttttttttaattttcaaaattcaactttttgagaaaagaattcatttttatgaatttctccgagggggtggggaaactagctgatctcagatcacttcaatcagctttcagtctcgactctcgagatttgtgctcgagcaaaaggtcccattaacgatttcccagtccaattaatgccgtaaattttttcaaaaaaaaaaatttttttttttgaaatttaagccttccaacgctcccggctcagtcccctcctgctcatccgcctcatccgcttctccatgctcatcatcgttcacttccaaagcggtgaagaggccatcctcctcctcgtcctcatccggcaaacatttgccatacacgtgcaatgtgtgtgcccaatcgtttggccaacccggcacattggacacccatttgaggtgggcggcagtggagattaattaa

SEQ ID NO: 58127 - DNA, 336 bp, Heterodera glycines
atggccgccaccgccggcggtgccgtcgtcgcctccggcgtgtgccgttgtccgctgatgccgctccagggcccgttttgtggggaaaagtgccgatgccgtcgtcgtttgttggtccgcgatgttgtcggcacttgtgccagccgcgtcggaatctgtgccgccggtggcgcatggaggcgcatcgcagcggtgccaaaggcgaaatttggccggcgaatgggccaatgcgtgggcctggaaaaaattgatcagttttggcactgtgataaatctccggaggcctacgaccctacatcacggctagtagtgtcaattgcagaaatttggctttag

SEQ ID NO: 58128 - DNA, 676 bp, Heterodera glycines
gatctcacttgaatatttgctactaccaccaagatctgcactggtggaagctccggccgggcccacgcccaaagccttcaacgcaaccaccacgaccctcctacacgtcatggccagactacgcgacaagcacgtgtacaagccaatgacggtggagtataggtggcccgctccagcgccatccattttcagggctagttgattcggcaggtgagttgttacacactccttagcggattccgacttccatggccaccgtcctgctgtctatatcaaccaacaccttttatggggtctaatgagcgggcactttggcaccttaactccacgtttggttcatcccacatcgccagttctgcttaccaaaaatggcccacttggagctcaaacattcaacgcctgggttcagagtaaagcaaccctggcttcatacccatttagagtttgagaataggttaaggacatttcgtccccaagtcctctaatcattcgctttaccgagtataactgcttaacgagctccagctatcctgggggaaacttcggagggaaccagctactagatggttcgattagtctttcgcccctatacccaagtcagacgatcgatttgcacgtcagaatcgcttcggacttccaccagagtttcctctggcttcatcctgctcaggaatag

SEQ ID NO: 58129 - DNA, 133 bp, Heterodera glycines
tggagtccgcagacggacacacaaaggcattcatggacctgatcagattcattttgccaatggaagagcccgagggatcggaggaaagggaaggagcaaaagcagagacagaagaaggagcggaagaagcagg

SEQ ID NO: 58130 - DNA, 511 bp, Heterodera glycines
atggcattgctttccgaccgtttcgatgttttggtggacaaacatttcgatggaaaaagcgaattgacaatttggagaacaatcacaattcgcaaggacgaaggaccaaaagcgaaactgtctgttctgatcgatgacaaatgcgtggcatttccatttcccgaccgtccgctgcccaccaaaattcgctttaatagcctttggattaagtaagtaattttagacttttgtatatattaaagcaatttttatatttcttcagttacattgaccattctgtgctcacatttcttcgttccaacaagcaaataatttggccactttttgcgaaaagcattcggcatttgagctttttgtatggcgatgatttggacaaattgcgtcgccgcatttcaccgacaattctcactgatcttgatcaattgaattcaatcgattctgttggtctgttccccgatggaattgctgacgatggacccttgtttagacatttcgccgtgccaccacttct

SEQ ID NO: 58131 - DNA, 59 bp, Heterodera glycines
ggataattggagactgcggtattaatagagactgggccataattagagcatatacggta

SEQ ID NO: 58132 - DNA, 520 bp, Heterodera glycines
atggagcaactttccgaaatttatgcaattcgcgcacttttgcgtcattattggaagaagggcaccaatgccgaggagacagtgcgcaaaatttgtgccgtcgaaggaccaaatgttgttgacattgaaacggcacacaattggttcagtcggtttgagtctggccacctaacacttgaaccaaagaaaacaatgtaaaattaaaatttatttttacgaatttgtacagaattttgggtaaatgtcaaattttttggcagcctatatctggattccatgttggacctggacctagatttcctggacaaaaaccctggaaacgccaggtccaggaaaaatccaggcttttcgaggcatggacctgattttttaaaattttttttgaaaaagcaaacaaatgttaaaaaaaaatcaattaattgctttggaacatataaaaatatttaattgaaaataacattttgtttttaaattttttaataattttttgaaaaacttaaaaatacatcggtcagatgaa

SEQ ID NO: 58133 - DNA, 1032 bp, Heterodera glycines
atgtccacttccccgggcttgggtttacgggtggctcagcaggaatactatgtatgtgagaaatgattaagctgaggaaaatcgagaaaatgcgtcggaaaaccgagactgagaaatgagtaaagaaagacgagaatccatagagattttcaacacgagagtcgagcagagattcaattttcagttgataaaattcaacaaaatggtacgatttggcaaccatttactcatcataaacagttttgattgattctgtcatttatttaaagcagcaggtattgttagtctatttgtatgtaatttttgtctatttttggtgtttttttgtgaaaatggacacaaaaaaccttgcaaaattggacacggaagaaagaaaggacaaacaaaaagcctaaaacataaaatatgcaaatttttttgtgcaaaaggacgcaccataaaagggagaggggggggggacgaaacggaagagagagaacaaaatttggggggggggggggggttttattttgttaatagctttacaatttttaatttgcttttcccaactgattgacaattagcacaaaatggatgaaacttttcaattttatgcaaaaggccgttgattttatttactgtgaaaaggcaaaacgaaaaatacctgttaatttatttaatgagtttttgggtcttttaattaattgacaagagattaaatgaaaaaaaacaaattaattttttatttaaaaaacaaaatattccaaccattcttaaacaataatgtctgcttcatcgacattttttctgcttttttccttttggtgccaactctaaacggttaattcattaataactagtgttgctctcggggtttttttttgggtcttggtctcgaatctcgggaaaattttcgttcttagcagcagcactgtttctgcaaaaataaatgaatttgagaaagaattgttgtatattatcaatttagtttttattttgtacatttcagcgcttagatgctatgacggcactgaataagatggccgcggggta

SEQ ID NO: 58134 - DNA, 245 bp, Heterodera glycines
atgcatgcttttcagagcactttggacctgtacgttctctccatgttttggccatctaaatgcactgtgatgatgaagaaatcgttgcaatatgtgccattcttcaacatcggtgccactttggtccgtttattttggtctaattgccctaattaaataaaattggaccgtttctatttcagtcaaattgcatttttgtggatcggttcacccgagaaaatgccaagcaagcgctggacaaatca

SEQ ID NO: 58135 - DNA, 514 bp, Heterodera glycines
caaaggattggacggagttgcggaggaattgtccatggaaatgcatcggatcggagcacgcaattttggcagggacgaccgaattggcacagtgaatggcaaaagccttctgtgagttagccttttatatgcccttttgctgctttcaataaacgatcatcatcttcgttcagggcaccgttccttgaggagccgttggtctgctggctgaacactttgccgaccgcgttgaagaccggcttcggactgccgaccaatgacggcaccgccaacaaatttttgttgcgcaacgccctccgctctttgggcgtgccggaatgttttgtgcagcggcctaagcgtgcgatgcaatttggtcagttttttgtaatgtcagccattttttaaatttaatttaagttgaattttaaaatgcactttctatttcaggcacacggatggtcaaaatggagaacgcggagaatggcgacccaaagttaagagggcccaaatttgcgagaaactgatgctatga

SEQ ID NO: 58136 - DNA, 391 bp, Heterodera glycines
atgagtagatgtctacggatgcttggaagtggtgtttatgaaatgatcaagtaagtggtgtgagtgatcgtgtgataagggacgagtgagtgattaggaatgagtgtgtgatcaaagagagacacagagagatcggtgtgagtgagtgttatcagagagtaagtagatcagaaaatgatcagagtaagagttagaggtcagatagtgattgggaactaataaatgatcaaagagaaaaagtaagtgatcactagttagtgtgaaatgatcagagtgagaatgagtgatcagaatgatcagaagatgatcagattgcgaatgaatgatcaaaataacaagcggcccctatatcttaatgatttgtaggtgttgtgatggggcttgtgagtga

SEQ ID NO: 58137 - DNA, 932 bp, Heterodera glycines
atgacgcttaccagaattttcagaagaattctgacatttaccagcatttacagaaccattctgacgcttaccagaatttttcagaactattctggtgtttaccagaattttcagaaccattctgacgtttaccagaattttcataactattctggtgtttaacagaatttacagaaccattctgacgcttaccagaatttttcagaactataatggtgtttaacagaattttcagaacaattcttacgtttaccagaatttacagaaccattctgacgcttaccagaatttttcagaactattctggtgtttaccagaattttcagaaccattctgacgtttaccagaattttcataactattctggtgtttaacagaattttcagaaccattctgacgcttaccagaatttttcagaactattctggtgtttaccagaattttcagaacaattctgatgtttaccagaatttacagaaccattctgacgtttaccagaattttcagaacaattctgatgtttaccagaatttacagaaccattctgacgtttaccagaattttcagaacaatgacgcttaccagaattttcagaaccattctgacgtttaccagaattttcataactattctggtgtttaacagaattatcagaattttaaaagcacatttgttttaataattaactcagttaaattttttccaagttgagacgcgtacaagattgatatgttgtgcaatggatttctggtaaaaaatcacagaatgttaaatcatttgtaaattagttttattttttgttggtaaagtaaatagttttatataatccttattttaatttgtcttattttttatctcaacacactttaatcgtttaattaggaattttttttacataaatttatttatttattataaaaatcaaaaataaa

SEQ ID NO: 58138 - DNA, 186 bp, Heterodera glycines
atgacgcttaccagaattttcagaacaattctgacatttaccagaatttacagaaccattctgacgcttaccagaatttttcagaactattctggtgtttacttgaattttcagaaccattctgacgtttaccagaatttttcagaactattctggtgtttaccagaaatttcagaaccattctga

SEQ ID NO: 58139 - DNA, 656 bp, Heterodera glycines
gttttcggggcagtccccccgaaccgatgcgcccagatttatggggagaccgaatccttcgggaatagcttccctatagcctgtactttaattctgcgttggatttttgctccccataattgtttgagtaccccaaacggacacttgaaaaaatcgatttttttgttttcggggcagtccccccgaaccgatgcgcccagatttatggggagaccgaatccttcgggaatagcttccctatagcctgtactttaattctgcgttggatttttgctccccataattgtttgagtaccccaaacggacacttgaaaaaatcgatttttttgttttcggggcagtccccccgagccgatgcgcccagatttatggggagaccgaatccttccggaatagcttccctatagcctgtactttaattctgcgttggatttttgctccccataattgtttgagtaccccaaacggacacttgaaaaaatcgatttttttgttttcggggcagtccccccgaaccgatgcgcccagatttatggggagaccgaatccttccggaatagcttccctatagcctgtactttaattctgcgttggatttttgctccccataattgtttgagtaccccaaacggacacttgaaaaaatcgattttttt

SEQ ID NO: 58140 - DNA, 207 bp, Heterodera glycines
aaacaaaaaaatcgatttttcaagtgtccgttggggtactcaacaattaatggggagcaaaaatccaacgcagaataaagtacaggctataggaagctattcggaaggattcggtctccccataaatctgggcgcatcggttcggggggactgccccgaaaacaaaaaaatcgattttttcaagtgtccgtttggggtactcaaaca

SEQ ID NO: 58141 - DNA, 651 bp, Heterodera glycines
atggcaaaagaaagtggaggaaggaattggatgcggaagcggaggagggggcgaagtgggaggaggaggagaagccgtgggatgtactcgacttaccaatcattggaaaattggaggtgggcaccagggactggacgttcccaggatttcggcttggggggggggtaccccactttttagcttgcttttcgcaccactttttttgcggcgcactttttaacaaaaatatgtggtgatcaagggggtccgcggtgccgataggtgctgctaggagggaaaatatttacccgtgcctagaaggcattttgctgccaacctctaaataaatgtgtcataaatttcagatttggattaatgaccaaacgtccagaaaactgctgcaaaagtgtctgatcagtgccgtcaacaatttgatcaaaacattggaaatcccttttaatgcgacgaaacaattcgccttccgcgtccgagtttatggcgatgaatattttgacaacaaatataccgcaagtctgaagatgtgcagcatcaaaacattcaaagcgcttaacccctagattaatgaagaaaacattttgaaatttcgttatcattttcatattaaatttgtaattttattttagtaataatattattggctttgaatcataa

SEQ ID NO: 58142 - DNA, 455 bp, Heterodera glycines
atgtcagacaatccctgcaaagtcgaaaaacaaatggcaaaagcaatgtaattttgagtctgtatttttatgtttaaattcatcatttttccgtttttcagcttcatctccggcgacggttggctggcggtgttccatttgctcccgccttctcaacttggccttggaatcgcactgatcagcccccgatttgaccactttgtggacgaacatttcaaaacgcgaaaatgggcattgggcaatatacgaattcgaagcaaaattggacagaatggcacaaaagaaatggaaattataaattccgatttgaaattgctgccaattgcgcaaaatccgccgccaaaaaaagtcattggattcaacagaatttcgataaggtaaaattgaggaaatgaaatgattgttgggtaatagtttttttgctagttaaaaaaaaaatctattttagaacataa

SEQ ID NO: 58143 - DNA, 327 bp, Heterodera glycines
atgcttgtggctgctgcaaaacattccaatgggctgaacaatgacgacaaagagaaagtaaataaatattaaaattttttaaattattttatttaaaattattttaaatcaaaaatattttgattttgattttatttttttagcctccgccccccattcattctaccgagtcgcatcagaatgtgctgctgatgccgacaaattcgagctgttctttgaatggtcgcctcctcgccgacatggacatggacggtggcacgttgctcagtgtggaggaggtgcccatttttgaatttgaaaatggcaaataaaatgccaaaaattaaa

SEQ ID NO: 58144 - DNA, 255 bp, Heterodera glycines
atgagtgagtcattcgcttctcttcactttacataaacacatcgaaacatttatttattgaatgaatgaaattgtgacgacaaaacagtgatcagaccggaaacaaaacgaatttgtaagaccatttttcgaatagcggaattttcagtccgtccaattccgggaagcaaacgaagtccaaatcatgatcatggactttgtgtcatgatttcgagattcgattgggcatctcgtttaatagggggatgctcgtga

SEQ ID NO: 58145 - DNA, 543 bp, Heterodera glycines
atgaaattgaccatcaaccagagactgggccaaggtcagcaagcgtacttgcaaatgtgccgccaaatcgggctcggagaaaccggagagcacttctggattcctccgcagttcctcgttaagagcaaggaagagctgatagattatgtctatcctaacttccaacaactccttggcaatgacaaagagttgctcaatcgtttgattctcgctccgcacattgacacgtgtgatgaagtcaacgagatcatgatggcgaatgtgccaggtcaagtgcgggaatacttgtccacggataagccccttgacgaccgcccactggacatcgatgagatcgagtccgaagtggctgcgttgaaccggcgcacagactcgggcatgcccccgcacagtctccggcttaaagtcggatgcgtcgtcgtccttcttatcaataaaagtgataaggaaggactgatcaatggcacacgcatagttctggaagaacttggcgatgatcgcctcattggtcgtgttatcaatagcaatgctattggcggccaa

SEQ ID NO: 58146 - DNA, 653 bp, Heterodera glycines
atgaaaaagtccttaatttactgttacagtaacggtaaaaaccggtaattaccgtaactgatttttaccgaaatccccaaaactcgattagtaaatggcacttttgaacaggtccgaacaaacaaataaactcctcaaaactgtcaaaaatatgaaaatttaaaatttttaatgggataaatcataaaaataaattctcgaaactattaataattaaatttgcaggtaatcgatttgccactttggagctgaagattatccttgttcatgtgttccgacggttgcgcttctccactacaattccattcgagaagaatcgtccagctcttgaggctgtttctcggcttgaacttggctgccttttgcatgtccatgctgcgtcatagccaaaaaaatttaaaatggataatggaatttgtgaaaatggaatttcagacgacctatgatggggtgggggacagtttagtctggccggtttagtctgagccaagtttaatgaatagggttgtaaattatatggattaacatattttttctgcgcatatgctatgaagaaaggggcttaaaaatagcatttctgcgttaaaattttttgatttggtgaaggtttttagtccatataaatccatattttgggggttttcgggaataaa

SEQ ID NO: 58147 - DNA, 1723 bp, Heterodera glycines
atgggtcactgtgccgcttcgttggaccacgccgatttggtgctcaccgagttggagaacatcgccaaatgggagcacaccaaaaaaggcatttctggcggcgtcggcggggccgccggcagcggaagctcttcctcgggcggtggcattttttcatacattcgagtgcttatttcatttattttaattataaataattttctgaatgctgatcattttttattttggcaatataatattgccttttccaattaggactattcctttggtcggactgtcgacgtcgaggtgctcaatttgcgcgcgactttggtgctcagctacggctacgtggtgttctactgccccaccgagggattggtcctccgccttcagcagacggtgctgcccttcctgcgccaatacacggcaaatgcaaaagtgagttgacaatttccaagggcctttctcttcttttgcctaatgttgccaccttttatgcaggaaaccatcgtcagagaggcgcacttggagacgttgaatctgatcgcactgtccgtccatccgagtcgaattcgcgactacaaattcgaacctcgctacgaatgccttacctatgttaaagtgggcacagtgggaaaggcaaaattattgtgtggaaagccattctaagacctatttgaacgaagagaagtcgccggatcagctgaacagttggattcgccttttgggtgcaaaagcggccgcttcgctaatgtaaaaaatctgctaaatttgttactattgattggttcattagaaagcgttttctgtaacaccaattaattagtgttaattgctaacacattaatttttaattgatcaattattgattaatttttaattgatcaattattgatgctaatttgtatttattaggttgacctttctcgcacaatctgaccctttcaagcctttcaaaacactttcagcctgttagagccaccgctcagtgacaatgaatttgttgaattggccaactctctcatcttgaacatcttttcgatctgtcgcgagcgaagtgggcttaaaacggtcggtgttttgtccttcgtcggacgaatgcgaatgtatggcactgaattttatttattttttgtttttgttttgatgtttcctttcctttgttctgttttcctttaacattgcgttggacacacctaacccttttttaacgttttattcgtcattattttgccttttgccatgggattattcccctcttcgcttcgtccgctttctcttcctttcttttacgctgtctgtctgtcctcttcagttggatgcgttgtgcgttttcggttttccgcatttcacgccgcttcgtcagggcgaatggacctttcagcctgcctttgttggccacctttactcctttgctgggcaacgccttccctcggtgggccactcaaaaaacggtcaaccgacagacggagaatgccagggatggcccaaggcaattgccatggccaatgcttttaaaaatggaccaacatcggcgaagtcggggggatcaggaggagagcatcagcagcaacgacaaagagcggcaaaccgtcgacaaatgggcaaaaggggcgccgacaacggcgatggcaatggaaaagccgacggcaaggcatgccaactgaacattttttgttgtattaagaaaggcctcccggggttttgccccgtttcggcgatttggttgaaatgtgattga

SEQ ID NO: 58148 - DNA, 314 bp, Heterodera glycines
atgacgaataaaacgttaaaaaagggttaggtgtgtccaacgcaatgttaaaggaaaacagaacaaaggaaaggaaacatcaaaacaaaaacaaaaaataaataaaattcagtgccatacattcgcattcgtccgacgaaggacaaaacaccgaccgttttaagcccacttcgctcgcgacagatcgaaaagatgttcaagatgagagagttggccaattcaacaaattcattgtcactgagcggtggctctaacaggctgaaagtgttttgaaaggcttgaaagggtcagattgtgcgagaaaggtcaaccta

SEQ ID NO: 58149 - DNA, 383 bp, Heterodera glycines; identical to SEQ ID NO: 51114

SEQ ID NO: 58150 - DNA, 388 bp, Heterodera glycines; identical to SEQ ID NO: 51536

SEQ ID NO: 58151 - DNA, 1313 bp, Heterodera glycines
ttgactattgaaattcgcttatgggaattgagatttcatttgttatccgtcaactttcttctttccttcataaaatcctctgttgttttaatccaaaaagctccattaaaaatgacattaattacataaatttttctcccattttttttccaggaaaggcaaatactccgacaatttgtccgtcgatgagttatggcgtgccaaacatctgtacgactcggcattccatccgcaaacgggcgaaaaactgttgctgatcggacggatgagtgcacaagtgccagctaatacgatcatgtccgtcccatttttgcaaccatttttccaaaatttgttgaaaattttttagtaccggcggcatgctcagcttctacaagtcggttcaacgcccgtttttttttgtcatgatgcattttataattgttaatttttcacaggtctactcctgcggttgtagggtggcaattcattaaccaggtggaaaaaaaacttaacaaatttcgacttttgctgttgtggcgccccaggaaaaaaccaaagggtgtactttgaaattttttcaattcgactgtttgttcgagttcgggctaatgatttgttggaatatatgtcagattgtgatcagccagcaacctcggaaaccgcattcaaacaaattttccgaattattttaacaaaaaagcaaaagagtcctttctgattttttttcttggggccccaacagcaaaagtgcccggaatttctcattttcccccaaattttttggcacattttcaagacgtacaatgccactgtcaattactctaaccgttcgggcgatgcgttgagcggcgcacaacttttgcaggcgtatctgatggcaacgggtgggaaaattaaaaaaaatttttcgaaaaaaatttccagtttttgattgtcctgtctgttctatgattctcaaattgtaggtggagcgatgggcgttgcgttgggactgaatcatgcagcgacggtcggtgtttagcgatgcctacaaattttttgaaaaattttttcctctacagaaaatgccaccaatttggggtcgccttgtgccattcgcggccgttgcatttgcaaattgtgtcaacattccgatgatgcgacgaaagtgcggcacaaaaaaaatgcatgcatttttgaatttcatcttttttgcagggagtttgttgacggtgtccaagtggttgattcaaatggtgtgccgttgggccaaagtcgcaaattggcatggtgggcaattccgcaagtggtcgtcagtcggattggcatggccacgccggggatgggtgaga

SEQ ID NO: 58152 - DNA, 359 bp, Heterodera glycines
atggtacatcaaatatctgatccaaataccgtaaaattcgatgattttataatattagagcagattggtatgggagagaattttaaccattttcatggagtacctccttatcaacgaggttatggtcgccagcgaggtggcggtgtaggtgatgttttacgatatttatggagagccattctccctaaaataaaatctattggaacattgttgggtaaagaagcactggcaacaggttcccgtgttttagacaccagcaagaatggggaatctccaaagagcgctctaattagtcaagtcaagaaaggaattcataatttaacggaaaatggtgggattgaaggcaatatggaactcgt

SEQ ID NO: 58153 - DNA, 203 bp, Heterodera glycines
gaaaaaggcgaaataaaaatttctaaaatgaaaagagtggaagagcaattgcttgagtatcgacgaacgcgaaaagcggctcttgagcagcaaagggtggacggcgatggaaaatcggacatgccaatgtcactgaatggccaagaaggtttttgggatatttaaatttaaaaaattcaaccaaaagattaccttttgatgaa

SEQ ID NO: 58154 - DNA, 2901 bp, Heterodera glycines
atgccaaatcttggccattaccgaattgtcggtggtagccgggtcctagaaaacagcaatggaagccccggttttttgcgccaaaatttgttgctgattctcactgtcagtgccgtgggcatcggtgtactgctcggcgttggacttcgccaagtggagcccaactaccgaatgatcaaactgatcggatttcctggcgaagtacgcaatttgttttgggttttaatgtaattaaatttaatgaaaatttaaaataaatttaatgttttaaatttttcagcttctgatgcgcatgctcaaatgtgtggttgtcccattgattgttgcttcgctggtcaccggattggcccagctgaacattcgcgactcgggtcgaattgggggcattgccgtcctttattatctcgtcacaacgacaattgctgtcatggtaaagcaaacataaaattttaaattgattgaaatatttcccctatttaaatttcattgtgcttttaattagaaaataattttaaaaatattcgatacatggcaagggcgtagaaaccataaataaaaattttaatgaaaaattgaaagatttgtttatcttaagaaatttcattaaaattcacagaatttgacccaaaaaattgccaatttttgatgaaaatcttttgaaaaaaacggctaaaaattccaaaagttttcccggtgcacctttcatatgttttttacctttcaaaaaaaattgatgcccttgaacattttgttttgaaaaaaaaaataaattattcgttcctcataatatttaattccagactggcatttttctcgtcttgaccattcgtccgggtgatttgggtcacgacacgaatggtaatgggtatttgggaaatggcagcaacacaaagccaacggacaccatggacaccatgctcgacctgatcaggtcgataagtgatcaaaaataattaaaaaatctattggcgtaaattatccaatttttctaaaatatttattatttatttaaacgcgctaattatctattaattagtaaccaaccatcctttatttaaagaaacatgcttccggacaatttgcttggcaccgcgttgcgccaacagcaaaccgcctattactgtgtgattgatggtaggaagacgacgagtcgcgccctctgcgagaagcatacggtacatttgccggaggcacaaagggaccgtttcataaggacggagctacagaacattgacgggtacagtacacaaacaaattaattattaattatttgttaagaagcagcaacattctcggcattattgtctgctccatcattgttggcattgtgttgagtcaaatgggcgacaaggcgaggacaatggtaaaaaaaattctaattgtctctttgcgaatttattttaattttttgtgctaattggcacaattaaaaatcaattacaatcaaagctaaaatagttgacattatatttaactttccataattataattaatttttaattcccagatcgatttcttctccgttctggaccaggtcagcatgcgtatcattggctggctgatgtggtactcgccgattggcattgcttcactgatcgccgcaaaagttctcgaggttgagcgactgggcgacacgctttctcgccttggcttggtgggttaataattacaaaatttttaataccgtcatcttatgtacagttctgtgctaccgtaatggccggatttgctatccatttcttgatcactttgccgctgatttactttttaatgacgcgtaaaaatcctctgcgattttgccaaggcatgcttcaagtaattttccgaattaatgtaaacagtattcttttccgctataaatattcataattcttgcccctcaggcaatggccgtagcatttggcactgcgtcaagtgccgccactttgccgacaacaatccgttgcctggagcaacacttgagcattgaccggcgcgtgtgccgttttgtgttgccggtgggtgccacaattaatatggacggctcggcaatgtatgaagcggtcgcaacggttttcattgcgcaaatggtgggccgaacactgaacattggccaagtgatggtgatcaggtgatcggaaaatgaaaacgaaaaataaatttaaaacgaatttaaaaaattaattgtatatttttataaaaataattataaattattttataaaataattttacaaatagtagaggttaaatgaaaaaacaaattaaaatgaattgtttcagcttaacatcaactttggcatccatcggagccgcgagcattccctccggcgctttggtggcaatggtaaaactctttttttgaattaactaacaataagttaatttgttcactaggttatgattctgacagctgtcgatctcccaattgaattcatcacattgattttggccgttgattggttcctgtaagttaattgcctaattaaattaaatttaaatcataaattttatttatttctaaattcttaggggttgtttccgtacagatcatttttaaatctatattttataaatttattagggatcgtttccgtacatctatcaatgtgcttggggatgcgtatggtgccgccattgttcaccaccattgccgtgagcatttgtcaccggctgctgatcagaagctaatgaacggctttgttgttgccaacaacgagttgaaactgatgctaaaaaacgacggcattggtctgatcacttttcccggcaacggagtcgcaattggtaccaacaatcatttgctgctggtggagaaagaaaatgccgacaaaaatgacgagggaagcagccgaagcagtgccgcgagtgagggaagtgccgacggacgacggcccctggtcaatgccgactattcttaa

SEQ ID NO: 58155 - DNA, 558 bp, Heterodera glycines
ctttgtgctgtctgcgctgcttttgctgctgctcccttgggcgtccgacgtgagggtgaactgtccgcctattccgtgttcaaccccaactgtgaacggttgccgggccaattgactggcgaacactttgagcgggacatgctttttgccaggaggcagtaatcgatcgaacaccgacgggttctaaccccctcccccccccccctaagttaagccattttttgggtgggcctgtgatttttgtactgttgtatcaaatattatatatttagaaatgacaaagaagtgaagcaaagaataccaaaagcaaaatttaatttctttttaaatttatatttcgtttgtttttttagtcgattcataggagatgttctcgttttattgtaaaggtattttttgtacagaattttctgaaaatttccaaaaataaaaaccttaaataagtacaaaaaatagacatctaacatcgaagaagctccaacccaagtggaaagtgcttttttcctgtttatctcgattattaaaaatgctcaaaatttgcagttctttaaaaaagcg

SEQ ID NO: 58156 - DNA, 148 bp, Heterodera glycines
caattatgagtaatagggcccggatgggataggacgtgtggattttcccggaccaaaaattggattttaaatcacatcccggcctgattcccaatcccatccccgatttttaacaattacaggactctaatttcacacgcaatcattt

SEQ ID NO: 58157 - DNA, 1279 bp, Heterodera glycines
atgaatacaattaacaaccgacagattgcgccaattccccaaactttgtcagaggcgcgtcagaaattgcgccagcgcccgcgcgtcaaattcaacgaggaggaggaggtgatcaacccgggtaagtggctgatcagtgattggattgacatttgatggctccgttgagtttagaagaagtcgacccgaacatcggccggttcaggtaacaaaagcattggacaaatggccaaacgatttacaattagtgaagggattaaataagttttgagttttattttcggaattacttattttgtcataaatacaccactgaatatgcaaaataaacctaaaaggcatggacaatcagtttttttggcccaaaatccgccgcttcaaataatgccttttgcgtctattcgaagttgaacttttccatccctctcttttgcaacttcattcatttgttcatgttttgaccatttgcctccttcccccagaaatatggttcggactgcggtcattccctcgtccaattcgaaccgccgtcagagggacgtggaggaccaattgttcgacttttacacgcccagcgagccgaaaaagaaaaaggtggaatttctgccctcttttttctgccgtgggtttgttgtgagatgaatcccctcttttcagctcctccaccatccgttgaccgccgcttcgcccgtcggtgcgcgttcctccctctccggcactcgcattggttcacttgcgctcggttcgctgactctcaacgcggcgcccgacttggaattgttggcgaaggagcctttttcgttttttaaacaatgcttcgtcagatattctcccgctttgccaccctccgcttctttgaacgccgttgcgccatcgaaatacggtccctcgcccgcagcgaactcttcggcacggcaattgctcggaggaggggcaaggggcggagattctggtatattcctgatacaatccaatggaaataagagcagctcgtcccctctcatcccccgatttttttttaatttactaaaaaatttcacaaaaaattaacatttttctagcgattttttaaaatgatgaattactgtttggggtggtgacgtaatgcacccactggactgattttgctatttgcaacttttcgcagttggcactgttccgtcggcagttgcgcctgacgaatgtccgctgaagaagaaatacgcgaaggaagcgtggccagcggaaatgagaaggcgttcgggcagcattctctgagcaaataagcaaatgaactcga

SEQ ID NO: 58158 - DNA, 558 bp, Heterodera glycines
atgcttttaagccccgccgtgaggcgggacagttccaaaattttgtaccacattttactgtggaaagtccaagtaccttattggacaactacgtgtcaatgagcacagtcgcctttggccagttgtggaacggaaaaatgggaatatcagatgggggcgctcttttctaaaaattcctcttttcgtctaaccatccctcccttttgtgcactatttcgtttcaaaattgaatcattttttttggctttttgaaataaattgtgaaaaatatacgaaaattattttagcttttaattatgcagtacaatgcttttaagccccgccgtgaggcgggacagttccaaaattttgtaccacattttactgtggaaagtccaagtaccttattggacaactacgtgtcaatgagcacagtcgcctttggccagttgtggaacggaaaaatgggaatatcagatgggggcgctcttttctaaaaattcctcttttcgtctaaccatccctcccttttgtgcactatttcgtttcaaaattgaatcattttttttggcttttgaa

SEQ ID NO: 58159 - DNA, 387 bp, Heterodera glycines
gcttaaaagcattgtactgcataattaaaagctaaaataattttcgtatatttttcacaatttatttcaaaaagccaaaaaaaatgattcaattttgaaacgaaatagtgcacaaaagggagggatggttagacgaaaagaggaatttttagaaaagagcgcccccatctgatattcccatttttccgttccacaactggccaaaggcgactgtgctcattgacacgtagttgtccaataaggtacttggactttccacagtaaaatgtggtacaaaattttggaactgtcccgcctcacggcggggcttaaaagcattgtactgcataattaaaagctaaaataattttcgtatatttttcacaatttatttcaaaaagccaaaaa

SEQ ID NO: 58160 - DNA, 887 bp, Heterodera glycines
atggaacaccaacaatctcttctgccaaaatattttgcattttttggcatcaaagtgtgtttaaacaaattttaataatttttaaacaaattttaataatttttaactgcatcaaaattcataaaatttcatgccaatttataaatgttcttttgcatgaaaatattaaaagttggccccgattgttaacaattagttgcttatctctatatatttttagggcaaaatatttaaaattatatttatagacaaattttttataaattcttttaaatatatatatttatcgatcatttttggagtaaaattcatggactaaaattactccttttatacagtgcatcaaatttttgggccgcaacgcaaatgaaagcggatttatcactaattagctaaatttaatttttaaaataaggttttttaaaatttaatttcattaggacaacagttacggtgtgccgggtgaagaacgcttttttcttctgaccaaaaatttgttcccagaaaagtacaaagatgaaaagaatagtggtaaaaatgagcagcagcaacaatttgcattggatttcacttacaaatttgatgttaaaggatcgctggaccaccaaaaggtaaattaattagtttgtaaaatataattattatttttaaattaaatttttaagttgtcggccaaaaaacgaaatgccagcaaacatccgatgttccgttatttggacctttatgatgagaatgaacagcaaatgagtgccgatgaacgaaaaaagattgaagtgacgaaggagggatgctttttccgcaatggcattatgctggaggatgaaacgtacgaaaaattcatcggcattttggggagagatacagtggtaagaggagaatgtcattaa

SEQ ID NO: 58161 - DNA, 778 bp, Heterodera glycines
atgacattttatgattattataatgcatttccaatgccttcttcattcatccgtgttttgttgtttctcatcggcatttttctagtcacaattttggcaactccgtcaccccaaattgatgttggtgtgtcggttacgaaccgaactgaagccatccgccaaggattgatccacgctttatccaccatcactagcaccatcgattttggcaaagtttttcatgataatgtgccgtcaatcaagcaggacagaaacagtcgtagaagcattgaatacaaaatgccgatgccgacattgctggaattgggtcaaaaattcacattgggcgctgacggaaaacgccaatttgaattcactgcctacggcatgcaagcattcagcaaattggcagatttatggaacttaccaatgcaacaattaattgtacacaaaattaataatggctttaaaaaataataaaaaataatgataactttgaatttttcaattcctagggattaggatttggactctaaaaaaggacaagtttaaaaccacggacatttatgaatatttggcataatctcttttacaatgccaatcttaatttcagacatcgttgcgaatgggcaaacttcatcagatttcaaatcccaacggtcgcttgtctaacatggacattttcatcaaaacggttgatcaacaattcttcatcaaagacgtcaagacgggcatggagacgttgaagaataagcagagaaaagcactcaaaaaaacaaggccaaagggcggagattga

SEQ ID NO: 58162 - DNA, 1166 bp, Heterodera glycines
aacaaaaaaatcgattttttcaagtgtccgtttggggtactcaaacaattatggggagcaaaaatccaacgcagaattaaagtacaggctatagggaaactattccggaaggattcggtctccccataaatctgggcgcatcggttcggggggactgccccgaaaacaaaaaaatcgattttttcaagtgtccgtttggggtactcaaacaattatggggagcaaaaatccaacgcagaattaaagtacaggctatagggaagctattcccgaaggattcggtctccccataaatctgggcgcatcggttcggggggactgccccgaaaacaaaaataaatcgattttttcaagtgtccgtttggggtactcaaacaattatggggagcaaaaatccaacgcagaattaaagtacaggctatagtgaagctattccggaaggattcggtctccccataaatctgggcgcatcggttcagggggactgccccgaaaacccaaaaaaaaattttttggataaaaattatttaaatgaactgactagataatatttaaaataggttatttctcttcctttcagtatccctgcaaagtttggtgcgcttctgatcagtttctgaaaaaaaagttaagcctaaactttttggcctgtttaaaaaggaattaaaactttttaacacccccattcatctcccttttttgatagaaaaagcatcagagtgcctaaactaacatgtaaataaaatttggtgcgtttcaaaaaccctttctgaaaaaatatttaagaatttaattttgcaaaaaataaattaaaaacgaaagactcagattttcgaaaaattttttagagcaagctagctccggcgctcatttcagggtaagttagtcctttaccggggagtatccctgcaaagtttggtatgcttctgctcaattagcaaaaaatatgagtgatcaaactttcactaaaaagttaagcctaaattttttggcatatttaaaaagcaattaaaaaatttttaaaattttattcacctccattattgatagaaaaagcatcagagagccttattaacttgtaaataaaatttggtgcgtttcagaaccctttctgaaaaaaatatttatgaattaattttgcaaaaaataaataaaaacgaaagact

SEQ ID NO: 58163 - DNA, 1029 bp, Heterodera glycines; identical to SEQ ID NO: 27469

SEQ ID NO: 58164 - DNA, 531 bp, Heterodera glycines
atgttccaagttgtgttcgagatgaagaagaagcagttggaggaggagaagaagaagcaggaggagcaagagaacacactggtgagaacactcactgaccaactaaaggaattgggtggagaatttgaattttactctttttttggcgattcgtttgggtccatgccattcgaaaaatttttttttttgaataaatgcaacaggcaggacccgaattcttgttaaaacagaacctgttcgggtccatctctcggaaatccgggaagttcccctggtcccctagggttttcccaaatttctggggtttttttggttacaaatttcctcccgtttttttttaaattttgaaaattgtcaatttgtgcctaattatttattcaaatttggcagaatgccgagcgggaggcgaagaacaacggtggtggtgccaatggacagcacagtaatgggaaggctggtggtgacatttatttgtcggcatcgaaaaccgaaaatggcaccggcggcggcggtggaagttgcggtggctga

SEQ ID NO: 58165 - DNA, 3067 bp, Heterodera glycines
  unsure (1)..(3067): unsure at all n locations
tccacaatgccgcccaccaccaccacatctatctcatcatcggtccctgcaattgtttttgcttttaagcagagtaggacaggaccgggaatttttggcaaaaccgggaccgggacctgagaagcagggaccgggacctcggtttttattcgggaccgggaaccgggacctcgaaggacagggaattcccggtcccatcctaccctacttttaagttctcggcctattctcgtgccttcgtttctgccttctgctggtgtctctttgttgtggctcatttaaattgctgttctattggacggacaagtttatatgaatttttcaaatgttcattcgccttaactgcttaactcataaaaatcacattatgaaaattgaattttgatcaaccaatcttttgtttttttagacaattcaacccaaaaatatttgcccgcaaaagtaaatgtcgtcgccttatacacttttctcggtgctatgtcgaagcacgaaaagtgcaagtgatcactgatcaaataattattcaaaaaaattaaaagtaaaataattattttaaataaatttaatatagtttatatanttagtttcagaaaatagaacaacactagatttttcaaatataaaccaaatgattaatactagagcctggacgggcccgggggcccggcaggcttttaccgggcgataaaaatagataaaaaaatatttaaattaatcgcatcactacgatttttgaaaaaaaagaaaaaaaaattaattttctaaacaactgtcctataatctgggatatacatataaaaccaataaattatgacttaaaaatataagtaattcaaaaattatataaaacgcttcaaaatttacaaaaaaattgtttaagatctaaattgaaaaaatccagtttattttttaagtcccccaaattataatgatccaggtcttcaaaatatgataattaatttgctttttaattcctacgaaattcatgtgaatttgaaaaatccatttttcagctgccccacccacagcggagtgatccaaagtccgccggtgtacagcgacgggctgaacatggcatttgcgccggtgttcgccttccatttcccagaccgtacacagatgaattttcggtgccaaatccagacgtgcaacaaattggacaatgagtgccaaggactaactgtgagtggcaccggaaatattttggcacaaaaatggggttttggatgtgtgtgatttgggttttccaggccagagacttggacacaaggccaaatttagaatggggaggaaaaatactatttttcgcatgacggcactgcaattttgacaaattagagtttagaaatggtactgtagatgccatggatgcgatactactccaaataatgacttttaaaattttttttccattacagcctccaaactgtcagcaaaacattgttggcctaggcgcatcaagcggcgaaggctacagtgctccacctactggccccgtggtaccgtataccataagtgagtggcgctgctttggcatcactttatcgcaagaatttgtggcatttcctagatcctccgccaactccgaactttgttatgccaacgctggcttcatcggttggcgtcggagcttatttgcaacaaccgatgttacagcatccgccgtttatcggcgccggggtgagtgaactacggtaggtagaggcctactgttgcacagtttgatttgcgcagcctttcggtcacaaccactgggccgagaccagagctttcgcaaatctgaacctccttagaattttttttgctcccttttgaacgaatttactggcgctggaattctcagggttacagtatcaaaacccaaaaatttttaatgataaagtgaggtgtttttgattccggctgtaggaaggcacagccggggaacatttttgaaaatttcgacgaaatcttctatcattattattttttatattgttccatagattgcgccctcatcgccgccaaatgcgctcccattggacagcgttttgcagggcaatccctcccaagtgctccagggactccaacggccgtggccaagaagcagcagcagcaaaaaaggcgcaaaacaccgggcagaaacaaggcgggacactgacaatgagcaacaaaatggtggagaacaacaagccggaacaggaacaaaagcagtagcaccaacagcacaaggacgccgggaacagatggagttggaacatcgcattctgatggccacgcaacagttgaagtgggcggaagcaattaagcatgctaattaaacacactctctctaattgacttgaacaataatgggctgatcacagaatcaaaattcttgatcagtaatgaactgattagatttaagtctagtgtttatgcgataagcaaaatggtaaaaaaaagcggcactttaaattaagcatactaatcattcaggcacaacgaggacggcagttggcccccatcgttggtgattttcggcacgggcaacaaaagtgccggtagcgcggctgctcgacgcttcttccgtccaattccagcagaagtatgtgataactgataacatacgaactccatcccagtaaggggttgtgcgagatttcgtgtcgttttcgtttcgccttttcggcacttttatgtttcattttcgtgttttggttttggatttaaaaattaaatttcattttctatattccaaaaaaaatttcctttcttttaaattttaaaatttaatgtttttagttttggttttgtttacgagaaagattatttattattttcgtttcattttcgattttcgattttgcacatctctgttcccagtcgtgggcagcagcttttcgagaatcgagactgagactcaaaaaaaaaactaagaaatttttcgagtagaaaattgaggctgggactcttatcgcacatgtttatcggtcagcttcttttctctatactctcggccattttcaggaacgcgaattacggcaacgccaacgccgtgcggaggagcacactcaggtaccatttggggacatgaacccattttggg

SEQ ID NO: 58166 - DNA, 873 bp, Heterodera glycines
tttcccgcagcgattggccaatttttgctgcgcggtgccaaactgaagaattgccgctgggtgttcggtgtcgtcgtctacacagggcacgactcgcgacttctgatgaactccaccagcgccccgctgaaaacgtcgcgcattgacgtgatgaccaaccagcgcattgtcatcctctttctcatgctggtgctgatcaccatcgtcaggtgaccgggcaatttggaatgagagtgccggatggaaccatccgattatgccaacaaatgcctacggaaaaattagaccaaacttagctaaaaagaagaatttttggtgaatttaacgacctttaggaaatgaaacgaaattgaatttttgtgtaaaatacactttaaattggctttggaactagttccgctttaaaaagctatcaaaaccttatatattattatgttacaacaatatggggtttttaaaaagggtctttatatatgtgctttgtgtgtgtttgtgcctccaatcagccttttgcagtgtcatcggtgccgaagtgtacaacaaatggtttttggacggccattggtacatcggcgccattggccattggtccttctggtggaacatgctcaccttcttcatcctctacaacaatctcatcccaatttcgttgcaagtgacgctggaaattgttcgcttcttccaggcctcgtacattaaccaggcattgactatttttgagtacattcaaaattttaaaacaaaaattgttcactaattaagtccaacctttttaggacatttttatgtatgacgaggcaagcgacgtatcggctacggcacgaacatcaaacctaaacgaggaattgggccaagtgcaattcctaatgactg

SEQ ID NO: 58167 - DNA, 724 bp, Heterodera glycines
atgcttttgtgttcaaaaatttcgcactttcttctgcttttgcttggtgccctgctgttgttgtccttcatttcaatgggcaacggtaattaatttaaaaataatataattctaattttaattatatgaagaaataaaaatacaaatattatttaactttttttggcatgataatgggtttacttatttctaccccccccccccccccctcttaattagttggaaaattagtacgagtcagggtactaccagcagtactgagttggcctagtacgagttggggctttcataaaccattcatactccaatttatagttgctaaaaagtgccaaaataattaatttttagtttctaaaaacccccaaaatggttttgctaaaaatggccaaatagtttctaaaattcaaattaaggggggtgggtgtaaaatcgaaaattttcttcaaaaaacaaaaatattatgccaacccattaattagatacataattttcaaaatcaaaaattatcgtcaataaaataaattaattatttttggagatgattttttgagaaatttttcatttcttaggggtgtattttttgaaaaaaatttttaagtcgattcttaggggtgtatttttactttttattgcatttttttaacaaattttgggcaaaacgctaaaatagttgaaaatagtttttttaaaaaaattttatagttttttagttgctaaaaataaa

SEQ ID NO: 58168 - DNA, 1031 bp, Heterodera glycines
atgttggggtaattaaaatggactgtttactaagaaaccgaaaatccatttctgcgaattcatttgtttatttttttgtaataagaaatgtttttcattattttatcaacatactataattacctttttcattcatttaaattactaattctcatttaacggagctttcatttccttttacccgagaattaattaaagtgcttcagctttgtgggaccccaaaatgtaaaaaaatgagaaacacgcaatggaatatgcagtgccattaaaacaaaaaactgattaattcgcagaatcattagtgaaaaaatggaagttaattgaatggagtaaaattcaaaaactaaataacattctcctaaaagaggaattgataatgttaaataattctatttattatttaaattaccgagtcaatggtttcataaataaaacaacaattaagccgaaatttttaattattgtagtcgaaagctggcaaaaacgaaaaattttattataaacagtgaaagataccaaaatattgtatgggtacagtaacagtcaggtacagacagtacaatgtatacggttagcaaaggaatttcctgatgcacagttcctggtccacattgacgaagaacattcggaggaacaaatgcaatggcgcggcgcccgtgaacatgtcggtgtggaacagcgcaaaatgaccttggcgaaggatacggtcaaatgtacggtagaacatttggtgggtgtaattggccatcaaaaaataggggtcatgcacctgcaaaaaagcaaaactacaataattaaatggaagaaacaatttggcattagcaagaaaagaataacggaggaagaaaaaaaggagaaaatgaaaatttattcgcaaataaaaagagaaaatgcaaaaatgtgtgataatgaaattgctaaaattgtgaacacaatcatttgatgcaatatttggagaaaaatggaaagaaaaagaagaaaaacaacgaaatgagaagaaaaaaagagaaataattggaaaatattataaa

SEQ ID NO: 58169 - DNA, 870 bp, Heterodera glycines
atgaaattatttccgctacttttattaattatattatttttaattgtaaaaattggatcggaaaagaaaaaattgcaacaacaaaagtcatttggcgaaatatttggagaaaaatgggaagaaaaagaagaagaaaaacgaaatgaactcaaaaaaagagaaataattggaaaattcaacaaaataaaagagaaaataaagcaaaaaggaagaaaatactcaacaaaagaatggcataaaattgatggaaaaatagcgaaaaaattggggacaaatcgaaataaaatttataaatggattaaagaattatgcctatataaatacaaaacaaaaactgatgatgataaattagaaattatacaaaaatacattacaatgacaaatgaatacaaacaaataagaaaatattcgccaaatgaatggaacaaaaattatgccgaaatttgtaagaaaattggagttggctatggaacaatttgcagatggaagaaacaatttggcattagaaagacggagaaagaaaaaatggaaaaaatgaaaatttatccaaaaatgagtgatgaaacaattgcaaaaacaatgaaaataaatcgaaataattttttaaaatggaaaaaacaatttgaagaataaatgattcgaagaacaattcgcttttttaaaattattatttaaaattgtaattcttttgtttacctttattttaaatattttatgcaaatttaaatgatctgggcaattttttgttaattttgagatttttaaacaaattattacatacaaaaatttttttccaatttatggaaacaaaggtttacacagaaaacattttttacaataatatatttgcttgactgatcacagatgcca

SEQ ID NO: 58170 - DNA, 897 bp, Heterodera glycines
atgttcccagaatgccgcctggtcactgctgatccggcagctgaaatcaacgccaatttgacgcgccaaattggcggcacttttgtgcaggcggcggttggcggtgaaacggccacgggacagccagtgaatttttggggaaaaggtaattattaggcactaatggcggtcgagagtctttcagtatcgagccatttgaagattctcggtaactcgaataaagtctcgagctccgcaaaatagtaatcttttttcgtctaaatcctgcggttttctgtatttatttggcgttatcacttttcctaggtttttattttttagaacataaaaaacctaaaaaaaaatttgaaaaaagctattttcaactatttggagctttgcccaaaaatttattaacaaaaatgcaataaagtgacaaatactcccaaacaatcgaccccaaaaattccggaaaataaggacctaagaatcgacccaaaaatttctaaagacatgcataataaaggaaaaaatttttttcgtctccaaaatttattttttatttttttgaatttggtttttaaaaattatatatctcaatactaagttggcttaattttgttgctttttaggttaaatttttacaattttacacccctaaatttggaactttttggcacctcttttcccatttttagcacctattttggctgtttataacctaaaaaataaccattttgacaatttttagcaactttaaattacatttctactaattatcggcagataatccgccttgaaattggcaacgaaaaagatttgacaatgaagtcggggcgtcgtttgtgtacagaatttagtcaaccaaattcaattaatttgagtattcaaaatcccaagaatttttttttaaattag

SEQ ID NO: 58171 - DNA, 405 bp, Heterodera glycines
atgaaaacgcttcgccgtcaacaggcggcagcagttggtcagtcgcccattgttgtgcattcggtggggaccggtttgccaaggaaccaaccgattcatcaggtaaaaagttttttgcacattaccgaaaaacgccaaaatttcagcgccagcaagtctgcaccgtgccctcccatgaggtcatctacgacgtcccatgcaccggagaggaccagcaagaaggatcggaggacagcttttgagaaacactgaggatccgacaatctgagctttaaattcacacacacacacatatatcattttgcattttcatataatcatttttaattgcattttcatataaccatttttaaattgcattttcatttatcattttcaaattgaaatttccatatacgcattgaa

SEQ ID NO: 58172 - DNA, 422 bp, Heterodera glycines
atggtaaaaaagacaattcctcactttacaattaacaatctgtcaccttcagtaccggacgaagtcgactgcgaaatgcccgatgaacgtgttctacacctcgaatgttttgaaagcggcgattatggtgtaagtaactgtgatgaatcctatgtttaaatattttattctcaattttaatccattttagatgatggaattgtacgggccggaccgtgctaaagagatgctgatcgacctgcgcgactatgccgaggcgaatggaatgccatgtcaacatgtgaagatgctgctctacaaactggacaaggggctgatcaaatggaaggggacaaagccctgagaatgaatgaatgatgtgtgatgatcattgtgttggggagcgggaaaaattggtgatggtgtttattttaaaaattgaa

SEQ ID NO: 58173 - DNA, 705 bp, Heterodera glycines
atggcaatcaacatctccgacaaaaaatcgttgtgcaaccaaatcctcggccaaaccgatatcacagtgacctcgagtggcataaccatcagcggtccccgcctctcgacacctcgcttcatcccatttgatgaagccggccgttgtagatgctgtaagggcactgagtccgaaattgacactgtgatcacgaaagaaggcatcacgctttggtgcacccgcatagagaaggcccaattcatcccgtttgatgttgtgtacgatttgcctggtcattgctttttccgtttgaaaaataagtctcgtgtgttcaacataccctacggcgacataccctcttctgacacgcacaccactaaacggcgcaccaatgaccaacagcatgagctgaagcgcaaagcaaaggtagctcttgacttagtggaggccggactaatggccgatgccatgcaggacggcgcacgctggaagaaggcgaaaacagcaatcaatgtgctcggcaacctccttttggcggaatcgctggacaacacctccgctaatgtaaaaaatgatgtcgcggacatcaaaaaagaagaagaagcaactgtggcggaagaacacaaagaagatgatgatgaccaacaaaaagaggacctcggagacattgacaaaacgcttgacgatttcttcaacagtattaaagcatccacagcaaacatgtag

SEQ ID NO: 58174 - DNA, 1299 bp, Heterodera glycines
cagatgtaaactcattggagtcggggccagtggaagatgatgaagaggaggaggaagaagaagaggtgggaagggtaacgagtggaggctgctcgagaattgaattttctcgagtctcaagaagctgggcaaagaattggacgagagtcgagggtcgattgagactgacacctcaaaaacccatagaaatttcttggctcgaaaaccccagcactttcgagtgagctacaatatgatcaaattggtgccactattcccgactcagtaaaattccttggttttaaatgtcatgatggtatcttttctgcaacatattagtggtggtgagaacgaaaaatttctcgagactcgagccccaaaaaccccgggatttttctcgagttgagaccgagactctcaaataagcaggaagatttctcgaattagcatttaaaaaattaattttaaggatcaaaagcgaaagccgagacggaaagcatcagatcaaggcaaattatttgtggatttatttatttattttttatcatcaaaattaatgctgtttaagcagatgaagaaaactcattggagtcggggccagtggaagatgatgaagaggaggaggaagaagaggtggtcaggggaaggggagctcgctgaaacttagaaaaaaatataaaatgaaaattcagaaaatccctcgccgaaagagaacaaagaaaaagaagaagaagaaacggcttcattatgatgatgattacggcaattatgatgacgaggattacgatgattatgacgacgatgaagacgatatttacgaggacagcgactacggtacctatgaggatgactacgacagttatgaggacgattatgatgatgagccggccgatatggagccggactatgattcagaggaggaggaatacgactatgtggatgaaggcggtggtggcaacaatggcattggcactggcgtgtcaaggccgaaacgatgccgggacacgaccagagagtgcaggcacggatttaacagacttttgggggaatgataatcgaccggaaccagtttatgaatttacaaaatgctaggtgtatgataacctcccagtcggggctggtaaatcggagatttccccgaaaatggcttaaaaaattcgcgggaaattagcccaaaaatgccgggggccctcccaaccataatttgttgtttttaatgggaaagttgcaggacaaagcaaatgcgtctctactgttccgacgaggactatgaagaggacatgcaccaaagatgtccagtgacatgccgattctgtaaag

SEQ ID NO: 58175 - DNA, 797 bp, Heterodera glycines
atggcaacgacccgccccttcccagacacggcacacgggcctcactcccgcgacattgtccccgaaacggcatcaacccttccgacacggcatttcctaagaagcggcaacgaccgaccctcccgacgtaaaattgtcccgacagaccctccccctcacccttccatcccgaacaaacgaacaagtggaatttccaataatttttttggaggtttgtgaaaatgggaatgggacttgcatacaatattaaattttatttctttgcaatttaatgatttgttttttgttctagtgaaggtgtcatttccccgtttcgtatgggccacacactcggacgaggtgtttcgcgttcctgagggatatcaaccggaagaggaaataatgtttgataattattttttgctaaattatctgtaattttgtaatttgtttatctgtctgtttttgtttaaaatgttctcattcgtattgtggtccagccactgtcatatgttatatttatttagtgcttgtatgacgtattgcgattagacaattaacaaaaaagttatacatgaaatttgcgaaaaaactcgaaattttgaagtttttgttaataaaaattttttcaggcttgaaaatcttttcgctttttgtaaaggctaatagagcatgtgaagagcttcgaatgataccaacaatgtttgatttggatgacaaagaaaaaagttgtagtggaaaagcatgctggggccaaatcgtgacggccgaactgaacgcgtagatttattattgtcattagtcgtaatttcaaatga

SEQ ID NO: 58176 - DNA, 149 bp, Heterodera glycines
atgaaattgagcggacaattcctttgccttcgtcccatctcttctctcattcgcaattcgtccgggctgagattcactcttttgaagaagcttttgtccacaacaaacgcttcaaagagttcgaaggattactcagaacgaatcacaaa

SEQ ID NO: 58177 - DNA, 289 bp, Heterodera glycines
atgggcaacatcgacgtgggcctttatgcctcaaaggatgcctttgcgaaggacattcaattgattcgcaacaatgccatcgagtacaacccggacaccgacatggactccaagcaaatacggcacgccgcaaatgccctcgtggacatgacggaggcactgttcagcatggaaatggacgacgatttcccgaccaaattggaggaggcgcgaaaattggtggaggaggcgaagcgatggacagaaaaaatggaatcggcggagaaagacgatggcacgaggaatggag

SEQ ID NO: 58178 - DNA, 130 bp, Heterodera glycines
atgcgtttttggttaagccgtaaaaacaaaggagatgatgcagtaaacgatactgatttggaattggaattctctaataaacttgatgatttggaaaatgataataaagcagaggggatcatcggagacg

SEQ ID NO: 58179 - DNA, 93 bp, Heterodera glycines
tccaagtggggaattgaacccaggcgaaaaattatgaaaggtagaaagtttaacgactacaccacatgtgcatgtgtgtaatcccatgactaa

SEQ ID NO: 58180 - DNA, 129 bp, Heterodera glycines
aaattgtacaaaacttactagttttttgaaaaaaaaaattaaaaaaatttccgacttttcatcaaaaatttcggaagtcggaattccgaccccaaaaatgtcggaaatcggaagtctttccgtgccata

SEQ ID NO: 58181 - DNA, 806 bp, Heterodera glycines
atgtcgggtcaaatcagagcaaaaataccgttacttaaccgagtgttaataaaagaaatacagaaaattaagtcaaaattagaagaagggaatttcgagtatgataaaaataattttgatgactgttctcgaatttttaataaaactaaagaaatcattcaaagaattgaaccaaattttgaaaaattaaaaattttgcaccaaaaatggcaaaatttaatgaggcgaatgaataaaacagaatggaacagtgaatggaaactacaaaaaatattccgggaaaagcataattatttaaaaacaattaaggaaattgacgaaatccttgacacaattaaggatataaatttggaggtaaaaagaaggctgaaagcgctcaaaccaaattcctcttcagaatccgaccaagagaatgaatcaattgatgaagagcaagaaaacgatgatgaagaagccggagaagaagaagatgaagatgaaaaagaatatgatagtgatcaagaggacgaatcacaagaaatgcattcaagtgatcaaacacatcgtaatcgcataccatttgttcatcaacgatcaagaataaagcttccggcacaaactctaactcacttttcgggaaaattttcccaatggccaagtttttgggacgattataaatcatcagtgcataacgattctaacatggaaaacatacaaaaacttaagtaccttcgtggacttttacatgatgaaccctaccggattgtgtccccatatcccctcacaagcaaaaattacccaataataataaaattgctgaaatcacg

SEQ ID NO: 58182 - DNA, 1410 bp, Heterodera glycines
atgcaagtcacacttaaaggacataaggttaaagctatttatgataaaaatatttgtaatattgttacaatatcattggaaggatgttattcctgtactagtggtgctaattggactttatcatgtaaaacaaattttggtaccgcattagccaatgttaaatgtccaagtcaaaaggtccaagtgaattgtgataaagaaggaaaagaacaacaaatccaacttacatataataagcaaaatattatagaaaattgtgaagttatctgccccgatggtaagactgaaattattttgaaagctaatttggaatatatatcccaacaagataataaaattattcctgctaacaatactaatgaaaaacctattagcggaacttcattggaccaagtaactgatatattaaattttgtctattcccttattaaaacaaattttttcaatatatttattattatcatattcatactcattataattttcctaattccatgtctactatctattctatataaatttatgtgtcgctgccttcctctttcgcgcgggagtgtcgcgacgacgcgaaatcctaagataaaacccaaaacaaaaaatgtaaaaaataaaaaacattagaaataaaaatgggaaaaataatttaaaattatttctacatttaatttagaaaaaacacattaaaaactattaaaatatattaatataaaaatgggaaaaaacctttagaacaataaattaaaaaatgtgatcggaataatagtgcttttccttggattgaaaggaacggaaattaattaaatattaaatgattaatatgtaattggcaaattctgttaaaatacgttcgtaaacaaattattaatgattaatttgatatattaaagaaattgaaattgtaaagggaaaaaatggaaaaacaacaattaatgggaaaaatggcaaaatccaaagggataaacataaaaacaaattttaattaaaattagaaattggagcgtactatgatgcaaaaaagccgtataaaagcggctgggcttttcagtgattttcagttcgacattggttccctccgaagtttccgtcttcccccgtgccacaccatcccgaagtgccctgcgccttcccccgtgccacaccatcccgaagtgccctgcgccttcccccgtgccgcaccatcccgaagtgccctacgccttcccccgtgtcgccccatctcgaaaggtcctgtgcctctctccgcccgtccttttccgaagtgccctctcgcatccccattatgccattcccatataccgttcaattttgcccattttttattttttatgtttttgtattgatcattttttgtattgtgtcgccaagtttgagggctcggtttaattacccaagtttgagggtacaaataaa

SEQ ID NO: 58183 - DNA, 477 bp, Heterodera glycines
atgagaaaagtaatcggaaaaagatttattgagtttgattcttttcaaactctgacttgtgaaattgaagccctggtaaattcacgaccaattacctttatatatgatgaaattaactcttatcagattcttagaccaatcgacttcatacttccacataaaaatttatgtattcctcctattttggaaaatgaggaaaccaaagacccaacttattacccaaaaaagacttcatacgaccaaacaattgaattatggaagaaaaccacaaaattattggatgattattggaaaatttggactgatgaatatataccaagtctaagagaacgttataaaatcgaaaacaaaaatccacgaaattgtatgaaatcttttccagaattgaatgaaattgtaataatacatgatcaaactcccagagcaatgtggaaaactggcattgtcaaaaatgtcataactggatcagatggtatc

SEQ ID NO: 58184 - DNA, 589 bp, Heterodera glycines
gtcgatgtcagcggcttccgccccgaggagatcaacgtggaggtgattggtaatgaaatcatcgtcaatggggaacatcgcgagcagaacgacagtgagttttgccattgttcgagtaattttatcggggttttggattttggtgagacaaatgtcagggcttgagtgttaatggattcatttaaaatgcttttcggaaccatatttagccaatttaggcttacatttagcgaatcagagaaatatcgagaaacttctttcaatttggaaaatttatatccgcatttctgccatttatggccatatttttgcaaactcttgattttttacgtcccaaaatacctttgaatggatttttcgaaacgcaaaaatattttttttcgggtcgggcatattccgaatttatgattgatttaaatgcaataaatgtctagtcataatgctgtttttcgatgattcattgccccctccaactcaggcgaatcggtccaccgtcagttctcgcgccgtgtgctcatcccggagggcatccaaaaggagagcatcaagtgcgagctggacggcggtcgcttgtgcatctgcggaatga

SEQ ID NO: 58185 - DNA, 1219 bp, Heterodera glycines
atgattgccggacttggctgtgccgctgcttcgggtgtcaccaattcgtcgtcgtcctcgtccccttattacggtggtgtcggaggtgatgagcagcccactgctgatagtggcggtgttgttcggatggacctcggctggacgacaacgcggcacaataaccgcaacgccaacaatggccaacacaaaaaacaaaacggagaagcgacgaagacaacagagcaggaggagcgggagcagtacagcaacaacgagttcatcctgttggtcaacctgatcgcctctcggtattacaatacaaaaaatagttaatagttaaactgtgattatgaaaaattttagcaatttttaaattctgaaaattcgaaatttggagttcgtgattaacttcaaatttccagggtgttttacgacttttgccgtgacaattactggtgcggtgcggttcggaacaaaattcagacaaagttggccaccattcatgtgcgttgtttttccagattccgattttttgggtgattttgaggggcccaaaaatgtaaatttatgccaaaaaggtatcaatttagtaaaaaaattactcattttcattgaaattttgtttgtttttcggtcaatttagtcaatggtcttcgtacaaattgtaaaagttgcagttgccctatttcatcgagacgctggagctgtccaagttggacctgggcaccatcacggccccaaattgtgcgggtgcacccgcccgacggtcaacgaatggggcatttggtgcgactttgacatcaaatacgacggcatgattcgactcgtgttggaaacgcgagttaacttgatgaagctgaagagtgtcagcgagtcgtcctccaccgccacaacgccgtcttcgtcatgtccaatcatttccggtgccggcggtgccatcgacccgacggcgacattaactataaaaaacggtgccgtcgatgaacagcagcagcagcgacaacggcacagttgcggtggatgctgtgccacttctgctggtggtggtaccgccccacaaacgatgccaacttcgacgacgacgccgttgttgccccggtccagctgttcgacctatcgcattgcgccaaaccggtgaattgatggggggaacggagaggagggggtttgcatcagcacacttagtttcaccaggggttgttccttagggaattaaaaacaaattctttttaaaaataaa

SEQ ID NO: 58186 - DNA, 512 bp, Heterodera glycines
atggaatcatttttaaaagttttaaaggaaagcgaagaaacgctgagggatttattggctcaaatcgaattggaccatttggtgccaaattcggcggagaaattagtcgaattgaaagacggaaagctaattgaaagcccatcattggaaaacattcaaaagcaaacagagcaatttgtgaacaatggccaacattcgcaagaagcaattgatatggcaaaagatgcgctgtcatcaatgaacacaattaaaaatgggcaacttttttttcatctttccattgaaaatttgaaaataattacagtggagaaaaagcagaagaaaatgccaaaaattttggctttattatcgcgaattaaaatctcaggaaaaaagaaaaagacatgaacaaagttggcacacaataagcatttttaatttgctaatattattaattaacattcgtaaatgcagttaaattgaaattttaaagtttaaaaaatttgcaatttctacctattttcaaagaatta

SEQ ID NO: 58187 - DNA, 1569 bp, Heterodera glycines
atgagctccgaattgaacgaacttcaaagcccccctcgtgtttacttggaaggcttggtggatgctgttgacgagagggttcgagaggcatttctgaacaacatgatggcgttcaacaacctgttcgcctttgcatctacacatggcgaaaaggccccacctgagcaaatggggggccgcctggacacgtgcaaatacaacggttaagaatcaacttatacatttttaataaaaaaatttaggggaattttcgttcctgttcagcgacctaattgccccgggggtccgtcgcccgtcgtttgctcaggtttatacattgacgccggaagacgctttgaatgtccgtgaaggggcattacacaccgcagttgcgccgcacatcagacgcacaatcatccagagacttgaggcgctgatgcgggcaaacccatttggtcagacattccagacggtgggtacgaagattgaggcagctcgagcagcaacgggagaacttccgcattttcgagtacacctacaatgaatcaatttttgattaaattaaaaaaatttattaaagattgccctgttgacggatcggcacttaaagggggttccgcttcaaggacgcactgatattactgttattgaacgagcggatgcaccgactgccaaacaagtggctgtaatttgggtagaagaggatgggctaccaccacagatcagcggtaataacaaacgatccaaaaatagtctcatcataaaataattaagctttctgggtgtccgacaaagccgggaagatgcgcgagctgaagagtggcatgccgcaaatcgacccgtgctgcttcccactactccacccacttggcacacttggatggcggtggtttatgaagaagcgtgggtccgaggttataacgagaaagcctatcaaaatcaaaaataattaaaattctcaagaacgcccatcatgaaatgcagcaacaagaggaaccggatttggaccaaatttccgacgacgaattgggcgacgaagttccaatcgatgacattgtgggtacgcagaagaatgatgaggaaattgacgaaatgccggagctcgaactggaattggacaacgatgttgccgaggaacaggaggaacctgatatgaatgctgtgggttcgtctactgcacagccaaatcccggacgcaatgaaaatgaggacgtcatctttgaccatgaagtggagactcgtggaggccggaccaacatctctgaacgacagttctaccgctaccgcatggcacttcgggggtccggcaagaacaccttccattggttgtggttcgcgcgacgactcgccgagtacttcaccatctctgtgctcaaccggatcgagcgaaacgaccttgaacatctgaaggcaatccaggtcaagaagaactaccggcagcttctagcccgtgaatatatcgccgccatggagaagggggtccgacagcaaggaccaaatgccaagctcggccgtgttttcctcatgccacagaccttcgccgggtctcggcagtattaccaagggaagtacgccgacttgatgacaatg

SEQ ID NO: 58188 - DNA, 387 bp, Heterodera glycines
  unsure (1)..(387): unsure at all n locations
atcttccaccctnttgttgtccttttgccaagtggacgaattgcgaggcccaaccgctgcagcaattgtcgctgttgagcccaacgagcagcagctgaacacgccggcacaggccatggtcaacacggcacggctcacctttgaggaggccatcttccccgaagtgccgttgaccgccctccaattgttggcatttgtcatcaaggcaagacacaattgtggcacttttgttcactgctcaacaaatttctctaaatttacataaatgtccattttcttcgattaaaaaaaaagagtttgccaagcaatttcctagcatttaaatttttttcaatgataaaaaacaatgtttgctctctttaaggaaatttttcataaaaatccaaa

SEQ ID NO: 58189 - DNA, 197 bp, Heterodera glycines
ccagtcgcagtgcttcagcaatttgtttggcatggaatggcgccaacggagggcacagcaacggatcaatgcgtacggttcgcaatgtttgcccaatgagtgcacacaaagggtcgaaggaggaggagaaaaggcgacgaattcctctgccaacatcgacggactccttaatttggaaaggattaagcaaaaattga

SEQ ID NO: 58190 - DNA, 257 bp, Heterodera glycines
ttcccttcttcctcagcgtccaatggtctgaatccgctattacaggaacgctttgtgttccatgtgcggcacccggagctgtcactgctgcgctttcatgtggaagacggcgatttcgtcggtccgaagacggatccgttcattggacaggccgtgtttccgctcgactccgtccgctgcggcttccgctccgttccgcttcggaatcagttcagcgaaccgttggaactttcggcacttctcgtccatgtggaaat

SEQ ID NO: 58191 - DNA, 534 bp, Heterodera glycines
atgtcggcgatcgaaaatgacgagacaaagagcagaatttggcagcaactgaagaccaaactccactcgacgatggtcgccttcggaagcgggtcggtgcagttgcccaagctgatggacacgttcaggtgcgtctccgatggactcaaaaaagggcactttcactttttaaatccggcatcaaaaacatggagataggaaaaacaaaaagttatgcaattttcatcgcattcaaagatacatgcaaaattgttgaatgctttggattttttaactttaatttcttccgtttttttgttacgtttcaatttttaggcatgattggggctccgaattgacttcgtacgcggtccaactcggcttcggctgcaacgacgcggcggtgtacaaaatgttgctgacgatgcccgacgaaattgaaagcggcttcatatcggccactggcaccttcgcgttcaaagtgattccgaaggcggagaccagcgaaaacttgacgaagatcgaccagagcaaccaataccaagagtttgttgg

SEQ ID NO: 58192 - DNA, 304 bp, Heterodera glycines
gcacaaacaaattgaaaacattctgcgcagttcacgcggtcgactgcctcccaacggacatcctcccatcgtgcggaaaatcagcatccgttcgcaggtccaacaggtcgtacaaaaggagcagcaggtccaagtcgtacaagaggttgtttgataagaaattgcttattgtattcgagatttgaatttgtaattttaggacgagcaaagtcacgatcttcagaagccgaaacaatcatcgaatgctaaggacgagtcggaggacatcatcggacaactgatcgaacaatttaagagattgaaa

SEQ ID NO: 58193 - DNA, 1361 bp, Heterodera glycines
gcgtctttgtctttgtcccctcggagcaaacatatcgcaatttgcttgattttgcactcgtttatgggtccttcgacggcggtgaccagggacttctgaacgcatatttcaggtttgattgttttttgccatgtcgcacaaacatccactaattttcaggtcatttacattttttctctttcagcacatggcgtgaatcagatgctacccaccgtctcccgttcacttacaatgtcacgaccgttgccatttatggctatgccgccgctttgaagcggtaatttgtttgctgaacagcagcgacaatgcaattgtttgttgcttttagtttcgcgccgaacatcaaaataatccattttcttggcaagcaaaagccttgggctctgctctacggggacggcgctgcggggatggcattcgtttcggactatcacaaggtgaaggggatgccttatattgaacgcattcttttcaaaaagggtgcacttcacttacaccccgccggttccccaccttcccgaaatttgaaaaaaggttatacaaaaaggtttagattttttcttgaaaaatttgtttgaatattttttcaaatttttcggccgggtaacgacgtgtaagactccgtttcaaaaatacgacatatttggtgtttgttcgcatgcttttcaatgttttaacccatttcagcaatggtaccaactctacgcaaacattgtccagcaacttctgcctccgtcctcttcggtaatttcttcttccaccccttcttctcttccgtcctcttccttctctattattcaacatccgttgacttcgttcgaaaaccgtcccattgtcgtaagctgtgcagtgttttatgtgttcttttttaactattattagggaattttttgctgcttaaaattgcagttttagtgcagcatgtgtgtccctttttgcgtcccgttcaattttatttacggtattattcgtaagcggatcgccactagtaaacgcgtacagatttatgggacaggtcaaaatcatgggacgggttaaaattctatgggacgcataaatgggcattttgactgtaatactaacaatttcatgtcttattgctgtgttaacagtttccattttttcttttattttctaaatccgttaaaccgatttcagtcgcacggtgctaccgcaatcccggggcgtgcgcctgctggcggtggttacgaggcttgggaagcggggtcaccggattatttgggtaataacaactcttttattttacaaattatttctgttccatatattcgaatttttaaggtgctgactcctttgccaacattcagaaggctattgaaaaagcactcaaaggcgaatga

SEQ ID NO: 58194 - DNA, 381 bp, Heterodera glycines
atgaaagatgaaagttattaaaaagaaaaataatttttttatttcatttgtacttaaaaataaatatttaaatattagtaaatataattttcatttttcctatttgttaattttttaaattataaaaacattttgaaaacaaattcagctgttcaacgcattgttgacctgcatgttggtgttgatatgctcaaaattttggacaattatgctgagggtttttcgggtgtgctgaaagatttaagtgccaaaaatggtcaagcaacaacattcaatgccatgttcacgacggcatatttgaacattttgtccagtttaagcaacaaatgctatgtgtccattgaggaaggaccttttggacgaatcggctcaattataatc

SEQ ID NO: 58195 - DNA, 168 bp, Heterodera glycines
atgtcagaactgaaagacgcaccgacgcattggtcgggaatggacgaaaatcgggaggaggaaatgatgcgcgagataatgacgaacggacccatccaaattagtgtaaatgcatatgatgatatttacaactatggtgaaagcagcaatcgaatcaatgtttacgtg

SEQ ID NO: 58196 - DNA, 305 bp, Heterodera glycines
gtgttggatttgtgtgcactgatgttgaggcagctctggaggcgcgtctttcatctgccaaggacaatctgatcagatttggcgacgaaatctacataaagctgagcggcgaccatggccagagttgtacgaagattaccgtctcattcagccaggctgctcggtcaaattctccatcaaacaatttcgtctgtgccgttttccctaccaaggatagccgcgaaaacttggagcgctatggaatcacactttgggaacaaattgacggaataggcacattggcgggcaaacgagtcaagtggtaa

SEQ ID NO: 58197 - DNA, 904 bp, Heterodera glycines
atgatggggatcacgaaaccaccgcttctcctgtccattggatttgaccggattatccccgcgccatttcacgttttccaggggattggaaatgccttaattcgggaactcgaacagcaggaaggatgtgtcgaaattgctcaacacttttttcggagattcggcgcgcggagggagcaatttcgtaaacgagacatgactgggaattcaattagaaaaatccttgtccatgcttctgaaatggaacatctcttttcgacggattggccaattacgatttgcagaacccttgtgcacctcgggaaaattcaaaaattttcaaaagtcccttttttctcttttcacaaacttaaattcgaaattcaggcagagccattgtcaccgaatgacctggatgagctagaggagcgtgtcaacgattttaaatcttttttgtctgcccaggagcgaatgcgcgggtttctctcaaagaagccgaaagcacatcttttgttgagccattttgttcccttcgctcgcgagcacaagtttcttggccttttagatgaacagggttgtggtgaaaaatgttttctatcccattaatctgaattttaaggtgatgaggcgctccattccgtttggcgccgacttgagcaactgtggaagtgtatgccggacgcagaccaaattttgcagcaattggagcaccattttgtcaacaattggctcctcgacacgggcaaaattgatgaaatgaagcaggtctgtatgtttggagggggtgattgcgttaaacttgttttattttaaaatttatatataataattcagagacaaagtgatcagagggaagagcatgatgagctcgatcaatctgaagaagaaattgacgaaatttcgcttatcatctcattgattgatg

SEQ ID NO: 58198 - DNA, 1563 bp, Heterodera glycines
atgtggatgcgtgtctggagcagcaaaatcgctgagttccgagaagaactttatgacaaaaagttcttcggaacaatccttggttacggtgaatcaatggagttccaaggccgaggaggcccacatgcccacattgtggcgcaaacagacctggacgcagttccatatgtcattcaggaatacatatgggcgcacattccatctttgcctgataaagatgacgacacgcccattgcaaaaatgcatcgcgaaatccgcgaaacaatgcatatgcaactgcacagatgcagtgacagttggtgtggtcctagcgacccaatttacgggcggtgcaagaaggggttcccagccccttactcaaaatgtacgattttgcgcccggacaggcccgcgatgtatttccggccttcaccaactgatggtggtgcccaattagaggtaaacggcctaatatacgacaactcacatgtcgtgccgtataatccttatattctgctacgttaccgagtacaccataatgtactgtttgcatatggtaacaaagcaaatattaaatacgcactcaagtacccttttaaagggccaggacattgttatgtcgagtgcaaagaagagtccggcaataaaatcaaaattgacgagccggctcaatatgccaagatgaactttcgtggtgcaacggaagcatatgccattgttcattcaatgccatttgcccgtctttcgcatcatgttgtcaaattggcaattcatttgccaaaccaacagcccattgtatatagggctttccagctggtgagcaaagctcaacaaatccagcaaggcgaactgccagaaacgcagtgttcagcctattggaaacaatggcaaaatgagtggaagaatgatccaaagtttaaggacattcttttcgaaaaagtcccagagcggttccgatgggcaaaggacaaatgggtcctgtacaaaaggcagcaaattaaaaggcctcctatcggccgaattgttcctgtacccccatcggacccggaaaggttcgcgctctattcacttatgcgtcactttcctggagacccagaccatcttaagatggttaatgggttactttgtacctcattcactgaggctgcaataatgcatggtcttcttgaagacgacaaaatttgggacaaaactctggcggaggcagctctgtcgcgctggccagatcagatgagatggctttttgtgagcatcctggtctatggccagccgagtaatgccatagaattgtggaacaagtacaaagaccaaatgtacaatccgcaaggcattattactctggcacagcataaagtagcagagcttgaagccctagccgacattgattggcggctgcacagctgctttaacttaagctgtgtgcattttagcctgccagacccgccaacttcaattgccaaaaatactgacgcggcaattgaaaagtttttctttggcgatgatgatttgaatttgcctccagggcaaccaaatcctcgtccacagccaaatacccctccgccacttaacagcgaccaacagaag

SEQ ID NO: 58199 - DNA, 111 bp, Heterodera glycines
ttcacccaatatctttcgtccacgtcgttcaaccaaaagtattattttacggtggacaccaattatgtgcggcgaaagttggccctcattctgttcccgttctttcatcgg

SEQ ID NO: 58200 - DNA, 649 bp, Heterodera glycines
atggctgagctgaactcggtctgtgaattggaatggcgaattttcgatttttctcaaacggttgaaggacgagtgcgccacccgaaaagtttcgcgtggaaaattttggccatggcggtaaattaaatttaaaaaatcaaaaaaccactgcaattctaaggaagttttgtcggaatatgacacggtcggttgggtggatacatcagttttatttagcagtgacaatttggagccaattttaacacaaattcaaaatggcaaaattggcccagtccaattactaaccagtgagtgtaaaaatggacaaaattttaattgttttgttttttgaaaaattgttgttaaccttaagctacttggcacggcaaaaacattgcgacacatccgagtacttattttaatagaatatttgatttaaaacttataactaattactaatcacaatttttgccaagggatgtacgattatttgccaatggtcgccaattttgggcccacaaaagaaacaaatgatttgtcagggaaagaagacccgccacagttcgagtcaaaatttgtcatccttcataaaacggaaagtacgcggcaaatgatgaaatggttggtatttattctcattggagccgttacaaatatctactggcactaa

SEQ ID NO: 58201 - DNA, 925 bp, Heterodera glycines
gccaaaaaaggaagagctgtcccctccgcccgtttcttctccgtcctcctcctcctcttcttcggtcgcacgggcgcgaaaacgaatgccaaaagcatcgccgttggacggaactttggacaattcgccactttcactggtccaacaactgacggaagccgcacaaagtgcacgggaactgatcaaagcaagcatttgatgggagattcaattgaaaggggcgggggagtgacgtcactttcttaataatacaaaattaaataagtaatgggagagggattaatcggtcgatcaaaatttgaaatttacagtccgaagacaacgccaaagaatcggcgccaccggcggatcaaagcaatgggattaaaatggaaaatgacaacagcagagaagaaaacggcggggacgaagtcggggacggggaggaggaggacaacttcggggagacactgggccaaattttcatgctgaggtcattgggaaacaaaaatggaatgacaaagacaacaaacagtatatccgacattttacagtaagcaaatcgctgagaatggcgtcggatgcgcacccgcaaaaaacaatggcaaaagtcaccaaaatgccattgggacggaacaacaaatgacggaaaagtcggcacaattagctttttgtaataactaataatttaattgcagcgatttgccaattcgatttctgctgaacgaatggatgctgaagggagggccgagcatgatgacgaatggcgaagggacagccgaagcgaacgcagcgaacaacgcaattggcattggcaccgacggcaatgcttttcggcaccatccgtcgccgccggcgccgaaacgcatgcgttggacggaagagaatggcaccgcaacagccgcttctcaacaaaacggcggcggcgaccaatttgacattttcg

SEQ ID NO: 58202 - DNA, 561 bp, Heterodera glycines
atgtgtcccgttcggctggagttattctgctccgagggtcccctgctgatggagccgttccgtgtcgattgtttccaccgggacgagttggacccacttttggcagaacacttttgggagcacggcaaaccgttgccataccttcgcgagattcaaacactacgccaattcaaaacggattattatgcggtgctggtggcgggcagaacggtgggggaaaagaggggagaaaaataataatcaaaaatggaaaggaatgccaaaggtagtgaagaaaatggaaaagaatgccaaaatgggaggggatggggtgccgaaaaattggacagttttaatgaaaaggcaaatttgaataacgaatggtcatttcggcatggaattcccgtaccaatggacccattaattaattattttaatttgttttttgtcctttttatgaaaagcatttgacttttgcagcaaagtcaaatgcattacatgctcgacttgagctcttccaacaacgtgaacattgagggtgaattgaaggtcaatcagacggtgcccgcgaacactttgaga

SEQ ID NO: 58203 - DNA, 423 bp, Heterodera glycines
atgggagtggtggaggagacgagagccggacgaaacattggacactgtgaaaatggtaaaggtaattaattaattaatgacaaattggtcaaattgtgcgaatgaaagcatagaattattcatttcaacttatcccaactaattttacaaattatcatgaccatttcgggaagctcccccccccccgctcccccggcggggggacgacccttccctaagtccgtccatctgttcgttcgtttctatgccaccaataattggcaatttattaattaaatgctttgtcgaccaaattactggccaaagctaatgagtgtttaactgtttatctttttgcagaatgaatgaagaaaaatgaaaggtgcgcgggtggacggacttcgcctttcattttctgcgaattccccggcaacggacggacga

SEQ ID NO: 58204 - DNA, 503 bp, Heterodera glycines
aatcatttaaaatgtagcaaatgcagcatatttattcccgactatttccaaacccaccgaacatgtcaaacagattcatgagcatgcatttgaacggtttggtcagtcgtcccttatgatcgatgatttggtctgaccgttctggctcaattatttttagtgctcggcagaaacggactctgatcaaatggtttccggccggcaccgacacccaatccgtggtgcatttctgtgatcagccgacggtcacaatatttatcattttaatgatgctgccttccactcactccgttttcctttcgccgcgccaccgcgtggacgcgcgcgttcgactccaattcggaggacatgagaatgccgaggacggagttgtggaagcggctcagagagtgatcgactgaccagcccgggggagggacggacaattgggcacggcacccgacaaaacaacaactcactggcttcgttgacgcaaatggacagacgcattttgcggggccttt

SEQ ID NO: 58205 - DNA, 241 bp, Heterodera glycines
atgtctgaatttggcatttcgatcgaacagattttacgcttttgggccaatacgatgaatgtttttattgatgacaacaatttaacggctgttgaccgaatggaatcgcaaaacgtaattgatccgttgtttggagcatggctggaccaattacgcgttaaagaaattatgggtcttttttgggagcgaaattacggatcgtgttgtggaaataaagacgttttgagttctgaaattacgg

SEQ ID NO: 58206 - DNA, 1907 bp, Heterodera glycines
atggacaattgcgcaccgttccaatatgccgtggagaacatcagtcgatacgtttatgacaagcttggcgaacgctgcgcaatggtggtgaagggcaaaaaaaaatttttcaatgggtttaaaaaacaatttttaatttgatttgataaaaattaatcatttgcccccccccccccccctcttaagccttccattgttttgccaacggtggtcatttatggactgatccttctgcttggcattctcggcaatctttgcacttgtttggtgattctgcgcaacaaatgcatgcaggtcgaacaattggcgatttatggagggaaaagggggaaaggggtcgaacggaaaagcgaccgattgattcgaccgatcatttgatcgaatgaccaaaatgcttgtttgtttgcccaaaaatgccaattcgattcagaacccaaccaattattacctcttctcgctggccatctccgacctgcttctgcttgtgcttggccttcccatggaattacacggcgttttcggtgccgtttacccatataaatttggcgaattcatctgcaaaggtcgcgcatttctaatcgaagtctgtggtcgagaaaatgataaaaaataattcgacctcccctctttcccctaaagttcacaagttatgcctccattttgaccatcacttgcttttcagtggagcgatggctcgcaatttggtattaaatttgagaatgttctttttgttgtgttaaatatgtaattggttttatttaagaattagtcattaaaatgccaatttttcttggccgtgtatcatttgtctatttgtcattgtgccaattgtccatttacaatttctcagttttccgttgcgcatcaaaattttctcaactttggaccgtgccgtcaaagtgatcgtcgccgtttggctttgtgcttttctggccgcttcgcccgtcctctcaattgtcgtggtcaacaaattgcctgttcccgactgggccactgatcagccttggctgcccctcgtcagtcatttttgattacttttggcaaattagtcttgtcaggtctcctccgacggccaacttttgatcggcaccgaaacatgcgcgatggattttatgagaccattcgtaaaaatgggggaggcaaatcaaaagaaccctggggcattttttgatcgaattaaggcacagcgcaacttcatcttcattgccttcaccattttcttcctcctgcccgcccttctgatcactcttgtctattttcacatcgtttaccgattgtgcgcctcgggcgaccgttcgctgacggccgagtcggccaagcaaaagacgcgttcccggaagagtttgctcaaaatccttggtgaattttgttggcatttggcagtgccaacaatgggttctcattttcatcccccttcagttcccgtggtggttatgtttttcctctgctggttgccttttcacgtccagcgtttgctcagcgtttatctgaatgagtcgtcgatggaatccgtcgaggacgagcagtacaattccgccattcacactctgttcagcatcgtcttttacatttccggtcggtgcattttcagtgccatttggtgccacttttccttgctcaatttgccattttctgttaaggttattgctactactccaactccgcttgcaatccgatcctttacaacattttgtctgccaaatatcgaattgccttttgcaaaacggtcagttaattttgcttcttttcttctcatggctttcacttataaattttccgcttagattctcggcgagcgtttcgcccacaaaatattgtcgggtcgaaaccgcgccagagactccgccatcgctggcggcaatggactgaatagcaatttgaactccaaagtgtccaccggtggctcg

SEQ ID NO: 58207 - DNA, 681 bp, Heterodera glycines
atgccggattggttacgctcatttgggctcgaaaacattttgggatcaatgaatggcacaaaaggcacaaaaacggcgggtgccgacgacggcgttgccggcgaagacaccggcaacgcactggcacaactcttcggcagaagtggtggtggtagcggcagcagtgccaacggcggcgaagctggcggcaccggtggtggcaaaggcttcgcgctgtcttccgtgttcggctctgggctggacgatatgccaagaaggcgttgaaaatgcaatttttgagtgtgttcactgggtttttgatttcattttttaaaagtttactaaaaaaaattttaaaaaatcgttttaaaaaattaaatttttttttcattaatttattaaatattcaaagtaaatatgttaaaaatattagcacaacaaaactttgcagggatactaaaaggaaaagaatcaaccaattttaaacttttttatcccatatccttcaaatattttaacgcttattggttctaaaaaaatttcaaaattatgagttttccattatttaaaaaaaaaattattttgcacaatcaattcataaatattttttcagaaaatgctctgaaacgcaccaaattttatttatatgttaattaataaggcactcggatgcttatattctcaaaaagggtgatgaataaa

SEQ ID NO: 58208 - DNA, 983 bp, Heterodera glycines
gggaccagtaaaagtcagtattaccctattctttttggattatcggttaatcttatgataatataataaattactactacacttaaggttggcaaaaaaattggttgtggtaattttggcgagctccgacttggcaaaaatctttacaacaacgaacatgtggccataaaattggagcctatgaaaagcaaggcgccacagcttcatctggaatatcgtttctacaaattgcttggccaaacaggttccctcaaggggagctaatagtaaaacgatttttgaccttttttgcggtaagccgagtgataatgttttgggtatttttagaaggaaattcacaaatactgaattgaatttggaatgattatatggttctattcaagtttacacgttcaatcattaccggcttgtttcttaggcttaagcttgaagtagggagttttatgtaactaaatatactataaaagactgaattttattgtttcttaatgccattatttgttctttttggtcatgattggaggcgtaaactggaatagagccaacgacattacaaatgaaaccgaaaaattgtagaggggctaccgcaagtgcattattttggtccctgcggcaagtacaatgcgcttgtgatggaattgcttggccattcgttggaggatcttttcgatctttgtgacagaaaatttacgctgaaaaccgtttgtatgaccgcaatgcaattggtgcccatgttttacacaacctttctatacatttatgttttaagttgagaagaatagaatacgtccactcaaaacacttgatttatcgtgatgtgaagcctgagaattttcttatcggaaggagttccactcggaaacagcacattttgcacataatcgacttcggtctcgcgaaggaatacattgactgtgacacgggtatgccatgggtgttatggcaatcctctagattattggtcccgaaaattttttcttaaa

SEQ ID NO: 58209 - DNA, 311 bp, Heterodera glycines
tggcaatggccaacaatttttgtttcgtaagatttcgctgttcattcaaaggttggccacggtgtccgctcaatgccgtgccgatgtgtcccatttgttctgttccctgacccgactggtccaatccttgaaaacggaatgcccgggagctgacgagggaatggcacaatgtgccgagtgccgtaggaaaacggacattctctaccgggagaacaaatgggtgctgacatgtaagcaaaaggagtactgaagaaaaaatatttgagtactttagggatcgactcgttggggaagatgccctcgggcataag

SEQ ID NO: 58210 - DNA, 901 bp, Heterodera glycines
atggcttggacgagttcggcgagtgcaaaacgtcctttccgttcagctgcgatgggtacgccaaacgctttccaaaggacgagaaaatattttgtcgcacgacgcgacacaaaacggcgaatggtgcggcactttttggcaattaaattttgtttaaaatgtttttcattgcttccccccccccttttttaggcactttcactgtggtgaaggaatgcatcgcggacagtgcgcaccacgtcactttcccgcgcaaaccgtaccaattggcggaggagtgcgacgtggtcgaccttaatggggtcgaagtggcctattgcctttgtggggaccaaaatttgtgcaacggcgaggcaattgtgggccaattcagcgcatttgaggaggtgaaaagtcaaaatcagagaatgttattctttatccattgcttatttgaacatttgcatattttaagtttttcttttaattagtaaaggaaaccccaaattaattatccgaaattacactgtctatttcaagtgaaatgtttaatttataattcaaaagttcaattgaggaagagttcggcatgccaatatcaacaagcaaaatttgaggatttaatcgatgatttatgtgcgcaattatcacattttccaaaaaataattaaatgtcgactcaaaataaggacagatcttaaaaaatatggacttttgcgagtattgcttttgtttccgtgcccatttccctccaattccctataaaatttaaattcctcagaaataccccgaattgttcgactccgatccgacgaccacggcgtccgatcagttgtctctgtctcagtcctcacaccagcgatcagcggaggaaaagcaaagggagcgaagcggagaagaagcagcagaatctgcggaagaa

SEQ ID NO: 58211 - DNA, 808 bp, Heterodera glycines
  unsure (1)..(808): unsure at all n locations
ggcagattctgaccacccttcgctgaagagagagttgaaaagttntgctgaaaaaactacgaaaacaaaaatgtctggacgaattaaaaaaagcaatcattgctgagggcaaatacgtcaaatgtgtggtgtacaaaatgtaattttttgaatttacgtatttataaaaaattgaatgggggcacagacactgacaaaattcaaaaactacgcaaattcacaaaatttcctgtttgcttaaattaacccttttgacacgttaagtgcactagatgaaggaattcctcttaattgtttgcatttaagccaccaaatgttagggttttttttataaaattcattgcttttcatgccaaactttggctcatgcttttttgctaaaatttcttgtttttttaagtccagagaagcagcaaacaccctatggtggacagatgaagtcatttccgcatttcatttgctgtaaaatttgcagatttcctggtaattattgtttgtacaaatttttgttaaatcaattttttaaccccttccaatttttcaaatttttctaaaagcagttgggctggattgatgagagggtgtatctactaaatcattcacttttccatctcaaaaaatgccaaaatttccaaatactggagaggtgttggcaaaaaaaaaaatgataaataatctttctggcaattttgctaaaatgtctaaaagtcgcttttcttcataaaattactactagatttgctaactcatcaccaacttcgtccggttgctcaatgtttgcatcccttcaacaaagcccagaaaatgg

SEQ ID NO: 58212 - DNA, 93 bp, Heterodera glycines
  unsure (1)..(93): unsure at all n locations
atggggagcaaaaatccaacgcagaanttaagtacaggctatagggaagctattccggaaggattcggtctccacataaatctgggcgcatcg

SEQ ID NO: 58213 - DNA, 289 bp, Heterodera glycines
  unsure (1)..(289): unsure at all n locations
ccaacgcagaattaaagtacaggctatagggaagctattcccgaaggattcggtctccccataaatctgggcgcatcnggtcggggggactgccccgaaaaaaaaaaatcgattttttcaagtgtccgtttggggtactcaaacaattattggggagcaaaaatcccaacgcaggaattaaagtacagggctatagtgaaagctattcccggaagggattcggtctccccataaatctgggcgcatccggttcggggggactgcccccgaaaacaaaaaaacgattttt

SEQ ID NO: 58214 - DNA, 1420 bp, Heterodera glycines
atgttaaggaaaaaattgacaaatcataaaatattcatcccacatagtaattatttggtttttattactattatttatttccaatccatttaaattctttgtttattgagttaattaaaaaaggatagtgagaagtgtctttaaaacccaattttaatttaatttaattccatttttccatcacacagtgcattttgcaaacagaaggttcatcggttccaaaagcattcacattcgatggcgtttatttcatcgattctactgcggaacagctttacaacgacattgtgtatccgctggtcgaagttggtgacaattggataatgtttaaaaattagttgatcatcttaaaatgataaattattttatccattgaaggtgtgaaaatggtttttttatttaaatttttccaaggtttttgctaattaaatgatccaataaaataagcataaattatagagcgtgatcgaaggctacaacggcacagtgttcgcctatggccaaacggggtccggcaaaaccttttccatgcagggcgaccaacaattggacgccgcacagcgcggcgtaattccgcgggcatttgagcacattttcgaggccattgccaccactgaacacaccaaattccttgtccatgtttcctatttggaagtcagtcacgaaacttcaaataattaataaccaaaataaatgaaaattttgaaaaaattttaagatttacaacgaggaaattcgcgatttgttgggcgacaaatgtcagaaattggatgtcaaagaacacccggaacaagtggatttgggggggggggtttgaatttattaatttttattccgactttaattcccatttagggcgtttacgtggccggcctttccctgcacgtgtgccatgacgtgagcgactgcgaacggctgatgacgaccgggttcaacaacagacacgtgggtgccacattgatgaacaaggactcgagcaggtgcgaagagtcggcgggacattttttagggaaaataaaaataattaataatatgtaaataaatgctttttgtaatttttagcaataaatcattttttattcgttaaggtctcactcaattttctcaatgtatgttgaagcattggatgagaatggaaacatccgaatgggaaaacttaatctcgtggatttggcgggcagcgaaagacaggcgaaaacgggcgccaccggcgaacggttcaaaggtgggaaaccaaaacaaataatgtgactaattaaaaggatcattagcataggataatttagaagcgaccaaaatcaatctgtcgttgtccgcattgggaaatgtgatttccgctgttggtggacggcaaatccacgcacattccctacagagactcgaagctgacccgtcttctgcaggtacagcaattagcaga

SEQ ID NO: 58215 - DNA, 2068 bp, Heterodera glycines
atgatcacttggtctgtagcagatgggtttgaaccaatgagcgaatttgttgattggattttgggatttaaacgatttgaaacggttgcttttgctcattatggtggaaggttcgactcgcattttgtgttaaaagagctgactgaaagaggggtcgaaaccgagttgatgatggcagacctgaagatttatcaaatgaaagcgcgtggtgtgtattttcgggatttctggctgctcagccaaaacaagttggcagatcttccaaagactttgggtttgaaaaccttagcaaagttgtacttccctcataagtacaacaaaaatgtgaactttggaaaaaaattgacacacctaccaccccttgaagattattgtccggacaatatgaaggaggaggaatgtgctaaattggtaaaatggcacaatgaaaattatagaatggaatttgagctaggttagagaaaatctgttttccttttaaaattgaattttaggagagcagctcaaggtttattgcgaaaatgacgtcgaaattttgatggaggcaattttgaaattccggcaattgtttttggagattactgatgggatggatgtgttgaaggacagtgtaacaattgcgggggttgtgatgagaatttttcgaacaaaatttttgagagaaaatcatctcccaattattccggaaggcggttatgagagagccgagaatcagagcaaaattgccgtgaagtattttgaatggttggctcaaagcaaaagagtgagacttagacacgcatgcaatgggggtgaagtggaaatcgggggattaaaagtggattgtatcatcggagctgagaaaaaaatcattgaatttcaggtaggcagaatttccttccctattttattttttgctaaagggatgtgcgtttcatggatgtccaaaatgttttttgccctggaccataggacccaatgggcgttgtatggaagtaaatttccgacgaactgagacacgaatggagtttttgagggaaaaatgtaaaaacttctcggtggaggaagtttgggtgtgccaatttcaaattttattgattattgaacaaatttaggaatgcgatgtgaaagagaacttgaaaaaaaatagggagatgaagaggttctttgacgctgtgccggataagggtccaataaatccgagggatgcttacgcggggggacggacaatgcctttttgtttgtacgcaaaagcaaccgaagaagttgagatttcgatgttcgatatcataagcttgtatccgtttgtgaattatggtaaaaaatctgcttgcatttttgaaattttccttcgcttaagacaccccttatccggttggggtccctaaaattgtggtgagcagggaattcgatgtgaattggacggtgcccgacgatgtgccctatgatggcctgctaaaggtgaaggtcatccccccaaaggaactgctttatcctctcctccctatgcatattgataatatgcttctcttccccaattgttatacatgtgcgaaaaaaacgaagaaagagtttgtgttggctaaggatgtcaaaaaatgtaaccatcggccagagcggagagctttgattggtacattcacctcgatagaactgcggaaatccttggcgttgggatatagagtaataggcttctatcgggcctatcactttgagcaatttgacagtcagctgttcaaaggatatgtgcgcatgttcttgaaaataaaggtggaggcgtcgggctggccctcggaggtgagaaatgaggaggaaaagagagcattcattgaaatgtacaaggccaagtacaacatttggttggaatatgataaaatggtgtttaaccctgggctacgtatgatcgccaaattggtgagaaaaacaaataaaattcaaaaaacaaataaatattaagggattgaacagtttatgggggaaattttcaatgaggaacacactttctgtgactgagattgttaataatttggaaagatggacggagctcatcaaagatgacacgattgagtttaaagaccgattgagataa

SEQ ID NO: 58216 - DNA, 1703 bp, Heterodera glycines
atgcaacgcagccgacgtgacccaactccaccaacatctcccaaaagaatgagggccccaactccgcgaccaatcgttggactaccaattcctgttgtggagggtgagtttgtgctttgacaatgagagaaacggtttcatggttggccattttatcccccaaaaatttaggcaatcggccggcggaagatgtaagctcagacgatgacgacggtgacggcaatgccgcccaccaaaacattgtgcaaagacaggaactggacattggcgcacgagctgtccaacgtccaattgcccgggtgccgccggcatttcgtcaaggccctgttcgccgcccctttccaccacttctactgccacgtcaggtcagaaaccaaaggcttttgagctttctttgcccagattcacagctttgggtcttagggtccacaaatgccacatcgtgtattcccagtcccgcaccaccatgtccaacaccctcttctccacgtccgaccacttcctatgccccgtcaggtcgaaatcgaaatcgctttttttgctttgccacaaattgtcaaatttgggctttagggtccaccaatgccatacaacgccctccgtgccccacaacaccccatccggtttccaattgtgaatgttccgccacttccgctgccccctcaggttggatactgttttttgaccctattttgtgccaacatttctcaaacttttgagttcttagggacaaccaatgctgcgtaatgttgttcctgttcaccaccaccatcatccaatcaacggcctaccacttccactgccccatcaggtcaaaactcatgaccttttttcgccttttcttgaccaacatttcctatctttgatttgttaggggccactgttgttgcgtcatgttgttcctgttccacatcaccatgtccaacctccaccgaatggtctaccgcttccattgcctcatcaggtcaaaaaatgaccttttttcgccttctcttgaccaacatttcttatctttgatttgttaggggccaccgttgttgcgtcatgttgtacctgttccgcatcaccatgttcatcatccaatgaacggcctaccacttccactgccccatcaggtcaaaactttgaattcttttgacccaaatttctcatctttgatttgttaggggccaccgttggtgcgtcatgttgtacatgttccgcatcaccatcatccaatcaatggcctaccacttccactgccccatcaggtaaaaactcatgacctttttcgccttcttttgacccaaatttcaccgctttgagttcttaggggcaaccaatgttgcgtcatgttgtgcctgttcaacatcaccatcatccaatcaacggcctaccacttccgctgccccatcaggtcctaaacccgcagttttttctaagacaggagaaatttaggctcatcttgtgccgccccaaccatggcatttcccacctgtcatcgttcgcgtcccgcccgtcgcacaaaggaacgaagctcttcaagttcggaactttcaaacccaaaatcatcatcgtgaatttatttaggcgcctccaattgtcaatccgttggggcaaaatccacagcaaatgatccgttggccaagacaacaatggattgggagaccaattgaccccgctcacccccacattaatgagaaaacagatgcatttttaataaa

SEQ ID NO: 58217 - DNA, 643 bp, Heterodera glycines
atggacgtaactcttcccgtcagcaactcggcaggtgaatggatcggagaggaacggagggatggtgttgtgctctatgcgccgtggacggacgagtggcatgtgcaacagcagcagcaacagcagcagcatcaacaacaacaacaccaacaacaacaacagcaaaacgaggtgcagcagcagcaacaacagcttgtccggcgaacaggcacggggtggacgcggtttccagcatggaacgaaccgctcgttgccaacgattggcgagagaaggaggaaaatctgatccaaaggaagagactacagcgtgaaaacccggagtattgggcgcaaatattggaggaggaaaagcgagccggtgaggagcgccgcttaagggatttgcggttagagcgcacatgggatggctacaaggaaggccacttcgagcgtcggcacaatgacggctcgttttttgaggccagaaaatttcttggttcaaatcgacagaatgactttttttcattttcagtttgttgctggggtcgggaagacagtggttggaagttctggaggagggctttggtgaatgatgttggcatgggattgaaagtgttaagattaactatgattggggatggtatttgacattaatcgctgataa

SEQ ID NO: 58218 - DNA, 741 bp, Heterodera glycines
atgggcgctacccctggggaggtgttggaggaagagaccgaaggtctggaggaggaggatgtgtgtaaaaaagggaaaccggaatcggcagatgcgggaccagaggtcgaacaattgaagaaaatgctacgtgacagtggccaaatgccgatggataatgccccactacccctaccccgctgggtgcggggtagtggggcatttaaaaaaaagtacaaaaaattgtacgacgcaatgactaataatatgggatgatgttgaatgtttatgtattgcttgttgttgcctaataaataataaaaaaatcaaaatcgaaaaaccaattagaatttaaagaaattgacagtattttgtattttccattgtttttctgtatggtgtgactcactgcccccccccacacccgccacaccaccgaaaccacacccattaccccacatttggatgatagacatttggaatagtgtgaaaataaaatgtaaataaaatttggtaaaaattgttatgatttataaattgaaaaataattattagggttaataaatgaataaaaaaatttttggtaaaaataaaatttaaaaaataaaaatgaaattgattaaacgaataaggttaaaattttgaaaattaaattggaaattaaatattaatttaattatagaaataaataaatatggaaaatggaaattaaaaattggaaacaattaagaatagcggattaattagaattttaaatataaa

SEQ ID NO: 58219 - DNA, 1386 bp, Heterodera glycines
gctgccaagcagtcttgggaggactatcggaagcgaaatgacagcatcattgttgacctgctccatggacaggtgtgtttaaaactaacgattatttatttatttttcaccattcttccccctccccccgaattccagcacaaatcgacgctcacatgcaatggtgagaattttatttggtaaaaaaaatatttcgtctaacatttttctccccccccccccattttccatggtaaagtgtgcagcaaaatcagcatcaagttcgagccgttctgcttcctgtccgtgccggtgccgaccaaggagcacaaggcccaatcgacgatcgtttttatgcgggccgagaaatgggcaaaggtacggtgcattgccatggcatacaaaatttgtcattttttggacaaaattcgttaataaagcgcattataaaatgaaatttttttccggcggcgcttattggcaccggccggggatcccctgttccacaaaaagttttttggaaaaaccgccgcaaaaaaaagtggtgtgaaaagcaaaaaaaaaggtcggtcgtcgcccggggggagatacccccccccccccccccccccccaagccgaaatcctgggaccgtctctggtgggggcggcaaaatctgttaaacaaacatagggttgatcgcgtgacgagaaaacagtcgggattgggtggtcgaaaatgcgatttaggttgagacggtcgaaaattttcgggaagaaatacatgacgtatttttttttttaaatggcattcattctcttttccctgcacagtttcacgtcacacacaccagcaaaacgacggctggccagctgaagcaaatgctgcgtgaagagttgcagttgccttccaacacacaggtgggcaagcagtgcatggtcagatttcttcatcggttagaaccctagcaaaaaaaaactcgtttttttgaaaaaatgttcaccggtccgagttcgacccccccccaaaaaaaaatgaataatttttccattcaattttgacagatgatcatttattcgacctacagtaaccgaatattgaaggacgacagcacattgtcctccacctacatgtacaattacagtatgaaactgtatgcctacgctgtgaagccgggccccgtcattttggtcagtctctctcttccatgaatcatatccatccatttttattaaattgcattcattagatttttattgatttcattgtcaggccatatttttttggcccaaaaagtgccaacagttctgacaattttttgggcatccaaatttgttgtatgtaaattggtttcataaaattgcccatttaaaattttgagatgcatcgatgccaactcgtacaaagaaagggcaacttgcacaataa

SEQ ID NO: 58220 - DNA, 594 bp, Heterodera glycines
atgaattcggaggaaaattttgaaaattgtcaaagccaagaacaccaacaaacagcaacaacaacaacgccaccaccatcctctcctgtgtacaacaacaataacaacgacgacggtggcattgatgacaatggtggcaccaccaccgccgccggcactgtcggtggcaacagcagcgagttgttggccgacaccagtgacattggcgacgacaatggcaccaccatggccaccgttggcagcagcagcggcagcagcaacgagatggtcagcaaccatggcggcggcggcgacgacgagttcagccgggacagtggcggcggcgccggtggaggcggcgacgattttgtcggcgccccgctcgatgaggaagggaacatgtacgggccatggccgaaggaggcgtacgaaggggaggaaaacagattgtcgtttgacggcggcaaacgggtgaaaacgtacgatcgcgagaatgtctatatgcggatggaggacaacaacaacgccgccgcgggcatggcgtcgtcgtcgtccaccagcagaaacagcgcgccacggccctactccactcgctactcgcaagcaatgctgtga

SEQ ID NO: 58221 - DNA, 483 bp, Heterodera glycines
atttcatcctcaaatgttttttacttattgttcaccttctcatttacattttacacaaaaaattcaccatattcattgcctgtcacattgattcaacaaaaagcaaagtaaaatttaccacttcttttgcatcacatttaaactgttgaagcgggtgtcaacaaaaccggccaattcagaatgggctacattctttttattccatcaaattcatgcaccgaattggtggctaaataaattgtctctttatcccatcctaactttttctctcgtcagatttgctggccacacacactgttgttcaagttcgagcttggcattaaggcggatgatgaccggcgccagtgctgtaaagtgcagagacggagttggccaagaccgccaatttcatcatgcgcctggaggcgcgcgtggatgacatttggcaacgcttttgcgccacatccatttgctcacaatcagcggcaacaagtacgacaacat

SEQ ID NO: 58222 - DNA, 60 bp, Heterodera glycines
ggaaaatattgatcatagtccccaaactcaaaaatgcttaaaaacggtcagaatcgatgt

SEQ ID NO: 58223 - DNA, 138 bp, Heterodera glycines
gtaaccctggcaccagcgggtctcacaagcgcttttaagtgaatttcgtagattcgatgatgtcataatttgttgattgatatgcaatagaaattattttattcgaaaataattattcatcttttttattaaatgaat

SEQ ID NO: 58224 - DNA, 1649 bp, Heterodera glycines
tcttatcaatgaccgctggcaagtgaaaaatttcgtattttgggcttcgctggctcaaaaatgttcaaaaaattgaaacaaaaggtgaagcattgctccgaatgacttctcttaattgaataaatgcctttaagactttttgtggttgtcgcctgaacaattgcggaaaatgggcgacaacactaataataataataatgaccaacaaattgacggttccaaacaaccggacatttacacattggcattgattttcactgaagtataaattaaatgcattaaattttgggttcaatttcacctgcagaaggcggcaccatcggatcatttcatctttttaaaactaaaaaaacatttagatcgttttccatagaaaaattagtgtttacaaacatactttggacacttttgttttgctgtaccatataagatggaattgtgaagcctttatagagtattaattttaattattaatcactaattaatgggtatttgtatggagaaaaagaaaaaattattgtctaaagcaagcactaaattaatttcataataaatcatttgttaccttaattaactttgtgtcccaatttcggatggtgaatatgtgcccgtgttgggaggagagtgaccaatacggcgccaatgagcacggggaaaacgtgcggcgagcagcggatgaacacgcagcagcagcagcagcggtgttcaacaggcgcagggaaacagcgcagcagcacgcggcacgacagccgagggaacggaacgcggaggaaattgcttatttggtgaagcggggcggcactgtgccattgagaccgaccatacgccccgcgctggacgaactgaagcccgaattggtagggcgcggtggataaatgtaaatgtaaagttggaattggaattgcactaggaaattttttgggactgcttcatctcccattttttcgcttattttcattgtctctattttgaaatttttaattcgagattccaattgcttaaagaaatattattcaaatcagcttcatctgatccgcgattgttgggtggaggcgccgaatgaacggccaaccattgagaaagtgcggcaaaagttgcggcaaatgaatgccggcagaagcatcaatctgatggaccatgtgttcggcatgttggagcagtacgccaacaaattggaggaggatgtgcatgaacggacgcgcgagttggaggaagaaaagcgcaaatcggaaatactcctctaccgtatgatgccacggtaattaagtcaaaagtgattaaaaaaattcctttttttctcacgggccctctccctccctattacaaccccctgttttattgcccttactgtaaagccgatcaaaaaccaaaacgtaattaagccaagttgcggaccggcttaagcttggccagtcggttgagcccgagcatttcgagtgcgttacggtgttcttctcggacattgtcaaattcgcggaactgtccaaccaaatgcgaccgctgcaggtggtcaacctgatgaacgaactgtacaccatttttgacgcgatcatcgacgaacacgacatgtacaaagtggaatcaattggcgaggaatttttttaaaattaaaaacagacaaatgaaatgtttgaattttggggctaggc

SEQ ID NO: 58225 - DNA, 264 bp, Heterodera glycines
tccttcgtttggtgctcattcttttggccgtccccaccgttctgctcattatcattgtgatggtcggtttcatcagccacaaaaagaaacgtcgtaacgaattccatttggacaacggcgccgccaccatttgagaaaagagtgacgatacgataaaccattgaaaatttggtatttgtttttgaaaatttggtattttgtttttcttgcaatcgatcagcatattcccgtgtcttttctttatggataaattgtcgatctgaa

SEQ ID NO: 58226 - DNA, 718 bp, Heterodera glycines
atgggccaaaaatcgcgaaatatggacataaaattgcataaatatggacataaatttttccaaattaagggtataatttcccaaaatttcttcatatttgcttaaaaatttgaaaaaaaattgtataacaaatatttaagacacaatttaaacatatttagagagaaatgcctgttttgaacaatctttgtcctttttcgtccaattttcagcaaatatttttaggcttgcacctaaattcgatccctgttaaataattgctttaagaattttttaaaattagccattttcactaattaatttatttgaaattctgttattgcttcatccactttttcaggtgactttgtccgcttcttggcttcgctgcttctccccggtgatcgatcggatgctcagtgtggagatgagggagaagcagcagcgatcggtcactttgaacgaattgggcattgacatggaccaatttttggattttcttctgcacatttcgccaaatgctttgagccaaccaattcttcctaaccgtaaaaatttgaaaatttaaaaaaaactggaaaaaagagaacgtgctgagacgatcctaaaaaagtatcaatggggcgttcctaaaaaagtatcaatgtgggcgttcctaaaaaagtatcaatggggcgttcctaaaaaagtatcaatgtgggcgatcctaaaaaagtatcaatgataataattaattaaa

SEQ ID NO: 58227 - DNA, 229 bp, Heterodera glycines
gcgattttttgctgctttccgttgaagaattttccccaaaattcggggtgcatataagaacaagcagaaatgtaattttaaagggaaacattttggtggtttttgaatttggtggggaattgcaagcttttctcgggtatttaaacgaaattttttcatcaatttttcattaaattcttgaatttcatccatttctggctttttgtgttcccaggccgttcctctgcgg

SEQ ID NO: 58228 - DNA, 620 bp, Heterodera glycines
atggcaaaaacggacgacggcaccaaacattcggagacgaagaagattttgacggccaatttttacacaaagtggagcgagaacgaggcaaaagacagaaagttccactggaaacttctgattacggtaagagaaaaaagacatacggtacgggacgaaagttcgcgagttttaaaaatggaaagtgtaaaatttggaaattaattttagttgtaacggtggaaagcaaacctttggacttacgcaaaatcgaccgaattctcgacaatttcgaagcgtaccaaaagaaaaggaaacaaattaccaatgatttgttacggcaaattgcagtgctcgaaaatgccaaccccaacaacgaagccaaagtttggttcagccgtctcagaattcaaacgttggccaatgcaaatgccatcgacacggcgatgattggcatcgaaatttcgttgataccattcaaaaatttgtggcaaaatgggaaaagtttgctgctcgagtcaaacgaatatttgaggttttgttttgccgtggttttttttatctcttccgaaaattttgacatattatcaaaagattaactcacaagcaaaaaaaaagggggaaagaatcatcggaattta

SEQ ID NO: 58229 - DNA, 593 bp, Heterodera glycines
atggtcaaagcattggtccaaatgaaggaagacataagcattgttatgaagcaatggattggggcgatgaagcgacaaatgttggcaaacggtggtgctaaatacgacatatcagtggacaatttgcttaacattgtcgaggtattaaaatgaacgattcgcattaagctcggcacatttgtcatccgagcaaaaaaaaatattatttttttaattttcattaaaatgccgtctaaaatggacgcggggtggtggtgattttcctaaaattattattttttaatcaaattacacacattgaagcgcaaattactgttcattataagcgtaatcaccataatttagagtttggtcgacattattgaagccaaacataagaatgtttctcgccatcgtcacatttccaatttgactttttccgttgcgtttttccgccaagtgattggccattgttcgccaccgctgactttggaaaatattccgatacgttcgaaacgtttgcaaataatttgcgaggcaattcgaaacttttgcaactcggcaatttacgaattgagccaatttttgtgtctctacggaagacgaaagtaaaa

SEQ ID NO: 58230 - DNA, 124 bp, Heterodera glycines
atgcggaagggattgtggaagaacagtcatcgacaattgatgaaggaatggcaccggaaagaggagggagaggaagcggagggcgaggatgaacagaaagcgggtcgacctgcacgagttggct

SEQ ID NO: 58231 - DNA, 182 bp, Heterodera glycines
atgctaaatcaacaaaatgtaagaagaagaaatgttttttaatattcacaaaagttgcttcttttcagaaggaagtcaaagtggcgatggttttgttcagcttaattcatttattcgcagctgcttttgactctcctcaatgcaatttgggcctcaaattattcagcatcgaaggcggaaag

SEQ ID NO: 58232 - DNA, 498 bp, Heterodera glycines
ctcccatttcatcgcttttcgcgggcgccgcacttttctgtcggggattgtcctatcggaacagagcattcttctccaatgctgcgcttcgttggccacctccgtggaattaggcaaattagcacaataaattaattacataaaaataatgattaatcgaagcaaacccattaaaattcgagcgataattaattatgataaatatttcaggcgatgaaaaggaaacgaagtgccattggagtgaggaaattgagactgtcgtcgaccggccgaatatgcgctttgagagagtgctgggcaaaacagaatattacagaagtgagtaaaattaaatttgcaaactacttattaataaaatgcaattacaatggaattaaattaatttttaaagatttgggcgcagtacgaaacggacggagttcgattaaactgcgcgtcgaagtgtgccgttacacttctgaaaggacattttgcgagagaaatgtgtgccaaaattag

SEQ ID NO: 58233 - DNA, 851 bp, Heterodera glycines
atggggaaaagcgatgccaaaacatcggaaaaagaagacaaaagagagggaggagaaggcgaacaaagcgcgaaaaagtaattaaataattaaattaacagttatatttaaaaaataaaaaaataattaaggatgaaacaaacggaaccaattcaaccgacactcaaccatgaagcaacgattggcccacaacatttggccattcggcgaattcgctacccccaaatgatggagcagagaacgggcaaattcaattaattaattttataaaaattaaatagcttttcctattttgcctttttcaatttatcattccctttctcagctctttttcgtccctccgccgcttcgccgatgggtcggccgaagggaccgaagcgacacctttggcccgttttggccacaaattcgacaaaggtattttttgtatatttttggcattcctttaaatgagacaggaatttttaaggaactgattccagcaaatattgaccaaaaatggaacaatgccaaagaaaattggcgaggcgcctaccaaattcggagcggaaatgtggggaaaaattggcaaaatttgcgccaaacgaattactcatttatggacacaaaactaattcgacaacaaaaggtgaaaaatgcattaaaactaaagcaattaaaggttcaattttatcagcaaaatcccatcgcaattcgggcgctttccccgcgcagtcaaaacattcctccgacaactcgtcacgaattgcgcatcaaaaaattaagccgaaaagcaaattcgaatggaatacagacaaattcggcagttatgaaacagcagttgaaagctgaagaaagtcgagaaaaagtga

SEQ ID NO: 58234 - DNA, 212 bp, Heterodera glycines
atggctaatttagacaatttcgaaaataatacggtaattcattggtaaaatgttattttaaatttacagtaaattttcagttttatttgaccttcaaagatgcccatcccagcttgtcactgattggatgtgcaacaatttttggaatcaccgcttcatttggaatcctgtttcatttttcagtgatttttgtcacaatcaaaacaaagtga

SEQ ID NO: 58235 - DNA, 747 bp, Heterodera glycines
  unsure (1)..(747): unsure at all n locations
atgagtgatgatgatgatgacatgcgagcacaaaaagggacactaattattgatccaaaaagcccgtctcctatagcgacacccccagttccggcggttaaaccgctaacaacaacaacaacaacaacaccgactcctccagccgtaaaaccggtaacaacaacaacaccggccccccagtcgtctgcaaagccatcagcacaacagcaaaagccaacacctgtcctgccaaaaccatctgcccctcagacgtcagaaccaaaaatagcgacgacaacgacacctggccctccaaaaacagcaataacaaaacctacaacgctaccgccaccgtcatctcctccaacagttcctctacagcgaaagccaacaacaacaacaacccctcaaacatcaacaccaacaacaacagcaacaccgactcccacacaaccaataacaaccgtccatacaccgaaaaatacaaaaacaacaacaacaacaccgatccctcaaacaacaacaaaaaccacaacccaggtctctccaacgccaaaaataccatcgcctaagccgcctgctgttaaacttcctcctcccacttctacaacacatccgcctcagccagagccaacaacaacaacaactgctcctaccaaaactttcacttcctctcctacgacgggggctgttattggattaccttncaaagaaaaacaaattccgaccgtcgacgaacctgtctcggctgcgttaactctagaaaga

SEQ ID NO: 58236 - DNA, 877 bp, Heterodera glycines
atggcaaagggaaaaagaaagtggcacgcaagcgacgagcaattagcaggcaattagtattaaaataaaaagaaaattttctgtggaaataatttttaaatttgtttttcagtttcgtgccatcgcctcaatcgcttcatctttcacctcctcgcccatcagcagcagtaacagttgaagaacaagcaattatcatcccgtccaacaacatccagccatcagcaaaagctgcccattacaccattttcaacctgtacttcccgaaaaacccgaaattcaacgtgttcaggtattaatccaatcaaaaatataaaataattcaaattttgtttaatttatttaaattatcaaacaatttttttacaaaggtctgacaaggaattgggcgcttcttcagcagctgaagaaattgacacaatttcggacttattggaaatgtcaaaagcgaatcgaccggcagaaaaatcaggtgaacatttttaaaaaaatgaatttttccggtgcatttttttgcatttttatttgctgttttaaacattacgaaaattaaataatgagaaaaattttaattttaaatgtgttaagaaaaggcatctgccggtggtggaaaagatttagtggtaaatttatttcaataaatttttttatgtattttcttctcaaatttttaaggtcgacgaaattgctgacttgctaattgatgcgataaaagacttgtgaaggagaaaaagatttgatttgatgataataagcaaaaagcagtagaaaaaagcataaaccaaatattattactaattttctattttggttcgttgaaatttaaaatggtattctacattaaaaatgaaaaaatcttaaattggtttaaattaataaa

SEQ ID NO: 58237 - DNA, 413 bp, Heterodera glycines
atggcgtggaaagctggcatgcccgactgcagaagacttttgcctctccccatagcaaaaatgaacagacggtaaagaaagattttaaaaattttcattttccctattttccatgtttcagttggatttgtggcgacgtttggatggacattctgccatcttttgaccatgcccaactcggactcaaaatggcattgctttccgaccgtttcgacatcttagtggacaaacattttgatgggaaaacgacgaaattgacaattcggagaacaatcgaattgaaaaggaggaagggccaaaagcgaaaatatatgccaatggttatcgtgtgcaatttccgttccacgaccgtccgctgcccaacaaaatccgctttaatcacattcggattaagtaattcgaacattttgtaa

SEQ ID NO: 58238 - DNA, 1054 bp, Heterodera glycines
atgtgccgggtccaagaatgggaacgactcaacgcgataagtgagcaaagcgtggacactgagttggcttcacgctttaaacggagcgcaaaaattgaccaataccaagtgagttggaggttgttccaatttggataggatatcaatttcttaattgtcacaatgattcgtcaagttgtgcattcaatgcggtttgtcagcatttgctgaacagtttggtctgacgccagaggaatttgcagaaaatatgactgaatatgttaaacatgaagtgcggcaagtagacaaattgccgaacgatgctgcgctggagttcgtcaaagagtatttaacacaatcgctttaccatgaaatcatttatttcacagggagtttcttcaatttccatcgcccgaaaaagtcatccaaggcgccatttatttgttagctcagcaattcagtagagaactagcggtgcgaaaaaaattacgacaaatttaccgacaaaatttactcatttctgttcatccgactctgaagggaaaggacgaaattgacgaaaatcattctctctatgggcgccattatattaaggacaagccggtgaaagagctaaaggatgacgagtacttgagcttcgttagggtttgtacaacaaaaaaattacaatattatttatttttattttttaattaggaaattcagaaacaaaaaatatagccccaaatatctttgagagaaaatcggaattttgaaattggttgggtaatcccgaccgtatgcttccataaaatgacattaatttgtcttttgataggctcaaaaggacggccttatcgaaatcgatttacacattacttcgaatgaggaatcggagaacaaatgtttgcgtgcgtgcatggaaaacgatggctgtgcgacttttaagcgtaacgaaaattcggaaattgtggaagaatggaacaaacttcggaaccttgttcttacgatttgcgtcaacaaaatgttaattcctgtgctcagaagggagtcgcatgaaaatttgattgaggaggccaaagaatttgtaattatg

SEQ ID NO: 58239 - DNA, 636 bp, Heterodera glycines
atgggattgattatgagtcgctctcgttcccgttatcgttctcgtccgtctgctccgctcgccaaaccggcaatcgagatggtaagaaatatctttttattttattttttttatttactcctaaggtggaattttcgaacaaaagagatgttgttcgtcatcgtcgcaattttccggtaaaagatttgtgtgattttatctgattaaaattttaaccagccactggctattccccctcttcccaaaaaggaccataaaaccagcactgaagctggaaatagtgctggttttatcgaggacagttggatggctgaagttgtcaccaactgtgagcagcgtgctgctgatggtcaggtaaaccccaatttaaattaaatataaattttctttaataaaatttaagttcaaggctaatgcgaccatcgaaaaagaggtcgtcgatgacttgccggtgacgccgaatgacaatggaaaatacctcgacaaagaggtcgtcgatgacttgccggttaaaccgaaggataatggtaaatcccattatggtaagtgcctcccatttcatttatataataaagaatataaaatttttcagttttgaccaccatccctgaggaggaggaaaaggaaaaagaatga

SEQ ID NO: 58240 - DNA, 635 bp, Heterodera glycines
atgcctccaaataaccgtcgcttcaagggtattccgaagaaaagacaccaaataggaggagtcgcgcactggtccgcaggtaaggaatagagtcaaggtcaaaccttttagtctcacctttattcttttcattaatcacaattatcttagcccatcaccgatcagactctcggaccttttttatcaaacaccaccagaaacagcaccaaaagcgtcaaattatgctgttgcagcagcaacaacaaatccataaaaaagagatggaaattatgcaacagaagcaaatcgaatcgcttcaaaaagtgaagcatttggggaaactctacattgaagccctacatcaacacctacgcgtatgtgcagaacatcagcagaagcagcaacagtttcacgagcattcgttcaccacgacggaggagcttggcgaagccttctctcaaatggctgtaaacgcagacggaggactgatgtggtattttgtcgtattttaataattttttttcaataattattaattttttcgacattaaccatcaaatgggagctgaagaaatgtcgacttctgccgcttcgctcctgggaattccttacggggacactaattttggtgattaattttttattgacaaaataaa

SEQ ID NO: 58241 - DNA, 319 bp, Heterodera glycines
atgtcagagcaatttgtgcaacaccaaagacccgaggacggagtgaaagaagctaagaaaccacgagttgatgaccgtttcctttggaaaattacgaggggtcaatttatgttggcgattcgactctgctcaggttaaaaaaaattttagcttaatttattaatgtttttcagatgactgggacaaattatttcacaacaaggagaaggtacgccggctggatattggaagagtgggggttggtttcaagatgtgcgaaaaatggtgcaagattaactggatcacaaatgaacgatgccaaaaaacgaaggaaggatga

SEQ ID NO: 58242 - DNA, 599 bp, Heterodera glycines
atggtcctcgtcatcgaattttgtgcccaaattctcggctgttccccgaaatcactccgcgacaagctgaatcatccggaggaccgggtgaaggcactgaaggagctgattggaaagaaggtccggacgacatacaaggatcggaatggaatgcagaaaacattttttatcgacggaatatcggaccaaggagcggctttgaccccgacgtatggcagactcagacaaccatacaacatcaacatagctgctcatttctacgctcgccaccgaatcaagctgcatctcccatacgtgccgtgtgttgttgagaaattttccggaagtggcgaagacagatactacccaatggaactaattgaaattgtggatgacgactacaaagagcgatggcttggcaaattgtttacggaaattgaggacgactcaattcatgtcaaacgatttggccgaattgaggaagccgaagaaattgacgacaacaatgatggtcgagatgaatgcagtcagtcagcatacatttattggtaagagacataaaattttactgtccttaattatgcacttttctacctaaaaatgacaagttcgtgcacata

SEQ ID NO: 58243 - DNA, 437 bp, Heterodera glycines
atgggctttaaacttcggcgaaatggacaggaagaatttgtgctgaagctgaggggcatcacactgaactacgacgtgatgcagaaccaatccctctgctatgacacattcaaagaagaagtgttgcggtacgccgaaacaggagagtatgagccaataaatgtgatttaccctaactttttgagacccgacattaggggtggcggacacgtcacttcaggccccctccaaaaatgttatcgacgatatgtaggtaaagggatagtgggccccaactataatgtgcttaatttcggtcacactttgtaattatttgttaaccattcattgtatctctctcacacacacacacacgtatccacacatgtacccctttattttctctattttatacctcaaattgtgttattttgtcatttttttgcgtttttaataaa

SEQ ID NO: 58244 - DNA, 397 bp, Heterodera glycines
atgacccaagccaggaaagtaagcgaaaatttttaaatttttaatgacaacacaaaatttttagtcaattgccattgggaatttgtttgggcttctgcttgattttgcaaccagctcgccaactccttgggtgatgaaacggccaatatgctgcggaatattctaccgtcaacacatgccgctttctgctatttgataaaaaactaaaaaaaaatgatgcagacattaccatagattaaaaatttctcgctaaattgattttttgttttaaatattatgacaaacatttcttgtaatataatttttttttaatttccaaatatcaacattacttattttcaatttttctatgtttatttctttttcattgataaacaatctttttcggaaaaattca

SEQ ID NO: 58245 - DNA, 595 bp, Heterodera glycines
atggatataaagccaactactggacagtttcaacgatcagtatgttttgagtttgtggaaaagcacagaaaagaaagcgcgactttcagtggaggcacatttgtttggtgttcaaactactcgggctgagactttcaactttatggtagaccatttatcctttttagctagggttggtcgggaccgggaatcttgggcaaaaccaggaccgggacttttcggattgaaaaaccgggtctttttggctgggaaaaccggaaaaaacccgggaatttcccggtaccggtcaaaactgttcaaaaccgggacttcggtactcagttgtactcaattgcaataatgatttatattaaggtttttaaatgtgttagatagagttgtattttttcgttgtatcatttcaaatcacgcgggttatctttgaatttttcgaattgtattaataaattatgatgaataatgcttataaatgtttgtttacttttaaagtataatttagaaaaaacttatttcataaacttgcagaagccgactttcgaaactgatcattttgaataaataattgttaaaaacaaaaatatttaccgaaaataaa

SEQ ID NO: 58246 - DNA, 1132 bp, Heterodera glycines
atgcttatattagttctcttttttataattttgatgttagaaataagatgcaattattaaatatttgcaattttcatctatttatttatttattacaatattttatcatctcgttgactcgctgtcatcgtttttagcataatcgagctcctttttagcccatagtgtcacatgaatttttgatattttatttcatttcattattttaattaaagtaaaataaattgtaatgggaaccgaaaaaacaaaaaccaactttaaattggaacattcattaaatttcaaaaattattaaaatattttgaggttttgtttaaattattctgatattatttatcattttttcaaattttagaataatatttctaatttattttactgaataatcgtttttttcagctgtgttctcttccaacaggttgattataataatgtgggtttcgacctcgataactgattttaccatactataaatagtcagtaatttactaataatttaattaacacaacattttattatatttattgcttaataaattaattactttaatttttaatcatttttcatatttacattatttattaaacatttcgaaattttagttacaatattcttttctaaaacataacaatcgaatatgcgaactcgttgcaagcgctgctggttctccctacaactttagagcccttcatttggtcctatttgaggtcaaacaactctccccagaatttcgatgaatccatcacatatttatttaaatttttaaatttattattttattatgtttattatttaagctattaatcacttcttgttagttttttaagattttaaaatttatcattgttattaaattgtttctaagaaaaatttcaaaatttttgttttttacaaatctttttaattggcagtttaaattgtggaaatttcataattgagttctataatgttacaatcacagatgatgtgttgcttatcaattttttcagctttcgcattcataggtttcatattcatacagaaaatgctcaatgtcaatttttatgttatattaattcgattattttataagaacaggtcagaggtcaagaatatttccttatatttttatttcgaatttttttatgtgaa

SEQ ID NO: 58247 - DNA, 234 bp, Heterodera glycines
atgcgcattgataagcaatttttgataatacgaataagacaagaacaatgtcataaaaatataaaggaacaaagaaacaatgaaaaacagaaattaaacggagaatggagtatcggtatcagtgaaacaaaaaaagaaagatcgacaaaacatcagagaacacaacaacattttgatcggtcaaatatcaatcacaagtccgcggactttctgtctcaaatcagtccgtccgtg

SEQ ID NO: 58248 - DNA, 748 bp, Heterodera glycines
atgaacgaactttccacgctcgcttggtacccggctgccgaatttttggaatttgaacgaatcaacaaagcgtattcgttcaacgtcccagccttttctgtggacacttcgacaacggatgggccgaagtacacacaaattatgaacgcactgtcggaacaattgcaacagcacgtggccaaggcgaatttgctgatttctctcaacgagaaaatcccacaattcgatgttgaagttgaggtcggttttaaaaccgaaaattgaaatgtaggattttatgagatgacggacagataacgaaactaaaatcaaacattaaaaataatataaaactgttttaaacgcgttttccctttatttcgagcattttttgagtttcaaaaagcatttgcgcaaatgtcaacaaaaaccttttgttaaggaaatgatgcgcattgcaattggccgtacgcaattgctgctgaacaaacggatgaagcaatttcgggaacatttgagccgtcatttggtacgaaaagagagagcgacggcatttacggcacgacaaattgaattgtcatttttacagaaaccaattcctggccaaaaagtgaccaaattgaacgatttgcacgctctttgggtgcttatcgacatgcaattggatgacatccgatccattttcaactccatcgagcagttccgtcttcgctgttgggctgtcgctgaaccaaaggccgccgcgactgccgcttcttctggcaattaa

SEQ ID NO: 58249 - DNA, 103 bp, Heterodera glycines
atgatgagggggaggagggagggaaaaggaagggcacggcacagcggaggaaacggaggaggacgagcagaacaagcaaatgttgaaggaggaggaggaggaa

SEQ ID NO: 58250 - DNA, 881 bp, Heterodera glycines
atggctatggctctggtggctatggctctggtggctatggctctggtggctatggctctggtggctatggctctggtggctatggctctggtggctatggctctggtggctatggctctggtggctatggctctggtggctatggctctggtggctatggctctggtggctatggctctggtggctatggctctggtggttatggctctggtggctatggctctggtggctatggctctggtggctatggatatggtggctatggccacggcggtggaataggcggtggtagaatgggcatgggcagcggcagcgggatgggcatgggcagcggcagcggaatgggcagcggcagcggcagcggaatgggcagcggcagcggaatgggcatgggcagcggcagcggaatgggcagcggaatgggcatgggcagcggcagcggaatgggcagcggcagcggcatgggcagcggcagcggaatgggcagcggaatgggcatgggcagcggcagcggaatgggcagcggcagcggaatgggcatgggcagcggcagcggaatgggcagcgtcagcggaatgggcatgggcagcggcagcggaatgggcagcggcagcggaatgggcatgggcagcggcagcggaatgggcatgggcagcggcagcggaatgggtatggggggcggcagcggcagcggaatgggcatgggcagcggcagcggcagcggcagcggaatgggcatgggcagcggcagcggaatgggcatgggcagcggcagcggaatgggcatgggtggacgctgatccgcgaagtgatgaaaaaaagattatttaaaatgacccaacattttttcatcgtatttaatggatcaaaaaaacccaaaa

SEQ ID NO: 58251 - DNA, 369 bp, Heterodera glycines
atgtctaataagcaacaaaaggttggttttgagtttaaatgttgccatcggtgccttcttaacacaaattctttcagaacgcaaactttggacagagatggcaacttgaatcgaatacgtccggaagtgattcgaagacctttctttgggggcagccacctgattttggatttactgccaagactcggaatgatttggtcgggcctcttccgccctcacaaggcgtcagtccgtcgaaaaaaaagccgagttcaaagagtcgtgtagacgcattccgtcccccgtgggaggacagttcggaggaagaaaaggagggcaccgcgacagagggaaagggcacggaggaaaagcgctgggacatggaagaga

SEQ ID NO: 58252 - DNA, 354 bp, Heterodera glycines
gaccaccccgatttggcggcggcctttcgaattgcttccgagacgtactcccacgggtacaacactgccaacgcgtcaaaggcgttggaccgattcgtcaagcgcaaattgctttgcgtcgagcaaatgcaatgtttggcgaaggaggcgcctacggcttggaattcgacggtgcaaatttgcagaaaattcatcacagtgccgtcaatcggcgtacaaaacaccaaattcgaagggcacggggcgacgctcaaagaagcggtggacaattgcgacttggccattctgtacgaactgttcgactttgacgtgatcaaggaggccaacgtggagataaacaacatgcaacgaaag

SEQ ID NO: 58253 - DNA, 537 bp, Heterodera glycines
ttttgttcagttgcatttgatttttggggagtatcagaagggtcatcggtcatcccattgagcaggcaattcagcaacagttcagcggagacacgagggacgggtcggtttatttggggggaaaaggggggggggggaggcggataatggcaaaaagaggaaaagaaggaaggggaggcagtggacaatggcaaattcaaacgatttgccttgcttcagttatttggcggtggtggaatgtgtgcacaatcggcacgccttcttcgccaaagtgctccaaaactcgaccaaaagcttcctcggcattggcaggcgcgactcggacttgatccgactgattgtcactcgtgccgagtgcgatatggtcgagatcaaagtgagtgaaaaggacaaacgatggatttaatcgatcctctgctaattggcctggtttaggagcagttcatgcaaatgttcaacactccgctggagaaggccatcgaaagcaactgttccgggccgtacaaagacggacttttgactctggtcaaagggaat

SEQ ID NO: 58254 - DNA, 1644 bp, Heterodera glycines
atggacaaaactctcgccgatattttggaaaaactcacccaggcaataaagcaacaaaaggcgccctccacaacacaaacagcacagaacatcacattacctgacattcagacattttctccgaacagtgctgaagaattcgaggagtggctggaacgtttccaatttgctttggattgtgctgcctcaaatttggacgatgaacagaaggtcaaattgttgatgaccaaattgtctccgacggcgttcagcgagtacaagcgcttttgtctaccggacgaaatcacgaaattcaattttgcggacacaaaatcccgactgctaaaattattctcgcatccgccatcattggcaatcgaccgatacgaatgtcttaaggcatgcagagacgatggcgaagaatttggcgcgtttgtgaaccgtttaaaggcgctgcttcgaaaatttcgctactcagaattaaatgaggagcaatttaagtgcctggttcttctgacttcactcaaatcctcgagtgatgccaaattacgacaacacattcttgcccgtctaactgtcgaagatgcgaaggtcaacaaaacggccaagttgtttgattcggttgttgatgatttgaatacagtgcttaaaactgaagcggaggcaaaatttttggaacagccgaagcttaaaataaatgcagtgcagcacactaaatcatcaccgacaaaacaacaaaatcaaacaaatttcagtcgatcacacaaaatttcaagcacatcaaaacgcaaaaatcctccgaacaattgcttccgttgcggagagcttcactgggcccaaaattgcccaaagaagaataatgtgtgcagaaaatgccagaggagcgggcacatcgagcgacagtgtgacaaaattcaggcatatcacaaaaataagaggagccaaaatccaaaagtgaatattgtgatgttgcccgacactttcatcaattccgttcaatcggcgggtctaatgaatgcaccaattttaatgaacgacaaatcaatcgatttcgttttggacagcggcacagaaataattgtcgtcaccaatcagacgtacaatgatattggacgaccaccaattcaggcgtgtcaggaagaagggagattttttgacggcacgcgctgcaaattccttggccgcggtgttgccaacttccaattcaacggaatccgaacggagctaccatattatgtggccaaaagtggaacaattaatcttttgggcctgactgctttggaccgttttggatttctggaagaaatgaagcggctgatcggcaccaaaaatattaatcagatttggtccactgattcaacaaaaattcgggacacaattgcaaattttgagaacaaatataagcaaattttctctgagggccttggactctgcaccaaaatgaagggccaattgatgctcaaatccggcgcaaatcctatttttaaacgcgcccgtcctgttccttacgcaactctgccgacaataaatgccgaaatggatcgattggagaaattaaaagttatcaccccggttgatcataccgattggtcagcacccattttggtggtcaaaaaggcaaatgagaacagcaagattatgcgcagatttttccaccgggcttaa

SEQ ID NO: 58255 - DNA, 1282 bp, Heterodera glycines
  unsure (1)..(1282): unsure at all n locations
atgtggaaaacatttttgattacctacctatgtgaccaatttgattatggttttctatgttcacatacatatatgtgtatgtattcccataaaattggtaagtcttctaggaccccaagggcgtggccaataccttcacttccggatcgggccagtatcgtctgtccagttgcgtctgagccaagtttagaccaccataacttttttctttgttgaccaaatccaacagttggtatcattcgaaagctcttaacaagctctatcggctatacaaaaatcaaaaagacattacgacatataaataagttataacattaaaatatgcaaaaattaaatcttgttgccaatgatctaggcgattgccccctacgtgctctaatttagacaattttgaaaaaatttcataaaaatgcgaaaaaacagacatcgatcgcgatgttcttttttggatttgtgtaaaaaaatgcaggtatatgaaaaacacagttgccaggttactctttttttcactatatagtattctaaaagagaacatagagctgtattaattagataaactcttttccgaagggaaaattttgaaatttacaaaaaaatcaaatttccgattaacttttgacgtccaatcaatgaccatcctgtttttggccataactttttgttactttgtcaaaataaacattcttggtatcaaactaaagcttagaagaaagcaaaagttggcacaagaaagcagtcacaatgagaaaacaccaaagtgcgcgaaaagccattttttgtatgcgacaaagtaaaatcaccttcaaaattgagatttaagttaaaaaaataggggaaaatataacaacaaaaaaacggcttaataaccatagagttcttagagtttacaacttgcgaaaaattgaagggaaacacaaatttttcatttttgtttctggattttttttaattgggcaaaatgccaaaataaaataaaactaaaatttttgaatttttagaacgcaaaaaggaaaaccgtaaagcagagaattaggaaaggtggccaaacatgaacaatcgcttctagggattgcatttcatcaatattgaacaaaattggacatattttttaaaattttaaacggcataaattagacattttttaaccacatgattttctgcctgcctacttaagttaatgtcaattaacattttaattaatgatcaaatgtatttgntggcgttgnntgtgggcgctcttnttaaaaacagtaattaccataaaactntgaaaaatcgctaa

SEQ ID NO: 58256 - DNA, 140 bp, Heterodera glycines
atgaccagacaaaagcagagaaagaaagggccaacaaacgcacggattaataacggaacgaatcagcggaaggccaaaggaaaagccgacataaccgaacgaagaacggacaaacggacgaaaatcggacgaagaacgaa

SEQ ID NO: 58257 - DNA, 653 bp, Heterodera glycines
atgccgaaggttgtgctggttgtcgacgaagggtatttccacgccgtacatcacaaccagctgaggcctctcactgaagtcagttaaagccttcacagcaaattcaaacaaaatcattttagacagtgaccgctttcaacaaaatttttctggcaaaatgtaaggtaaagcgtgttaatttttatggacctgcagattgtgaacatttagcttgaaatcggcacggatggccaaggccgtggttggagtgcggaggtgcagcactttgtcagcgagtcattgcggaaggtggccatgcgaagtgattgccgggtggagttgctgctgcaaaagggtggaagttggcaatacgcggagggagggaagattccgacatgtacagcgaaattgctaatcgacggtgccgattttgcagcacaaatggcactgatgggaattggccattcgaaagcaatggaatgaaaacgcaaaacgaacgacgaaaagcattggggaaaaacaatttataataatccaacttaattaaattacattttattttgtgataaatgtgtataatcgcattctaatcacattcgaatgtgtgcaactcgaggcccagtgacggaacggatggctttttggatggtccgtctctcagctggttgaaaata

SEQ ID NO: 58258 - DNA, 656 bp, Heterodera glycines
gtttccggggcagtccccccgaaccgatgcgcccagatttatggggagaccgaatccttcgggagtagcttccctatagcctgtactttaattctgcgttggatttttgctccccataattgtttgagtaccccaaacggacacttgaaaaaatcgatttttttgttttcggggcagtccccccgaaccgatgcgcccagatttatggggagaccgaatccttcgggaatagcttccctatagcctgtactttaattctgcgttggatttttgctccccataattgtttgagtaccccaaacggacacttgaaaaaatcgatttttttgttttcggggcagtccccccgaaccgatgcgcccagatttatggggagaccgaatccttcgggaatagcttccctatagcctgtactttaattctgcgttggatttttgctccccataaatgtttgagtaccccaaacggacacttgaaaaaatcgatttttttgttttctgggcagtccccccgaaccgatgcgcccagatttatggggagaccgaatccttccggaatagcttccctatagcctgtactttaattctgcgttggatttttgctccccataattgtttgagtaccccaaacggacacttgaaaaaatcgattttttt

SEQ ID NO: 58259 - DNA, 966 bp, Heterodera glycines
atggaattcattgtgaaagcgatgcccatcgtaacgctgaattcgatggatgaagcggaattaagcaagaaaaaactttcccttccatcgcggccaagacagccagacattctgttgggaatggatgtcagacatgacctgaaaataagagacgagacagaaaagttgccaagtggattcacattgtcaacgtctcgagtcgggcggatgataagtggttatggccaagtccagggcccaatggacatgagtgtgcaagtgacgtacactggagcactcataagtgccttacaatgtgccaatagcagaagagatgctgacgaagaaattgaagaacagataaagacatttttcgggctgaacataatcggattgagcgacaatcctgaagaagaggacaagggagaagtgatgagaacgttcagaaaaggcttgacattcaaagaaggaagatatgaatgtggcctaccatggaacgaaagagtaaaggatttgccgacaaattttcaacaagcgagggcaagactttgtggcacagtgaagaaattgcgagaattgaatttggtggaagaataccaaaaaattttcaatgagtgggagaggaacgggataatcgaaagagtgccggatccaacacaaacaactggaccggtacattatctcccacatcggcccgtgataaaaatggacaaggccacgacaaaaataagaattgtgatggatgcatccgcgaagccagcaaaccgcaaaggagccccatcgttgaacgaatgcttgcacacagggccgttgttgctaaacgaattgaccgggatccttctaagatggagaagaatgaaggatctaatcctggcggacatcgaaaaagccttcctccaattatcagtgagagaggaggacagagacgcgaccagatttctgtggctggaggatccacaaaagacagaaatttcaagcccaacatat

SEQ ID NO: 58260 - DNA, 3949 bp, Heterodera glycines
atgatcaccggcgcagcacaaatggagggcaccattttggtggtggccatcactgatggaccaatgccacaggtaaaagagggaaaaggggacggacagaacggaacgagtggcaaattggcaaggaatggataacatggggagagagaggtgttgtgacgggagcagtaggttcggttcccccccccccgcccgtatcagtccgcccccaagaaatttttgtttttttctttattaacttggtaatttaaaaaaaaattgttgaaatttttttcttggaatttccgtataagaaaacattaaatttttataagttaattaattttaaaaaaataaaattttctcggatgtgtgggggaaattgcggtggtttttatgtcaatacacgtccggctcgtttccataattgtaagaggatggatcctcccgtttcgtttcggctttcaggggcataacaaattccacacccacccaccctacccacattcaaaattattttgacacagaatttttaatgttttggcggcatattaaaatgcaaaaacatttctcttctattttgtagacccgtgaacatttgctgttggcacgtcagtgtggcattccgcaggagaacatttgcgtgtttctgaacaaagtggacgaagtcagcgacgccgagacgcgcgaattggtcgaaatggaggtttgacgtatttgttacaaaacttgtacattcaatcactcccatttgtcaggtgcgcgaactgctcaacgagttcggctacccgggtgacacggctccgatcattgcaggttcggcactgtgcgccttggagggcacaaagccggagcttggggaggagtcggtgaagcaactgttggacacaatagacaacttttcgatcccaaagcgaacaaaagaggacgagccatggatgccggcggagaaagtatacacaatcaaaggtgaaaatcggggggaaagtggggaggagagagcaattttccattttaaaataaaaaggattgaaatgcccgtccatctttcgcattttaggccgtggtacggtgatcaccggcaaattggagcagggcactctgaaaaagaacgacaaagtgaccattgttggactgggcaaaaaattggacaccacaatcgccggtaaacccaatggtttactctcgtattttaaattcataattttgtttataggcttggaaacattccgcaaaacagttgatcaggcggagcccggagaccaattgggtgagtgatttaacgaacaattgacacatttaagtaattaatttaaaaaaaactgaaataccggagtaggtcgtttccaaaaaattttattgaaatttcaaagatttggaaaaaattttaaatctccaatatttttgcccgttccttccacccgtttttgttcaggagttctcctcaagggccttggtccgaaggacgtgcgcaggggaagtgtgctgctcaaacagggccaagacgcacattttacggacaaagttcgagcgcaggtgagcgaaatacaatggccgtttttctagaccacggtttcttaaacatttttttagtttaactgctaacaataagttctttatcggcaccgccgggcttctcccccccccccctcaattccccaaaattttttttgtgaaaaaccgcgccgaaaaagtctgaatagcaaaaaaaaaacagcagaagaaaaaattagaccttcgtatgaaaatcggccccgaggtttttatgtttttttaaattacgaaattttcaaaagctgattttcctgtcatcaaaaaatttcatgtcattctgttaatgattaagaaaatcagcatttttaaatattttaactcattgggttttcattgtttgctaacaataaacaaaacacacgctttcacagatttacttgctgaaaccggaggagggcggctccaaaatgccgttggcccacatgttcaaggagcacatgttttcattgacatgggactcggcggccaccgttatgttgcagggccgtgacttcgtcatgccgggcgaggtgggaattgtctggcaaattggtcaccgcatttaaaagaggggctatttaaaaaaattttcttcaattgcttattatagtaatattattttcattgtttcccttccccctttagactgttgagctcgagtttctgttcaagtactgtttggcggagtgttcaaatgcacccatttcctcttccaccccctttttaaagcactccccaatttgttcgtccccaacagcgtttcactctccgccatgacaaaaccacaagttggttttgtatatttgttatgaaatgggcagttgcctcgaaaaaacgaaaattcaattccaattgccgattaattaatataattaattgattgaattctttgtgtgtgtattgtgtagcacttttccgttttcagtcgcctgcggcgtctttttggaggctcttcccgagtcggagggcgaaattcgcgacaaaaagtggaggaaaatgcaaatgcgaggagtgatggaaagtaaggccttttgaaaatcaaaaattgtttatttgtgttcggtcctttccttttcatcgtatttctgttttctcatttttcaggggttggtttcaatccgttcggcaaccgatcgtttgagcgagcgtgcaaagtgagttttattcgctgcccaatttcattcattttaaccaggcacataagcagagggatatggcagttctcctcccccacaaattttttcggaaatgtttaattttaattttcagcaattttaccctacattttccctggcgttgcctaacatcactgccggatcccaattttcttatatttgtgtcatacattaacaaggggtgcgtcggcgcacccccccccccccacgtgcgtcgtaagggggcggctgtaaaggaggggaggaggtcgtaacgaagggggaaaaagttaaaatttgaacaatttccgtagtgaaacccatagaaaattcaacaaaattttcccggcggcgcctatcggcaccgccggaccgccccaccccttcccacgaagttttttggaaaaaacgcgccgcaaaaaggtttgaatagcaacaacaacaaaaaaaggtcgccggggaaaaatagggaccgacgtaagaaaaagttggtcctggcgcacccccctgcgccaaacgtccgacgtatgggggtctgactggcgcaccccttgttactgtatgatttgtgttaaaattttgtttcgaaatggctacaaatttcccctttctcacaaagccagaaacttttgaaattaatccctccccctttcgctttcagcctgactataccaattcgccgaaggacaacccggccgaggcattgttcaaagccgaggcaaaagcctagaaagaactttagcgaggggatgactttagatgaaggatttgttttttcattaattaaatcactcatttccgtttcatttatttggcgttctgtttttattccatgataaattcctctttaccaatcattgcttttgctgattccctctatagtaagattctcccccccccccctaactcacttctgagcaaatttaagactttttagagagtgttacgggcgacagttgggtctatcgacgcataatcttaagtgctataaaggaaaaacacgggttttcctaaatgtttagaactgttcgaaaaactaaccaaaaatcgcactttttttgtatgacctatttttgaacggtttttcataccttaaaaaattcaaatcaaaaatcgaaacaatttcgcatgctatacaaagtgttggctttcagatgataccacatctttttaaatttcttttttccctttttcgggattatcgtgccttaaatgccttttttggcatttttccattttggtgttatttttggcgtttttacgaaaaatccattaaaaatgca

SEQ ID NO: 58261 - DNA, 1184 bp, Heterodera glycines
atgaaattgcttatttttgatgattacgaggcgatgagcgctttcggcgcccaattggtcgctcgaaggataaacaacgctttggaacaacgaaaagtcactgccggcgcagcgaatgtgccaaatgggcgctctctgtactcagttggccttcccaccggtgggaaaaaatttggctttctgagaggccattagcgctactgcaatgcataataatcagaaatttctgactatgaaaagcctaaaattgtcattttttggacaaccgccgagaaatccaaaaagatgcattttttctggctgttcttttgtgtaattggtctttttaatcacttcctgattactttttcaatctgatcatttgctctcaatagaaatcatctctgattatttgtcggtcttgtgccattgttgaccgatttttgccatttcgttttcgactaaaccgtcacacgaattgctactctttctgatcagtttttccgatcatttttcaggtggcacccctctgggcttgtactgtaagctgacagagatgcacaaggctggccaagtgtcgtttgccaatgttgtcaccttcaacatggacgagtaggaaaaaacgggcgcattattagtgccactttgcgtgatctaattcaaaccgaaccagcagcagcagttaaatctgctgatcggttttcgaggcgccatttgattttttgatcagagtccaaatccggcactattccaacagttgaaatatattaaccgattttaaatgaattctttagtcatgaattgatagaaaatgtcttttttgcttatcctaagatatgttggcattccgcgcaaccatccgcacagttaccacacattcatgttctccaatttcttccggtgagtacatattttgaaaggatagaaacattttgaagggaaaaatggatgaaaaatccttctaaaaagtgccaaagttgaagaattaccttatttgcctctgatcaattattcactgatcgcccccaattttccctttaggcacattgacatcgatccgtccaatgtttggtttttgtccctccgccactaattttgtgcccccccctcccctcaaaaggtgcatattccgaatggaaacgccgccgatctgaccgcggaatgcgcaaactacgagtaagaaaggcgacacgatttgctgttca

SEQ ID NO: 58262 - DNA, 1017 bp, Heterodera glycines
atgtgctggtcaacgaatatttgcctggacaaggcattatggcgagttattgttgccaaaaatataaatgtattaatataatttttcaattatttttaaaattaaattagtaaaaaaaaattttccattatttttaatattaattaattttattattattattttcagcctcacacggatggaccagcattttacccactgatctccacaatttcacttggctctcacacagttttggacttttacgaccaagtcagtcatgtctagggctccaatttttagccaaaagcctatttttttcctgagctccccgtggcctgaaacgcacgaaaaacatttttttgggctgttgttaagctacttttcgagttattagtgcctattttctagccttttatttttagcgcctaaaaagcctaaaaaattttgaaagagcctatttttgcctattttggcgttttgccgaaaatttgttaacaaaaatgcaataaaaacaaaaaaacacccctaagaatagacctgaaaattttataaatacacccttaagtaattaaaattttatcaaaaattccatctccaaaataatttatttattttcttgacaagaatttttgattttaaaaattatttagctcaatactgttttccctaattttttgctaaattttttaattttacacccaaaaaatttgagactttttagggcctattattcgaaaccttttacagattggaaagacacttttatctttttagaatagctttagtccctttaagactgttttcgagcgttattaaacagtcggacgattcagtccctgttgaaaatggacacttcagtatgcgattgtttacagcaaaatggcaagcgcgcgcctaatttgcatttttctcaccgttttgggccatttttttacaaatgttttgaattttttgatgcaaaatattttaatacaatcatacaataatcttcatttttaaaaattttcttgaaaacatttagctgaaataatttca

SEQ ID NO: 58263 - DNA, 113 bp, Heterodera glycines
atggcagccaaagcaccgctgttctgctacctgttcgcctggttttgtgccattattgttgcagcaccgtacggtgccgccgtgtccgttgaagatgccaccattttggaccc

SEQ ID NO: 58264 - DNA, 1690 bp, Heterodera glycines; identical to SEQ ID NO: 27565

SEQ ID NO: 58265 - DNA, 577 bp, Heterodera glycines
atgccatcggtcgtcagttgatcactgactttcatccaggtccctctgccggtccattcaaatttcgtccattttgtctctcatttcctttagctgtcaaaaacgtcgcttctgccagtcaaaatttgctccgttccttccaaagtgtgtttaattttccccgataattttgtctgtcaaaaaaaggcctaagtcatcacttttacgaatacaccgccgctttatacgctttgggcttttcgggcataaattcggatgagttcgaagtgagggaacagtcgaaaactctgcagacggtgaccgaagtgctgaagaaagtccattcggaacagatcgattgggttggtaacagtgaagggaaagcaaaaacaaagcccaaaagatggattacttcacggcgatggcactgacaatcaatcaaaacagcaaaacggagaaggaacggctgaaagcattgattagcggcttttccgagagagagaggcaattgagcaaagcaatccatcgaggcaagcaaatgccggacacgcggagtaacttttacgagacggagttggaggcgatgcgggaccaacaa

SEQ ID NO: 58266 - DNA, 1215 bp, Heterodera glycines
atgatggatgtgccaaactctttcaacacttcaccaggatttttcgagaacttggcccagtcgttacttgacctcaaaattcaggacaatcgcaattacaaaaatgaggaaccaagatctggggcaatgaatgcgctcacacacatcaaacccaaaacaacagcaatggattgtcaggtcgaaaatgaattagcaaaaggatcctctagtgaatccccagcctgtgggccggaaacaaagacaaacattcccaaaacgtcaaattgggaacggccaagcgtacgatcgaaagtcgcttctttaatgttcattacattaatgcttgttggaatgattttaccctttactactgctaatatgccccatctgccaatgcatccccttgtctgtcaaacccaaaacggaggaaaaatttggcaattgccggcagttactggctgttcaaagctgtcaattgatcattcaaaagcacctgttgttcgaactttcgatgtcttttcgccaaatttatttgagcactcggcagatgcttgggcttgccgaaaagtgagaaaatccgtgcgtaagtacacttcaatcactaatgttccgatccaagagactcttgaaccacttatgttgcaaatgactccgagtgaatgtaagcaaatggccgaaaatggaaagtgcagcttaggcttgctaattaatgactcgggactctcgcatactgacaagaaattggatttttcaccccgaatgtggctaattggctcatttagctggtcgactgtctcaactgaaaattgttatctttttaagactaaaattatgtcacaacacggtagcacagttatgcaaagtcccctcgggttagtgaacaattgcgaattcaaggcaggccaatgtgagatggaagacaagacattgctcatgtgggacaccaacactacccgtgcctgtgaattttcgaaaatcggcacatggaaaggactacaacttgacaatatttggatttcggatgaggtcagttttcgtttgacatttttgaacaacacaaagaaagtcaactcatgtggtctgaatctgataaaatcggaggaaggatttgctgtacaagacttgccttccgacgatagcaacgaatcctcaaagagaagcagaaagacgagatcacttgaaagttgggtcaccgaatcggaaatgaactccaaattgggctatttggatgaacaa

SEQ ID NO: 58267 - DNA, 655 bp, Heterodera glycines
agcatttctcttacttgttcatccaaatagcccaatttggagttcatttccgattcggtgacccaactttcaagtgatctcgtctttctgcttctctttgaggattcgttgctatcgtcggaaggcaagtcttgtacagcaaatccttcctccgattttatcagattcagaccacatgagttgactttctttgtgttgttcaaaaatgtcaaacgaaaactgacctcatccgaaatccaaatattgtcaagttgtagtcctttccatgtgccgattttcgaaaattcacaggcacgggtagtgttggtgtcccacatgagcaatgtcttgtcttccatctcacattggcctgccttgaattcgcaattgttcactaacccgaggggactttgcataactgtgctaccgtgttgtgacataattttagtcttaaaaagataacaattttcagttgagacagtcgaccagctaaatgagccaattagccacattcggggtgaaaaatccaatttcttgtcagtatgcgagagtcccgagtcattaattagcaagcctaagctgcactttccattttcggccatttgcttacattcactcggagtcatttgcaacataagtggttcaagagtctcttggatcggaacattagtgattg

SEQ ID NO: 58268 - DNA, 678 bp, Heterodera glycines
atgccaatggtggtgaattttggccgggtgggtaaaaactttttatttttattttactattttaaattttcaaagtatttcagactggggacgcgcaaaggactggacaagtcgggggccgccgatcgatgccaccctctgttgtgccggcgaatttgggcggcgtgccgccataccaggtacaaacacaacaaatccatttgcttccctttcttataccatttttttttaaaaaggagccgcaaacgcagcgcgaggtgatttacgatgtgccggcggatggtgtgccggaagacgacgatgacgacgacagtttttgaacgatgagccgatacaacaatgagctttaattcctcataaatttttataaaatttgggaattttcatttcacatttaacaaattttggctaataaatgtaattcaaaaatgattaattggcaatttataggagaccactaaataggagaaatttcaaatgttttactgttgggtattcagatcgttaggcgagattaatgctctttacgcaaaattttaaattttaagcatttgatataatctttttgaatgattaatgtgtgatatagtggagaaaatctgtcggtacatcaaatgagcaatttgtttaaaaatgggtcacatccattatcgggaattcgggatgctttggtgcata

SEQ ID NO: 58269 - DNA, 1097 bp, Heterodera glycines
ttccaactggtgtgttaacaattgaagaagtgaacagcgtgtatcagcattattcccatccaaagttaagtgatgccactgggcttatcaaattgaaatttcccacccatcaacgctacaaaaacgaaggcacaattgagatggaaattgaaaaagtgtccgaatttgcggtggaggaggtgggaagtggccgatttagcgatgccatggacattgggagatttccatggaaaataatggcacaaatcgaaacgaaaaacgaaagcaatgagaaatggttgggcttttacctttccaacgatggccttgaaaatggtaaaaagtctttttcgtaaatctgtccgaatttaaattcaccaaaactaaatatgtataataaatagggctgggatttttatgttttaacatattttttttgcggcttagttatggcgagagaagcccaaaaatagcattttctccgaacaatttttgatttagagcgacttataaaaacataaaaacacatattttggcgttttcgcacataaaaacatatcgcacatatttcggggtttggcacatattttgcacatattttggcatttttgaaaaaaatatctaagaaaaaaaaacacaaaaaattcaaaaatgcacccctaaaaatcaactttcttgccatttttataggctctttcaaaattttctttatttatttcgtgtaccgaaaatcgaattcttcattaattcgttactggatatcgaagtttcttgctggcacttactcaactgatggaaaaattatctttaaaaacaatttatcaaaaaaggactaattttacccccaaacacctccaaatgttttttatttgcaattgtgcgggcaaaaatgataaagaatgagttttttggaatttttatgcaaaaataccattggtttttccaatttttagcacatatttttgcattttttaacacaaagtaaaaacctaagaatcccatccctgcttatgatgattggtagtacgacaaaataagagaaattataaagaaaaagagaaaggacgaaatagggtaatcatgtactttattggtccctaaaaaaaagaaagaataaa

SEQ ID NO: 58270 - DNA, 228 bp, Heterodera glycines
aatttctcaaaaaaagagatagccatttttctgggataacctctaaatataaaaatcctctgtgaaataaaatggcgattgtgcacagccctccgtctcatacgcaagcgcttttgtgaggtataaaatttctcaaaaaaagagatagccatttttctgggatagagtataaatttaaaaattccctcaaaaataaaaggtctattgcgcaccgccctccctatcatg

SEQ ID NO: 58271 - DNA, 393 bp, Heterodera glycines
tttgtattggccaattcgctaaacttttgactcgaattgatggaatggaagcccaaataaatggactgaaggaaaaggatgaagaaggatcgttgtcgtcatcagtgccagcagcagtggaggatgatgatattggcgaacattcagattcaacggtgggtggtgcatttttggttcaatgacaactcgcgtcgtacaaaggcaattaattcgtcgtttaagcggcagcaaaccgagggccacaaccagaattttgaatttggacaacgtcagttcgtggattatactggttacgcatcaccaacatctgcagccagctctgtcaaaagttctccaaagaagacggcggaggaggagggtcagcagcagtcgtcgtcttcttccaagcgtcat

SEQ ID NO: 58272 - DNA, 738 bp, Heterodera glycines
atgaagtttcttctattttacgagttttctttttatcacaaagtaatcaatgacttaagtgacttcagatcagtttcctagactcaattggtcgcgcctcgacattcaaattaaaataaaaaattttactattaaagtaatatattgttaaaaagctattaaagcataaatcattgaatttttcttaatgttttaagttattttcatttatataaaattattttaatcaaaacaataaaaaataataaaatagaaattttttttaataaattaaatttcaaaataaattattcttgtttaaaattacattaaataacaataattagctataaaaatgaacataaagaataagaaatataaaatcaaaaaagaaactgaattaaataaaaaataggcaactttttcggcaatctcattcgataatataataaaataatttaactcaatcctagtttaaaactaaactaaattaatgttgaccaaaattattattttaaagaatcaaatcttccctgatatcagctaattgcactacattaagaacaaataaatgagaacgcttaaacaaaattaaaataaaactattaattgctataattaaattatttttcaaattgaggaatttatggataataaaggagtttttatatacgcagaatggcttgtgtgcatgatcatggacacacacctggaaaacttataaatttaaagaaaaaatttatttctgaaaaaatagga

SEQ ID NO: 58273 - DNA, 559 bp, Heterodera glycines
atgccaactccgttccgcctgctgcttcggcatttggctctgtgcgtgtccgaatgggaagaggtgtgttgaggaagggattaaccgagcatctttcgcatttttcctccgaccaaaatttttaaaaaatagaaaattttaatttcgaaaggcacaaaaagagggtttttgatttttcatgactttgggtgtcgatggtgattattttcaaattcttttttattttttacattttccattcatatatcactcgtttttggataataaatttttccaggtgttgtacatggcatttttggctatccaaggcatgttcattgacctcaacagcggccgaagacggccgataacgaaagagaagcaaaggcggcggcttcggcacggcttttgtccctcctccgcctcgttatcggacgaagcggcaacggaaaatcagcagaaggaagttgggcacggaacagaagcagcagaagaagaacatgttgaggaggaggaggagacggaacaccaactgttcatgataagcagcagttcgtccagcgaggaagaggacttttga

SEQ ID NO: 58274 - DNA, 351 bp, Heterodera glycines; identical to SEQ ID NO: 53910

SEQ ID NO: 58275 - DNA, 772 bp, Heterodera glycines
atggggagcaaaaatccaacgcagaattaaagtacaggctatagggaagctattcccgaaggattcggtctccccataaatctgggcgcatcggttcggggggactgccccgaaaacaaaaataaatcgattttttcaagtgtccgtttggggtactcaaacaattatggggagcaaaaatccaaggtaaaaataaagtagaggtatatcgaagctattcccgaaggattcggactccttataaatctgggcgcatcggttcagggggactgccccgaaaacccaaaaaaatcgattttttcaagtgtccgtttggggtactcaaacatttatggggagcaaaactccaacgcagaattaaagtacagactatagggaagctattcccgaaggattcggtctccccataaatctgggcgcatcggttcagggggactgccccgaaaacccaaaaaaaaattttttggataaaaattatttaaatgaactgactagataatatttaaaataggttatttctcttcctttcagtatccctgcaaagtttggtgcgcttctgatcagtttctgaaaaaaaagttaagcctaaactttttggcctgtttaaaaaggaattaaaaatttttaaaaattttattcatctccctttttgatagaaaaagcatcagagtgcctaaactaacatgtaaataaaatttggtgcgtttcagaaccctttctgaaaaaatatttaagaattaattttgcaaaaaataaataaaaacgaaagact

SEQ ID NO: 58276 - DNA, 803 bp, Heterodera glycines
atgaacttcaagaagcgctttcttctgcagcattttttgacgattttatgccatttgttttggcatttgaatttggcgcaacattttgcgcagaaaacggcggtaccaccaaattgtgcaaagagaaagtgcaatttttatatttaaaattcgtaatttataaataatttcattttttagtgcctttcccaaacattggtcgccccaaaaacaaaggcaccgtttgttggcccaaccaaattccatcggacaacgccacgcgcagtgccaaaaaccacttttggcattgtgccaaaaactgaagaaacctttggctttgtgccatttgcacgaaatgtggaccattttggcacaaattgtacgaacattttcttcccggcggaagtggacaaattcttgctgaatatcaccgcgaggccatacgaaattgcatgcaatgactatgaaaaacgtgccaaaattgacgagccaataccgtccgattattggtcaggcggacgccttgtgaatgcttgcatggcggtgccaagtgaaaaatgcgaaaagtaatttttggaatttattttttgaaaaatttcaaagttgaaggctcgtcgaactttacgggtgctatgaaagcattggcaataagccaagtgtcaatgccatcggcgaattgtgccaaaaacatctgaacaatgccacaaatgccgctgggttttgctgttcaaatttgtgcacatcggcaccaaacggaggcgacgaatgagctcattgttgaatcgttcatcaacttttcgttcactaatggagccgtttgctaa

SEQ ID NO: 58277 - DNA, 2720 bp, Heterodera glycines; identical to SEQ ID NO: 5507

SEQ ID NO: 58278 - DNA, 1688 bp, Heterodera glycines
atggaccgtatctaccagggatcacacggaattacgacgatttccgatcgccattcttggggttggaattccgatttccgatatttttgataaaaattcagaaatttttggaatttttttttaattagcaatttttatacaatttctgtatataaaatgcactgaaattttgaaaaaattttcccggcggcgcctttcggccttgaaataaccttttatttggttaagaacgtattcgaactgacgtatgaatcaggcaaggaaaattgaaaaataaataaattataccttttaaattttttaaaaattaatttattttaacttgctttcgttttaaatgcttttctaatcagaaccattacaaaatggaaaattaattgttcaaaaatctgttaaggcaacgccaaactcataaattcgaacaaatgcgtaaataccgataatttgtatgccgagaaaaggaaccccggcaccagcggtttgaagtgttatgacggggtcaaacaccaattttatgactgctcctgtcacggtgataagaaatgcctcgctgaagaaaaatgggcacacgacgcatttctttgtccaataataaaggtaattaattaattagttattcattaatgccaaaagacaccgccagatacatttcatataatattttggcaatttaatttttccgtactaaaaaattaccattttttgtataaaattagtgaaataaggataaatatggcaaatgataaaaacactctattttattaattaatttgtaaatccaaggtcaatggaattcaaatccaaggaagccgacaacaagtgtttacggacccaaaagattttcgatacgattggactcggattgagattgattgttatgtaagttgggtctgctatatcaaaaaaccctgtttgattgactaactttacagaaggccgaagcgagtaccgtaagcttttggggctacagtaagccgtacacaaaggaaatcattcgggtggacgaaatccactgtttgacttataaagctgctggagtaacaccaccgtcacagaaacggttcaagagtttgcaagttgaagaacagctgtcgatgaaattgaatccaagtacattattggacaatgcttcatcacttatccatgtgttcgtgccatttgttggccatccatgagagaaaaggggtgatcagtgatcagtgggtgatctgtctctgcagctgatcagttggccaattccaatcagcaaatttttattttatttttatttttttgaatgaatttggaaatgaacaaataattaatttaaaaacgatattgtcttaaatttaatttaaatgcgatatttttatttatatgcttgtgattttttataagattttttgttaaatgttataattgtaaaattaatttattttaacttgctttcgttttaaatgcttttctaatcagaaccattacaaaatgggaaattaattgttccaatatgttaaggcaacgtcaaactcatcaattcgaacaaatgcgtaaataccgataatttgtttgccgagaaaaggaaccccggcaccagcggtttgaagtgttatgacggggtcaaacaccaattttatgactgctcctgtcacggtgataagaaatgcctcgctgaagaaaaatgggcacacgacgcctttctttgtccaata

SEQ ID NO: 58279 - DNA, 1388 bp, Heterodera glycines; identical to SEQ ID NO: 27593
  unsure (1)..(1388): unsure at all n locations

SEQ ID NO: 58280 - DNA, 928 bp, Heterodera glycines
atgatggaagaagcattgagcgaaatggagacgatgctcaacgagtacagggaggaaaacagcgcactcaaaggacaattggtggaacgacgggaaggggtacggtaatgggatggcacagggaaagatggccgaaggtacgataattgaaggattgcaccgttacagtttttgcatagccgtgacatgatgagcgcctctgccagtacagtgatcagcaacggcgtgtgttcagctcccgcggtattggaagagcgtctgcagatgagcgagtccatgtgcgagcagttacgacgagagcggaaggagttggagcgcgaaattgaagagatgcaggaccaataccgagtggaagagatcgaggagttccgcgagttgcagcgcgagttggagcaaagcgcgaagaacgggcgcattctgcagttcaaactgcgcaaggcggagcggcaaagggaccaattgcaggtggacaaaacggaggggtgggggaatgaggctcaaaggctgatcagacatgagaaaaactgatcaaaaggaaagacaatagttgatcagctcaaggtaagccggatcagtattcgttgtatcgaaacaaatgatcattggtcagtccatgagaaagtgccttggttgatcagcaacactccaattaaactaacacttctgatccgcccatatcatcccaattggaactgatacaacattttatttttctttttaagactgaaaagaatttgttggcacgaaaagtgcaagaaattcaacgagggattggagaaggagctgaacaaattgaggaaatgagcggagaaagcgacatggaagaacaaatggggcgaaaagtgagcgaattggagcaggaattgcgagtggccaaggaagtgtcactgaaaatgcacaacgaattggaagtggcggaggaaaagcg

SEQ ID NO: 58281 - DNA, 88 bp, Heterodera glycines
atggacccggaaaaggcacgacaacacattcctgagccggcaattttcacttatgcatccaaagatgccattctctacgccttaggaa

SEQ ID NO: 58282 - DNA, 1395 bp, Heterodera glycines
atgattgccgaagtggaacggctgttgactcgaaaaaggtccgcaccggtgcatgcaagttttgggaacattgacgacgacgatgaggaggagggcgagattcttgacgtctcgtttgttgaggaggaagaagacaatatgggcgaagcgcccttaaacccactttcatatttgaccaagcaatcagcggctcaacaagaaacgttgcggcatgaaaaatgggcacaagaagagagaaagcgaagggaagaggagcagagaaagcagcgagaaaatgaacgtagacggcgagaagaagaggagatgcgtcgtaagacagaaaaagatagaaggaagactgcagagaaagcagccaaggaaaagaaggcaaaggaagagaaagaggcaagtgaaaagaaggcaagggaggaaaaactggcacgggaaaagaaggaagagcagagaatagcaaaggaaaagaaaggcgagaaagagaccaaggataaaaaggctgaggaggagagagtagcaaaggaaagaaaggcagaggaagagagagtggcaaaagcggaagcggagagagtggcaatggtaacaaaggcagaagaggaaagagcggcaaaggcggaagcggagagagcggaaaacgagaccaagaaaaagcaagcggaggaaaagcagttggaagagcttaaacgacagcaacagctgcacgaaacggatgattaccactttgtgaatgctgtacacaaataccgtgtccggcactcagagctcccctgggaggcgcccgagtttaacccatccgcgcacatccaacagaatattggggagttccgtgagctgtttgagcaagaggtgtacgatgaaaactatgcggtgaaaacgcgagaggaaaaggaggagctgatcgagctggtcaaagggttccgcttttacttcaccgagcaaattggcagatttgagctcaaagttttcaacgggaaaatttcgcacattacgctgactgatcaactggcctacgtgttgggctatgaacaagagcagcagatcagaaatgaagagcttgcaaaatatgcggttgatttgggtggtggtgtgagccacctgtgcatttacctgaacagtggcgtcattgagagcatgattgtcggcaacacctttgccaatctgctccaagtgattgccgttgagggaaagtcgggtagtgtggtagagaaggacttccaggcgccgttgtttcacaaaatcatagcaagggaggtggatgtgcttgacgttgagattcgcactctgaccgggaggttaggctcttcagcagggcaattatttctaatcacttatttaagggaggtgccatttgagtttggccaagttgttttgactcttcagtttaaaaaggtgttaacgttctga

SEQ ID NO: 58283 - DNA, 579 bp, Heterodera glycines
atgaagaaagcaaaagccatggaagctgaaggtttggctttttctgcaaatttctttaaattagccaaattttagtggatgaatcgcccaaaaaacaaccgaccaatgtgtttgagtacccgaccatattttggaaattggcccgcccaaaggttttggctaatatttaatttgaaaaaataggaaaatttcttaagtacggagtgttcacgttcatgtgcaaagagtgtcgtgatgacaatttccggcaggggaacagccgattcaaacttatcaatcagaatggcgagcagcaacgccttgagttcacccaatcgttttgccaagactgtgcaaagctgaactttgactgcaccgatctgatcatgaagcacctaaagaaggatgaaccggcaacgacgacgacgacgacgatggcaaagagtttccgctggatcaaagatgggggaaagtgaaccgagatggcacaccacgatataaggacgatctcattttgaagaatttatacttgttgatcaaatgacaaactctttctttgtaattttgccgagcaatacgccaggctttgttggaaataaa

SEQ ID NO: 58284 - DNA, 1190 bp, Heterodera glycines
atggacaagaaaataaacaaaatatacaccgacccggccaatccgggcgggtatgcgggggcgagtgccctgtacgcggcggtgaaggagaagcacccgaagttgaagcgtgccgagtttgaggactttttgcagaggaacaccacctacacgctgttcaagccaaagagggagaagttccaacgcctacgcacagtgcctacgggtttcatgaccggtaagttgtactggggcttattgtgcacaattcagggttcagatgttcaggcggacttggcagatttccaggcactttcgcgcaagaacagcggctaccggtacctgctgttggctgtggatgtgttgtcgaggcgaatgttcggcgcgcccgtaaagagtaagcgaccggcggacatgaaaagggcgtttgaggagctatttgagcaaatgccaagggtgccggacacactgtacaccgatcgcgggctggagtttgtggcaaaaccgctaaaggagttttacgcggagaagggcattcaaaagtttgagaccagttcaaagaaaaaggccgacgtggcggagcgtgccatacgcaccctaaagacccgtctgtacaaatacttttccgccaacaacacatcggtgtgggtggatgtggtgccaaagtttttgagtgccatcaacaactcagtgtgccgcgcgaccgtacttagacccaacgaaatcagcgacgccaatgcgagggaggtgtggaagagggtgtacggcgaagggctcgcacaattggacaagacaccaaaaatcagagccggggaaacggtcaggattcccgagcctaagcacattttcgagaagggtactgtatttcacacattttttcggtcaatttattttaattttaggttatatacccaattactctgatcacgtttacacagtagatgtggcccgctcaaccaacccccagcactatttgctcaaagactattatggcacaaagttcaagagaaaattttatttaccagaattaacaaaagtacaagttgatgaaaacacaatgtatcggattgaaaagaaatacaaagaacgagtgagagatggaaaaagtgaaatattggtgaaatttattggctttccggaaaaatattgggtgacaaatgaagaaataaatgaataaaaatattacaaaatgaagaaaatcaattgaaaca

SEQ ID NO: 58285 - DNA, 1513 bp, Heterodera glycines
atggaccacccaagaataaatgaaagtgagctcgcttttcccatcccttcggggattattgtcagcggtccgtcctcatcgggcaagacccagctggtccttcgcctgttacggcatgccaacgtgatgtttgacccgccgcccaaggcaataggtatgtgcaaagggcgtttctgtgcagtgggctgttgctatttagtatgggcatacggtgagtactcgacgcagattcccgatctggagcggcagggagttgccccccacgcaggtgccccgtctgacgagatgctgaaaaagctgccaaagccttgtctgattgtttacgatgacttgatgggtgacattgaggccaagaagttggccgatctgtacaccaaaaagtcccaccataacaatttttccgtgattttcctcacgcaaaacctgttcgataaatcaatgcgggtgccaaggtccaacgcccagtacatcttcctgatgcgggctcccaacgacatgcttagcattcgtaatttggccagccagatgttccctcgcgagcagggattcctgatggatgcctaccgacaggcatgtgccctaccgtacggctacctattggtgactctccacgcgaacagagacaacattatacgcctaaggacaaacattttcccagacgacgaggagagaatcatttttgcccccaaaaatggttaagcgggaacagaagatcggtgagcgggttgtgcacaactacgactatttgaagaagttgggaaagacaacgtcggagaagaagcgccgtcatttgttgaacagtgccggttgtgaggaactgttaacgcttgtcgagatttgtcttaacgttttgaacgggagtttctgtctgagcaggaaacaaaagcagagacttgcgccatttgcaaaagacatcagacagttggcacgtgtgcgaagcgagagcggtgcgcgaaaactagtgcagcagtcaggcggatcactttttgcccctttgttggcccccattctgattgaggctgcccgatacctgctttcgcgcagcaataatggccaataaacttattctgctgccgtacgagcactacaggggctggttgcagcgaaggagacaaagaatgacgacgacgacgacattgctgagcggacaaacttgggctttgtcaaacgacaggtgaccgctgcagtacagaagcggaaggaaaacgtcagcgaacggaacgcaatgtacaaccagtacctgcgccggtacctgaagatgcgcaaggaacataaagagcggcccgtccgggtacagctcagcaacggcgctcaactgctaaataaaacagtggagacgggtgtgcaggtacggcctggtccggacgaaccgaaggacaagtccgtgatggttaccgacgaagatgaagaggaagaaattgaagtgccaaagtttttaaccccaacaagccagacgcagggaagcagccgatcacccaggaccaataagaaagcagcaaacagcaaaaattga

SEQ ID NO: 58286 - DNA, 627 bp, Heterodera glycines
atgaacaaaaaaggcagattaatcgagtccaaagaaaagagcgggaaaatttataaaagccattcatttttcaagatggaattgctgtcaaaagaggaggaagaatctctgaagagattgaagagaaagctcgaacatcaacttctgagggtccagcaaagtgtgaccgaaagcgaaaaatggaaatccggaacgtcggatgatgatccagtgagaccacaggagtgggaagaaaatgaggaagaaacgacgaaaaagggcgaagaaatgaagaaaaaagaggaggaggagaagaaaggaagagagggaaaagaaaaagagacggaaaagaagaaggaagagatgaagcagaaggacgagacggaaaccaaacgaagcctcagcgtcggaacaacgaaagacgatgaaatctcgattgtggattctgaagaaagagaaagagatgccttcgaaaaaccgccgaagccgacaaacgagcgaatggcattttgggagtcgactttgaacaatgaggcaaaaaaggatttgcgggaggacaaagagaaagccttaaaaaatacaggccaaggtattgttgtaagctccagaaaacgaacggtaaacgaagccgccaactttgtcaaatga

SEQ ID NO: 58287 - DNA, 538 bp, Heterodera glycines
atgtggcacaaaaccgcacttgcccaacaacgcgttgtgtacaatggggagatgggtgaccggcagcagcaacaacagcagcagagacgaaacggagagagggacgaaacgacgacgcatcggaaggagagaaaagcgacggaagagtgaggggacaattgaggggaggggggggggcatttggaatgcattggggggcaattccttttttatttccattaatattcattttattttgcaggttttcgccgctcattaatttctcgcaatttgaagcaaatccaaagaaaaagagtgccgaggagacgaaaagcagaacagacgaggaagaggaggggacggcacaaagggcggggtgggggaatgacgaatgataaatgatcgcatttgatgtgttcaataattacgccctttcatttgtcagcgtaatagctaccgatgcttttaaaagtcaaaaataatttaacctttacatacatcaaaaatgtaaatttaaccgtaatcggaaaatgcgtcaatggtaatatttttaaataaa

SEQ ID NO: 58288 - DNA, 678 bp, Heterodera glycines
atgacgacagaattgccacggacaacaaccattccaatgctctgcgattcgccggtcttaaaacaagatattttaaagtgttttccaacagtcctaaaatggacaaagagaatgtatggctcctttttataatagtgaaaaacactgccatttctacaccaaaaagttgagtttttcaaaaagcataggaaattaggcgttatttacaaagagtagtattttgaacatttttcactttttttggcctaaaattttttttaatactactctttgtaaataacgccggaaaatcttaaatgacagaaattataacaaaagaagtgagtttgaggtttaataataaccttgaggtgctcaatacaatcttcaacgacgatgttcataaatggatcaaacccacgcagaataccggacacatttctaaacataagaacgcaattagaattttctattttggattttttgtccaataaatccggcccctagtaataaattattactaataatatattattaaaacagaaattcctgggctcggttctctgatcagaaaggcttttatccaaatgcgtgccaaaaaattggttattgactgatccatcatcctaatataataatttaaggttctagtcggttttatgcgtcccatgtcatattatgcttccctgaaaaaataaa

SEQ ID NO: 58289 - DNA, 80 bp, Heterodera glycines
accggcgaatcgcagagcattggaatggttgttgtccgtggcaattctgtcgtcattatggaaccgatggagcgaattgg

SEQ ID NO: 58290 - DNA, 365 bp, Heterodera glycines
atgtcgcacaatccgaaagaagcaaagaaagaaatggaaaaagcgatgtaaataattaatctttcaattttccatgctaatcattttgatttttaagcttcatctccgccgattgttggcttgaggtgtttcgtttgcttccgccctttcagcttggactgggaattgcgatgattagccgccgttttgactacttcgtcgatgaacacttcaaaacgcgcaaatggacattgggaaaatttaaaattggaccgaatggcacaaaggaaatgaaaattgtcaattccgatgaaaaagaattgccaattccgcaaattccgctgccaaaaaaagtcatcggattcggattcattgagatcacgtaa

SEQ ID NO: 58291 - DNA, 639 bp, Heterodera glycines
atggaacacatactcagcgcatcgaggcgagttggaggcccgcgaaagactggtttcgcgagagacgaatccctgggttccagtttgcagaaactctggtggagtatcaatggcgacgtgagctcaagaagaatgaattggacccattttcactgctccttcaagctgttcaccattattacaacaaaaatttgtgaaaaaaacagtaaaaatttttttttttaattttgatttcaccaagaaattgacagttttgcgccaaaaaacgtttatgcctattaaatacacgccatttcaaaaccattaaacatgtttttagtttaccccttgaacgaaagtcaagccaaaaaattaccaaatattagcctctgcatagggttttccatgttttcatcattatctctatgatgcttatttttcaagtaaattacgaagaaaaggtccggctgtgattctaatctggtaatttttaaaaaaaattaccaaaacattaaaaaacatagcttggcttaaagaattcttttttcctttttaaaaactcattaaaaatttataaaataaaaaaataataacagtttttaattgaagcatttcttggagcccagtactataggatgcttctttacacctgaaattaaa

SEQ ID NO: 58292 - DNA, 1199 bp, Heterodera glycines
atgtctgggccaatacaaaaagggatcatcaatgcactcaaagctctggacaatgccaaaagcgccacctcactccttctacaccccgacccggacctgtcaaactgggaaaatgccgtcaacttggaggctcaatttgatcgcgtcgtcaaggaaatccgtacaatggaaatgcagatggacagtctacgagactcatccaacgcttggattgaacttctcgcccacctgaccggagacgacaaagacaacggcgaaaaagaatacatcaaattcgataaaaatgagaaaatcgccgagcgatacgacgcagcatcaaccaaacttcgggatttgcgagatctcgaagcaacactcagtgccgcagccaaactgcacagaggcagagccgacagagaagcaaaggcggatcaattggccaatccgcagcaacaaccgcccatgccaccagcaatggcagcaccaatgacaatgccaacattcacagcaccgctctaccaattccaaccaattcaactggagaaatttttcggccaaaagcgaaaatggcccgaattctacgaatccttcaaatcggcaatcggcagtcaatcaatcagtaaagcgcagaagctgaacttactccgcaatctgctgggtggagaagcgcgagaactcatagcgggcttccggctggaagacgcaaactacgagacggtccttcagctgttaaaggacacgtacggagctccggaggaacacatcagaagtcttcacttcgaactggccaatctcaagccgtgccgaagcctccgtgagaccaaagactttctgcttcaacttgagcggcttacaagggagctgaacaatgccggagaggacatcgaaggtcctcaagtgttcctcatgctggaaaagaagctgacgccagcattcctgcgaagcatcctcaacaagaaaggagaggatccggcaaattggacgacaaccaaatttcgggacgtgctaaacgaagccgtccgaaaagaagttcaaatccaagaagtgatgggagaatatggccatcactacgtccaaccaaaagcagaagtcgtctcagcagcacctgtacaagcaccgagaacaccaaaccaaaggtcacgaaggcctaaccaaccaatggcactgcgtgatatgacatttatcgcctcatcactggacgagggccacagacatcaagg

SEQ ID NO: 58293 - DNA, 2002 bp, Heterodera glycines
tacatccatccacggactggtgaagcaattgacttggccagtgcggcaaaccaaggccttgtggacgtgacgctggccgagacgttgcccaacggtgttgtacatccgggcaccggcgagaaagttagcgtccgacgtgccgtcgaagcgggcattgttgactcgcgaacgggcgaagtgcggcatccgttcaccggcgagcgcctctcgtgggtggacctgacgcgcaaggtgtacagtgcgatcacgcagaacggcgtgtacgacccgcgcaagggttacgccgtctcagtggccaggtgagctggcgaggcgagcggacgggaaaataactgatcaattagttcctattatgccctttgatcattgaatcaaatcaaacattttaatcgatcagctctgtttttttccatttatccattgttgtatttacagtgcatttgctgacggactgatcgacacgcgtgcagttgcctacttgaacccaatcacgcaggaacagctgtcgctggaggaggcgcatcaacgtggcatcatcgacgcacaaacgttcaactcactgacaacgcctgcgctcctcgaccaccgtacccatcggcggctgaacctggtgcaagcggtcgatgcccgtctgattgacccacgtgcaaaaacggtgcaactgtcgccggacagggttgtgccagtgaaacaggctgttgacgaaggcgcactgcctcgcgatgttggggagcagttgcagcgcgtggacaaactgacttttgtggaggcggtcagccgtgggctgatcgacgcggcgcagggcacgttcacggacgcagaaagcgggcggcagatgagcattgcggacgcggtcagccatggactgatcgacaccggttcaatcagtgggcctgatacagacggagccgaagcggcgactaacctggcgcggatcatccaatcggaagaatttgacgagcgatcgggacgagtacaggtcgcaaatttttccttgaactaactgatcagctgagtgcaaaattaattccaccgaatcgtttttccatgaattcaaaaattttaaatttaccaaaaaaaatttagaaattttatgtttatactaaattaattctcgaaaatttataaattttaattgaaaattcaaatttcatatttttaagaattatttggaacctaaaattttcaaagtttttcatgaattttttttttgaaaatttgaaaaaattgaatgaatttttaatatttctttctgatcagaccatgatgatcagcagaacatgtacccttttcataattctaaatttttatatctgactgattacttttccctttaggacccgcagacgcgcctttacctgccgtttggcgccgctgtcaatcagcgactggtcgacccggactcgctgctgcacgacttggactcgtccaaaacaatgacattgcgcgaggcgctgagcatggacctgatcgactcgcacggccgctacgtgccgaagcatgcaaagggtgccgttggtgcgcagacagtgccgctgaaggaggctgttcaacggggactgatcgcgctgatcggctcgccaatgcaggcagcgcttgcggtcagcgaggcgttgaagcggcgcgacgttgagggctacaaattccggctggagccgttggatgactcgaccctgcagcggatgagcagcgcaggctacgacacgcttagcggcacgagcggtgctactggccgcccgcgtggctatgaggagaccgtggtgcgcacccggcgtgcacccgagcccagcctgtccgtccgtgtccgctcttcggatggcagtgattcgctgttgcgcggctcacgcgcacgctcagacgtggacccgctagcgcttgtcgacttccaaaccgacttcctgaaactgctccaagcccaagggttcgacgtggacgagaaatgcgtggagaatccgtccacaatgcggctgatgtccatccgagaggctgtcgagtctggctt

SEQ ID NO: 58294 - DNA, 358 bp, Heterodera glycines
atgggtttttccgattgcgtactgccttctcacttcagtcataccatagaaaacttcaacgtgcatttgattgttcacatccaactgtcttctgcttcatcaacacaattcgatgtgagcaaaaaccaattgatgcagacatcgcccaatgcgtctccggtgaatccctcctcaaaaggcgcccaaatatcgtgccgccgatgcgagaattcttcgacttttgcagggctacaatgccatcaacaataacccggctaaccaaaatgaccacaattatcatgccaatgtcaatgttaatcccgataacatcaatcatcttctagttggtgtttctcgaaattatgaaatgtgcccgtaa

SEQ ID NO: 58295 - DNA, 458 bp, Heterodera glycines
atgccggtacttcaaaatggcaatgaacgggaagaagccaaatttgcatacgaattggacaaaacatttttggacgataaaaacgcagaaaaagtggccaaaatgttgaacggacaaacactgaaagtgggaggaagaatgggagaagaaaacagcggacagagcagcaggtgaaaggaggaaacgaaattgaaagaaaaattggcaatttgtaaattgaaaaggacaaaaaaacaaattaattaagcaattaattaaggcacatgccacgcgacatggcccattttgatgaccatttggggagtggtggcattgccgttgaagagcaaatgaataattattacccttctgattatagtttcgcccatttgtgggaatatttaaattcaaataatttgtcacaacaaatgccacggggaaggcgaaagaagcgggtaattaaaaaagcaattaattaa

SEQ ID NO: 58296 - DNA, 369 bp, Heterodera glycines
atggaggaggacggactgaagttggagctgaacaaattgggaatgaaaagagtgcggcaaacggagccgacacttcgcatggaaatggtcgaaatggtgggccaattaagagacaattaattcattaaattattaattgctttaaataataattaattgctttaactaattaattgttacaaaattatttgtcctttactagatattgaatgaatgttctttttgccttgatgaattctcagaaaaggaaaaaaatgcactgaaaatggcgggttgtgaggtcaaaataaaaataaaaatatttttattttttataattttgtttatttttagcattttgctcatcggaattgtttcaaaaaatggtaa

SEQ ID NO: 58297 - DNA, 208 bp, Heterodera glycines
atgaatcgaaaaaaaattgaaattcttcaaaaatgtcgtaaacgcaagtttctgaacaacaacgacggtgaaaacgcgacaacttctgaacaatgtgagcataacgacaacaacaatgaccgcgatgaagactttggagaagaacatgccatcatcaaattcgaactcggaaaaactcaaaagggaggcaattgtctttggtccgaag

SEQ ID NO: 58298 - DNA, 552 bp, Heterodera glycines
  unsure (1)..(552): unsure at all n locations
atgcgtgctttctcttctccatcctggcccatttcatgcccaatttttctgctgctcattgtcctacaaaattcgctgttaattaatgctttcttcggatggggtggttgtgaggacgaaacgcaaatcggagttgcacaaattattggacaaaaacaacaacaaaaagaaaaccaagaaaaacagcaacaagaacaagaagaaaaacaaaaccaagaaaaacagcaacaagaaaaacagcaaaaagaacaacaagaaaaacaaaaccaagaaaaacaaaaccaagaaaaacagcaaaaagaacaacaagaaaaacaaaaccaagaaaaacaaaaccaagaaaaacaaaaccaagaaaaacaaaaccaagaaaaacagcaaaaagaacaacaagaaaaacaaaaccaagaaaaacagcaacaagaacaagaagaaaaacaaaaccaagaaaaacagcaacaagaacagcaacaacaacaacaagagcatanagacacacaatatttcggcaacagtgatagccaacacagaaacacgacaaacacttcagca

SEQ ID NO: 58299 - DNA, 466 bp, Heterodera glycines
gatttgaactacaatatgaggaccctaactgatttgtacatgatcattttcatcctctcgattgcgttgccaattttcacccgtggaaatggcccagtcaatgcccttggaaatggcatcatcgatgtccgtggtaatgatgggatggatgcccattgaaatggcacatgacaatgttacaataattaaactatcagccaacaccgaccaaaatgccccagccaatgcccttggaaatggcccagccaatgcccttggaaatggcatcatcgatgtccgtggtaatgatgggatgcccattgaaatggcacatgacaatgttacaataattaaactatcagccaacaccgaccaaaatgccccagccaatgcccttggaaatggcccagccaatgcccttggaaatggcatcatcgatgcccgtggtaatggttggatgcccgttgaaatgacaatgttacaataa

SEQ ID NO: 58300 - DNA, 1839 bp, Heterodera glycines
atgagtacattcgacgaaaaacacgagagaagcgagccaaccgtgctcctggacgcactccaaactggcggcactgacagcactgttgatttgatggacgcagcagcccaaggcattgtgtcgagggagaaacgtgcagagacaagccaaattccgttgagagaaaagatggatgacaaggacacataccaaaacaagctggacaattatttttccaccctcaagggggaggatttggaactgcttgatgaacttggccgaaacaaattgaacgatgagattgcaaacatgtttgacgaagatcgcacaatccttgacgccaccaaagaactgggccttgaggcgtggatacaggcatacaaaaaggtgagatttgcgtgcaagtttacttttgacactcacaaaaaccggttcacgctgagacttgacccacgttatgtacagcgcgtcagaatgtcgtcacagctcgcctacattcttgggtttagcagcaccgagctggtggcgcccgaaaacgaggcacgcttcatgcccgacatgagtggcggcgtttcttcattccacgtttacacacctgacctcattgagccaatgatgattggtgatgtcaccgcaccagtgctacgcatagtaacgatacggggccaacccgacgaaattgtcgaggaacaatttttagcaatccaataccatagaatactggtaaaggaaatatctgaacttttgattgaaatacgtacaaatagtggaaacttgatgccattccagtacggcacatgtactttaactttgcactttcgaaaattagcctacttttaatcataacaatgatgaatacatttgaaattgacaacagtttggccaacaactcagtcacacgccacgcctatgttggatgttttgcggcagataaaatcccaactaatcacattgcagtatatccacattgtatggtactgaatgttgacccaagcacatcacgaggttcacattgggtgtcactttactgtctttcccccatgcacattgaatactatgactcattgggcatttggcctccgctaagtgtgcacatcaaaatttttttggcccaatacaaacaaattcgctacaacccaataccaattcagtccttcaactcaaatgcgtgtggtcgacacgcaattttctttctatacacacgctgccaggggtttccctttgaaaaaattataaactttttacatttctccagaatgtcacccgacagaattgcaaacacctttgtcagaaaggtaattttcaacaaacaacaataatattataaataatagtcattgcctgattaaaaggtgcagtaaaaaaaaaatgcatgtcgattttgatcctctccaggtggattggtctacactatcaccatcatcagctgaattagttcagtttggtggcttcaacatttttcgtggcgttccctatcagcgaggcgcgggtgttggcgccgttttcagaagcctcatgcgatacttgttgccaattggtaaacaaattggcacggcacttggacgccaaggacttgagagtggaaaccgagtgttgacaaatgtactggacggtaaagaccttaaagaatcacttgtcaacgagagtaagtcaggtctgaagaacttgctggaaaaggcggcaaacaacattgaagcccaaaaagggcaaggctttgacttcaaacggtacaaaagtgagcaaatgccaaaaattgcaagagctagacataaacctataaataaaatgcattcctcaattagtccaccaatgcttggtaaaaagaaacgtgtccgtgttgactcgttgggaccttattga

SEQ ID NO: 58301 - DNA, 2057 bp, Heterodera glycines
atgcaccacacaaagcgctatgtgctcgtccccgaggaaatttatcagagcttgaccgccacctccggcgcttcccaggacggcagcccaatggggttggtccgcgcgcgaatggaccagctaaaaaatgacgacacaataaatgaggaggaaaagtccatcaggtatgagcaggagtttaagcgactgaacaaactgaaacgtgacgaggaagaacggccagttgatgtgcgtctacaaaatttgcgcgagatcgccgatgcggcggcacctgctctgccaacaacaactgcatcattggccggcccagtggtacaaatgacacaacaacaacaacaacaacagcaaaaacaacaacaagccaaacgcaagccaaccagcgcattccgccgcacaatggttgggcggcatcttcagcaacaacaacgacagcgtcgtcggttgatcgtaaacaaacgtggtggtggaggtgatgacgatgacgagtcggcgggcgatgagcagcccaaaacgcgagttgatgatgatgatgatgatgatgatgacgaattttgggaggacgcgagtccacgtgtgttacgttcagcccaacagacagcctctgcgtccacaacaaaatcgcacgcaaactacacgctgaccaaacaaggcgtgatggcgttaatccgtcgcaacgcagacgcattgggtgtgtccggggaggggaaaatcaaaagggcggacggacgaccgttaaaaacgagcaacgtggagcgtattgttgcccacctgttaaaccgggacagccggagtgagtacaaggatccacccgttgggctccgcgagttcacggaacgggcacaacagaacgctcagctgagcaaatacctcttcaccaagcatcagtttgggaagggcaaaaaacataaaaagagtacggcattgaagttcaagccaaagctatggtcggcagcctgaagaagaagcagcgtttgttggagtttttgtacaaggacacaaactcacccgtctcgttcacaagcgttgagccgcttttgtgccaagcgcgaaaacaccagcaaaacatcagccgaaaagatgttcaaaattttttgtccacccagcgcacctacacccttcatcgacaagcgaagcgacgctaccgccatttgccaacgctcgcacccggcctgcacaccgagtggcaggccgacttggccatctttgatagactcggcaaacaaaacgccgggttccgttacctgctcgtctgcatcgacacgctgagcagacagctgtttgtagagccggtaaagtcaaagacgagcgccagcatgatcaaggcatttgacgcggtactcaaacgtgcaaaatatgtaccgtggaaactgttgactgaccagggcagggaatttacagcccgggccgtacaagagtactttcgggcaaaagctattgaacacttttgcatgttcacatccccacaattccatgccgggatggcggaacgagcaaatcggagcatcaaggagcggctgtaccgctacttcaccgaacgcgacacctataaatgggtggatgtagtgcaggactttgtgcgcgccattaaccactcttacaactcaagccttggtgcgagacctgttgacgtaaattttaagaacgcagagagctttagacaaatgctatatgataaggccaaaaaaatggtcaaaggagtacaaaaattcaaggtgggggaccgtgtgcgtattgaaaagtacaaacacgtgttccaaaaaggttacttgccccgtttcaccaacgaactgttcacagtggcggaggttcacgccgaccggtcacccatcgtctaccgtctacgagatgaccacaacgagacactaaagggctggttttacgcgaacgatttgtgcaagacgctgaagaacaaggagcgcatgtatgacattgaaagggtgttgcggaggaaaaagggaaaagacggtgtggaatatggttttgtgaaatggcgtgggtacagcacacgcttcaacagctggattccactgaactcaatcacgtcgaaaaacatataa

SEQ ID NO: 58302 - DNA, 811 bp, Heterodera glycines
atggatattattcgtgcaactgattggatctgctgcaacgccaacgccaacgccaactccaccttggccacaaacaccacagaaatggatcagcaggacgacaacaataagccctcaactccaccaccagagacagctgcaatggcaacagcagtggtggtggacccgaaaggagatgaggaggaggaggaggaaatcaactggcttcgtctcatcgatgaggtagagcaacaggagcagcagcaggagccgaacaaggaggaggaggaggagcagcacaacggggaggagaaggcggcacaaagtacaggtggtggtggtgacggctattttttttaaatttttataaagacacagagaaatgtgcttgtggagtggtgagcggcagccgacagcaagtgtccctggtggaccacctgtgcaagcggttcaactgctccgcgcacgagctgaacgtgttgttcaaaagtttggagcaacggcgtgcgattgttgggcacttgcgcacagcacggttgcgcacctcccatcttcgcccctctgtccgcaactttcctgtgcgctgcaatgagctgtccgtcctggacgcacactcggcgcccgcctatcggggctaccttggaattactgtgagtcattgtttttttttttggtttatttttccattattaggttcgtatgcactactacataaagcacggcatccgtctgcgccatcccaattttccatgtgttgttgaatttggaggcggtgatcacaagaccttttttccgcttgaagttttgagtgttgttctcgcataggtgaaaa

SEQ ID NO: 58303 - DNA, 445 bp, Heterodera glycines
atgaaggagctgacgttggccacctacaacatagacggacccatgtaggtgcgctatttgtggtattaattttttttgtagtgatgatctgatcgacaatgacgacctgtacgtgtacgggagtggtggtggtggtgaacatcgggccatccgcgtcacatttccgcaaattggtcgcagtgtgcacgcggatctgtacacgcacgaggcgcacaaggactaccggcccttctacgccaagggacgtgtgcggcctgggatgcagacgcgcccctttggctaccaagaagagcagcagcaacaacaacaacaacaagcaccacaacaacaacaaacacaggcacaaccaatgatgatgatggaggaattggagatgatgacgatgatgatacccaaacagaaccccgacccaacccagcctggccactctgggtggtttcgatga

SEQ ID NO: 58304 - DNA, 1150 bp, Heterodera glycines
atggcgccaaacccgggcctgcgcctcatcgccaagacactggccaactccctttggtatgatggtggtggtgatgtcagcgcacacacacacacacacacacacacacacacacactgcacaacacaggggaaagttggcccagcgtgtgggcgggaccgaggtgcggtacacgcgcacgcccgccgagttccaccgtctgctggaggatccgtcgctggacaagctggactttgtgcacgtgtcggaccgcatggaccgctgtgtggtgcgcaagaggccagagtttgccaaggcgccgcccaccaactgtctgcccgtggccatctacgtcacgtcgtacgcgcgactgcacctttacgggtacatggaacaggtgctggcgctggacggttcggagctgctctactgtggtttgtttgtttgtttctttgttttcgttacaaacaaaaaaaattttgcagacaccgactcaatctactacgtgaaccggatgggcggcggccaatgtgtgcgggagggcgaggcgctgggccagatgaagcgcgagcgcaccgaccgacgcattgtggagtttgtcgccggaggcccaaagaactacggcatccggcacaccgcccgtgacgggagtgatgagcgagccaatctgaaggtgcgcagtttccgcctctcctactccgccgagcagctgctcaactttgacgccatgaaggagctgacgttggccacctacaacattgacggacccatgtaggtgcactatttgtggtattaatttttttgtagtgatgatctgatcgacaatgacgacctgtacgtgtacgggagtgttggtggtggtgaacatcgggccatccgcgtcacatttccgcaaattggtcgcagtgtgcacgcggatctgtacacgcacgaggcgcacaaggactaccggcccttctacgccaagggacgtgtgcggcctgggatgcagacgcgcccctttggctaccaagaagagcagcagcaacaacaacaacaacaagcaccacaacaacaacaaacacaggcacaaccaatgatgatgatggaggaattggagatgatgacgatgatgatacccagacagaaccccgacccaacccagcctggccactctgggtggtttcgatga

SEQ ID NO: 58305 - DNA, 191 bp, Heterodera glycines
atgggggctcccaagtgcgcgaccgtgatagtaacagcccatccactcgatggccatcgggcgaaggggcggctcccgacgccaaaggccgtccacccgatacccgctgtcctcaatgtgcgcctctccaacggaccagctcgcacactgcacctgcgccacccggatgctctagctcaaagaaagcgaat

SEQ ID NO: 58306 - DNA, 704 bp, Heterodera glycines
atgaaagaagaagcaaatgatcaaaagaaaagagaaacaattcaaaaatttgaagcaatcaaagaaaagttgaagcaaaaaggaaaatatgaatggaaaaacagtgtcaaaattgaatgtaaaattgcaaaattattaggcgtaaatcgcgacaaaatatacaaatggaaaaaagaattaaatttaaataaaacgaagaaaaagagtttttatgaggcgaaaaagcaagaattcattgaacgaattgatgaattaaaaagtttatatggccaacgtaaacagaaagaatttgcgaaggaattgggcatttctaaagacacatttttcaaatggaaaaaagaattaatggcaaattaccataagagtcacagtaagaaattttgtaatttattcatttaaattattattatttttttagtgaaaaataaatattctaatgaggacaaacaaaaaaagatgaagcaatattttgaaatcaaggggaaatatccaaaaacaaaagacaaaataattgctaagaaattatcaattgcctatgaaaccctgaaaatgtggaaaaagaaattttcttcattaaatgatttttaagaagtacaattataataggcattttaatgttttcgattgttgttaaaatggtttttttctaaaatttaaaagcgctttgaaaaatttggtcagattattcaatgtattttaataaa

SEQ ID NO: 58307 - DNA, 1432 bp, Heterodera glycines; identical to SEQ ID NO: 5514
  unsure (1)..(1432): unsure at all n locations

SEQ ID NO: 58308 - DNA, 458 bp, Heterodera glycines
gagaggctggtgcccccggacagcccggtcagcctggagcccccggtcagcccggcgcccccggacagcccggcccgaagggaccccctggcgcccctggacagcccggaaacgccggaggcaatggccagcctggtcaacccggacagcctggcaaccccggagagcgcggaatctgccccaaatactgtgccatcgacggaggagtgttcttcgaggacggcacacgaagacgttgaaaaggcacgaacagtccaaatgcaacaggagaagaagcggaagaagaacagtcactcccccgccccgcccctctccccactttccggtgtccttattgttcttattttttgtagtttccccaattcatccaaatttcgtccccaaaaaactgccatttgttccctccttcgatgagaagcgatcagtgatcactatccgaaattgcaaaagatcagcaa

SEQ ID NO: 58309 - DNA, 709 bp, Heterodera glycines
atgcttgaccgtccccgctttagaaccgtaggagctgcgggaaactaccgcgcaatccctgaggggcccggggtaaagcaattagtccaatgaatattaattaattttaattaagggacaaaagtcaaagtctaattaaaaacaaaaagagaattatgtcaaatcgtcaaaataggcattttgtgatacgtaaaagtcaaattataaatcataaggaaacagattaaattattctaattcaaattttatctatttaaaattacatttattagtgtaaatcggtggtgtgtgccgaagggtacaaatgcactgttggggcgtcggttgaaaaaattggtgatcgaccgtttgcccaatcagtctgtaagtaaaaaatctaacggaaaggtaaaatgaccaaattaattttataaaaaatttggctccaatatttagccttgccgcaatgcgttgtcaacggcggttcattaaaagatgtgagaacgaaaatccgaggcggaccaggggtaattaatgcaataattaaaaaatggatttactacacttatgggtccaatcaatgatcttttcttcattggtttaattttaacattaattggtatcaattggaagcttaaggtctcggaaagtaagacaatatgcattttttaatatatatattttcgtcttaatgagcttatttgttagaatatgattatttaaaagggca

SEQ ID NO: 58310 - DNA, 542 bp, Heterodera glycines
ggaaaagtgatgctcactaccgtaatgaacaacggtaatttggggtggggggacgaaaataatagaaatcttgttcttaatcaaaaggattcgtcaccgtcgaagagggccccgccggtggctcacgaatccgcttcaaactcgtggacattggccgtatcagtttcagccgggatttgcccgtccacgacgtaaatccgattaaaattagcgtaaattgggatgccaaacggaggcaaccgaacaaatgccaaaggatcaaacgaaaataaaataaatgggaataaaggaactcggaaaagcatttttatttaaaaatctttttggtttggcatgaaaaacccattaaacttaagtatcctcaccaatttaagttggtccgcgaatggactcagttggaccacaaccatttcgaggcccgtctcgacatggaaacggcgagaaaatctttccttttttcccaatcagctgattaattggatttttagctaacccatggaatgcaagaacacacagtgattgtctacacaaaagtgatgtga

SEQ ID NO: 58311 - DNA, 415 bp, Heterodera glycines
atgtcgaaattatattacccgccaccaaattggaagccgaaaccgagcaaaaagtcaggtgagtggggaaaagccgaacaaatcgaattgaacggtcgaaatgaccgacgggagagaaaattaagtcaaaaaaaaagaaaaagcattttgcattttcagccggacattcaactgttatggcgaccacacgagcggcaacttgtgagttaattaattggtcatttaaaagtaattaaagaaaaattggaaaatgaaaaaatcaacgattaaaacgacccattctgttctggtttgtacacatccgctgacaaaatgttgatcaaaaacaacagcaaacaaactctcgacaaaaaatgacatgacctttttaattttaaaatattttaatattttattacacaaaaaaacatttcaa

SEQ ID NO: 58312 - DNA, 66 bp, Heterodera glycines; identical to SEQ ID NO: 53774

SEQ ID NO: 58313 - DNA, 302 bp, Heterodera glycines
atgcattggcaaaatccgaaatccccgcagtcgccgcagtgccaagacccgctgaattctgccatattgcgctgggaattgccacgtcaaaaggacaccacttggagcgtgctgttcgaacgagcgcaggcattggccgaccaattcccggtccgtctcgggaatttcttccctttttgattttcatttccgtctcaggtcaaactcgagaaagagaccgacggactcccccaaattgtggacttttcgctcactcagaattcgctggagcaagtgttcatgagcttgaccaatgtggacgt

SEQ ID NO: 58314 - DNA, 3507 bp, Heterodera glycines
ctacaaggaatacggatctcctcaataaattagtccctgtccttattgtgatgtgcattttgatcactttgatgccctcctttctgctcaaactgatggtagaagagcgctcgtcccgtttcaagcaccaagtaaactatggaaataatgtcaaatcaaaaacaatattttgacacaacatcagtaaaaagataagaaatcgctcaagacttcgaagtttttccattggttcatataatccaataaaaattttaaaaaattaccaaaatgcaaaaacccaataaatctcataataactaattgattgtttgcttctcttttccagttgctgctgacccgtctccatcccatcatttattgggcttcatttctcctgttgcacttgaacatttacgctctgttttgcttttgcatttcgttgccaatttttgtttacggaatattggaagggggcagacttcggtaagttctttgtttgtttaaaattaacaaaaaccgtgatttcaaataagacttcaacccgattccggtcttataaaggtcaatttttgagtttttttccatgccttgaacagctttgttcatcctaattatctaattaattttacgtctttctttcagtcttccgctcctttttgccctcttcttttggatttaccatccatggctttgctgtgcgtcgtttctgttcaaaacggtgcagtccgtcacaagggcacttttggtcctcatcgttctgagtcttgttggtatcggaattgtgttgctattcgaatctttatttcctgttatggattgggtgccaacaactctgaacgttgttttctttttgctgctgccaccgtatgacttcagtaagtgcttaccgtatgaaattagttttacagtgttttgcccctctttaccccccccccccccgccctggtcatacaacagaaaggcggggggaagggagtcatagaagcagagtacggtatttgttgtcgtccaaaattttgttccaatttctcataaataattagcatctttccccagtgaacggactgtacagattggtttatcgaaaagaaagcctccacgcggcatcggactacatccttagcatgtttgccttgggcacttttcactggctgctccttttttgtctccaatcgcatttcgttgtccgacaattgaaccaattgaagtgtcgcattttcaatcacagactttaccaaagggtaggcattcacttcttttccggcatatccgagaatttcttttattttgtggctttttgaatgtttagcgaagatgcttttttctgatttttagcaaaatattgacaaatcgcataaaatccgtaatttgaaaatttttaacaaaaaccgagtgaaaatgtctaagggttattgagtcaaacgaaattttgataatttgcgatcggtggtacttcaaactgttctgtttcagcttcgatcccgggatttttccgctgaagaagacaaagatgtcccccgaagagcgggaatttgtgaaacaagaaggcgtcgagaacttcgtattgtacattaatgagttgagcaaatattacgggaacgtgcccgccatcgatggcataacattcggagtgcagcgcgatgattgttttggcttgctgggtgagttttctcaaagcataaaattgcaggactggtttcggcagaaatccccatccctggctctcatcactgtcaaagcacgcaaaaatcgatcttctagtttgaaatggtttatgtttgggcgctatcgtgccgacagacgccttcggattggccctattaattgttgatcacgttcatttcaggcgttaatggcgcgggaaaaacgacgaccttcgacattctgtccggcattaaattcgccacctcaggcaccgcagcaatttccggcgtttgcgtctccaagcatccgcccatcggttattgtccccaattcgatgctctcccaatggaactcactggacgtgaagtgctccatttgattgctcaattaaacggcttttccgaagtgtcgcaaaagacggagaccattttgaaatgcattcaaatggacaaacaagcggacaaacggattaaacacaacaggcaaaaaacagaatttgtgttaaaatggatgaaatgccaaaatatacgcaaaatttggactgataatctaacaatacgaaatagtttgccgaaatttttaattgaatatcaattccccaataaagaggtaactaatccaacttcaaatttagcggtggacagcgtcgtcgtatttcgcttggcgttgcgttgctcacttgtgccaattttgtgctcttggacgaaccgaccgcaggcattgacccgggcacgcggcgcgatgtttggcatctcatccgtgcaattcgccagcagggcactgccgttctgctcgcctcccattcgatggaggagtgcgaggcgctgtgcagtcgaattgcagttttgaaccgcggcagattggccggcattggcaccgcccaacacttgaagagcaggtagaacaatcgaacagcgggggaaggggcagaaaatgtggaaaaaggcaacaaaaaacattattgtttaaatcctggaaggatgcaggtaaagtgtgcctgtctttagtgatggagtggttgcttgggttcgggtcccatttttctacgtgttttcgcccattattatttttaaattttttgactttgaacgcttttttatttatttgttaaataaagtttatgatagataaatgagaaagaactgaattaattaagcggaaaatttttcagtttttattttggaccaatttttagaaaaatttaggagttttcttttgagtttcattataagtcaaagcagaaagaatatacaaaaactaattattttaaaaaaaccattttgaattggcaaaaaaaaactaaaaagttgaacgaattctgtagaacttttgagaaattatggaaaattcatgtgctaatttttgcaaatttacttgtctttctgttcataattttagtgcaattactttttcttagatttggcaacagttttctgctttccatcaccgttgccaacccgtccaaagccatcggtgccaaattggacaaaatggtccgtgatgcgatggctgtaagttgaatatgacggataagtacatagacaaaatccgaaatccccgcagtcgccgcagtgccaagacccgctgaattctgccatattgcgctgggaattgccacgtcaaaaggacaccacttggagcgtgctgttcgaacgagcgcaggcattggccgaccaattcccggtccgtctcggaaatttcttccctttttgattttcatttccgtctcaggtcaaactcaagaaagcgaccgacggactcccccaaattgtggacttttcgctcactcagaattcgctggagcaagtgttcatgagcttgaccaatgtggacgtgtaactttttcgccttggattcaagcgattttctgtatccctgcggctc

SEQ ID NO: 58315 - DNA, 806 bp, Heterodera glycines
atgcataaccactatattaaacgaatattgtaattagggcaagggaagaatttcgtaaatccatgcacccaaatgtttcaaatccatcagaccagacaggctaatgtggtcattaattctttaattgtcgggtcaaaggcagcagagcctttttgactgttttacatttattttatttggtttattcattttttgctcaattttctgagtgctaaacatttgaaacctgaaggacggaccccccccccccccccctcgtatcagctcctcctcctcgggtccaaccctcggacattaaaaagatttatatattttttaaataattccggtggaatacgatacgggggaggggggagtggaaacaactcctcactgcccatgtatgtactcgataatacttttttgtttttcttaatttggcaagttattcctcaaaatctaattattttttcttttaggttgtcaatgctggaagggttgtggaggatggccagcagaaacgctttggtggtgcaattgcaacggttttggccataattcggaagcattcgccccaagcatacattgaaaacgcacaaaatccgcccgaatttacaataattttgccagtccaagacaaaaaactgtaagaaatatttgttttttttgtcaaattaaaaaatctgcttatatattttttacaaaaaaaaataattaggctctttccaaaatcggtctctgctcattttattgacatttaatttttttagctttgccggtcttttcaaagaacttgaacaaattgtgggcgatcagcggccaataaa

SEQ ID NO: 58316 - DNA, 685 bp, Heterodera glycines
atggggtgtctgtcgaacaccaaaacggccgggcccattgattcatacttgggcaagccggtcaagaacagcattttcactttctacggtgccggcggacgcggcgcgtgcggtctagacgccggagtggtaagtcaagaaaagtgatgagtgatggtaaattaaatcttaaaaatcatagtttcgaaaaagagcccctatttacaatacaattttgatggcatctcatattttagccaaaaatgtcagctgccggctccggccaattgttcaagtcggacgggcagtggaaagacgcatgccgagccgacaaacagtacatgttggacgacccgatttgcaagaacatttgtatcaaagttgattacaatgggaaaacgtaggacaaacacttgccaaccgtctctgatcgtctcaattaattatcctaattactaaagtttgaccgttccaatcaataacaaatgcccggagtgcccgcccaaccacgtggacttgtccattgatgcgtttaactttttggagccacgcgggggtctcgtgggcatagcgagaagttcgaaaaaaactgttttttaataattactttgttaattaattatatattttttaaaattattttttgataattaattgcatttttagatgccacgctcacttacatgaaatgcccgtcgagcgttaa

SEQ ID NO: 58317 - DNA, 264 bp, Heterodera glycines
attagcatcagacaccgagtcagagctgccttgagaccaccggaggaggatgattcattcttctgatgtcaccgagcccaatgagcggattgacacctggagaaccgtccttaacttgcggttcggcgactaaccaatgttccagccgattgtgaaaagaatcatactgaagcgaagacaacagaagtgatgttgcggaaagcgactcaaatttcttaaaatctaatttgtatttatttttgtcgataatgtttctctcgttca

SEQ ID NO: 58318 - DNA, 879 bp, Heterodera glycines
atgacaccaccgcctcctcctacagagagtgccgaacatatcaacgggttgcagccaccgcctcctccaagagagaatgtcgggcccgtgccgccaccgcctccccctgcagagagtgccgagtctgtcagcgaattgccgccgccaccacctcctccttcccttcagccttcgcttccattatcacttcctccaggcgccaatgtcgccacttttctgcactctccgccaccgccgccccctcccccaccaccgcctcctcgaccttttcatccgccttcacttcctccacaaggcaaccgcaactttcttcggtcaccaccgtgtcttcttccaccctctccgtcgggtactgtcgcctttttacacacgccaccgcctcctcctccgcaccctcggcctgcaattcctccactgatgatgccaataacaacagcgacgacaccgactccaatgcggcactttgcttctccacatccgccttcgctgtacccacttcgggttacatcgccggcaatgttcgcccgttccatcggttctccactgcctccacggatgactttgccggactcgatgatgcattttggtccacctcatacttctccactgcctccacggatggcgccgccagttacaatgatgcattttggtacgtctcgtccttctccgatgccttttcgtatggcagcgaggcaaatgttcccatctgccgctgctccaccgcaacggatgacggcgcccacttcgtttcttcccacaatggcttctccccctccgttgatttgtgctccatcctcttctgctgctgctcctccacgactgccacaaagccaaccaatggcagcgacaactgatgccaccacgccacaatcatcgaag

SEQ ID NO: 58319 - DNA, 438 bp, Heterodera glycines
aaaatctataaaaaatttaaaaatgagaattcatgcgagattttctggaaataagcttaattgggcctagttaagctgtaaaaaaaatttggggcgatttgaaagagaatagaaagaaccaggttcgatgaagttttggtaagccaaaaaaaatccaaacatttaaaaatctataaaaaatttaaaaatgagaattcatgcgagattttctggaaataagcttaatagggcctagttaagctgtaaaaaaaatttggggcgatttgaaagagaatagaaagaaccaggttcgatgaagttttggtaagccaaaaaaaatccaaatatttaaaaatctataaaaaatttaaaaatgagaattcatgcgagattttctggaaataagcttaattgggcctagttaagctgtaaaaaaaatttggggcgatttgaaagaga

SEQ ID NO: 58320 - DNA, 626 bp, Heterodera glycines
atggaatcgttttgctgcgtttgtaaagctatttatggaggaacccacagctgttccgtctgcaaattgccgtgccacacattctatggcgattctggtggagttgaaaacgaaggcttcggcggaaaggtcgtgtgccacaactgcgtaaacgaggaaggaaacgcaacgatagcagaaggctcagaaaacgatgaacaagaaccgcaaaacaataaagagaatgaaggcacaccgacaaaagacaagaagcgccacagaaacaacgatgtgatgaaaaaactggaggcagttgagtgggcgcaaaaaaactcaataaatgcagcagcaaagaagttcaaagtgtacaggaaaacgatcagagattggatcgcgcatgaagataagctgagaaaacaaatgtaggtatttaataattttttttgtttgtgatcaaaaattttagcatgtcaccaaatggggggaaacgaatgcgactcgacggagcaggtcgcccagttcaccgtccggacatcgacactgaactggccgaatggatcagcgaaaaacaaaaaaataaacagcctgtgtcaaggagcatcattcgacagaaggcggctgcgctgttcatggacactgacattaag

SEQ ID NO: 58321 - DNA, 1053 bp, Heterodera glycines
atgacaacggcgcctcaagcggcggcagcgactgcgctgtcggcacttcaaaacccacttagtttggcacgactccccccggcccacggcagcgggttgaaaacggcgccggcggggtcggcacaatctttggcggacagatatcgaataaccaaaaaggtgaaagggcggccaacagcagcagcgatcgaaggaaaattacatcaattattttttaatttcctaattatttaatttatttttttgattaattccctttggtttggccttttctccgtttgattctcacattttcctaaattcaaccaattcgttgtctttttcctagagtgcagcgggaccgggaattttgggcaaaaccgggaccgggacctgagaagccgggacctcggtttttttcgggaccgggaaccgggaccacccgggaatttttaagttcaaaaaatttttaaaaatttaaaaaaaattcaaattttaatttatttcacgtgaaaatattaaataattaaattttgatttttattttataaaatccaaaagttaaaacaaaattaaattaataaaaatttcaaacaaattttgttcaattatttcaaacaattaattaatcacttttggactaagtgatcgaatattattataaattcagatttacttttcagatcaatttttttctaaaagaatatattaatattttttaaaattttttccttgtaaccaattttcatcattaatttttcacccagacccccattcttaccagtgcttgtttttcccggtttccggttgcccattgggaccgggacctgagcttttcaaattccggaaccgggaccgggacctcaaaggaccgggaattcccggcccggtcccgctgcactctaatttgcacccctaattttcaaattttttgtgcatatttgatgcatattttgcgatttttatgcatatttgatgcatatacgacattatttgcatatttatgcgcatattttggccacttttcgtgcatattttttgcagccctgttgattggtctatgtaattaataaa

SEQ ID NO: 58322 - DNA, 1134 bp, Heterodera glycines; identical to SEQ ID NO: 27643
  unsure (1)..(1134): unsure at all n locations

SEQ ID NO: 58323 - DNA, 613 bp, Heterodera glycines
atggacaacgaagcggccgggacggacggagaagcggtggaggacgaggaagtgatgacggacgcggacttcgaacgcgccatggaacagctgagggaggagggcggcgaggacgtcaacgaattgctcagtgcgttttgccaaaagccaaaacattgccaaattaaacaatggtcgcctttttagtggcaatgagtgaaaatcgcatcatcagttgggaggtgaaacaaaagtcagattgaggggccattgcgaattggccattttttaggaagccgaacacattttgggcaactcgacaaatgaaccggtaaaatcgtcgcttcctcagcagacgcggcccacggagccggacaacgacacggacgtggactggtgcgtacaacggctgatgaacaacgacccgaaactagtggagataaacctgaacaacatgaaagtgcgtgccatggggtggaaagggaccgagtgtttttcgatcactatcgattgattgattatcaaatcatttatcgatcgctgctctattaaactattgattggatcacattaattgatctgctggtcaatctgccgctgattattgcttttcagaggacacccattcccaaaa

SEQ ID NO: 58324 - DNA, 80 bp, Heterodera glycines
gtcctgcccataatatctgtggcatggaataaattttggaactgcgctgcctaactgcggtgcttaaagtgcgctaaaaa

SEQ ID NO: 58325 - DNA, 80 bp, Heterodera glycines; identical to SEQ ID NO: 51817

SEQ ID NO: 58326 - DNA, 149 bp, Heterodera glycines
atttgaatgagaatagaaagagccaggttcgatgaagttttggtaagccaaaaaaaaatccaaacatttaaaaatctataaaaaatttaaaaatgagaattcatgcgagattttctggaaataagcttaatagggcctagttaagctgt

SEQ ID NO: 58327 - DNA, 691 bp, Heterodera glycines
taattaaatccattccttcgggggaccgtgccgggtgccgcggggtaagcagtgctggttcgtttcatcacggcaccgaaccttttggctagtcagcaatcgttgcttaacttgccagatcggacgggtgcgcatgattccactgttccaagcaccccaccaaaagcaaaacgatataaccaaaatataaggaaaaattttttaaaaaattttttctccatcttcctttttgatactaaagcatcagagtgctaaaattaagttgtaaataaaatttggtgcgctttagagctctttctgaaaaaaatatttatgaaacaaaaaaatcgattttttcaagtgtccgtttggggtactcaaacaattatggggagcaaaaatccaacgcagaattaaagtacaggctatagggaagctattcccgaaggattcggtctccccgataaatctgggcgcatcggttcggggggactgccccgaaaacgaaaaaatcgattttttcaagtgtccgtttggggtactcaaacgattatggggagcaaaaatccaacgcagaattaaagtacaggctatagggaagctattcccgaaggattcggtctccccataaatctgggcgcatcggttcggggggactgccccgaaaacaaaaaaatcgattttttcaagtgtccgtttggggtactcaaac

SEQ ID NO: 58328 - DNA, 345 bp, Heterodera glycines
atgttccgatatgacgagaagttccccgcttcggtaactcaaagccccgccgatgaaaagggtttgaaatttaaatttcattttaaaataaaaattttagcttcccaaaaagagggaaacagtcccgtggagattccagatgtgtttttgacatatattattaaaaaattcttttggcagacattgcgttggccattggacaatgtaagcagaaaggaatggactgttcggcgaagaattaccgacaaatgcttggccaagcattggtcaaaattcgatttccaatcattaatatggattttttggctgatattggtatgcaattttacttgcgctttacagtag

SEQ ID NO: 58329 - DNA, 673 bp, Heterodera glycines
atggagcaagaaattaagcagaaaaaactggcggtggtccatgccggacgaagcattgactcggcactgatcagcatcgaactgtcgttgctgccgttcgccgccgatctgtccgcccaattggaacagttttatggcgccataaatgtaaatgaaatgaaacaaattgccacacaaatcgccgaacaaatgatttgtgcactgatcgagccaattgatgtgcgggaggactttttgaaaacatacatcaaacagctccaacgagcattgccgcagaacattttgttggcatcggcaggcgcttcgttcattcgtcccatggaattcctcaccaaattagaggctagcagcattagcattagcattttaaattttaaatttttaaatttagatggctgactttacaagcggagcagaaagttccgtacaaagttcggcacaaagattgatcaatctcaattttaagctgtacaacggactgtacaaagtgtcgagcaatttgctcaacgcaattcccacaagtttcgagaaagtgccgggaattggcatttttttgcaaaaaacgaaggcatttgtgcgcattataattgagcttatgagaggatttgtggagaaggcaagagaaatcggactaaacagggccaaaatcgagaaatgcgaagacggccaatga

SEQ ID NO: 58330 - DNA, 470 bp, Heterodera glycines
atgagaaaggcccttctttgcctattgttggatatacagtgagtgttacacaaaatgatacgttgacccccgtatttcagttttttgaatgttctaattaacgaaattgtttcagcggaggccattttgtagagcaattaaccaaaggccattttgtagagcattttgtgctctttcagattggcttaataattttttcaagaaaaattttctaaccccttaggaatttttttcgtaaattttcccgatttcaagccattttaaagttttcagattaccatgaagcagtgatctgatgaacatggtttaattaacttttttgatgagcttaaagatttttcttacataaattatatcagattttttgggcgacattttccgatattatgatttttttttgaaagtgaacgtatcattttgtgtcacctattttataaaaaattgctggatattgaagacccttttatcaa

SEQ ID NO: 58331 - DNA, 821 bp, Heterodera glycines
atgtcctttcttttcggccattgtcctttttctctttcccttttttgcttcttccttttcctctgcttttcgctgctcgttttggctgatgaatttgccgaaaatggccaaaacggcgctttaaaaagccaaagtcagcccaaggaaagacggctgcgaaatcggccacgcgactttctgtcggaatgtgtgacggggtaccgggaacggatcgaattccattgccaattcccgaacatggacaagccttgtctgcgcgaaaatgctgaaggtgtgacgactttggcactcaaattcgctttttcgattgcgatggatcccatgttttgtcccaaaatgatttggtcccattcactgatcacctgatcacagattccgtccatcagttggacgtgttggctgccgagtgctgtgcctccccccgcctatgctccgtcgatgacattgagtcgttttgctgtcgtacgatggactgcttgggcctgtgctacggcgactccttcttggcacaaattcaaagccgcttccgttatgcggacattttgctgaaacggcactcatcaaaaggggcggcggaaaagaggggacgaagaacgacggaggaggaggaggaggaagaaaaaagagatgaagatgatgatgatgatgaataagaaaatgatcggatgaacgttgaagagaatgatgagccaaagaagtgaccgtcacaaaggaatactgtcttatacagtgtgacacaaaatcatacatcatccttgaatttcagttttttagaatgttctaattaacgaaattgttttgaaattgtgcaaagcaataaa

SEQ ID NO: 58332 - DNA, 62 bp, Heterodera glycines
aattgttttgaagaaaggtgctcaaaaaacgcatttctgcattaaaaattttcgattctgag

SEQ ID NO: 58333 - DNA, 701 bp, Heterodera glycines
  unsure (1)..(701): unsure at all n locations
atggagcccggtgcgaagaagagcagaaaaaggaagaatgccgaaaacaccgacggcgaggctatggaagtagatgaggaagaggatgccgtggatgaggacgccgagaacaactggatgctgggatacgaagaagccggggagaagccggagtcggtgacaacatacgcatacgcccacgccggtaattttgaaattattcaaaaaaacttggaataaataaattttaaaggttcccgctacgaccatgtgctggtttatggtgaaatgctgcgcatgggtgtccgccctgaactcatccgccaaggcaaccatctcctagagatgaaggcgcgcaaaacgggagtctacacacccaccgtgtttcgggacaggtaaaaattcaaactgaataattttttattttgtcctttcagctacaagctgatcccgatcaaattggcaaattttgtcaagacgtttggtctggaaattgagggcgtggaaaacaagaaatattttccacacaaattcaataagggtaaggggttaatttaggaaaataatttanaaaaaaaaactcataaatttcaggcggaaaactacggcacagtcttggaaacctgncaccgatggaggactattaccccagtggactcttcccggcagagcgcgcaaagtttgagcagtggtacgacgagacccgggaaaactggttttga

SEQ ID NO: 58334 - DNA, 328 bp, Heterodera glycines
atgactttcagtttgttttcatgcatttaagtcgttttcgagacattaacccaaatttctaaaatttaactttcgattctttgttcgaaatcgggtcctgttttaggaattggtcgaaatggatgccatattcgtgatcagcggcccaagtaacccccgacggtgggcacaaacaacttcattcttttgttgattatgtacacaatttcccctccatttttaaggcaaacgggcacaggacttggccgaagaaggaggacttgccgaaatgatggacatttttcgcactaccacggcagccgaacgaacggaggcggcggaacgttga

SEQ ID NO: 58335 - DNA, 673 bp, Heterodera glycines
  unsure (1)..(673): unsure at all n locations
atgcaaaaattttattgtganaattatgcaaagaaattccggcacataaagaaaagtcgaagaggcgaagaatttgccctttgtatcgtctgcaacgatgatattaatctcctttccattggaaaagctgccatttctcagcatcaaaatactggaaaacaccagaaagcggcaaaagcagcaaaccgatttctcaattcaatcccaaaggacgaattgcagaagctcaacactgaacaaaagtggatgaagctatttgaagccgatttaccgcacttgtacaagttggtcagcattgtactttccgtgccggtctcaaatgcatttgtcgagagagtgttttcgctttgcggctcacaatggactgatgttcgaaattcgttgaaagtcgaaaccgtgaaggctctggtccagacgcaaataaattttgatctcacttgcccagaaatgtatcagatgctcatttccaatcacaaactgttggatcagatcggtggatgggacaaattttgcgggacgggatcccgcgggattaatcccgcaaatcccgcatttaaaatttgcgggatcccgtgcgggattgcgggattttggaaaattcgaaaaaatttcaattaaatcaaaaaatttccaaaaatcaaaaaatgctgaaaataggggctggcgggatgca

SEQ ID NO: 58336 - DNA, 636 bp, Heterodera glycines
ctaagtgtttgtttaatcgaagcggaatcactaaacgtgcacatttgccatccgatcattccttcgctttctccggcacaaattcaactcaatttgcaatcgaccgttttgaattttgcggtaattgcactaacacccgttgtgtagcgggggaccctttctcgggcccgaatatttaaaaaacccatagattaaaataattataataatattttattgttcaatgtattttttattcatttttatcactagtacaatttgttaaatgagtctgttgaaagtttttcaatttttctacgtaaaacgggtcgtttttgcaattaaattatttgggcttttcgtttattgctcggcttcttctaaaaagttcaaacaaaaatcatttccagattgccttccgaattgaaaatgttaacattgattttgaaaattttgtgatcattgacgacattgaagttgctggcggtgaccaatgtggtgatttggcagcaaaattggagaataaattgcttgaccaatttcttccggtaagaattaattttccattatatttaattcatcataaaatttaattgtttttgcttttaggctccaatgctcagcagtttgttgagccgcccaattcattcggctcaa

SEQ ID NO: 58337 - DNA, 330 bp, Heterodera glycines
atgaaaaatggacaaatgtgtaggctgggcactgtcgcatttgtagattattatcaatttttgtgtgcatcgcttgcaaggaatggaagagaaatgaaaacagagaaagagtgagtgaaaaaaaagaatgacaaaataatgaataaaatatagaaaaatagaagaaataggcagagaaaatagagaaagtaagaaagctaaggaaattaaggaaaagaaaaaaaggaaaagatcagacacagagcgcaaagacagagaagatgtatgtggtgttcaatgtgagaagaggtgagcatatgccgagctgctctagatgggtgagaaaataaa

SEQ ID NO: 58338 - DNA, 439 bp, Heterodera glycines
atgagcaaaactgaaatgctattgaaggaagaaaatggaaaaattagcgaattggagatgaaaatgaaggacgaaaaggagacattcgaagcaaagttggaaaagatgaaaaaagagggagaaaaggaggcacaaaaaggagaggaaattttgaggagggcggaaaaggaaaaaagagaaatgaatttggaaatggaagcgatcaaaaaggaaagggacggaagaaaggaagaggtaattgcggaagaaagcaaaacaaacccaataatttgggggattttaggtggaaaagctaagggagcaaatcattgcatttgaggaagagaagggacatttgaaactcgaattgaaaagcgtaaaaagggagttgaagggactgaagcaaatcgaagcacaaatgaaaggtggcgaagaaaagggcaaaagcccaaggaaatga

SEQ ID NO: 58339 - DNA, 702 bp, Heterodera glycines
atttggtgcgctttagagcactttctgaaaaaaatatttatgaaacaaaaaaatcgattttttcaagtgtccgtttggggtactcaaacaattatggggagcaaaaatccaacgcagaattaaagtacaggctatagggaagctattcccgaaggattcggtctccccataaatctgggcgcatcggttcggggggactgccccgaaaacaaaaaaatcgattttttcaagtgtccgtttggggtactcaaacaattatggggagcaaaaatccaacgcagaattaaagtacaggctatagggaagctattccggaaggattcggtctccccataaatctgggcgcatcggttcggggggactgccccgaaaacaaaaaaatcgattttttcaagtgtccgtttggggtactcaaacaattatggggagcaaaaatccaacgcagaattaaagtacaggctatagggaagctattcccgaaggattcggtctccccataaatctgggcgcatcggttcggggggactgccccgaaaacaaaaaaatcgattttttcaagtgtccgtttggggtactcaaacaattatggggagcaaaaatccaacgcagaattaaagtacaggctatagggaagctattcccgaaggattcggtctccccataaatctgggcgcatcggttcggggggactgccccgaaaac

SEQ ID NO: 58340 - DNA, 251 bp, Heterodera glycines
atgtcaatttcgaccaattcaataaattataaagatgatttcacaccagcagaaaatggaggtaaattatgagaaaaggcaaaatgggagaaaatttgaattttggggtgaaaataaataaatatttaattcaaaatttaatttatgtatattttttagaagtcaatggcggagcaattagtttggacaatgatggacaatttgatggaaaaaacagtgaacaatcggtcactgatcagcaacagtttaag

SEQ ID NO: 58341 - DNA, 156 bp, Heterodera glycines
gcagttccggcgcccgtcagtctgtccggctacggcgtcgagttggccatcaaaagcaccgagtacaaagccatcgacgactccaatgatcagaaaactggcggcgacgagccagcacagaatttgcacgggttcaacttcagtcttttacggtaa

SEQ ID NO: 58342 - DNA, 722 bp, Heterodera glycines
gacggaaaatggcttgaaaatgaacatcgaaatgcaacaattacattcaaaaacatttctgttttagaactgttttttggcatcaccaatggcaatgatgtgataaagttgaacggtgtgcaaatgtttgaagaatattccaattcggcgccatattgcgacatgaaaaaaatcgaggtgacataattaatgaactaattaattaatttattacatggaatgcatttttttgcttgaatgaaaactggctgaaacgcacaagatcttgtttttataagcttctcttctatgacgcattttcatatgcattttttaaaaatttaatttttggaaattttcttggaaaaataaataaattaactaatttttaccaaaatttacgcaaaaagaaaattatttattttattattttttggtttgcatcgataagagttgccggggaaacttatgaaaatttttatgtttttctatgtgagagattttcagccataaatttggagaaaattagaaaattttcatcataaaacatctaacataaatttacatgttttatggggttttgaaattttacaaatttgttcaaacaaaaaaagttagccactttagaatcatagtttaaaaaaatttattttatacttgtatgatggctttattaatttttctaggtaatgggagatgttattttattagatgaacccgagctgaatgtgccaccaccaaaa

SEQ ID NO: 58343 - DNA, 4941 bp, Heterodera glycines
atggcctttgatcaaatggactgcgacgatgaaaaacttttggacttcgaggaggagacaccggtgaacgaaagtgtgaaatcgttaacaaaagaggaggaggagaaagtactgaaagagctgggcattgtgtctgaaaagcccaaaatttgccgatcattttcatcgccaaataatttttgtgccgatcgggtctcagtgctgaaaacggcgctgattgaaaggtcaatcgtcggttcggaaagaggtaatgtgaaagttttgatccataataaaggaccggaaccattaattttggaaaaaggtatgaaggtggcatatgcagaaaagttggacgaaatttttaatccaaatgtcgaattgtttccattagaatttgatagaatgttcgtgtctcaaaaattcataaggtcaactgcaaaattcgaacggaatttgagaaataaagaacttatttcaattctgaacaacaaaattggtgctctctcagacagtgaaaaggataaaatgcaacaattttggctgggattttctgatgtttttgcactaaatgaatttgaactcactcaaaccgatttatttccccatgaaataaaaactgaaaacgcaaccccaattaaaactgctcctcgtccaattccattcggtgtccgaacaaaagtcacagaaatgataaatgattatttgaaacgggaaataattcgaccatcaaactctccgtgggcatctccaattgttttagtagccaaaaaagatggctcaatccgattttgcctggactaccgaaaacttaatagtgtgacaatcaaagattcatacccaataccgaacattgaccaaattttgatgtatttgggaaacaaacactattttactgtgttggatctaatgtcgggttattggcaagttcgagttaaagaagaagacattgaaaaaacggcgtttacagtacctggtggtctttatgaatttttggtccttccttttggtctaggtaacgccccagccacatttcaaagactcatgaacaaaattttgtccgaatatattaacgaatttgttttcgtttatctcgacgacattttaattgcctctgaaacatttgaagatcatatgctccatctcagaaaggttttcgaaaaactgaatgaaaacggaatgaaagtcaaggcagaaaaatgtggttttgctttagaccaaaccccatatttaggacatattcttacacgagaaggactcgcaaaagatccggaaaaatacaaacccatcaaagaatttccgatgccaaaaacaatcaaagaattacaaagatttttgggaatggtcaattggcaccgaaaatttattatgaattttgcaaaaattgcggcacctttaacaaaaatgttgaaaaaacaggatgctaaggtgttaatttggtcggacggagcaaaaaagagttttgaatcattaaaatcgctaattgttcaggaagttgtacttaaatacccggattttaatttggcacaaaatgatccaaaatttaaatttcatattttttcggatgcgtcgaaagatgggttaggtgcagtgctttgtcaacgggatcaatctgggaaaatgagaacaatttgttacgcatcaagacgctgtaaacaaaccgagtcaaattatgggccaacagttttagaatgtttaggcataaaatttgtcgtaatttaagcattttatcgcatggcttccaacaatcgtatataccgaccataaggcccttccccaaatgttcaaaagcaaaaattcggtcggaaattcaaaagtagacagatggatcatggaattaggtgctccattccaattagaggtaatttataagcctggaaaagagaatcacgttgctgacgcactttcacgagcctttaactcaaaaactcttactttggaagaaaagggaagcgaaaattgcgcatacatttctgccgtcttaacacccgaaattccgaaattgccaattagtgtttctaaggaagaatgggtcgaggaaatcaaaaattctgaattggcttttatttggaactttttggtcaaaaaagaattgccacacgagttaaaaactcatcagaaacttttggaatcgcttggaaagtttacagttgatgaaaaaatcctttactatttgaattccgacagtgaatcagagctttttgtccccaataaatttgcgattcgttgataaacgaacaccattcagggccatgcgcagggcaccagagtggaaaaaagatttataaaaggctaaaatttctcaaatacttttggccaaacatgttttcggactgccaacattttgctaggtcatgtcgaatttgcgcacataaccgaattccccgaaaaaaccatccgggtctgaaaccaattaatactcaaaaaccaaacgaacttttgtgcatggatattttgaaacttggaccaacccgaaacggaaacaaatactgtttggtcatgatcgatcatttcacgagattttcagaagtgatcccaattccaaacaaaaaagcggaaacagtttcacaggaatttgttgagaaatgggttctgaaatttggagcaccagaggcaatccattctgatttgggaggcgaatttgtgaactcaattttgaaggaaataactgaaaaacttttggtttcaagatcaaccacttctggttatgatccaaacgcaaatggtctcgcagaaagattaaaccgtacaattattgaaatggtcagaaaaacgagtacaagtccatgggagtgggaccttcgcattccatatgtcacattttcacataacatcaccccaaacgaaagtaccggattttccccatcaactttatttttcgggcgagctctaaattttccaaccaatgtaacggccccaaaacgaccaaatcctctttacaccatagatttggatgaatatttgcaatttttcagagaaaattatgaacttttggttaaagaggcttcaaaaaacattgcaaaagcccaatttatccaaaagaaacaatttgactcgaaaccgaacgttcaaccaggaaaatataaattgggagatagagtaatggttttctttcgaccgtcagcacaaattaagcactcaaaattatcttggaattattttggcccatacaaaattaaggccttaagtccaaccgcagcatgggttgtgcctgtgaataaagaagaaagtgaacaaatcaaagtcccaatcgaacacttagtccatacaccaatcgaacttcccaatgaaacttttctcccaaaacaaagacgcggaaaaattttcaaaaatatgccaccttctgaaaatggaaaagaaaccagccagaagaaaattaattctgttttgacaaaatgcatcttttcagaaaatgtcgccccggcgaaattggcactcagcgcacactgctcaggcattgagcaacattcaaattgttcttgcattttgctggaagaagtgtttccgaacttgccggccatggaccctcttcgacgcgtccaattgtcatcacttggagaattaatcccaatttcaatcgccaaacagaaagggattttgctgggccatattcgcagttgggccaattcggatgaagaatcagcttcactccttcgccacattccaaatttcagtcccgacattcaaaatttcattcctccaattttaatgtgggtggaccgttgtgccgtcgcatttcaaaccctcaaaaatacgggaatgaaagttgtacagcaagagatttgctcaaaaaatccgctccaccggttcggggagttgatcagcgaagcattcgaagaagtgaaggcaaaaaatataatcggcttttcatcaatggaatccgaaaaattcctttgttacggcgactcatcggttcgagagtttgctagtaaattggaaacaaaaaccatcatttttaaaaacacactggaaatggccgaagcattcaaaaatacttattttacgactaaagtccaagaaattctgatcctgatcggaaatgacgatttggaccaaggccttgtgttaaatgatgtcgaagaggccattcgcaaaataattgttcatgcaaataaattctcaatcaaaactattttcattccacctccttttcactattcaaaaagaattttgcatggaaaattgttaaatttgttggccaaaatgttgccaaacgatggaaaaattgtgttggcaatgaaaagaggcaaccggagtttggcagaggtaacccggttcgggaacctcgaaaatcgccgaacagtgaatgaaaatggcaagttgaaaccgcctggcattcattttacaatcagttttttaactgatgtgtttggaatgaccacgccggtgaaaatgtcgtcagaatcagggagttcaggaattcgaaccccagccacttccaattcgcgtgctccgagtttgctcaatgtgcaaattccatcgccaatcattcctcacccccgtcaagagcaaaatgcttacaggcgtttcaatcgtggtcgaggaagcggccaaaatttccaaaatcggggggcttaccgcaattaccgttggcaaaatcatggggattatccccctccccctaaacgtggaaggttctgaacggatcgtcattaccttaattgtgccggataaattttatttttgattgtatttccctgcctcagacctacttataaatgacctcattattgtttcattttgttgtttatttatttgttttttttttctctcatttaataaattttcatcgcttaaaatattcgtccaaaaagagtagtccctcctatccaccctttccccctttatttcatttcagctctcgccttttcgcttcatcaaatccgctgtttgagcgtcgacgtcaaaactcgcaagcgctcgtctttcgctgatccgggggaggtgtgcggcgatcagacc

SEQ ID NO: 58344 - DNA, 65 bp, Heterodera glycines; identical to SEQ ID NO: 54797

SEQ ID NO: 58345 - DNA, 1125 bp, Heterodera glycines
taattaaatccattccttcgggggaccgtgccgggtgccgcggggtaagcagtgctggttcgtttcatcacggcaccgaaccttttggctagtcagcaatcgttgcttaacttgccagatcggacgggtgcgcatgattccactgttccaagcaccccaccaaaagcaaaacgatataaccaaaatataaggaaaaatttttaaaaaaatttttctccatctccctttttgatagaaaaagcatcagagtgcctaaactaacatgtaaataaaatttggtgcgctttagagcactttctgaaaaaatatttatgaaataaaaaaatcgatttattcaagtgtccgtttggggtactcaaacaattatggggagcaaaaatccaacgcagaattaaagtacagactatagggaagctaatcccgaaggattcggtctccccataaatctgggcgcatcggttcggggggactgccccgaaaacaaaaaaatcgatttttcaagtgtccgtttggggtactcaaacaattatggggagcaaaaatccaacgcagaattaaagtacaggctatagggaagctattcccgaaggattcggtctccccataaatctgggcgcatcggttcggggggactgccccgaaaacaaaaaaatcgattttttcaagtgtctgtttggggtactcaaacaattatggggagcaaaaatccaacgcagaattaaagtacaggctatagggaagctattcccgaaggattcggtctccccataaatctgggcgcatcggttcagggggactgccccgaaaacccaaaaaaaaattttttggataaaaattatttaaatgaactgactagataatatttaaaataggttaattcttttcctttcagtatccctgcaaagtttggggcgcttctgataagtttctgaaaaaaaagttaagcctaaactttttggcctgtttaaaaaggaattaaaaatttttaaaaatttattcatctccctttttgatagaaaaagcatcagagtgcctaaactagcatgtaaataaaatttggtgcgtttcagagcattttctgaaaaaaatatttatgaattaattatgcaaaaataaataaaaatt

SEQ ID NO: 58346 - DNA, 667 bp, Heterodera glycines
aaaaaaggaaaaacgatggtaatggactcggaccgtgacaaaatattggtgtccgaattgatgactttcaaaggcggactggacaaggtgatcagtgactgtttcaactcaaatgagaagtttctgcacgcgctcaaagattccttcgactttttcatcaatacgagggcaaacaaaattgcggaacttattggtcagcgtaaaaagaaagactgaaaaaccgaattttaaaatggaaatttagcaaaatttatggactcgaaattgcgcaccggaaacaaagaatgttcggaggaggaattggacgaggtgatggaccgcgtcattgtccttttccgttttgtgcaaggcaaagacattttcgaggccttttacaaaaaggacttggccaaacggttgctgctgggccgaagtgcgtctgtggacgcggagaaggcgatgctttccaaactcaggacaggtgggtacttttaaaatagttttttatttcagaaaatttgctttttcagagtgcggtgccggccttacacagaaattggagggaatgttcaaagacatggatttgtcccgagacttttgcaagacgttcaaacaagtcgcaattaaatggattttggggatttgtcttttgtttttcagtatctcgaggcaaaccacgctagagatg

SEQ ID NO: 58347 - DNA, 610 bp, Heterodera glycines
cacgaaggcatccaacgggtgaccgagctgaaggaccaattgctggaggcggagcatgaacaatccgccgcaattgaacaacgccaccgggcggtcatccaacgctggcagcaattattagcaaattcgctggaacgacgtcgcaaattgacggaggcccaggcgcacttcaaacaaattgaggacctggtcagtgtacattttaattcaagaatggcatattttgaatcttgtaaatgccgagaatagcataattacctcctcttgtaaattacagtatctgacgttcgccaagaaagcgtccgccttcaactcgtggtttgagaatgcggaagaggatctgacggacccggtccgatgcaattcattggaggaaattcggggtaattttaaaaaatgttatatatttttatttattttaaaaatatatatattttaagcccttcgcgaggcgcacaccgaattccaaaagtcgttggttggcgccgaggacgacttccgccagttgcaggagttggaccgtcagatcaagtcgtacaatgttgggcccaacccatacacgtggttcaccatcgaggcactgtcagagacttggcaaaatttgcaaaag

SEQ ID NO: 58348 - DNA, 275 bp, Heterodera glycines
atgcatccgattcgtctcaccgtggcgctgaactttgccattctccaattcgaagtgcagaaatcaccagccgatgcctgtcaaactgcccaacgggtgatgaacagaaaatttgtatttcaagtttaaccgctcgaattttttttacaggcttatgacgacgcgacttccgatgcgcagacaacgggcgagagtatttgcgcggagtccgtcacgatcatgggactgttgcaggacaacatctcgtactggagtggcaacacctctaagacgga

SEQ ID NO: 58349 - DNA, 409 bp, Heterodera glycines
atgcagtacaatgcttttaagccccgccgtgaggcgggacagttccaaaattttgtaccacattttactgtggaaagtccaagtaccttattggacaactacgtgtcaatgagcacagtcgcctttggccagttgtggaacggaaaaatgggaatatcagatggggtgcgctcttttctaaaaattcctcttttcgtctaaccatccctcccttttgtgcactatttcgtttcaaaattgaatcatttttttttgtcttttgaaataaattgtgaaaaatatacgaaaattattttagcttttaattatgctgtacaatgcttttaagccccgccgtgcggcggctccccttttgtgcactattttagtttttaaaattggttccggactttttggctttttgaaataa

SEQ ID NO: 58350 - DNA, 388 bp, Heterodera glycines
gcttaaaagcattgtacagcataattaaaagctaaaataattttcgtatatttttcacaatttatttcaaaagacaaaaaaaaatgattcaattttgaaacgaaatagtgcacaaaagggagggatggttagacgaaaagaggaatttttagaaaagagcgcaccccatctgatattcccatttttccgttccacaactggccaaaggcgactgtgctcattgacacgtagttgtccaataaggtacttggactttccacagtaaaatgtggtacaaaattttggaactgtcccgcctcacggcggggcttaaaagcattgtactgcataattaaaagctaaaataattttcgtatatttttcacaatttatttcaaaaagccaaaaa

SEQ ID NO: 58351 - DNA, 202 bp, Heterodera glycines
tttcgtcaatttgctggtcgaccgttccgtcaatttcgacgccgacgcgatgcagctcaaatacgcgctcatttgtcgcttggttgaggccgcgccgtccgcgctgaacgacggacagatggaaatgctgcgcgactattgcacgaaagggcctttttggggggcgccggtggtggaagtcgcgacggaagaggcggcataa

SEQ ID NO: 58352 - DNA, 690 bp, Heterodera glycines
atgtcatacacaacaaatttcccgcacagtcggaaacgtacagtttatgttggaggtttcggagaagaggtcaatgaaaaggttctcacacttgcgttcataccattcggagacatcggttagatgctttttacaaatttaataaatcaaatttaaatttggtttagtcggcataagcattccgttggacaatgaaacgggcaaacacagaagttttgggtaagttgattcattttaagttgaatgttagtctttgctttttgagatttgtcgaatttgaacttccggaggatgcagcggcggcaattgacaatatgaacgactcggagatttatgggaaaacaatcagagtgaattttgcacgccctccaaaagtgaatgagcgaagtcaacgaccaatttgggcggatgacgagtggttgaagcagtacggccaggggagtggacagggcgaaccaggagaaaatggaggagaaaaacttaatgaaacggaaaggatggcgggagaagagggcgatgaggaggaagagggaagagacagcagccaacagaaactgccaaaagtttatttgggcatcaaaattggaataaggttggcattttgactctattgcagcagtttacaccaatcataaaataattgataaatttaatgcatcataactttcttctagaagcatccgaattaaa

SEQ ID NO: 58353 - DNA, 2159 bp, Heterodera glycines
acgaaaacagtgaaggatgcgaatcatccgacgacgacgaacgagtgactgatcgcgattcatccgaagacgaaaacagtgaaggatgcgaatcatccgacgacgacgaacgagtgactgatcgcgattcatccgaagacgaaaacagtgaaggatgcgagtcatccgacgacgacgaacgagtgactgatcgggattcatccgaagacgaaaacagtgaaggatgcgaatcatccgacgacgacgaacgagtgactgatcgggattcatccgaagacgaaaacagtgaaggatgcgaatcatccgacgacgacgaacgagtgactgatcgcgattcatccgaagacgaaaacagtgaaggatgcgaatcatccgacgacgacgaacgagtgactgatcgcgattcatccgaagacgaaaacagtgaaggatgcgaatcatccgacgacgacgaacgagtgactgatcgcgattcatccgaagacgaaaacagtgaaggatgcgaatcatccgacgacgacgaacgagtgactgatcgcgattcatccgaagacgaaaacagtgaaggatgcgaatcatccgacgacgacgaacgagtgactgatcgcgattcatccgaagacgaaaacagtgaaggatgcgaatcatccgacgacgacgaacgagtgactgatcgcgattcatccgaagacgaaaacagtgaaggatgcgaatcatccgacgacgacgaacgagtgactgatcgcgattcatccgaagacgaaaacagtgaaggatgcgaatcatccgacgacgacgaacgagtgactgatcgcgattcatccgaagacgaaaacagtgaaggatgcgaatcatccgacgacgacgaacgagtgactgatcgcgattcatccgaagacgaaaacagtgaaggatgcgaatcatccgacgacgacgaacgagtgactgatcgggattcatccgaagacgaaaaaggcttcgcgcaagtcgacatcgagaagggtgggaatgcctttaaaatttaattgtgccattttcgtaattgacttaccaccccctctcccgcatcgttcagcgaactcaccggaggacttgtggagcagggtcatcgcagcgtcgcagtcattcaagaaagtcgcgttccgtgagcaagtcgccgatgaagaaggatgctcgtccgcccggaagccgtcgtccgaccagccgtgctacgatcaaccgtcgttccgaggcggaggcgaccaacaccggtgggacagcagcggatggagctcatgccgcggagaagcaaaagaagaccagcaatggatagatgacgacaaatcggatgaaaagcgattatccaacagaaattaaccatattttttgtccgtcataaatgtgttaagagcgcccctctttctccccgtgtttgtgttgtataatattcatttcctataatcccgtgagatgcctgacacacacacatccgttgtatgaatgtccccttaatattgtcagtgaaggcatcctggtgttgtattgtcgatttaatcgctatgtgtgtctctcaattatgtttttgctctaccatgataaacgaacgatagtctcttgcgaaaaaacaatggaaaatgaattggcataagatttgtcattatatcctttgtaattattcccaagaaatgaattgccgataggcaccgccgggaaaaattttgagaatttgaatgcaatttgttaacagatggttgttaaaaatgacaaaattttcatcaaatttaaaaatttaagcgcacgcatttttagctttcataaggtttatcgtttctgaatccctcctaattatatggtcgaagcaaatttcaaaaatgcgcgaaaacacggcatatttatgcgggagatgcgatgtcaagctttacactagggctgggaatttaagccaaatgacttttttttgctgactctaaatggcctttaaatgacttaaaaagtgttctaaacttgtttgaagcttctgacatgcattttttgtgatttttttaaacttttttacactttttgggatttttatgactatttgagtttttgcgactttttcgtgattttttttactttttgagtctaaatttgaattttaatgaagaaaatgccgaaaaatacaaagaaaattccgaaaa

SEQ ID NO: 58354 - DNA, 1095 bp, Heterodera glycines
atgtcgacttgcgcgaagcctttttcgtcttcggatgaatcccgatcagtcactcgttcgtcgtcgtcggatgattcgcatccttcactgttttcgtcttcggatgaatcgcgatcagtcactcgttcgtcgtcgtcggatgattcgcatccttcactgttttcgtcttcggatgaatcgcgatcagtcactcgttcgtcgtcgtcggatgattcgcatccttcactgttttcgtcttcggatgaatcgcgatcagtcactcgttcgtcgtcgtcggatgattcgcatccttcactgttttcgtcttcggatgaatcgcgatcagtcactcgttcgtcgtcgtcggatgattcgcatccttcactgttttcgtcttcggatgaatcgcgatcagtcactcgttcgtcgtcgtcggatgattcgcatccttcactgttttcgtcttcggatgaatcgcgatcagtcactcgttcgtcgtcgtcggatgattcgcatccttcactgttttcgtcttcggatgaatcgcgatcagtcactcgttcgtcgtcgtcggatgattcgcatccttcactgttttcgtcttcggatgaatcgcgatcagtcactcgttcgtcgtcgtcggatgattcgcatccttcactgttttcgtcttcggatgaatcgcgatcagtcactcgttcgtcgtcgtcggatgattcgcatccttcactgttttcgtcttcggatgaatcccgatcagtcactcgttcgtcgtcgtcggatgattcgcatccttcactgttttcgtcttcggatgaatcccgatcagtcactcgttcgtcgtcgtcggatgactcgcatccttcactgttttcgtcttcggatgaatcgcgatcagtcactcgttcgtcgtcgtcggatgattcgcatccttcactgttttcgtcttcggatgaatcgcgatcagtcactcgttcgtcgtcgtcggatgattcgcatccttcactgttttcgtctatgattcggatgaatcgcgatcagtcactcgttcgtcgtcgtcggatgattcgcatccttcactgttttcgtcttcgggatgatcgcgatcagtcactc

SEQ ID NO: 58355 - DNA, 463 bp, Heterodera glycines
tgaaggatgcgaatcatccgacgacgacgaacgagtgactgatcgcgattcatccgaagacgaaaacagtgaaggatgcgaatcatccgacaacgatgaacgagtgactgatcgcgattcatccgaagacgaaaacagtgaaggatgcgaatcatccgacgacgacgaacgagtgactgatcgggattcatccgaagacgaaaacagtgaaggatgcgaatcatccgacgacgacgaacgagtgactgatcgggattcatccgaagacgaaaacagtgaaggatgcgaatcatccgacgacgacgaacgagtgactgatcgggattcatccgaagacgaaaacagtgaaggatgcgaatcatccgacgacgacgaacgagtgactgatcgggattcatccgaagacgaaaaaggcttcgcgcaagtcgacatcgagaagggtgggaatgcctttaaaatttaa

SEQ ID NO: 58356 - DNA, 1677 bp, Heterodera glycines
  unsure (1)..(1677): unsure at all n locations
ttttgcatatttgtgatatttcgcgatttatgtgcactcctgggcatatttntggcatttcatgcatattttatgtgcctttttgggcattttttcaataaatcctctattaaaacggccccctctattgaagcggccatttgggctctaatgaccgaaaatttttcaaaaaaatcacatttttgagtatattttctggtaaaaaagtaactttttaaaaaattggaattttatgccaaaaatagtcagaaaatagaaaattctcctttttttgctcaattttcttcaaaataaataaatataaaaatttgaaaatttgccctcaatttggaaaaatttatgtgcatatttttcactttttatgtgcatattttgcaatttttggtgcatattttatgcgcatattttgcgattttatgtgcatataattaccatccctatttatcatggtagagcaaaaacataattgagagacacatatagcgattaaatcgacaatacaacaccaggatgccttcactgacaatattaaggggacattcatacaacggatgtgtgtgtgtcaggcatctcacgggattataggaaatgaatattatacaacacaaacacggggagaaagaggggcgctcttaacacatttatgacggacaaaaaatatggttaatttctgttggataatcgcttttcatccgatttgtcgtcatctatccattgctggtcttcttttgcttctccgcggcatgagctccatccgctgctgtcccaccggtgttggtcgcctccgcctcggaacgacggttgatcgtagcacggctggtcggacgacggcttccgggcggacgagcatccttcttcatcggcgacttgctcacggaacgcgactttcttgaatgagcgacgctgcgatgaccctgctccacaagtcctccggtgagttcgctgaacgatgcgggagagggggtggtaagtcaattacgaaaatggcacaattaaattttaaaggcattcccacccttctcgatgtcgacttgcgcgaagcctttttcgtcttcggatgaatcccgatcagtcactcgttcgtcgtcgtcggatgattcgcatccttcactgttttcgtcttcggatgaatcccgatcagtcactcgttcgtcgtcgtcggatgattcgcatccttcactgttttcgtcttcggatgaatcccgatcagtcactcgttcgtcgtcgtcggatgattcgcatccttcactgttttcgtcttcggatgaatcccgatcagtcactcgttcgtcgtcgtcggatgattcgcatccttcactgttttcgtcttcggatgaatcgcgatcagtcactcgttcatcgttgtcggatgattcgcatccttcactgttttcgtcttcggatgaatcgcgatcagtcactcgttcgtcgtcgtcggatgattcgcatccttcactgttttcgtctcggatgaatcgcgatcagtcactcgttcgtcgtcgtcggatgattcgcatccttcactgttttcgtcttcggatgaatcccgatcagtcactcgttcgtcgtcgtcggatgattcgcatccttcactgttttcgtcttcggatgaatcgcgatcagtcactcgttcgtcgtcgtcggatgattcgcatccttcactgttttcgtcttcgg

SEQ ID NO: 58357 - DNA, 663 bp, Heterodera glycines
atggccttcggggagtcaatttgctgggcaatggcaaaacggaaaaaggcacggattgggcgtggaacagagaggccgatggctgtacaaggtgagaagaggaggtgaacagaaagttaatcggcatgactggtcagggcgagtggacccaggggtacaaaggacggtacggacgaagggaagcgattaattcggtggcacattatttgggcacttggtccagcggactccacgacgggtaatgttccgtttatcgctttttatctaactgtgctgaatctgtacagatacggcactgaagtttacgcggatggaggtattacgcggggacatttttgggcaatatttcgactctgttgttaagggatgtacaagggccaatggttacgcggcatgcgccacggatacggcatcagtgagaagagggtcgaattaatttgcaaaaaaatgtcaaatcatttaggaacaagtgccccgtggaattcagcaacaaagcagcgcacctctggcaattcgcatgctcacgcgtcactgagctcactccgttcgacgtatggaagcatggcgatggacgacgaaacggcagctgcgatggacatgccaaaccacacgggaagaagtcactccagagaccgtcggggagaagaagccgggtccgagtga

SEQ ID NO: 58358 - DNA, 683 bp, Heterodera glycines
atgtgccattgccttgcttatatagcggtcattgattctgtggtggagccaaaggcacttcaaattggcacaaacgggtacaatttggtgaatgttgaggtaaaagtggaaaaaaattctaccgtattttcgaaatagagcccctagcagtgaattttaattattttttttaacaacccttgaaagggggggggggggctttatttcagtagagggggtcttctaccttaggaaaaattaccgaatttcggaaaattgagcccctagaattctgaggaaaattttgtatttttaatgcaaaatttttttttaaattgagggttttatattttttttttacttaaatatatttttgacataattaagtttaaatatttaaaaatttatttaaacataaattttcatcatttaaattagataaaattgaaaaattaaatttcacaatttaaaaatttatcgaaaaatttataatcattttaaattccaaaaataaagaaaaattattattttttcataggtccaacgtccgtacctaaagaaacgggtgcatgttggcgtctgttttagcccactgttttacatggaacattggcaattggttgttttggcaaaggagagggaaaggttggcaaccattgaactgggcgagtgatgggaaatgaatgaatgaatttgaaaataaa

SEQ ID NO: 58359 - DNA, 102 bp, Heterodera glycines
atggctcccggacatttggacagtggacatctggacagtggacatttcgacagtggacatttggacaatgaagtcatttggacagaaccggacaattggaca

SEQ ID NO: 58360 - DNA, 56 bp, Heterodera glycines
gtcccggttcccggtcccgggttttgaaaagctcaggtcccggtcccggtagggca

SEQ ID NO: 58361 - DNA, 711 bp, Heterodera glycines
  unsure (1)..(711): unsure at all n locations
atggcatgcaatatatgctttgatgacattaaaattgatcagctctgtttttgtgaagatccatcatgtaaaactgataaacctgataacgatagaacagaaggtgaaattttcttaaaaaaaaattataattacgtaaacgagtatttataaatctcgaatttctttacaccgaaaatttggccattttcaaatttntaaagaaacccatgcccatttgcattgaatgccttcggcgttacacaaaggcggcacattcaacaatgccattcgctggcggccttgggctcagctgtgtggcactcaattgccaaaacccaataagatggggtatgcaggaatttttcgaggcctagacccgttttaagaaattaaaaaaaagtttttttcagaaaaaatagacagaaaattaaaaaaaaattatattctttttatcgtgtagtttaataaaacttggataggaaatcaatttttagtttttgaaatttatggttttattagcattattaatttatttaattgcgtttcttgtaataaattttagataccttaaagaaacggcttactaaggacaaaacgtcaattaaatcaattaacggcctaatgaatctttcggagcgatgtattgcaaagtttggcgggggacacattgaacggtcaaatttattatttctaaaaatattcgtcaaaatagaattttccaaattgtaa

SEQ ID NO: 58362 - DNA, 588 bp, Heterodera glycines
atgattggctcaactgctcggtgtgttgcgcttttgctgctcggcgccacaatggcacaagcattcctcacgacatttaagtaaatattacttattatcgttttaaattggctaattgaaagccttgcatgtttagcgttgcaccgaacgcctttcgaaaccgacgcggatgcggaggaggaggaggcggcggatgcggcggagggtgcggtgctcctccaccaagcggtggcggtgccatcaaactgacgctcggatgcgaagggcctccgcctcaagcgcctgccccatgcggatgcggcggaggatgcggcggcggttgcggtggcggatacggcggaggatgtggtgcccctccgccaagcggtggcggtgcgatcaaactgactctcggatgtgaagggcctccgcctcaagcgcctgctccatgcggatgcggtagtggatgcggttgcggatgcggcggagggtgcggtgctcctccaccaagcggtggcggtgccatcaaactgacgctcggatgcgaagggcctccgcctcaagcgcctgccccatgcggatgcggcggaggatgcggcggcggttgcg

SEQ ID NO: 58363 - DNA, 2528 bp, Heterodera glycines
atgatcgtgctggacagtggtcgtcaagcaacaatgtacgagggtttagacctttttctggatcaaatgcgacgagacaacaacaaagaggaagaggaggacgaggccgctctcgcaattggggaggaggccgccaggaaccaaagaaactggtcaagcaaccctcgatgccattattgtgaccgtgctggacattttgcgtacaattgccatcaacgccgcgccaattttagaggaaattccaaccaatcgttccgtcaaggaagatggtcaaatcagcaaccacgccaatctcagggacaatggcaaaatcggcagaatcctgttaacgtgatggatgctacaagttcttccaacgcttcaccaggaattttcgagaacttggcccagtcgttacttgacctcaaaattcaggacaatcgcaattacaaaaacgaagagccgagatcgggagcaatgaatgcgctcacacacatcaaacccgaaacaacagcaatggattgtcaggtcgaaaatgaattagcaaaaggatcctctagtgaatccccagcctgtgggccggaaacaaagataaacattcccaaaacgtcaaattgggaacggccaagcgtacgatcgaaactcgcttctttaatgttcattacattaatgcttgttggaatgactctgccctttactactggtaatatgccccatctgccaatgcatccccttgtctgtcaaacccaaaacggaggaaaaatttggcaattgccggcagttactggctgttcaaagctgtcaattgatcattcaaaagcacctgttgttcgaactttcgatgtcttttcgccaaatttatttgagcactcggctgatgcttgggcttgccgaaaagtaagaaaatccgtacgtaagtacaattcaatcaccaatgttccgatccaagagactcttgagccgcttttgttgcaaataactccgagtgaatgcaaagaaatggccgaaaatggaaagtgtagcttaggcctactcattaatgactcgggactcttgcacactgataagaaattggatttgtcaccccgaatgtggttaattggctcatttagctggtcgactgtctcaactgaaaattgttatctttttaagactaaaattatgtcacaacacggtagcacagttatgcaaagtcccctcgggtcagtgaacaattgccaattcaaggcaggccaatgtgagatggaagacaagacattgctcatgtgggataccaacactacccgtgcctgtgatttttcgaaaattgtcacatggaaaggactacaacttgacaatatttggatttctgaggaggtcagttttcgtttaactttcttgacagcacaaagaaagtcaactcatgtggtctgaatttgataaaatcggaggaaggatttgctgtacaagacttgcaatccgacgatagcaacgaatcctcaaagagaagcagaaagacgagatcacttgaaagttgggtcaccgaatcggaaatgaactccaaattgggctatttggatgaacaagtaagagaaatgctgactctttccttttctcagacaattaaatcgatttgtgattatatgttggagacgagaagatgggcagcgacggcacttctctcagacccaacaacttttgccagaaaattattccaatccggtaaactggtggcaaaagtggctgggcctgaattgattaaagtgtggccatgcatcgaattgcaagcgcacgattacgaatttgccaaaattgggaactcagtggactccgaattcgaatgctttgacaaaattccaattaaattccgagtgaaggacaacaaaagaatggcatttattgacccaagaacaatgattttgagctctgatgcgagactggcaccatgctcagaataccgcaaacagctcatttttgtgcgtggttctctttatgaagttgatcaaattgatgctcaggtcaagcaggtgaatgccaatcgcattgacggttttagcctaaatctatcattggcaccgacttatgctcgccattcttttcttcatcttgcccttgtgaatgtgtctgactttattggccagttttacgacgccaatttcgcaagagaaagtgaactcacattccaacttaaaagtgaggacacggttataacaaagactctgtctgaacaatgggagcaggtgagtgagtccattcgcaacaaaatggttgggaattgggaacaaattggaaaaattgtcatgtccatgatgataattattgtttttgcagactttttgatccgatttggattaatgattagagacgaatacgttggcagaggaacaacacgacgcatgacttttggtggaaataaaacgcagaaaattgtgaaatctccagcacacctcaacatgatggatctgaatgcatctgtagaatttggtaacgaaattgagctcagtcccgttaagctcattgaacccgcccaaacccagacacacaaaattgcaggaaaacgaaagagaccg

SEQ ID NO: 58364 - DNA, 724 bp, Heterodera glycines
atgggcttgcaaaagttgttgaagcaacttttcaaggttgtctattcggtaagagaaggccgcgaattgctgttcagacgagcttgccgaagtcgtgtcgtcgtttagattttcgcatttttggaattttttggacgagagaaaaggatttatcgattggtcaattttaaaatttattttttttttgagttcgaaatttaattctaattaataaacaaaaaaaatttaaaaatctttcttttgtaccttaattatattttttaagatatgttatcataatttttaatatttttctaaatatttaaattgatttaaaaatcaattcatcagttagcttttttgttgtttttaattagataaaattattcaattactttttcatgcattagtcttgtttgtaaaaatatggatttagttttgtcaaaaaattatttttatataatttattaacgataaaaaatttttacatttgtcttttagtatttttatttgtttgcaacttacaataaagtacttattccgctgttataataacgtattttaaatagagaaatttttgctactgttcaaaataccaaagttaaaaataatcgactcatattgaaaaaattgcataataagcgttataaatctcggcacgcaaagaaatgcttcatttaaattgtcccatttttgaagaagccctatcaattcttgccttatttagtccctttcggcgcattaa

SEQ ID NO: 58365 - DNA, 660 bp, Heterodera glycines
gttttcggggcagtccccccgaaccgatgcgcccagatttatggggagaccgaatccttcgggaatagcttccctatagcctgtactttaattctgcgttggatttttgctccccataattgtttgagtaccccaaacggacacttgaaaaaatcgatttttttgttttcggggcagtccccccgaaccgatgcgcccagatttatggggagaccgaatccttcgggaatagcttccctatagcctgtactttaattctgcgttggatttttgctccccataattgtttgagtaccccaaacggacacttgaaaaaatcgatttttttgttttcggggcagtccccccgaaccgatgcgcccagatttatggggagaccgaatccttcgggaatagcttccctatagcctgtactttaattctgcgttggatttttgctccccataattgtttgagtaccccaaacggacacttgaaaaaatcgatttttttgttttcggggcagtccccccgaaccgatgcgcccagatttatggggagaccgaatccttccggaatagcttccctatagcctgtactttaattctgcgttggatttttgctccccataattgtttgagtaccccaaacggacacttgaaaaaatcgatttttttgttt

SEQ ID NO: 58366 - DNA, 380 bp, Heterodera glycines
atgggtagcagaaaagtgggaatgacaatggtcggagaaaataacgaaagatggcaaatggacgacgaacagagaaaggtgacaaaatgcacaaaaatgggccaaattaagggaaatttggacaaaaatgggccaaataatgaacagaaaaattggaaaatgaaaaaatggaaaaataaaaagataattatttaaattaatttgaacaatttgttcagccaaaggcattgtcaaatgttgacgagaaaagaatggtttcactgatcgaaagcacaaaaagcgcaaacattggcagaaaagaacgcgcacggacaatgccaacgaaaagcgtttcattttgggacgacaaaatttaaaaagataaaaaaacaaacaataaa

SEQ ID NO: 58367 - DNA, 776 bp, Heterodera glycines
atggctgtgccgcccgcgggacttggcccgggcaccgctggtgccgccgttatggaatggttgcgcaaaaaaacaatggttagtgccacgctggtctcggtgatgctgggcgcaatgctcggcaccgttgtacggcaaaattagaaatagatgattgatcaacaattaggctttttgatcagatgggctagtccgtaaaacggaatcctaactctgttgatcatccaagaccattggttggcgttaaaatcattttgataggatgaataccaaaattcccgatgcagactttttgacattatatagtgcaaataagggagagaatgtcagtaataatgtagttaaagaatttagtctatcaaaatttgattcaggatcaggagtttgctcttcaagtcttttcctaggaataattattttccggggttcatcggtctcctgtggtttggatggcgctaggacttttcgacagcggacctttcgacagaaggacttttcgacagaaggacttttcgacagcggacttttcgacagtgaaggacttttcgacagtacactaacaaatcaaatttttcattaaaaacaaataatttctaataattaatcttgtttttttattttattatttgtgaaataagaatttttaattaaaaaatatatttttataaattactggtttataaaatatcttaatttagcggggtttaagaaggcattttagtttattgcactgcatttttggagttctcatgaatggttttcttatcaataataaa

SEQ ID NO: 58368 - DNA, 596 bp, Heterodera glycines
acgcgcgtaccccccccccccccccctgggacttaccctgcttcccaccttccatttctctaaaattgcctttaccctccatttgcaaactgtaggccactgattgtccaattttgtgccaatgatccgcaaactttgctgagtgcgtgccgtttggtggagggaaagtgcgacggtgttgacctgaacttgggctgccctcagctgatcgccaaaaaagggcgttatggcgcatttttgcaggtgaatttggccggagaaaaaggcacaaaaaagtagcggacccaaagaataaagaatgttatggacatgctaaaatttaacgagataaaaattggaccatttacggtaagatctgaaaaaaattaaatcaaattatccagtagtatcgtaaagtcaaagaatcctttttgattaaagattttttaattccgcctttttggttttcttttaaggagtctcctgaactgatcgagtcgatgatctccgctgttcatcgccattgtcaccttccaatttcggctaaaattcgcgtgctgcacaatttgtcttcaaccattgaatacgcacgacggattgaagcggcgggggccagg

SEQ ID NO: 58369 - DNA, 801 bp, Heterodera glycines
atggacggctccaccagtaccaccaagaggacccaaacggaaattgatacaaacagaccaagcgccagaattaaagcaaaaatcacaaaaactcagaggaatgagacaggcgagattcagggagcaagaaggattgatgcttccgtttccaacgaggggagtcaagcggaagtcgacggtcctgccaacagtagaaacggaaatcccaaccaaaagccagcgtctcaggccacaaaaatggaaaaatcaatagaaaatgtgttagaacgcctctacaatgacccaaaatcccctgctgcgttcgccggtgttgacagactgtggctggaagccaaaaaagaattaggaaataaaattcgtaaaaatgatgtaaaacattacttggagggacatcgcacctacactttgatgcgcccaaggcgcgtaaattttctgcgcgctcgaacgactgcagccggttttatgaccgattgtcaggtggatttggctgactttcaatcactttctcgacacaacagcggcaatcgttatttaatggtggtaatcgatgtcctttctaaacggattttcgtaacacctcttcgtaccaagaaatccgatgacatggtagaaggctttaaacgagtgttttcaactatgccaatgaaaccacacagaattttctccgacaagggtacagaattcagaaatcagcagctgaaaaaactttttgatgaagaggaagttgagaaatatgagagcacacattctgagaagaaagcagcattagccgagcgcgcaatacgacaaataagaaatcgg

SEQ ID NO: 58370 - DNA, 407 bp, Heterodera glycines
atgtgcgaattttttgcatacattgcgttaaacaaaatgtaaattaaagaaagacttgaatcacttatttaaatataattaaatataatttttacattttttagtttatccgttgttgaagagcatcgaattgaggaattggtgaatgagacaaacaaatccgtgcttgatgtgaacgaacaaagctgaaaccattttgggaagggatcatttggacagaaaaacgcttggcagaagtcgactaactcataattttagaaaagataaacaaaagagttgcaaaaacttaattatcaattagggaagtgctcgcaatgaaaaatgataaattcgggattcgtagcgaaaaaaataattgaatttccgtttctcgcttatttttgatttcggttgcctcaactaataaa

SEQ ID NO: 58371 - DNA, 3093 bp, Heterodera glycines
  unsure (1)..(3093): unsure at all n locations
atgcgggcggattgtgtaaatgcggtgttgaaatgtcggatctgcgcacacacccgaaatccaagggcaaatgcgccagaattaagaccagtgattacggcggaaccttttgagctaatatgcatggacattttatcaattggaatgtcagaacggggaaatcgatatgttttagtaatggtggaccattttacaaaatatttgatcactgcagcaattcccgataagagcgttgaatcagtcgcaaaggcttttgtcgaacaattggtgcttgtatttggcaagccaaaacgtattcattccgacaagggcgctgaatttgtgaataaaacaatggaagaaatcagccaaattcttggagttgaaaagagtacaacggcagggtacgacccaaatgccaacggacaagcagaaagggccaatcaaactattttaaatatgcttaaaaggtcaactgattcaaattggtcctgggatgaccggctgccttttgtcacatttgcttttaacatcactccctctgaaaccaccggattttcgccttacaatttactttttggccggccagtaaattttccgtcgtctgataatgttaattttactgtaaatccttcatacacaatcgatgaagaaagttatctgcagctctttcgtgaaaatttgttaaaaattttggaaaatgcaaaaaataattcggacaaatcaagagaacgaatggagaaatggtttaattcgcagccaaaagtgactttgcagaagtaccaaaaaggcgaacgcgttatggttatttttccgggagctaacaaacgctcaacacataagaaattaaagtggaatatctttggaccctaccaaatcctcgaaatttccaaatcctcggcaaaagtaacgcctgctgataagaaaaatgctgatccaatttgcgtcccattagaacgtctgatcagagcaccggatggacttcctaatatttcaacaactccgcgcggcaaaaatgcttataaaaatgtgttaaatgtgatgactattttgatctttgaagaaaaaagcatggaatttgaacaggaaaattttttgggaaaaacaaaaacttcatcagggacgatgaatttttcagaggaggaggaaaaaatggacattgccgaagcggagattaagtggacgatgacatgtgaaggcggcggacatgtgttgtgcaaaaaattgttggccggcgatctcgaccccgtgctcagcaaaacacaaggaatcggtgctatggttgtgcagactccattacaaggactcatcacactattcattttgcggtccaatgtttcaatgtctgcgtcgaaagatttgctgaaggtcgcaaaccaattggaaaaactgggtggaattgctaaattgcaggccattttgacttcggaccctgatttcgaactattaaaatatgtcgaagaacgtggtgatgctgtgcgttcgggaagatgcccgggaatcgaagaagtcgaaatcatttggaaaaattgggtcagcagttgcgcatctgcacacgaagcattgaaacgcacgggatttggccaaatatgcttagaagcaccaatttcgctttctgagctgccggaagccgacagaattggatgggaaaaagtctttaatgctggcacatgggcattggagaaagtccgcgcaaccgttgtttttggcaaaacaacattggtccatcagccgagagtgatcattggagactcaagtgctgcgcaactttgtggcgaagcaaataaccaaattgttgctcacttcatcggcaccgtacaagggacattgggcgacgtgatccgcgcattggacaaatcagtactgacatcaaaagtcacgtcggcactgatcatccttggaagagatgcactgatcaaagggcagaccgtagcacaaattatggaagaatgtgaacgcatcaaatcaatttgcggacaatttgaacacgttcgatttgtgtggatcccgcctccgtatgtgcgtgaaaagcacgcacagtacaacgaattgattcctggattggagcgcattgccgcagaatggttcattgcgctgaccgagaatggcaggagtttgattgagatgtggagattcggagacactttcgacatgacacgggtgcgtgctgacggaaagattctgcctgaaggactgaaatgcctcagggcatggatattcactcaaatttctgtttttcccgatgacaatttccttggcattcgtcgttcttctcgctcactcccttctgtacccgctcaattttccgaattgtcaattcatcgtcctcatcaattttctcggggtcatcgggtccatccatattctctccagccaagctcaagccgcaacactcaaagccgcagtgatgggaaagcgtacagtagccgtagccgtcgccattaagccataaatgcctttgaccccacctttctgttctcaatttctcaattttcatatttattgttctaagacgaggggaccgtcttcttcagaggatgnnggatgtggtacttaattgaccttttgacttcttttatgttttgaattataattatttattggcgttttgttatctttttatggaccttaaaatattagtgagtcttttttactgttcgtttcttgtttggtttttttgtcttgtcttctcttgaattgctttgaatttcttttgatgctgacttcttctcaattgattgttgtggtctcgtctttttaattattattgttgcggtttaaaatttatcgccgtaaattattttgttttgtttatttattaaagtgtttgcgaattcgttttgaaacaggtgctgacaagccgacagataattgtgtttgatccatttctgaaaagagacaacccatccccatcaaccattttatgaccctatttaagtgcgttcgtttgtttaatttaatttttaaatgctaaaaaaaactagtgaaataatatataaatcaaatcacagcttttgaacatgaaatatgttcattccctgcaaataaccatgaacacagaattctaacaaattcaaatttttgcttaaaaaaacataatcacaaaaaaaaata

SEQ ID NO: 58372 - DNA, 1206 bp, Heterodera glycines
atgctattcgacgctttgaatataagcataggtatggatggattgcttgatggtgcttaaaccctttcaattgaattaattagtttccattttgggcgtattttacacatttaatttgactctatttcattttacacgacccaaaaaaaaacagaattggggttaaaaatttaaagttttttgttgcaaaaccaaaggggtgaccttttgatttacaaataaatcggttttaaacgacctaaaattatgaaaaaatgtaaatcatcaagggcgggaacttccgacacatactaagtttttttgccgttccttactctacataaatgctaaaaaaaattcggttttttagggctctattacagatcggcaccgccggaccgtaaaaatccttaatttacaagcaaaaatttgctcaaaatcgcaaaatttgtcatttttcggacaaaatctgttaacaaatcgcattgaaaattacaaaatttttcccggcggcgcctatcggcaccgccggacccccttgcgccccaaaagttttttggaaggcgccgcaaaaaaatcaacttcgtttttcatgttcagaattccaaaaaatgcttatttctaacaaaaaaaaatgctcaaattgatcatggacaatcaaaaatataacatttgaacattttaaacgtgttttgatacattttgtaaaaatgaggctttttgacccaaaatgaggtttttttgcatgccaaatgaggcttttgaaaattttaatctggcagccctgactatgtatgtgtattaatagaaaatattcatgaaaattttgaatttctttcatatataattatttttaacaaatttcaaaaaatctttttcctaataagattaattttctcaaaatttgtttataaaaatagctttttaaacatttcaggacttgatatcaaaggtgtgggaaatgggaaacatatttgtatttacactcttcttgaaggggatagtcctttggatctttttacgaaagatgggaaaagactatgtggtgaggattactcagaaatagaagaggaaaaagagttgatggaacagaagaatgacgaaatgggagggacaagcaaaaagaacgagaagggagaagaggaagcggagtcaaagaaagggaagaatgccaaaattggagagacaaatggtaaggaaaagaagaagacagacacgacggcatag

SEQ ID NO: 58373 - DNA, 378 bp, Heterodera glycines
atgaagagaaggaataggagaggagaaagagaaggagaagcagaggagagaagaagagaaagaaaggaaaaggaggaaggggaagacaagaaggaggagagaaagagaaaagagcaggaagaggagaggagagaagaagagaaggaatggagaggaaaagaggagggggaagacaagaaggaggagagaaagataaatgagcaggaagaggagaggagaaagagaaaggagtaggaagagagagagaagagaaagaagggaaaagaaaaagagaagagggaagacaataaggaagagagagaaagagaaggagaaggagggaagacaagaaggaagagagagaaaggagcaggaagagagagaagagagataatgcca

SEQ ID NO: 58374 - DNA, 602 bp, Heterodera glycines
gtatcttgaacgaattgcttatgacgtggtcgtaagttacccttttcttccgccaaatgacgtgtggggagaggccaaaaatcccgccacaggttatacctcctctctatcataaataaatattgttgaatgttcaggaaaatgtatcgacacaatgggccaagcggtgccagggacaatgggcgccacgccatgccacggatatggcggaaaccaattaatcaaactgaacacggagggacaaatgacgcagggggagtggtgtaagctaacaatgcgggggagagattggtttaaactcattaaatgttaattaaggcattagacctactgacggatggggagggcggctgcggacgggccattgcacgaagggaacggtggacggaccgttcaaatacgatagagtgagtgttgttgtgtttcggatgggaaattcctttatgctataatgtttacaggagacgaaacaaatccgcaacaaacaatcggggaaatgtctcgtcgtcgagaaggacccgtcctcctcggtgctcactttttcggaatgcgatgcgtccaacgaattgcaaaaatggcaatgggctgaaaaatttgcataa

SEQ ID NO: 58375 - DNA, 1791 bp, Heterodera glycines
  unsure (1)..(1791): unsure at all n locations
atgttgggaatattttttctctttgctttatttgccttttctgatggagtattaaaagcacaaaaatgcgaagattgctcaaatttgaatcggttttggaccaatctctgtaaaaatgccgtgccaatgtttaaaaatgccgtgaatggggtacaaaaatttgtgtgccgactgagtcaactcgacgaattattggacatcattttacaagtggatttcgagaaatcggtgagaaacagggcttctttttttgtaaatacatatttttcctggattctccatggtctaaatagtaggaaaacatttcttttgtttgcgaacgaaaattgggacttttatttgtatattttttacatttttcatggtttttctacatattactatgaagaattttttccaaaaataatccttttaagattttatttacttatttcgcgatttttattacataaaaaaagaagcccagtaagaagttattattagggatgcgatttttaggcaaatgcctaaaatttttgcgcacttgatacgcacagataatcacgaaaaacgcattttccgctagatttggggtgtttacgatgacttttataatgcctaacgttgcctattttgggagtttttgtgcctaaggtgcctaattttagggtttttgaaaaaatccttaacaaaatgcaataaaaacgaaaaacacacccctaagaaatgaccaaaaaaaaattcagaaaatacacccctaagaattgaaaaaattttcaaaaaattgatcaccaaatttactatttttttcatgataaaaatttttgactaaaaatttatccttattcaaagaactttaaacaattgaaatataagcaagtttaagtttttgattaagtttttacgttgctacctaaaaaaacgttnaataaaaaaattctatnttgcctatntaatgactatttcgcgattttttgtgcctaaaaaatcgcatccnntagtttatttaatagaattagaacttattttatttttttaagtataaaattgaaagaattatggaatacgccaaaaaagaagatgcccaacttcacaaattgttgcaaaaattaattgccgaatttaaaaaaataaaccagaactaaatcttttgtgtaagtgtatttattcgtatgtacatatgtaaataatagaaatgaacattaattttgtcagctaattggtgactccaattttctattaatggtaattagatattaaattatttaagaccctcttggggatgagcagcaatacgacactgttcactgttccgtcatagaaagtgcaaattacttggagcatcgctttggcattcatttggtcgaactttggcacaatccaacggaatttggcgaaataaattcaaaaattgtgccattgattaatttggcacgaaatcatctcataggagacggacaaaagcagcagcagcaaaagaagaagaagaggacggaagacagtggaaaagaacggaaaaaagaaggcggaagaaaggacgagcaaaaacgaacagtgccaacggaggaggggacaaatagcacggggactaatggcattttggacaattggtcgaatttggcggggcgtaaaggtctaagaaacaaaaattaattgaatcattaacagcgttttcattcttcttaattccccggcattttcagacaaacaaagaaaaacgactcttcctttgattacttttttggcccgggattttatacgattttggtgctgtgccttttgacttatcttcttagtttcattccgcggtta

SEQ ID NO: 58376 - DNA, 857 bp, Heterodera glycines
atgtatgaacttctgcggcaagcgtggccgacattctcgccaacttcgtttgccattgactttgagacagctgcgcgaaacagaactgttaatgcgttccctggatgtgcaatcaatttttgcttcttccacttcgtacggaatttgcaaaaaaaaattaaggagcaaagtctctggcaggtacattaacattttctattgaattatttaatctgcgtatttttatcgctattgcgcggatgcggtatttgcagaaacagtcagaatgttgacttcggtcgcatttctaccgctgagtgacatcagaggacagctgtcatcgcattagacacggagtttgggaacgtcgcggcactcagaccgctcattgactggttggtctcatcattatcagaagtgtacttcaatttttgtgcaatttttaggttgctcaacaattacaaccgcgaccaaatgggacttggtctcaaccactcttcccaccagaacaatggaacgtctacactcgaactctgaatggagaagcaaggacgaacaactacgcagaggcagaacaccacagtcttcaaggcgccttcaattgccgtcatccatcgatctggcacttcattgacgttctccgccgtgagcagaagggcaccgatgggaagtatgcgtcatttattgctggacttgagccaccgcagaaagctaagaaataccaagtggctgacgagcgaatctttaatttggtgcagaattataatccggtgaatccaaactatgacaatgatcacaattaccacataaatcaaaatcatcatatcattttggaatttcttcgtggcatttcgcgcaattatcatatgaacccgtga

SEQ ID NO: 58377 - DNA, 1981 bp, Heterodera glycines
atgaccgtcggcggtgttccggaggcgatcaaagatcactgcgagagaatttgccttttggccattggaatggtgctttcttttcttaattgttttctgtcactattaaaattctttcgaagatttgggaggcacgttctgtgattgacccgatcagcaaaaaagggctcaaagtccgttgcggattgcactcggggaatattgtggccggagtggtaggcgtcagaatgccaaggtcgggaggcaatccggcacatttaagcgggagagaaatcggtttaaattttgaattttcaaagattttgtctttttggcgacaccgtaaacactgcgtcgcgaatgttaagtcattcgccacgtaagttgatcaaattcaaaaacgaactgattttggaaaggaatttcattttcagagggtttaattcactgcagcgaaacggcacttcggtagaaccattttaataattgaaaaatgatgacgaaaaaactcaaaagttcggcacaacggacgggacgattcgaatttatgtgccgagggaatgtgcaaataaaaggaaaagggccgatgaggacgttctttctgctcagatcgttcaaaaagtcactttgggaaattgtcgaaagggaaagaggtgaacagagaaaaggaaaagacgaaatagcatagggaaaagataaaagggaaaaaatagagaaaaaagacaaaatgaaacaaaagtgacattttgagatgaaagtacgaacagcattgacggatacgaagaactgacggcacaaatggaactgaaggggaccaaacaaggcgaaggcgtagccaaaatgatcgaaggactttttgacgacagaaggatggacagacggtcgacaacgtgcgcaatgatgtgacaagaaaggaaagaatgggggacaaatggacacgaaagggacaaatggacacgaaaagggacaaatggacacgaaagggacaaatggacacaaaagggggcaatggataaaggacatgcttttcaagaaatgtctcttgtcaaaaactctagcataattgaatttatgaattatatgtattaaaattttatacaaaaacattttttgatagaaacaaataaatgattatttttaaatgcaaaaactatgaatagacaaaatgtgtaagtaattctaacattttctgggcaattcacagggaatgtgagcgaaagaagcgaatggtcaaaggaaaagcattggcagtgcgatgttttcgtttctctgtcccccccctttttttggctaatttctgctgagtttggcctctcttctcctccttttgcgccgttcatagtccggcaaatcgcctcgtttggccactctgtccggatctgcgaatttcaaatggacattaaaacatttggcggaccatttgccgacctttcagctcattttggcacgtcgccccaaggtaccccggcgtgcattggcactttccgttctccgcgtcgcatcgtgcgccgttgtaacattcgcattgtctttggcattctttgccgaagaaaccctcggggcaaactgagcaaaaagtgtgccattgaatcgtgtgaaccgaggcaccactgatcgaacaaaccttcctcgcaattccttccgattcgtccgggagggcaatcgcaggcgccgctgacggagtcgcaaccgatggccgagggggaggacgaagcggacggaagatggccacactcgcaacggagaaggcaatgggcaccgaacgagcccaaggggcacaactgttcacacttgggggaggatgttcaaaaaagtatagttggcattccgtttgattattttaagcaacggaaagccacaaaaattcgtgtcaactcacgtggtcgccatggaagcccggaggacacagacattggcccgtcaccgggtcacagctggcaccgttctgacaatggcacgactcggcacattgcaagccgaattgacccggagggcattctaa

SEQ ID NO: 58378 - DNA, 2536 bp, Heterodera glycines
atgtccatgtgagtggtcgagaatctcgaccctcaaacccacccaaagtgatgcccttaatagtttcttattgctattgccactttccatctttagagtgtcccctcgggctgttcggtcccaattgcctttcccactgtctctgtgccaacggtggccaatgcgacgcctcccgcggcgtttgccgctgtgccgccggttgggccggcgaaagctgcgaattccgttcgttttcgcttaatccgcacccaaatatggcttttcccctctctctctcagtttgtccctttggtcttttcggtttgaattgctcggagaaatgcgaatgttctaatggagcaaattgcaacagaacggacggaaaatgccaatgtttacctgggtggcagggaaaaaggtgccacaaaagtgcgtctttgtgctgctggtaatttcgcaaacaaataaatcagatgcgatcagccatgccccgagggcactttcgggttaaattgttcggaacagtgccaatgccaaaacggcgccaaatgccatcacatcagcggacattgccaatgcagcgcggggtggcgcggtcgaaagtgcagccggggttcgaattaatccgataaaaatccctaaagagaacattttgaagcatgctcgaagggatttttcggccaaaactgtgcccaaatttgccaatgtccgtcaaaaggctcatgcgaccatatcagcggacaatgcgaatgtccgaaaggcactttcatttttttaaatatgaactctcatcaaatagttcaggtctgacggggtccgcatgttcagaggttttcccattaactctttttaattatcattaattaatgctttttaattcgtttggtttaagcggggccccccgggcacatttggcgttgggtcttcccaaaagtgcacttgcgggccaaacgaacagtgcgaccccgaaacgggcaaatgcttctgcaaagcgggacaaatgggcaaaaattgtgaaatcggttagcaaattcacaaatctttgaaatgttcaaacagtagccgactgtttgtttctacagtatccttttgcaattgaatggttttaaggttgccccactgggaaatttggcgtcggttgcgaggaatgccaatgtgaaaacggcgcccaatgccattccgagacgggcgagtgagtttttctggcccatgggagttagtttcattttgttcctctccagatgcgcttgtccccccggctttcttggcacgcgttgcgaagtgccgtgccccgccaaccgttacggcccatcgtaattaatttgatcattgctcgacccatttaaacttttttcctgtcacttttttctctcaccattcagctgtgctaatttgtgcgactgccaaaacggcgctcgctgcgacccgcgcagcggcgagtgccgttgtgcgcccggcttcacggggccgcactgcacgcaaatgtgcagggccggaagatttggccaaaactgcaaggaaaagtgccaatgcgaagatccgacaaattgtgacccaaagacaggccaatgcaaatgcgggtgagcgccaaaaccgaagcggagaatattactgcgattattttatgtcaattgtttatgtattgccattccacgctttccctatagctccggttggattgggcccacctgtcagcagcagtgtccccaggggaagtacggcttcaactgctccatggaatgcgactgtcacggctcggccgggtgtgacccgaccagcggctgctgtcattgtcccaaggggcggtacggctttcgttgtcagttcggtacgtttcactttggcctcctatgcccttttccatttgaaatttccttagaatgccctccgggtcaattcggcttgcaatgtgccgagtcgtgccattgtcagaacggtgccagctgtgacccggtgacgggccaatgtctgtgtcctccgggcttccatggcgaccacgtgagttgacacgaatttttgtggctttccgttgcttaaaataatcaaacggaatgccaactatacttttttgaacatcctcccccaagtgtgaacagttgtgccccttgggctcgttcggtgcccattgccttctccgttgcgagtgtggccatcttccgtccgcttcgtcctccccctcggccatcggttgcgactccgtcagcggcgcctgcgattgccctcccggacgaatcggaaggaattgcgaggaaggtttgttcgatcagtggtgcctcggttcacacgattcaatggcacactttttgctcagtttgccccgagggtttcttcggcaaagaatgccaaagacaatgcgaatgttacaacggcgcacgatgcgacgcggagaacggaaagtgccaatgcacgccggggtaccttggggcgacgtgccaaaatgagctgaaaggtcggcaaatggtccgccaaatgttttaatgtccatttgaaattcgcagatccggacagagtggccaaacgaggcgatttgccggactatgaacggcgcaaaaggagg

SEQ ID NO: 58379 - DNA, 994 bp, Heterodera glycines
atgacccgaatcgcacagacatcgacgagtgccgcgagggcggctccgattgccaattcgcatgcgaaaatgccaacggcggatttcgttgcttgtgccccgagggaatgcaattggccacggacggacgaagctgcgaaccgtcggaggacttgtcaaatggtatgtgaagcaaagcgaaaaaataaaaacgaacgaaaataaacggtaagtcaaaaacagcggaatgttacggtagggtgcttcttgcttctcccttctattgctgggagtaatattattttatttgcttatttgttatgtttaatattcctcaaattaactctttcttctctcattttttatttattttttattttccgtttttatttttcctttttcagttgcccttttttccttcctccgtttgcttttctcagttattgtttgtttctttagagcttttctccacaaatgtgctcttccatcagcagaatccccccacctctgaacggctcaaagttcgcggcgtcgccaaccatcggacgaattcgcaaaaagcgaacaaaaaaagtccgaaaaaacgctttttattttgatttaaccgccatttaacttttcaattgttctgctgttagttgcctttgcttcacaattgttgctttagcttgtgattatggccgcttcggcgtgtcgtgcgaattcacttgcgaacattgccaaaatggcggcggatgcgaccggacgaagagccgttgcgtatgttcgccgggatggcatggtcagtttaaaacagtgaatgataagaaaatgcagtggcaatcatcatttcggcactttctcaggcgaattgtgccaatttccgtgcctcgagggcacttttggccgcgggtgcgcaaagcgttgccaatgcgacggcggggtgtgcagtgccatcagcggagaatgcctttgtcccaatgggacggaatgtgccgatgactgtccaacgggtggagaaaattagaaaaataaa

SEQ ID NO: 58380 - DNA, 383 bp, Heterodera glycines; identical to SEQ ID NO: 51114

SEQ ID NO: 58381 - DNA, 271 bp, Heterodera glycines
atgtgcacgcgttccattggtaccggtggtggcattgaatgtgccgaaaatggagacgctgcaattgcgcctcggacgaaacgacggcaacaaacggacgacgacgaagtgccgcaggggacggtgacacggagaacgacgggcgatcggatcagagatcgggacggatttagacgcagagcggtgggaaacattttttaaattcattttaaatctaaaaataaggtttttaaattttcagcggcgacgtatttttttgattgtaaagtag

SEQ ID NO: 58382 - DNA, 364 bp, Heterodera glycines
gcgaactcatcttggacggggcctgcaaagacccgccgattgccatcgtcgagccgaacacagcaaatgttcattccatcgaggcgttggaggacggcgccgctttcttcgaccttttggtcccgggttacaacgacagtcgctcgtgtaattattacactctgtcggatgacaaggtgtactgtaatgccgtatttctctgtccactcattggttcgttcctttgttctttcaggtcaatggtaaaattggcatcggagacttcgtttggttggagggttcagaagaagtgcctagagaatttaccatgcaacagcttcgtttcgatccattccttatgtcaaataccaacagattcgattga

SEQ ID NO: 58383 - DNA, 312 bp, Heterodera glycines
aaaagtgctatgagcacaaggacacagtggtgccaatgattggcagagaagtgccaaagttgggcggcggtggtacggcggacgacgtgcggtgccaatcagctgcaattgacagcggtgatcagcaacaacaacatctcggcgaccgcattgcgttggacggcacttcgattgggtcggccgaataatgcaaatttcgcaattatttttttaacttttttcagttttcccgtcaaaatgttggcccctttgctcgtcgccaaaggctccaatggaaatgggacgccttttgagatcaaagtactcttttga

SEQ ID NO: 58384 - DNA, 827 bp, Heterodera glycines
atgtcgaaaaaagctcggcattgcaggtgccgcaaaagacgacgacgacggcatcattacggtgcccatttcgcgcgttattttcgcgcagacggcaaacggttggtgaggcatcgattagtccagcattttaaggacagcatcgagtggtgaccttgaatttccaaaaaaaagaaaaattttgttggtcttacttataattacaactgccgattaaggtgtgagacaatgacggattctgttccgtgattttggcagtttcaaagtcccattacggtatttaaaaaaaaaaattaatttttcggtatcctcggttttctcaatcctttaagccctagcagatgatttgagaaagctcttttttttgcaaaagcctggctaaaatatgcaataattcaaataatttaaaatattttcaacagcttgaacgtagcgaatttgacgaggaaaatgaaatttcgccattcaaccgccagcaacagttagcgcctgaagcgctcgcttcggttgcgcgtccgtgccacaacacctccttgcgcgtgcggcatgcgttggctgatgcgcgcgcattggaatgtgccggaatgtcgcacaaaagggcggaagtttgggtcagcgttcacgcgttcaaacggatgatgagaaaagcggaaaagaatttgaaagtgaagaaagaggagaagaacgcaaaacaattcgccaaatgaatcaattaaaatggcaacaaaaagcatgtgattgattctccttttgtccaattaaaaatgccaatacccaatttaaatcatttgcacaattatattcagcattgaaaaataattgaaaaa

SEQ ID NO: 58385 - DNA, 1899 bp, Heterodera glycines
atggatgatttttacattgtaattccttcaaacacacctggtccaggaaatactgcttcaaattttacggttagacttccgcacaccttagagcttgactccaaatggtccgtcgcattatcagcaataatctatccatattcattcccgtcgatcagtgtggacgaggatgactctatctctgtcaaactggttaatcctaactacagagaagatgccggaaattctgacgtggaatcgcaaaagtttatcaatttgtcagtgaaaattccaaatgtacaattccaaagtgtacaaagtttacaaaaaacactgaatcagataatccagaatgcttacgataaaaagtttggcggctcatccttaaatgatggtacacccactaaaagagccaaacgacaaaccgaattgtcagaatcaggcgctggagttatcgaagtagagaatttcttcactcgaaatccctttgactactggcaacagattggagaactgagaaaaaaacactatcagctcagagaaagggttgaaaaaatgacaaaggagtacaattcaacagcggatgacgaacgaaaaacacttctttcgacggagcttggggtctttcaggggcgagaaacttttctgaaagaacatttgcatttgattgaagaagaggcgaagagaagggacggtgagcagcaagaagccaatgaacaaagactcattgaccgtttctttgcccgataccccgacaattatagagagcagctggacgaatggaggtcaagttacctccgagatgtgctagatctacagacaaagatgggagagtatgaaggagttaaagatttgaaaaagcttgaagagctcaattcacaaactgaacgaatgagaaattccatacacgtttttggaagaaagatggaaatattaaacaacgcagcattgcaacgtgatcagaaaaaatctcaagaggattttgaacgtttaagccatgaacaaaacctaaccttcgtccaagaattcttccaagccaatcctgttaattactggcaagcaatccagaaaaattatgaagcgcttcaacttgagtacactaagaagagggaattgagggaaaagcttgaatttgaaactgacgcaacggaaagggattcgctgcagcgacaaatagagagcattcaacggctgattgactacaggcgtaaacggtttgcagctttggaatacgaggctaaaaaaagagatgcgcagacagggaaagctaactcaggcctcagtgctgtagctgaggggtcaaataggactagctccactcgaacagactccttttcaccagatgagccctcaaacccagacgaagctatcaatagtaaaaataaccaccaaaacaccaccactactgccaccgctattttatcatccgagacgccagctgaacaaaatttagcagatcaagataatagtattgctgataaaaatgaactcggtacgccgccattaagtggattagaacagtccggtgatgctgctacatcagtgactcaagctgaagatggtggaaatttacctcaagcagccgcgttgtcttccaataacccaaaatttgttgttaagcaatcaacggtagcgacagagagaaggaaggagaaaataattgaaaagctgattgacgaacaagtggaccgaatggtcgatggaacacatgcacagcagaagatgttacaagaagaaggtaaagacaacgatagtcaacaccgcatttcaacatataaactcatcgaagaagtgctccacggagagcatgggcagttaatggtacaacagcgtgaatccaaaatggcagctgaatttgcttacaatgaaataactcagcgattcggcattagaatgggccccaggagtaatgcacgttga

SEQ ID NO: 58386 - DNA, 364 bp, Heterodera glycines
atgaaccgacggtaaaaggattttaaaagtcacacaaattcgtcatttatttaactaaactgtttttccataatttcagttggatttgcaacgacgtttggatggacattttcccctcttttgaccgtcctcaacttggtctcaaattggcacttctttcgccacgtttcaatgcgttggtggacaaacatttcaatggcaaaagcgaattgacaatttggagaccaatcgaaattagcaaggacaaaggacctgaaccgaagctgtttgtatggttcgattacaaatgtgtgccatttccattgcccgaccgtccgttgcccagcaaaatcctttttaagagccttgagatttagtaaataaa

SEQ ID NO: 58387 - DNA, 390 bp, Heterodera glycines
atgaaaatagcattggggaaggaggagagacggaagagaaagagaggaaaaggaaaaattcgacggaagaaggagggggagaaagaggaggaaaaggatgaaaatagcattggggaaggaggagagacggaagagaaagagaggaaaaggaaaaattcgaagcaagaaggaggggagaaagaggaggaaaaggatgaaaatagcattggggaaggaggagagacggaagagaaagagaggaaaaggaaaaattcgaagcaagaaggaggggagaaagaggaggaaaaggatgaaaatagcagtggggaaggaggagagacggaagagaaagagaggaaaaggaaaaattcgaagcaagaaggagggggagaaagaggaggaaaaggatga

SEQ ID NO: 58388 - DNA, 380 bp, Heterodera glycines
atggaattgaatcttagacattcaccaatgaaatgttggagtttataacgaaattaaatttttagttccaactaaaactctggcagctgtaaatgaaacactgttgaggaatgctttaaagctggcaacaaatttcgaatactgttatgcgaaatttgtggatatttgaaggtttttaaattggcatcgcctttaaatcaatccctttttgtgggcatttcttgtacatgaaatattttgaatattttaaaaacccatttttctatcatttttagctgttttctaaaatgagtataacttatatttaaaaataagctggctgaatattgtcttattttattcgattctttggcagttttggcgcgttttctgctaataaa

SEQ ID NO: 58389 - DNA, 893 bp, Heterodera glycines
atgagtcaaaattcggcatcgccagcatcgatgccgtgtacgagctggaagtggagaaagaaacgaggaagacattcctcggaagcagcattgccgatggcgatgtggaggagcaatgggagtaagtgaaaaattttttgttaaaacaaaataatttcctttaaattgatcgtttttttctttttgtttatgtcttgcctatcccaaacggccctctttagtagagatcggaccggtcggtttttttttcggtttttttcggtttcggtttttttcggttttttaaccgaaaccgttcgaccgaccctcttgtccggtctctactctttagggctgtaatcacccaaatggacggattgacatgcatttttttattttgtctttggtcttataaattgaatataaataataaatggcacacagcttgggtactgaccaggaaaaatttggaaaatacgttatgagatcaggcccctttacgataccgaaaattttaaaaatttcttattggagacgacaggcggccatcaatgtcacatcggtgaaaaacaatggcggaaattggaaccgaattttggaaccggcccaggggcgtagcagcgtcggggagggggttgttccccagaccacccgtactttttgtactctggtgcctaaacggcattaaatgaacatatgtatgacaaccatgcttttcgttcaatgacttaatggtttagaaaaataaaaaatatattcctgcagaatttcccaggaccacgcgcatctttgtcataccggtgattaaatggcattataatgacaaaatgtccgacagtcatgcttttcttgccatgatcgaataattaagaaaaaatcccatagttgttgagtaatttcccaagactatgcga

SEQ ID NO: 58390 - DNA, 297 bp, Heterodera glycines
atggcacctggagacaacggcatcatttatgatgttccgatggttggcgtgtccgtcggcctgtcaagaactggaagcaatggcggcatagtgttcttcgaagtggtgttagccgacccgttctacaccaactcgtcgaagggaacgacatttgtcactgccggtggcggctacctggacatacacgcaacggattcacttaaaaatgcgtacggcgccgccaaagtgatcatgcgcgaacagcgcaacaactacttggacaaagcgcatttgcatttgaatgttgtggcagcggcg

SEQ ID NO: 58391 - DNA, 425 bp, Heterodera glycines
atgtgttcaatcgcttttactctctccgttggttcactattaaatattcctccaacaatttcgcataaacacagcggcccaattttgggctccaagtacaattatgctggatttttcgtcttagtggtctgtgagttagtcaacaaaaagaggggctcaggttcaattcctccttgtgtttgtgtataaaattcaattttttaaagcaaacaaataaaagataattaattacagaacgccaaaagaaaaaaatttcaaatacaaagagttacactattttttactgctgattttattgaaattttttagcttataacttggtcaatactagaacaaataaaattattttatgctcattttgaagggaaaattctgaagaatatttctaagttagtcaaaagtttaaaaaaattgtttattggcaa

SEQ ID NO: 58392 - DNA, 203 bp, Heterodera glycines
atgctggagcccaaacgtgagggcccaactgacggagtccggtgggtcagttttttactgggaattgaagatataataattattaaaaaatatgcagactggacaaagaactcctttttccaagtcccggtctctgccatttcaaaattaaggtctctgatttaattttgttaggaatattcaaaaaaacccttttggaataa

SEQ ID NO: 58393 - DNA, 676 bp, Heterodera glycines
  unsure (1)..(676): unsure at all n locations
tgaataaaatatgatgaaacaaaaaaatcgattttttcaagtgtccgtttggggtactcaaacatttatggggagcaaaaatccaacgcagaattaaagtacaggctatagggaagctattcccgaaggattcggtctccccataaatctgggcgcatcggttcggggggactgccccgaaaacaaaaaaatcgattttttcaagtgtccgtttggggtactcaaacaattatggggagcaaaaatccaacgcagaattaaagtacaggctatagggaagctattccggaaggattcggtctccccataaatctgggcgcatcggttcggggggactgccccgaaaacaaaaaaatcgattttttcaagtgtccgtttggggtactcaaacaattatggggagcaaaaatccaacgcagaattaaagtacaggctatagggaagctattccggaaggattcggtctccccataaatctgggcgcatcggctcggggggactgccccgaaaacaaaaaaatcgattttttcaagtgtccgtttggggtactcaaacaattatggggagcaaaaatccaacgcagaattaaagtacaggctatagggaagctattcccgaaggattcggtctccccataaatctgggcgcatcggttcggngggactgccccgaaaac

SEQ ID NO: 58394 - DNA, 735 bp, Heterodera glycines
atgcacatgacaaaattgtgcatgaaaacggcgatgggagagaagaccatcgagccggaaataacgactcgtgtgctgcgtgagatggctcacgtcgaattcaccgatctgtacgactctgattttgaagcaacgcaactgcaacccacccaaacagagtcactacagccactggtcctaattggcactgactactttgccgattttgacatcaaaacagagaagcgactcccatcaggcttttgggttgccaactcaaaagtgggcagattaatcttcggcaaaggaaacctttcaaagccaaagatggcgaaaaaagtcacttcaaccgccatctctcaagaggcagtggaagtacagcttcaaaacgacgacgacggactgaattcaatggtcaaacaattctttgatctcgaagctgctggtatggctgatgctgcccatccaaccgaaaatgagcaatggttggaccatttcaataaggagctccacttcaacatggaagagaaacgctacgaagtcgcgcttccatggaacaacagggctgaagagctacagcccaattatggattggcacgaggaagactggacaacaatttgaaaaagctggacaaagaaaagttccaactttacgatcagatcatctaagagcaactcagcaaaggcattgtggaaatggtgccggatcctaaggcatggactggcaaactgcactatttaccgcaccaagcggta

SEQ ID NO: 58395 - DNA, 469 bp, Heterodera glycines
atggcgaggacggcactttcgggttcggcgacgaggcagaggagcatcaccgacaattccaacagcaattgttttgccgtcgatgctgcaatactaggaacagaacaacagtgttccgctcgacagcggatgaatgcctcggcgatggcaaaaattagcttgcaaaagcaatgctttccgccggagtgctgctacacacaatgctccactgatgctccacaaaaatgccatgatgataatgatgcccagaaagctgttgatgctgttcatctccgttccctcaactgcttcttctcctctttctgtcctccatttcggcactttcttccccccaaagtgctcctccgtctctgtctgctgttcctttttgctgtcggcggctgtccaattgtgcccggcggcgtctcggcaacggcacgttcacggcggacactcgttccgctcggcatggacaaacagatgttccccg

SEQ ID NO: 58396 - DNA, 592 bp, Heterodera glycines
atgtccaattcagtttgtatggtggcaaaagttcgtatgggtaagtgtaaaagataattcacagttcacacctaatttgtgtttaattacaggccttatggccaccagcggaagaagaaaaagcgggtcaaagcatcgaaatatcgtcggactgcgcggaagtgaattaattatatttgagaaaagccgatctcacacaattggaatttgatttgatgccatcattttctctcagaaatgcttttgtaatacatttatttgcttgcttttaaatgaatgtttggttttatgacagacacagcaatatgtttcggattacaatgtaagagattatccgcaaagtttgtattaagcgagccattcattttttaacgattaaaatagaaagtaaatgtttacctgttttttttctcaaaataagcaacagaaaaatgttaattctaagtagtgatgttcgagagtctcgactcgagaaaagtctcggtttttttttggtctcaagtctcgggatttcagtctcggtctttgagactttcgagaccgagacttttttacacccctaatgatcggctttttgtaagttagaaataaa

SEQ ID NO: 58397 - DNA, 962 bp, Heterodera glycines
atggacaatttcattaaaaaaagtgaaggagtttgtatgaataatcagtttcagcatgaggacaaaattccaaaacaacaccaacaacaacaacaacaagatcaacaacatcaaactgatgtgatcgaacatgatcactgctacgcacgccccacaaaccagttatggaaattgaaaagacaaaaatacatgttgacatttaaactatgtaaaatgtgtgcacaagagctatacaaccgtaaggacgacataacagagtgtaacgatggaggtgtggacttgaactttcacctgtgcaaacattgtacaatgctcaacatgcgactcagcgatatgaattctgtgcaatttatggcatatcatccacgtaataacaactacaacaacaccaacaacagcaataaaaacagaaacaataaaaacaacgataatgacgaaaatgacagtcaaaataacttttggtacgataattacggtcctacatactgtagaggtggtccaagaaacaactacatgcaaggaaaacgaaagtgcttggaaagaattgacatggacgacatgaattgatatttaaaatattaaatttttttatttgtaagttatgtacggcctctaaacggattaaaattgattaattacatctgtgtccaaatttttggtggccaaatataaagtttaatcctttgactaattaccgcgtatgtgtattctcgggcctaactatggacaaagcccttagtctttgtggtcctgtgcccctaatctgatgattgattgacacattcgttttgatcgtcgcattgtatgtcccccacaaccgcgccctatggcaacaaatgttctttgtgacatccctcactgagtgaaagggcggtgccggagtttggaccaaatgatctcattctgccattcttgtaccattttcctccgttcgcttcgtttttttcgctacataattttaa

SEQ ID NO: 58398 - DNA, 643 bp, Heterodera glycines
atgcctaccgtaacgattaaattcgggcgaattgtgcataagatagaaggacagactcagttgtttgtcgcccatttctggcctccccattttgcctctgattacaacggtgtccccggcgttcagtgcattttcaaattttttggaccaactttggcgttttgatttgacagcttcaggcttaaagtaaaaacaaattgaagtcgaagaaataaaatcaattatgtttgatttttaagaattttagaaaattcgaaatgaattaaaatatattttaaaaattccaaaaagtccctaatttgtcgattcatttttaatttttcagcaaattccaaccctttgaagtcgaagaagaaaaaatcatttaagagttttgaaattttagaaattaaaaaattcgaaatgaattaaaatatattttaaaaaattccaaaaagtccctaatttataaattcatttttaaattttttcagcaaattccaaccctttccttcacttggggctcttcaatactgcttgggtagacatcgcccgcaatctgagcaagtttaaattatttacatttattaaaattcgaattatatttaataattattagggcttccttttttacgtaagaaaaatcgctaaatatgtaaataaa

SEQ ID NO: 58399 - DNA, 335 bp, Heterodera glycines
atgtgccgaaaagtgctcgccgagagagaaattgcgtaagttggcaaaacgtcaataaaaaaaaatcgagggtacttattagcttattgaagcatcccatcctctattgtcttttttttctttatttgcttcgtttttttttaaatttgtatagaaaaaaatagaattttttattaggtatctacgtcaaaaaaattgttgcctcacattaacgaaaaatacataaaaaattttttgtttatattggagtgatattgtcaattatgctgaattattgaagaaaaaactaaaacaaaagatgggaagaaaattgaaagaatttggctgataaaaaa

SEQ ID NO: 58400 - DNA, 835 bp, Heterodera glycines
atgaaactccacctattattcgttttatttatatttttgatcactcaaattaatcaaatcggaacagaaaagaaaaagttggaacaaaaatcatttgatgaaatatttggagaaaaatgggaagagaaagaagaagaaaaacgaaatgaactcaaaaaaagagaaattattggaaaattttataaaataaaagagaaaattaagcaaaagggaagaaaattctcaaaaaaagaatggaataaaatagaaataaaaatagcaaaaaaattagggacaaattgccaatatatttataaatggatcaaagaatttggcctatataaatacaaatcaaaaacaaatgaagaaaaatttaaaattgtgcaggaatttattgaactgacaaatgattataagcaaaaaagaaaatattcaccaaaagaatggcaacaaaattatgccgaaatttgtaagaaaattggcgtaaaccgagacataatttacaaatggaagaaacaatttggaattcgtgtaaaagaataacggaggaacaaaaaatggaaaaattgaaaatttataaataccggtaaaagcaaattgccttttgccgtttcttcatttaccgaaacaaaaatcgacgtaattggtgtggttaatgtacccattcagatgaaaagaattgaatgtcaaataccgtgtctcataacccgtgattcattttcttattgctaatttttataaattaaatccttacaatatttttattataaatgtttaatttgttattttcgaagaaaaataatatttaaatgtaatcattattttactgattcttgccaataatttgtttaataga

SEQ ID NO: 58401 - DNA, 96 bp, Heterodera glycines
tccaagtggggaattgaacccaggcgaaaaattatgaaaggtagaaagtttaaccactacaccacatgtgcatgtgtgtaattccatgactaaatg

SEQ ID NO: 58402 - DNA, 690 bp, Heterodera glycines
atgaaattctgtattttattatttttatttttgattgccctaattataccaattgaatcagctaatgaaaaattacaacagaaatcatttggcgaaatatttggagaaaaatggcaagaaaaagaagaagaagaacgaaatgaactcaaaaaaagagaaataattggaaaatattataaaataaaagagaaaattaagcaaaaaggaagaaaatgcacagcaaaagaatggaataaaattaatgcaaaaatagcgaagaaattggggacaaatcaaacatatattcaaaaatggattaaagaattaggacttaatcaacgcatgcaaaaaagctacaaatcaaaaactgatgaacaaaaaattgaaattgtgcaaaagtttattgcaatgaaaaatgaatttaaacaaaaaagaaaatattcaagaaaagaatggcaacaaaatcataaagaaatttgtaaggaaattggagttaacgaaagaacaattaacagatggaagaaacaatttggcattagcaagaaaagaataacggaggaagaaaaaatagaaaaaatgaaaatttattcgcaaataaaaagagaaaatgcaaaaatgagtgataatgaaattgctaaaattgtgaacacttcaaatgcgaataattgtaattggaagaaacaatttggagaagaaatgtttgagaattga

SEQ ID NO: 58403 - DNA, 235 bp, Heterodera glycines
atgccaaccaaccaaccgatgagtcgctggtcagacgatcgctttggcacaaagtgccatcacaactgttgccaaaaacggtggacggaggcggcgattcgcgctgctgctgttgttggagctgatattgttggaacatttgctggaattgctgctgttggagcactcgctgaacaatcgtaccgccattctaaaaaacaaaacaaattgaaaaactaaaatctccaaaattaaa

SEQ ID NO: 58404 - DNA, 411 bp, Heterodera glycines
atgcgatcgttcaacagtaaatctcatcagtatgactcatcaaagaatttccaagagcttttgtcgcctcgtctcttccagcgtcgacaacaggtttaaaaatgcataaatatttaagaattgccatggaatttcaattttcattaaattcgatctctctactttcattagcataatttttaaaatgaaatgtttaattttggagattttagtttttcaatttgttttgttttttagaatggcggtacgattgttcagcgagtgctccaacagcagcaattccagcaaatgttccaacaatatcagctccaacaacagcagcagcgcgaatcgccgcctccgtccaccgtttttggcaacagttgtgatggcactttgtgccaaagcgatcgtctgaccagcgactcatcg

SEQ ID NO: 58405 - DNA, 979 bp, Heterodera glycines
atgtttatgatctgttgtgccattcttttgaagtattgggaccgtttcaaaaaaccaccaaaacaacaacgaggccatcgcaaaattgagaaagtgccggaaactgtcataacaatttgcctcgacgaaattccagacaaccaaaatgaagcggaggaaaagatggcaaaagcgatgtgaaactaaaattaaaaattgccaattttcaatttagaatttcctttttttcagtttcatctccgccgactgttggctcggagtgttcgatttgcttccgacttctcaacttggcctcggaattgcgatgatcagccaccgatttgactattacgtggacgaacatttcaaaactcgcaaatggacattgaaatttattcgaattcgatacaaaatcgaagaaaatggcacaaagcaaatggaaattgtcaattacgattggaaaccaatgccaattccgcaaaatcaattgccacgcaaagtgatcggattcgaaaggatcatcatcacgtaaaattgacgcttaattgattcttgtcaacacttcccattcattttcagtttcatcgaccgaaatgtcatcgcttttctccgccattttcgttcacttttcgcctcattctgtccaattagtttggccatcagcacgaccaatgaacgcatttcggagttcatttttcacatttggccaatgctcggaaaaaactgtcgcgtgatggaattgcccgctccaattttccgccgtttgcgacatttcgtgccgtcaattctcaaagattgtatatcgcttcgcgttatcaacacctattcctatggtttcttcaccgaattccctgccgatgacagtgctacggcaacggatggacaagcggtggctaaatggcttttcactccacgtccggacaatgtgccaaaggtgttcaaatgctacttggacaaggatgatgcgaatttgacgtccaaagttgaagcattcaaaacg

SEQ ID NO: 58406 - DNA, 100 bp, Heterodera glycines
atggtgtcgccaccgtccggctcctccgcgctttttcccgtcggcaccgccgtttgtgccgccgccatccgtgccgatttcatcgcagccactgtctgcg

SEQ ID NO: 58407 - DNA, 56 bp, Heterodera glycines; identical to SEQ ID NO: 52733

SEQ ID NO: 58408 - DNA, 1627 bp, Heterodera glycines; identical to SEQ ID NO: 27738
  unsure (1)..(1627): unsure at all n locations

SEQ ID NO: 58409 - DNA, 948 bp, Heterodera glycines
atgccgaggctaaagccaagaaagacgcagaagagaaggctaaaaaggatgccgaggctaaagccaagaaagacgctgaagagaaggctaaaaaggatgccgaggctaaagacaagaaagacgcagaagagaaggctaaaaaggaggacgaggctaaagccaagcaaagaagcagaagagaaggctaaaaaggatgccgaagctaaagccaagaaagacgcagaagagaaggctaaaaaggatgccgaggctaaagccaagaaagacgcagaagagaaggctaatgccgaggctaaagccaagaaagacgcagaagagaaggctaaaaaggatgccgaggctaaagccaagaaagacgcagaagagaaggctaaaaaggatgccgaggctaaagccaagaaagacgcagaagcaaagaaaaaggatgaagaaatgaagaagcaaaaggctaagcccgaagaaaagcctgaggcacctgccgaagccgtagccgtagtgccggaagcgatgaaggcggaagagactaaggaaaagctgaagcaggaagagaaaccagtggaagtgccaccatctccagcagaaaagaagagaaaagaggctgaggagaagaaggctcagaaggatgccgaggctaaagccaagaaagacgcagaagagaaggctcagaaggatgccgaggctaaagccaagaaagacgcagaagagaaggctaaaaaggatgccgaggctaaagccaagaaagacgcagaagagaaggctaaaaaggatgccgaggctaaagctaagaaagacgcagaagcaaagaaaaaggaggaagaaatgaagaagcaaaaggctaagcccgaagaaaagcctgaggcacctgccgaaagcgtagccgtagtgccggaagcgaagaaggcggaagagacaaaggaaaagctgaagcaggaagagaaaccagtggaa

SEQ ID NO: 58410 - DNA, 1448 bp, Heterodera glycines
gatgccggtgccatcgctggactgaacgttttgcgtattataaatgagccaactgcggctgcacttgcttatgggttggacaagaagctgaccggagacaaaaatgtaggttccttctctccattttgaatacaatttgcctaaatttccttgaaaattcttattactaaataaaataaaatttgttatttatacaatttttagatattgattttcgatttgggcggtggcacttttgatgtgtcaattctgtcaattgcggaaggctcactgtttgaggtgaacgtaaaatctaacgtttttatgcctgaagcaattcatgtttaatgtttttttcctgaaagtggatgcttaaacaaacgcctcgggaatctttttcaatccttagaatcaaatcctcacaattaagccttgggaccgaaagttttttttaaggctttgaaaccaaagattttttctttgtgttcttttaatgcctttttataggttcggtcaactgccggtgacacgcatttgggtggcgaagactttgacgcgttgctggtggaccatctgaaagcggagtttaagcgcaagaatggcggacgcgacatcggtgcaaatccgcgcgcgatccgtcgtttgcgcaccgccgcggaacgcgcaaagcgaacgttgagcagctccaccgaggcgacggtcgattaaagatttatttgcattaaattaatgaaaataagttggatttaatggggtccaactgttttttgaagaaaatattttaaacaaatgcctttcgttgcagattgaggtcgattcgctctttgatggcatggattttcacaccaaaatcagccgagctcgtttcgaggagctttgcatgccgtaaggcatttaaaaaatttaaaaaaaaatttaatccaattttaagtctgttccgcaaaactctcgaacccgtggagcaggcattgaagtgagtgactgacagacaaatgggagggtgctgaatcaacatgacttgcagtttatggcaaaaagaagggcttgaaagatacaaaattaaaaaagactgctgcttttagagaaatgattgccaattgctgtatatttagggatgccaagttagacaagcgttccatcaacgaaattgtgatggttggcggatcgacgcgcattccgaaggtgcagaagctgctcaaagagttcttcaacgaccgggagctgaacctgtccatcaacccggacgaggcggtccgtaaaataacttaactcctctcggctttgatgactggcagtcccgataggccgtcggggaaattttgaaattattatctgacatcaatcaaatttgccaaaatattatttatcgctgtcgatcatttgatgtgaatttagtttattttcaggtggcttatggcgctgctgttcaagccgcaattttgtctggagtaaaggatgagaccacaaaa

SEQ ID NO: 58411 - DNA, 1336 bp, Heterodera glycines
atgtcaaaaattacaattgattatgctagcaacaatattaaagtttttaattcgtttgcagatgcttccattcaaaattccataatgcatggtttaaagaaagaaattgatgaagcgataaaaagtttagcatttcattggcaaatttcattgaatgaaattgtgccgaacaaaaaagagccgaaagaattgctgaaggaattaaaaagtttttggcaccaatttaatggccaaaagggcgcccatggagacaaatgtactgtagtgttaaagaatgggccaggattaatattttataaaaatgccgaaatctctaaagaaaaattatgaaaaattattaaaaaatttacgagaaatttttcaaaacttttgaaattttaagcggaagaaaagcaacacgaaagccattatgaaaagcgtctactgaagctgatggcggattactctgtttgtttgaatggatttgataagccaaaaagtggaaaaagttagtcattttctttatcaattgttcacttctcaagatgatttcttgaaaagaattcccttatcacctatgagagttaaaatatgattaaattcagtttctctatttttttttaccttacttagggcaacgccagaaaagcaaaaatgccctgctgtggtgctattagagctcggaatttgaaaaagtcgggatttgaaatcgtgccaggacggaataaccgagattaaaatttagatattacagagaccctaattcttttcgggctcttgatgtcattagttcagctctttccgtcgacaccaaccaaagcaaaaaaaagcagtaacaaattcataaggaaggcggctttaaagcctttggaaaatttaaaaatttatataaaattttttttcatggcatttttaaaaatcgaaagatcacgaaaccataatttgttcttcccgtcagaaatcaaatttgaatttgttttctacattttttcattttcacagaacgccgacgacgacgcgacgatgggagtggatggtcgaagaaaacaattttcggcttactgctaggagctttatttgtaatctttctaatctttgtgctcgccaagatgaaccactgtctgtgtgaccctcgtggtgatgataatgaccacaaaggacacgacaatagtgatagtgatggtgaccaaagtcgtgacattgaaattggctccccttctgctggtgaacatcgcccagcggcggcacgacacggcggcgccggtgccaattcggggagtgaaagcgaccacagcgtggaacaggtatttaacggctcacagaaaatgcgtcagtgatataattctttaaaaataaa

SEQ ID NO: 58412 - DNA, 467 bp, Heterodera glycines
  unsure (1)..(467): unsure at all n locations
atggacttcgacggccgcatcaaggcttaccgcttcgtggcttactccacggtgtccttctccatcatctctctgctttcggtttgcttcacgctgccgatgctgaagagctacgtgtccaacgttgggctgaagatggactctgagctcagctcatgccaagtaaaaacaatggcacaatttgaaaggtgacaaaatgccaaccccttcagagcaatgccaaggacatctggtcagaagtgagtcagctgaagggtctgccgttgatcgtcagcggaaaccgtacggcacgtcaagtgtacggtggcagcggcggctacggaagctgccaagactgttgctcaggcggaggacctggcccggctggcccgcccggacagcccggacgccccggaaaccctggagctcccggatcgcccggacagcccggacactccgtccagactccctgtgagncagtgcacccg

SEQ ID NO: 58413 - DNA, 1270 bp, Heterodera glycines
tttccgcattgccttttctcgccttttccacattagtacgaaaatttcgagaggcacccccaatatttcaacgggtgcaatgaaattctccaagactatttgaatcgtggcatcatcgaagaaagtacccggacaaatgcccctcaacactttttaccccatcacactgtggttggcaaacgattacgtatagttttcgatgcctcttcccatgaacgcgactcgcgttctttaaatgacacacttttcgcaggtcctaatttgtacaggatttagccggcaaattaatccaatttagggctactatttaccctgtgtgggcagacatagaaaaagcctttctaatgattagtttgaaagagtcagacagggaattttccaaatttctgaggactcgggacccgaattcccctctttccggaaataatttggtcatctatcgctttcgtcgaattacattcgggattgtttcgtgcccatttttgttagcggccactctccaacaccatttggaaaccacgccaggcactttggccaaggaaatccaacagcattccctgctgtatgtggacaatttacttttattagctgaatgccctgaggaggcgagagaaaaggccattgaggcacaaaaaattttctcatccgcaaaaatgcgtctccgtgattttgtcgcagcggactcgagaattctaagtgttgtgccatctgaagaccacctttctgaaaccgaaccccttgtacttgggcagaaatggattctcagttcggacaccttatttttctcattccctattgttccgtcaccggaaaaattgacccgtaggattattctaaaaaccattgcttcattctttgatcccctcggattatgctccccctgcctggtaggagctaaactatttttccagagtatgtgggaaaagtccaggggctgggacgagcccataccggacaaagaacaaataccatggcaagaattgcgaaacgattggcatggacaaaccatcacaattccccgacacactttccgtacgaaaaacagtacactacagctacatgttttttctgatgcttccccaaatgcttttgcaagggcagagacggacggaaatttttcctcctccttggtctattcccgatctcgagtaaacccaggaaaatgggaaaggaccagcctgacggactcactattccccgccttgaccttttaggagttttattaggagtaagggctgctaaatttgtaaaaacccatttttcctatgaa

SEQ ID NO: 58414 - DNA, 1546 bp, Heterodera glycines
atggctcttcccgatggttggccttgctcgggtccgttgttggatttggccgagaaatttgcacagcgattgcttccggcatttagcacaaacactggaatgccttatggcactgtgaatttaaagtactgttggcgttcctttgttttttcttttaaattaagatacggcgtcaattatttcgaaacaccgatcacatggtaagcttgttttgtctattctttcaaggttttgcaatgttttattgcttttttagtacggctggcattggcacttttcttttggaatttggcactctgtcgcgcctcactggcaacccaatttatgagagggttgcgctacgggcattggatgccctttggaacagtcgctcctcgttgggtttggtcggcaatcacatcgatgtgcagacgggtgagaaacaaacaaacaaaacaaaagcagagcaatattaatatttttccaaactaatttcccatgaatttagctacaaatagtaaaattaaatttgaggtgtttttaccgcaactgattccggaattggggctggcgtcgactcttactttgagtacttggccaaaggcgcactgctattccaacggccaaaattaatgcgccaattcaatggtgatcatttcgttttctgaccatttattcacattttttgacctcgaaaaggcactttaatcgcaattcccgcgtagaattcgaggcagccattaataaacatgttcgtcgtgacgattgggttttgtgggtggacaaggacaaggcgactgtttcgatgcaaatctttcagtcccttgaggcattttggcccggattgctggtttttatttatttaaagtttcagaaaacattattttaagactcttgtcggtcgtgttgaggatgccgttcgtataatggcatcgtatggccaaattttgcggcatttgggcgtcccacccgaattttacaatttgccgaacagagagcctgtaaaatcctttgtttttatttccattggttgtatttattctccgcttcccccgaaggtcattggtcgcgctgcttatccgttgcgtcccgaaatccccgaaagtttgttgtatcttcacagggcaacaaatgaccctgcttatttgacaatggctgcttcaattgtcgacgtacctccaacttttcatatttttaaatgttccattgtttttacagaccatcgaccaaattgcaaaaacgaactgtgggtgcgttgttgtcattagaacaacgctaaatcattctgttgttcagttttggcactgttcgtgatgttggcacgggcagtgtggaagacaggtgggcgcccgagggatcatttcactcccccccccccgaaaaagagtttttagtgtgtaaatttacaaacagttcaacttcctctttctcaggatggagtccttctttttggccgagactgcgaaatatctctacctaatctttgacgaacataattttatgcatagtgttggctctgcgaaggcaaaattggtggagaccacggggggaccatgcgtaatcgaag

SEQ ID NO: 58415 - DNA, 1148 bp, Heterodera glycines
atagcgctttgtcactcctttccacgccagcttcgacaaatgccatccgaactcgccctcaacagtggagagaatcaaaaaccaaggccaaatcagcaaatgccgtgcaacaaaaccacccggcacagcaaaaaccggccacaggaggaaaagcaattcgtggacaaccgacccagccgtgcggctcatgtgttggtactgatcactggagatcagattttcgcttccgagaagcgacatgccacacgtgccaaaaacaaggccacattgctaatgtttgccgaaagggagcattcacgacaaagaaccaacgccgttcatttcacacggtccaagtcaaagcaacatgcctacaaattggcacgactcaaggacggtggtggaaaattttggtcgaaattaacggcacaaaaatcgaaatgaatgtcgacacaggagctcagacgacagtccttaccattgaaaaatggaccaaattaggacaacctaaattgttgccaaccgacattgagaatcgtaactgcaacgacgtcacatttaacacaattggcaaatttacatgtcttgacagcattaagggacaaccaaccaaaaagctaacagcttatgtgactgaagagctcaattacgatttgtttggtttgccatggattgaggcaacggaaatgattcccaaagaaatcatgtttccggagacgcacacatcggttggaatccgcgcatcatctgccgcacctttccaagaaatcgccgatgttaagtcactcacgacggctctcaaagaaaattttccggatgtttttggtaaagagctaagacagtgcaccaagattaaggcacaattgattcttaaatccgacggtcgatcggttttctgtaaagcccgaccccttcctcatggctcactggaagcagtcaacacggaactggaccgcctcttacagatcggtgccattaatccgatagaatttagccattgggcagcacccattttagccgtcaaaaagaaaaatggcaaaatcagagtgtgcattgatttctcaactggcttaaacaatgcacttgaactcaaccgccacccactccctcggcctgatgacatttatgcagccataagcggcgctgcattttcacaaatttggacttaa

SEQ ID NO: 58416 - DNA, 746 bp, Heterodera glycines
aataaaagcacaattaaatcctgaaaatgcctttgtccctgaaaaggattggacttttacaaccacaacatcgactgctccaaggacttttaccacaaaatcattacaacgcgccgctttgatgagcgaatttcgaccattgagaaagtacggtaccatctaattggccagttgtacgataatttgcgtattgtaaaggttcgttcggccggcatcaaagtttgctgcggagggattatcggaatgggagagaataacgaagaacgggtgaaaatgtgaggcggaaaatgggctaataaccgtttgcttccatttggccaaggctcgtcacattggccaatttcgcacctccgcccgaatcggtgccaattaacaaattaatgcccttccccggcactccgttggccaatgccccggcgcccgaccccttcgatttcgtgcgcacaattgccacggcgcgtgttctgatgccaatggcttacatccgactgtcggctggcagagagcaaatggcggacgaattgcaggcgactaattttttagccataaaagcccgtttaatttaaatattacaaccaaaaattgactttcaggcactttgttttttagccggtgcgaattcacttttctttggggaaaagttactaacggcgtcaaatccaatgccagaaaaagacaaagaattatttcaacgattgggtctcaaaagagagcaaattgaggagaaaaaagctgaacggaatgac

SEQ ID NO: 58417 - DNA, 325 bp, Heterodera glycines
atggccgttccaacggccgacgacactccgccaaagtcctcaagcgatgcgttcaaaagattggcatccaagcggcgcaaatatcgctccaaatgttcaacaaaacgctgtttgaccacattgaattccatgacggatgacggacgaacgaacacccaaaagtcggcgaaaagagaaaacacgcggcctgaaaatgggggggggggattgttaagtgaagtgaaccaggaaggggggggattgtttttattgatgggtcataattaattaacaaactataaatttcagtacatttggattcgaaatgacaatcttttttgatatg

SEQ ID NO: 58418 - DNA, 1418 bp, Heterodera glycines
atgctttatgtattgtttcgatcagttatgttggtccaaaaattcacaatcgacgacccatttgcaccatccgatgtaaatttacaggtaaaatttatctcttctaaacctttgacaaaatacgatcaattattcacaaacaatcaaatttaggattaaaaattgttgattgtttccaggcattttcacattttttggatacatattttcaaatttttgtaaatttattttaaaaactcgaaaatttttgatttttccatgagatataatatttgcacttggtaactgtactgtaaaatttattttttacagtccatcattatttgtaactcattattccgccatttgcttggacatgtgttgataattgaccgttttcttgccacagtacgcacaaattcatatgaaaaattttcaaaatttggtttcactctcgcatggtctagcactacggtatttttttattttgtaattaaaaataatttcgaattacagttcattatcgcttttttgaacataataaccaatggcgaatcgtggaccgttacacgattaaatttgatcactcaaacaatttcgacgcttttaagattgcacaagcaacgcaaaaaattatcatatcggacatcgctatcttgtaatgttaaatttttttttaaatcttcaattaatttccaaataccattataattaattaattgatttaaattttttatttctttattaattgcaaatgttaacaaaaaattattatttttaaaattttatttttttatttgtaatccttgtttttttatcacttttatttgttttttattataaaattttaacgcatattttcgtacaaatttacccaattttcgggtttttaatttatatatttttttgtaaataactgaatgttttagcggtttttgatacattaaacacatacagtctcttgtaataattatgtttttgtttaaattataaattcattttttaaggtttctgataatgtgaaaacagcaaagcaactttcgccaacttttttatgcttatttctctccaatttattcatcaattttttgtattcagccatagcatttaacatggtcactgagaattaccagatcagtttgatgcgggcatttggcatttgggctgatgctgtatttggtgctgcaattgaactcacaatgatgacgtaaatatgcaattaaaaaaatttcaagaaattctgttgctttaattagtacgtaaaaattttgtacactgtaataagaggtaatttcaaatgctaaaacaatcaaaattggttaggcacacggaaaagggcgttaatcaccgctcttggggcttaactaggctaagaatttggtaattgtagtaagtttggtgttatgtttcaatgcaattaacagccaaggctaaataaa

SEQ ID NO: 58419 - DNA, 2505 bp, Heterodera glycines
gtcaacgacaagccagtttcacttgtggcggatacggcggcccgaaaaacaatcattcaattggccacatgggaatccctgggaaacccaaaattcaaaacaggcaaaacatatggcaaattatagacaggccacaatttttcactcatgggttcattcgattgtttggttgagttcatgggtatcaaattaagtctcgaatgttttgtagcaccgaaaggcgagcttaatctcttcggtctgccatggattcgcgcattcgaatacgcactcaactgtccgtggccacaaccctgccgatcattcgtcctgaaccagcatttttggccattacacattcaactgatttggctaatgaacttaaaagcaaattcccttcagttttcagtcccgaacttgggcactgcacaaaaatgcttgctcatctgtatctgaaatcggattcgagaccgattttctgccgcgcacgtcctgttccgcatggtgccgtcgaaactgtcaatgccgaattggaccgtttgttaaccattggggcgatcaaaccggttgattttagtcgttgggcggctccaatagtcgcagtcaaaaagaaatctggcgacattcgcgtctgtattgacttttccacacgtctgaacgaatgtttagagctgaacaggcacccgcttccgcgacctgacgacattttcaacgcagtccgtggcacatcggttttcagtcagatcgacttcaaagacgcctatttgcagatcgtgctggacgaagagtcgaagcagttggtcggattgaacacccaccgtgggctgttccaatatcaaaggcttccttttggaatcaaatcagccccgtctattttccagaaattgatggacgaattgacagctggtcttcagggcatgttcgtctacctggacgacttcatcgtggccaccgacacagcagaaaatcatcataaaattctttcaaaatctttcaagcgtttacatgaatggggactccgtgttaagctcaacaaatgcaaattcctctgcaatgagctgaaatttttgggccacatcatcacctcagatggaattcgaccggaccccgaacgctcacgtacaatcaaggacatgccggctccgactgatgatcaaacactcagatcatttttgggggcgattaactattactcccgttttgtcagtcaaatgcgtgaaatcagagcaccgttggatgagctccttaagaaggacgttcaatggcattgggacgaacagcaaatggcattcgaaaaggccaaacaaattatcaactcagatttgctgttgacgcactacgacccaacgaggccgatcatcgtcgccgctgatgcgagcaacaaaggccttggcgctacgatcagccacactttcgacaatggcactgagaaagttgtggagcacgcttctcgagcgctgacctcagcggaacgcaactactcacagatcgagaaggaaggcctggcgatcattttcgccgttcaaaaattccattgcaaagatgggcgttgactctgtcgaattatgattttaatatcaaatacatttccacgaaaaattttggtcaggttgacgtactttctcggttgatcagccaacaccgagagtcacagcaaaatgaggacaaagtcatcgcccaaatggacatggaagaaagcagtgaactcgaagtggcagccgtcgatttgttccaaacaacacttgatcaactgccgatcactgccgaagagggcccaaaattgatctcgacattgataggtgggttagaaattgtgaagagtgtgccttagcagccaaagcgccacccaaagtgccgcttcaaccatggccagcatccactcaagtctatgaaaggcttcacatggatttcgctggtccatgtgcagatggtaacaaatatctggtagtggtggattcattcagcaaatggccggaaatcattaaaatgaagtcaacaaccgcacaccttttgatcgaacagtttgtttggttattttcgcggtatggttacccaaaagaaattgtcacagacaatggccccccattcaaatcgcacgaaattttcacgttttgcagttcgcatggcattcagcaaacattcgcaccaccgtttcacccacaaagcaatggccgtgccgaacgattcgtcgacacactgaagaggcaaatgaagaaatgtgcgcgcgacgatccacattgggtacaaaattcactgctcgcgtaccgcaccacgccgaacgcaagtttaaatggtcgtacgcctgccgaattgttcttagggcggcccgttcgaactgttctatcgttaattaaaccaaattcccaaaaacaaaaacagggacccgtgttaaacgagcagaacagcaaaatggcgaaacaattcaacaaacaccatggagcacgaaatcggaacttttccattggtgacattgtccaatttatcaattatcgcggcccttcaaaaacgtggctgcgagggacaatt

SEQ ID NO: 58420 - DNA, 316 bp, Heterodera glycines
atgtcggaaaaccgtcgaagtcatgagagaaattggagaaaaagagaagaaatgaagaagataaatgatcatagaaaaagagagagaaaatggaagagaaatgaaagagaaattaagttgtggttaattggaataatttgaaaagtttgtgatttaaatattttatatgatattcctatttaatttcagcttttgatcgtcgctcactgtccaatatatgctcatcctacgcttttgtcacactaaatgacccacaatttggaagaggtggtcgtcatgtaaaatacagttatgataaatttaaactataaataaa

SEQ ID NO: 58421 - DNA, 372 bp, Heterodera glycines
atggtggagggtaaaatggagcaactcaaagcggagacggaagcggtggaaggtgtgcaattttatgatttggggcaacacttaccgaaacaccgaaccaatgaataatgccttatttcttcgaactaactcgaaacccccttaaataagtcgttttgattaattcgcttttaatttcgaattccctccagttttaccggtgaattgttggttcaaagactacgtactctcaccgcattcttgaatttttacaatttaataaccgtaaaagccttttcagaaattctacaagaacttttcaactcgaatttgacaaaatgcaatgatgagtacaaatctcaatcgatgaacaaatatttggtggaatgcgaa

SEQ ID NO: 58422 - DNA, 247 bp, Heterodera glycines
attgagaaacggcgtgaggcggtccggaaacgaatttgcccgtgctttttgagactcaaatcggcgattgacgaccaatacaacgaaaagaaaaaggttgtcaagcgagagcaaaataacaatgaaaataatacgacaaaaaatcatagactgatgaaaccataactttgatgttgtcatatgacaaaactgatagcgtatttttcgctcattatcagcacctttgacaactcatgagtgaaataaa

SEQ ID NO: 58423 - DNA, 967 bp, Heterodera glycines
gctttatctgacgtgcattggccttatcgtcttcattattctcttcgcaatccgtcaatggattaaaggtgcacagtttcgcgagaaagtcagtgctcgtggggcggtggccattgtgacgggtgcgaacagcggaattgggaagcaattggtgcgcgagttgaacctgcgttatgtgaaggtcggttggacattaaaaaaataagaaaaaaaatccatttactcgttaaatttaccatacttttgtaaattgatcgtatattattttataaattttaaattatttttattgaaaatccgtgctttgggcacaccccgcgggaagaccttctcctacattttacctttactcagcaaatccagaagggatgagtccgcttattttgactttccgttattcaggtgtacatggcgtgtcgaagcgtctcgcagggacaagcgactgcccgagagctgttttcccgggtaaatttccgatcacccttatttacatagcatttcttttcattagtacggttgcgatatgactcggatgattgtccgtcattgcgatttggccgacttttcttcaattcatcaatttgttaaagaattcaacagaggtatgcctctttttagtttatatcctttcaatccacccaaattaatactcagatgaacccaaattggacattctgataaataacgcgggcataatgttttatccacgcttcaccaaaactgtcgatggccatgagctgacttggcagtccaactttttaggtctttatttgctactattaataaaatataatgcattaaggccattttctgttgaccgaattgctcctgccaaagttggagcgcagtgaggaaggcggtcgcattgtgaatgtgagcagcagtgtccatctccgtgccgattcggtcgatccggaggtggtggagtcgcctcgtcgatttgggataatcgcgacatacgctcgct

SEQ ID NO: 58424 - DNA, 548 bp, Heterodera glycines
atggaattgtcggaggaaatggacaatttggggacgaatttggaggacaaatcggacaaattggaccaggaaaatgaaaatataaaatgggaaaattggaaagaaattgtgggaaaattgcactttcgaaaatttggcattgcaattgttaagggacgaatagaaaattgggaaaaattgggccaaaaacagaaaacattggcactttcgaatattgtcgaaaaaagagagaaaattttggaagaatttgaaagaaatttggaacaaattgaaaaggcggaaaaacagcgaaaattgggtaaaataaattaaaataaataaataaaatttaaatttaaaaaaattcttagacaaaaatattttctgtcaatatcaaagcgacacaaatttatcggaatttattgaaaagaaagacaaaataaattttagtgagaaaaattcgcaattatttccatcagaaaaatggcaagaaataaattcagtcaaagaatttgagagaacaaatttagaggaaaaggaaaaagtagaaatttaaaaattaaagaata

SEQ ID NO: 58425 - DNA, 61 bp, Heterodera glycines
atgtgcaagagaaaagagttgaggaagaaaacctatgaagaaaaggaagccaatggatacg

SEQ ID NO: 58426 - DNA, 391 bp, Heterodera glycines
atgaaccgacggtaataaatttttaaaagtcaaacaaattagtcatttatttaactaacaataaactgttttcccacaattttagttggatttgcaacgacgtttggatggacattttcccatcatttgaccgtgctcaactcggcctcaaattggcacttctttcgccacgtttcgatgcgttggtggacaaacatttcaatggcaaaagcgaattgacaatttggagaacaatcgcaattcatcgcaaggacaaaggaacagaaccgaaactgtttgtaaagatgggttacaaatttgtggaatttccgttgcccgaccgtccgctgcccaacaaaatccgttttaatcaccttcggatttagtaattaaaaaccagagagctatgaca

SEQ ID NO: 58427 - DNA, 143 bp, Heterodera glycines
atgcccccgtccgctgacgggcacaggtcgttcgagctgacttgtggacgctgcccaacattacggggcagctgcctcacgagccatgcttttggggtgcttccatacgttggagctgtggtataccgctcagtgctgcacat

SEQ ID NO: 58428 - DNA, 913 bp, Heterodera glycines
atgagttcttttggcaatgattcccaaaatacgacctctttttctcccaattggtcaacggcagacactaattctactgtaattacagtagcctattttttggtcagcggtatgtcgcttattcacgtcgccacactaacaatttcatcctttaatctgattgtgttgggctcgaccaagctgcttcacccgaatttgaaatttgttttgatgtgccaaagtggggccgtttttttgtttgaaatctttcgcctaattacgatcttccaaaaatttttgtcaaacgacattttcaatccatgcttcgtgttttttcaggtgaaaaagatttcaaatgttttttaattcaattaaggacggatatttaattaccaaattgacagggaatggtctccgatcggagattaggaattttttaacactcaaatataatgtgccatttggtccttttttggtcaaaatttaattaattgataaaattttcaaaaaaaaatttcagacggcgcctatctgcatagacggacccctttgttcctagtttttgaaaaaattgcgccgaaaaaagcatttttaaaaagcaaaaaatagtcaaatttattgaccattaacagatttgatttccgatctctttttaccgtctgacccattcgaaaaatcttagtcgcccttttaatgcatcccgccagcccctaaaatttcttctcgtatttttttttggaaatttcattgaaattttttcaaaatttctaagaatccgcaatcctgcgcgtgatcctgcaaatttaaaatgcaggattaatccggccggatccggtcctgcaaaaatttttgaattccaatcctgcaaaaggatccgcaaatttgaaatttccgagctctagtcacaccgtttcaaaaaatgagatgtgtacca

SEQ ID NO: 58429 - DNA, 838 bp, Heterodera glycines
atgatggagttcgaggtagctccaattttacggcatcatgccgtacgcatttcgttcaaatgtgcagaatgtggtgacacaacctttaaaacattcgacttcaattcacgtggaagatggggcatgtatttttttaagcattaatcaattagttggaaaggattggaatgactttttgaaaaattttgttgtcaaaaaagaaggggtgaaaattaatattaattgggcttcgtttttaggcaaaaaactcgcaaaatggcattaaataggcacaaaaatagacaaataaatttttttttattaacgctttttaggtagtaaaagacgtaaaaattgaacaaaaagattaattttgttttattacaataaaaacgaagccctaattttaccgaatttttatttcgtttgggaaattgatgagggacaaaaaggcctacaaaaacattaaattttccaggtttggccgttatggagaacacaagagcatccttgacaaaaaaacattcatctgtcacacgaaatgataaatgatgtgttcaaaacaatgccggacagaggctatgccttgttaagccttaattgccagatatgggccaaaagtttttatagtaaaggtttattttgtttgtttttttgggggtttaagggattagccaatggtatcgcccagagggccctatttataaatgcatatggattaattaatgtgcctacgttatttcgactttgaacacacgaggattcgaactgcatttttgattcaggaatatgacacgaccattttcagaattccccctccccccgtgcaaccatttttgaaaaagtttaagatttttga

SEQ ID NO: 58430 - DNA, 1292 bp, Heterodera glycines
atgtgggccttactccctctgaatttcctcctcaaccaatttgggttatgttcagttgttaaattgaatatgatcgacactgctctttgcccttgtccgcttacaaatatgaaggtgcagaacgtggagcatattgaagtcataaaagaccatgaagaggagaagttgaatgaatgcccgcggaattgcgtcgttctttcaatccgttgcaagtgcaatgcagagatgcgcaggacttatgaattaacaaaatatggcacacgcaaaaagtaagcaacagctaatagagcccgtacccagaaaataaattgtagggaacttcagaaatttaatcatgggatgccaaacggcgggacggtaacggatgggcgctttccaagggaattccaaaaaaaaggggcggacgattttgtatcgacccgtttttgtctacatatttatttattttttaaaactcaggagacatttttgttgcctccttaccaaaaattgacagccccccccctcaaagttcacattatagtcgggaaaaaatggccagtgacaagcaaaaggatcatcacaaagggtggacccctagggcaaaatgtaatttttttttgagtacaaatgaaaaaagcttttgtggttaacgctctaaagtcagagggagggggagggagcacaatctgacgagctttttttctctgcccagaaatttttatttgccagtgatattgggtaaattaggagtcgtttaagaagaaaaaaacttttttttgctgttaaataatttttgttttttttgaccaaatttagcccaagagctgtaatttttgaagaaaataaaaataaatttgcctggtacggaggtacctaaagaaattttagtttcgaggtgggagactacggatccatttcttgtttctcccctcctcatcaaaattattagattttgtgacaattttctgggtacgggcctaattaataaactcaatctcctccaacatcatgacaaattttagcatcgggcggcctgaacgagaacggagtgtacacagtctcaagacgggaatcggaatggaattggttaaggtggagataatttttgcaacaatgccagccaaattcgatgaaatacatttcaaccagcgacattgggctcgtcgttttttttacgcgagtaagcagttttggaaatgttttgcattaaggggaattatcccatgggcgtcgtggtcacacagaaagtaggatttgcatttacagcccacccaaacccgaaaacatataaatgccaatttttatttcga

SEQ ID NO: 58431 - DNA, 347 bp, Heterodera glycines
atgtcagtctttggcaacaaagacgagcagttaaactttaagacaatatgtatttggcagcgaaatgcagcggaaaacggaggacaatggtggacaaatgagggcactttttgttggaatcaactaaaattaaaatggcaatttaaatcagaggtcgcatttttacttatttgtaagtattttacttattttgagggtccaaaacttacaaattttaaatgtacttatttgtaagtaatgtacttattttggcattctagagaaattcaatttttttatctttgttttgaagcgaatattaatttttttttgcagtcttgtttttttctctttctattactttttaa

SEQ ID NO: 58432 - DNA, 117 bp, Heterodera glycines
atgtccatgtgttgggcagagccatggaattcggctccaatttggccaacactcgtccaatcttttccgtctcctctttcaacaatgactataaaatggacagagaacatccgttcg

SEQ ID NO: 58433 - DNA, 84 bp, Heterodera glycines
atgtacgcggcacgggcgcgcgcggccaaggcggaaaagcgtcaagcgcagctgcgcaaggcagccagagcaagggcaggaaac

SEQ ID NO: 58434 - DNA, 56 bp, Heterodera glycines
gctatagggaagctattcccgaaggattcggtctccccattaatctgggcgcatcg

SEQ ID NO: 58435 - DNA, 458 bp, Heterodera glycines
atgacgaaagactatccgacgagcctgttcgaagaagaccgccaatatttcgggatcctcgacaatgaagttatgcagcagaaggatatcacggaacaggcacttcttttccgttcggtttttcctcgccgtgtccacccgttattaacgattcatttcggcacctgaaattcaccatgaataagggttgattgatcttcacgatttctccaatttcagatgatcaaagccctccatcatcacattctcgtcgaaaaggaggcggcagcagctgggatttaccgcgagattgatgtgctggtcaggaaccaccgtgtcgtcccagcaaatgaaattgcgaatgccatgtctgaattctgcatttggttcaacaccacgcaagaaaataacgacacggacgcagctacatttgcagccaattcacataaccgcttcgaaagaccacattaatttattta

SEQ ID NO: 58436 - DNA, 861 bp, Heterodera glycines
atgcgggattccgcgcggaagtaagtgtgatttttaaataaaattttatataaaaaattttattaataaaaagaaaataaaaggttctatgtcgatcgacgaaaagtgcaaattgggcgaccgacgaaaaagtgcaaaaattaaactcttgatttatgcagttgatttttaacctaattattagatattaaagtcaagaaatcgttagaaaacttaaaatcacaattttaattcaaaagttaatatagtaaatttttttgctaattttcaaatgaaataaaaacaaaaaatattttatggaattcctttttaatgaaactttattgataacatttttttattattgacaagcggcaaattgtttcgacattttttgtagcatcctatgggtttactaatgatatcttcgctacactggtggaaaaaagtctttactcaagccgatcaaatttgaaaaaattaaaatttcgactagaaaatttaattgattattttttgtttatgtgtttttatttacccctatttatgtgctttttatgcaccacataattattttgatccactcattcattctgagcatgagtcgtttgatcactctttactcaaaaaaagggcggaaaaaagtctttactcagaacatttatcatcgaatttcttaatatttagtcggtccgccctttgcccagattggataaaagcattcaaaattggaataaatcatcaatttgtgtgccatcttccgaacaagcaacagtcgtttttatttccatccactttttcgaatttttcatttgcttccattggcaaaatgtcactgtattggactcggctcattcgtaatggaaagggtggcacctaaca

SEQ ID NO: 58437 - DNA, 376 bp, Heterodera glycines
atgttcatcaaaccggtgctgtacagtagcatttatttcggctggttcttctacccttttgtcggctacagtaacgatgaccatcatcaggtgggggatttagcattcgctgatcaaaaaaatgcgttttcaattttaaaatgtaccgtaaaaatattttctttgctacagtatgaacattggctgcatgtcgttcataatatcgccgtcgcatttctgagtccggccatttaccttttctttgccagcaaattgtttttcaacgtccaaagcaatcggcgacagtttgccgttgtcgcctccgaattaaactcaatgcaaaaaagggtttggtaatttggaaatttaaagcaagcatatgtaaacaatttgctta

SEQ ID NO: 58438 - DNA, 444 bp, Heterodera glycines
  unsure (1)..(444): unsure at all n locations
ttaaggcataaaaatactcgagaaggctcttcaatgtaacacgtttgatttgtctctccaatgttcactccattctcaattggtgggtgatgcgttacttaaattcctttcgattacggcttttgcattatattcgtccgttatttgtttgcagggtaatgcgtattatgcccgtggtgactacaggaaggcgaggttcccttcaaccgttcggtctttttactccccgacccattaaagagaccatcacatggctgacctttgcgcttctaggttaactcttggttttattgtngtaggaaataatcaacattcgacagattgcaaaaggacgaattgcaacaagcgaagacattgtccaatttgtccgcaacttacattctgtaatggagattattgtttttaattatttgtgtgaactattagtaaataagggctagcgga

SEQ ID NO: 58439 - DNA, 1141 bp, Heterodera glycines
atgatcctgcgttatgtgaaagcaaaagcggattggtggactaactcggctcactacaaccgtgagcgtgttcgacgcggtgcgactgtggacaaaacggtgtgcaaaaagaatttgggccgtctcacgcgtctctatctgaaggttgttttattgaatgcctttctgttttctaacgaaactcacccatttcaggcagaacaggagagacaacacaattacctgaaggatggaccgtatgtgagtgccgaggaagcggttgccatttacacgaccaccgtccattggttggagtcgcgtcgtttttcaccgattcctttcccgcctctatcatacaaacacgacactaaactgctgattttggcgcttgagcgcctcaaagaagcctattcagtgaagaaccgtcttaatcaaagtcagcgagaggaattggcactgatcgagcaagcatatgacaacccacatgaggcattgtctcggataaagcggcatatgctcaccatgcggtccttcaaagaagttggcatcgagttcatggacctgtacagccatttaatccctgtctacgacatcgagccattggagaaggtcacggatgcttatctcgaccaatatttgtggtatgaagctgacaagcggagactgtttccatcttgggtgaaacctgccgacactgaaccaccgccattgctcgtctacaaatggtgccagggcataaacaatttgcagtccgtttgggacaccagcgaaggcgaatgcaatgtgttgcttgaggccaaagtggagaaaatgtacgagaaaatggacttgacattgctcaacagattgctacgactcattgtcgaccataatatcgccgattatatgacagctaaaaacaacgtcacgataaattacaaggacatgaaccacactaactctttcggtaggttttttgtttcaaataccaggcaccagttgagagttcattatttcttcgtcaatttctcttttaggcataattcgaggactccaatttgcctcattgatcgttcagtactacggtcttgttctcgatttgctcgttctcggtctacggcgcgctagcgaaattacaggcccaccacaagtggaacattatagtttttgtgttactttgtaa

SEQ ID NO: 58440 - DNA, 381 bp, Heterodera glycines
atgccggccccaccaaatgcttcggttttaaaagtgccaacgtttttcctcttttttcaatttttaggacctcaacgtggaagccaacggactgagtgaggactttatgttcgacatgaccaaggcggagattccggcggagactttcaaaaagattgtcgcttggatggaggaacacaagggtgagttggcaatgaatatttgggcttttctttatccaacaaaactattttctgtatttcaggtcagccggtgcctgaattcgaggaggtaacacaaagttgccctgctgatctgttgaaaaactcccattttcaggatccgaacactttcgagcgcaaatggctcccccaaaacgattttcagcagaatttcttcaag

SEQ ID NO: 58441 - DNA, 1146 bp, Heterodera glycines; identical to SEQ ID NO: 27777

SEQ ID NO: 58442 - DNA, 580 bp, Heterodera glycines
atgcgaaacgccaaaaaattcgagtatgcgaaaggcgaaatgcgaaaagcgaaacctaggcacatccctgccactgaggtatgggtcagggatggcacggaattccgatttccgacattttggggttggaattccgatttcagaaaatttttagcgcctggaatgccatccctgttatgggtacttcaatttggtgttgatcaaatgagtgcccatacctcagcgggtataagcttagagaattgtgatcatttgcacattttagcatttagagcattttgtgctctctgatggacataatgtttttttccagaaaaattttcccaagtccctagaaattttttcgtgtattttggagtatccagatcaacatgaagaagtgatctgatcatagtgctgcaaaagacttttttcatctgcaccaaaaaaccttagcaggaattttttaggtattatgtttttacgtgataaaaattttatgcaatacatatggtgctatgtcgttatataaaaaaccatcaaaatggaaattttaaacaaaaaactgcccataacctttgtcaagctaatccaaattaaa

SEQ ID NO: 58443 - DNA, 271 bp, Heterodera glycines
agctcctctctgatcacatcgagtccgcccaacagttctccgtccaaatagacttgcggataagtgggccaatcgctgtaggatttcagtccttgtcgcacctgctcatccgcgagtatgtcaaaggtccaaaaatccacgttgtgactgcgcaatcttaaaaaaggaacgatgagatttgctccgatgcggaccgaccactcacaaatcaacaatctgacggctgaagcctgaaaagggaattcaaactaaattccgttgtgttaaagct

SEQ ID NO: 58444 - DNA, 523 bp, Heterodera glycines
cttcccattccctaaaaaggatcccaactcgcgtctgaagagactgatcaacactgctcgactcactctgttcatgaaagggacgcccgaggggccgaaatgcggtgggatgaaaagggggaaggaacccctggggaaaaggcaaatttgaaggaaattctaaggggttcgtattaccagcaaattcaaatcgttcagtccagagagattcgttttttagctttaacacaacggaatttagtttgaattcccttttcaggcttcagccgtcagattgttgatttgtgagtggtcggtccgcatcggagcaaatctcatcgttccttttttaagattgcgcagtcacaacgtggatttttggacctttgacatactcgcggatgagcaggtgcgacaaggactgaaatcctacagcgattggcccacttatccgcaagtctatttggacggagaactgttgggcggactcgatgtgatcagagaggagctcaatgaacaaaatttcgtagataaattgccgaaa

SEQ ID NO: 58445 - DNA, 1164 bp, Heterodera glycines
  unsure (1)..(1164): unsure at all n locations
atgatttttttggcaagaaaaccatttaaatttgtacgaaaaaatgatgacagagcaaaaaaagaagcaaaggatagctcaaaaaagacacatgtacgtgaaataaataaataacacaagggtttgtttccccaaacaggaataggtatgtcgtaacattgtcaattccttgaatcatccaatttttgaccgtataatttttcacagtcaaaaacgataaagttaaacatctgtcattattaatgactcattaagaatcttgatttttggcagcgttgggtcaaccgaatttctttttgtgccagttttacaactttttttgtatcaaaatttggcaattttacgcgaattgttgagaaaatatttaataagtgaactagcggagcgaataaagtgattgaacagtttttttgtattatgtcaatgaacaaaagtggaagaaaatgactaatcggcagaacagcagtgctttttcggtgtttgaaaattttagtattcgccgggggcgaaaatgcgtaaaataatttatttgttgtactctctgcccacgaaacaaacaatgtaaaacagacacagaggaaaagggaaatagtgttgtagttagatggcagacgaaaactgatatatcgccaaatcaaaaacagtaccatttcaaaaaagatttttattcaaatttgctcaaagtatggagccacgcgccgagattttgcgggatttcagtccgcaattttcatttgttaccaaaaacataggcatttcctaattaaaattgactcttaaatttattttatttagaaaaatcactttttttctaatttactaatggcagcttcctcatctgctgcttaccccgtgctgtttttcacgcaaaaacgggcgggcgatggtgagttattggcacataaaacaaaaatatttgtcgccgggcggtccgaaattttggaattttcgacccttttgaatttcatacgaacactttcattcatttttaattttttttctccccgaatttagacaaactttgggtgttctactggctcagcgatgagtccaaattcggcatcgccagcttccccgacacagtgtacgaaatggacgcggacagaaacacgaggagggcattcctcggcacattgccaagagtttggtggnagagtactggga

SEQ ID NO: 58446 - DNA, 882 bp, Heterodera glycines
atgtacatagcaacttcgcagtcttacaatggaatatcgggcgagcccagtgagttatattttccacttccaaaatccacgacattaaattgtgatggccatggatttgacatttcatgaacctgtaaaaatttttcaattggtatgacggtcctgccactacggatgccaatccatggccacagagacccaaaaatgccacaaagttacgaatttttaaaacagaatttcctcaaaaaatgtgtcgggatgaatggcatcaaatgttggcacattccttatctttttcaccccattttcccaggttcgtcctctccgccggtcaattggcgttccggcgcattgcgcggtggtcgaaaagtgaccaaggagccggtctacgccttcattttgcccaacttggagcagtacccggccgacttccgccactttttggagcgggacatcatcgaaatcagcacactgagggtcaaacttctgcatttatttgccatttgagtgtccgcccatgcttcagacaatttttttcagaaaactgcccaacttaattgcactttctggggctgtctgttttcactggttcagttcacccccaggaattttaatcaccaatttttaatttaaaatcccacaaaactggccctatttttggcgtaaatatgaaatttgattgccacaattgtcactcttttttccttacagtcaaagccatggcggggtcacccgtcaattttccccataattaattgcccccctttttttgctttttcagtgattccgatgaccgacaaaaaccgcaatttgccgcccgtccatttctcagtcaattctggcgccgatttcacttggttcaacgcttctaatacggatgattgtcgatga

SEQ ID NO: 58447 - DNA, 1665 bp, Heterodera glycines
atggccgtcccattgcccttctctgtgaatgtgtccaccatcggagtatgtttaaaaattgatatattcacaaatttacaaaatatttttaactgattattttgtcgttttcaaagtttgatttgtatcaccttatattttcccctttttcgggccaatttttatgtgaatttgacctaaaatcgctttttagaaaatccaactgattgatcccttttccgacgttttgtcggaaaccctttccccttgttaaccctttggccctttactaatgaaacctaaaattatccgcaaacttcccgcagaattaaacaacgaattgcttcaatttgcccccgagtttttgtgtcgaagcgttttggctaactctaattttttgttttatgatttgattcggaggagtgaaagaggcaaaaaatggaaaaccaaagtatggaaaactgaaacaccatcactcaatggacatgattttgggtccacttgggcaaatttaattgtggtttcaaatagcgataaacatatccaagaaattttcgctttcctacgcatttagcacaattttcttttaagtctgtggaagaaagtgaagcacggaccacgtacacgtacggcaatgtcacagtccggcctttcatcctacgaaaccgacgccaccacaacttcaatttcattgttgaagacctggtcgaccccaatttatttctccgctcggaccaaaacaacggacgcattggcctagtgtcaattcgtgtcggtaacgctgcacaggtgaacgaccataaaaataagtgcaaattaagtcatttttcacccatttgatatgtcttttttaatgtcgttggattttgtgttcggatattttggttcccaccttacgattagcttgtttttgttttgagttttaattacaaaatctaattatgaatttttacctaatccaagacctggtttcattcggaatccttttttattgctcatatgaaaaaaacgcccaagtgcgaaatggattttgtttatagaataaatttcaacacagagacaagaactccgacagttcttcctcaactcttctcaaaatataatggaaacgtttgaatgcatcattatgttcttctccctcgtccacgtaatgtttactctaacggtcgtaaattatttaagtaggagtaataatacgacgattttggacaatttaacagattatgcccaatttgaattgttgagattttagtctattaaaaaatatctaatatatttttatccaaatgctaagaaccaaaaactttcatttggaaatagcgcgggaatattgaaatttaataattaaaggcgtgggatgtagtccaagtacgatttttgtcggacaacttggaaacgtggactgaagtcatggaacgttttgagagggccgtaacggcagtgagtttccattaatcacctcttctgcaagcttgggatttttaacagattgaggatggcaggccgccaacgccggtgaatagtccaagtccagtgcaagaagttgtttcggctaacaattccggcgagaaattgccatcgctcaatggaagcaacgaggaagaggaggcgaattgaacggacaattcattgttgtgtttaaatatcatttgttgatttcacaatttcaaaattttacataattga

SEQ ID NO: 58448 - DNA, 1270 bp, Heterodera glycines
atgttcgaggagggccggaccaagatcaagcaggtcaacgacgagtccgccaccgtttgctacgccttcaaacacttcctggagtttccgcgcgtggacgacgcgacggcacggcgccaacgcattgaccgactcgtcaaatttttcatcgacgaagcgctggagaagaagcgcatggaggtaaaaattgaattcaaatttgatggaaaatgtctgaattcgtgtaatcaacaaaatttttctaaaaaaatatgcgtaattttctgcgagcaaaaattcaaaggaatttttaaaaaaattttttggtctgttttaaaactaaaaattgaatctttcttaaaaaatcttgaattttccactaggaaatttcaaacacatgcaacggtaaaaaatggcaaaaattagacctattttttgggaaaaaccgctacaaattccttcttttactctccctgggggctgaaaatttataaaaccattgagaaattttttttttttttttttgtaattttgctccgaacagtaaacaggaaaaggccttcgggttccgctaatccgaaagtttctggctacaagtttgttctgaatttgatttattccggccaagataaactttttgaaaatcactactttttgtcgtctgtccattttttttatcttttcagcagggcaaacagcagcaggtgtccgtgtccaacaattggtcaacaaatggactaccacaaaacaaaaagagtccgatcaaggtttgtttgtttaaacaaaaaaaaaaaattttttttttgggggggggggtcagtttttcccagagggggaggcctaattaaatggggctaatagcctccggccgggtcacaaaattgtatgaattttgtaaaataagttttgattggcaaccaagcaatgtaatggacagcccatccatttaccggaaatttttttaaacataaaaattaatcgaaaacttttagaaattaaaaaaaatgttttttttggttgttatttggtttttattttcaaatttggattttttcagaaaaacgggaatatggtgttcatcgggagagggatttaggcccaacaaaaccatgcgaaatgcaaaataattagcctaacaaatgtgaaatattttcagcgaaaattgccggcaaactcgcgcaaggcactccgcaagttgccgaccatgggcctgaactttgacgacgtaattgaggaggatcagcaacggttgcgcgacatgcacccggttgggtcggaaaatataaataaa

SEQ ID NO: 58449 - DNA, 420 bp, Heterodera glycines
cagtgccatatttgcgcagttccattcgccgttttcccgttgatgaacaacgcgtgccatggaatgtgcctcttgtggactattctccgtgcgattacaccgctgattcggtgcacggaaagccatgggctgacccatcggagccgtcaaaatgtaaattcaattcgatggacgacggggtgaacagagtttcgtttcacgggtacaatagttaaaaatgataaaaccaaatggtaaacattttcagcagttacaatttggacaccgatgggaggcctctgaaccctttcggacggacggggctcagaggcaggggactgtttggccgctggggtccaaaccacgcggcggatgccattgtgtcacgacggctggcgaatggccaattgcaatttgtggctattgaacggcgtgacactg

SEQ ID NO: 58450 - DNA, 194 bp, Heterodera glycines
gggaaaatattgatcataggccccaaactcaaaaatgcttaaaaacggtcagaatcgatgtaaaaaggtttgaaatgggttggaaaaatagaattaggggcgcgcttgccctttttcaggatgaaaagtgccgaaaatggagtgccaaactcaactgggactcaagtgaccgtgctatataaagcactcaaaag

SEQ ID NO: 58451 - DNA, 1029 bp, Heterodera glycines
  unsure (1)..(1029): unsure at all n locations
atgtcaatattcgagaattctgaaattccagcactacaagccaaaaatatcgctccaattgacatttatcgcccttttaagcgcaaatggggacttattttgtaattctcccgtaccgttttcagttcccactaagatgtcaatattcgagaattctgaaattccagcactacatgccaaaaatatcgctccaattgacatttatcgcccttttaagcgcaaatggggacttattttgtaattctcccgtaccgttntcagttcccactaagatgtcaatattcgagaattctgaaattccagcactacatgcccaaaatatcgcctcaaattgacattnatcgncccttttaagcgcaaatggggacttatttttgtatttctcccgttaccggtttcaggtcccccctaagatggccaaaattccaaaaattctgaaattccagccctaaatgcccaaaaaaatccgttcccattggaatttaatgccccttttaaggggaaaggggggattttttttggaatttccccggccccggttttcggcccccccaaaaagggcaaattttcgaaaattgaaaattccccccccccagggcaaaaaattcccccccttgtaatttttttcccccttttaagggaaaggggggggattttttttttaatttcccccccccccctttttcccccccccaaaaggggaatttttaaaaaaattttaaattccccccccccccgcgaaaaaaaaatttccccccttttttttttttttcccttttttttaaaaaggggaggagtttttttatttttcccccccccccgccccctctcccccccccccccgaggaaatatataaaaaaataattttaataccccccccccccccaaaaaaaaaaaattctctcctttttttttttttttttttttcttttatggaaggggggggggggttttttttttttcctccccccccgcccccccccccccccccccccccccccccaaaaaaaaaaaaaaaaaaaaataaa

SEQ ID NO: 58452 - DNA, 648 bp, Heterodera glycines
atgtattcatttactaccgcttccattcttttggtgtgttttatgggactaattggactcgccgaattgggcgatgatttttttgatgaattatggaaaatgaacaaagtaataacaaataaaaagcaaaattcaattcaaaaggaagtaaaggttgaagaagttgattatgagaagattgaaaatgaaagtttcgaagatgaaaaacggaccaatttaacacaaaaagtcaaaaaagagatggaatttggtgatgaaaaagtggatttggagaaatatgccaaaaaagaaccaatttttgatgaggaagaagaggagaaaattccaagggaatgtgccgaggaaaacattgtgccgacatattcaactgaagaagaaatggaaaacaaaattggcaaatttaaaagtttgaattttcaaaattggaaaagagcagacaaaattgcaattataaatcagttcatttcaatgagaaatgaatacaaacagagaagcgattataggcaacaagattgtggaaggattgaacaaaaaattgcaaatgaattggaaataccgcgcaaaaggatttacagatggaggagggcattaggcctagggcccgaatttttagggtttcatctattttttttttgcggatatcatatg

SEQ ID NO: 58453 - DNA, 324 bp, Heterodera glycines
atgggacaagaccagggttcccggatatttgcaggtgacctcagggtgtatcaagtaaatttagcataaaatgtaaatttatcgaatccctggttattcccaaaaaacatttgaattttcattaaaaaattcagaaaaatcgtgatttgtttgccaattaaattttttgtcatattgggcgtaaaatgatttagaaaaattaaccacaaaaaagtaaccaaaatgcatttttttgcaaaaaaaatacccaatgggcttaaaaaccccaaatttattcaaaaaatgcaaaaaagattgacggattttttttttaaatttttttaa

SEQ ID NO: 58454 - DNA, 80 bp, Heterodera glycines
attttcagtcgctttgcaatttcccgagggcctcacaatgttcgcctgcgtaatcgtcgacattctcaagaagcactacc

SEQ ID NO: 58455 - DNA, 363 bp, Heterodera glycines
atgggaaaagtgaaagtgagacaaacggaagaacggacaaaggaaacggaagaacggacaaaggaaacggaagaacggacaaaaggaaacggaagaacggacaaaggaaacggaagaacggacaaaggaaacggaagaacggacaaaaggaaacggaagaacggacaaaggaaacggaagaacggacaaaaggaaacggaagaacggacaaaggaaacggaagaacggacaaaaggaaacggaagaacggacaacaaactcacgtccatgtccaacgatcggatgttcaagtcgcgtcgagaaaggagcaaaatgttccaatggcaagaatggtttttgttggtcatcggagggtttgggtag

SEQ ID NO: 58456 - DNA, 2532 bp, Heterodera glycines
atttttcagaactaaagcagaccgaacccgtgccaacagcagatggagaggcgacatctacccaagctgccgatagtgggccgtcgagcactgcctgtctgatcacttctgttcagccttcggtgcaacttcgtcccggctgatcgtttcccctccgcccggcaccgaagactctgccatttcctggcacttctccgcgcccaaccccaactcgtggattcgttttgtcctcagcgattttcaattgccccagtcggcatcttcgctttccgtttatcccatttggtgttccgttcgtcgcaattcaccggttttttcgtctttctttcgtccatcctttcctttctcttccccttcccaaagagtgacgaaatctgtcgcgactccgacgcgttggcatttcgttttgacgccgcttcgcctccccaacgtggcaaaatgtacactttgcgctctaatcgtgccactttggtgtttctcccgaatttatccgggaagttccgattgacttgggaggagatcggatgggtggaaggagaaaatgggacacggagagaagaaacggaggcaaaagggagcgaagcgccggaggggaaaggggcgacgagcggatttaaatgtgggggagagttagtgccaagatggacggcaaacacacttcgcaatccgacgaccaacatgggcatgtggtgagaaagcgatttggcacgaggggagggggaggacaattcgccgccggtgggactcgaacccacgacccttccaacccgtggaatgccctaccgaaaataccattacaataggtaccgtaacaacgaacgctgcaaatggacgctgagaagaccaatgttcgagacaattgtgatgaatgtgacggctattgagttggaacagcacccgaactgtcagtacgactttttgtcgttgagcattaagaatttggagacggaggacgaattgaggtcgaaaggggggggggtaattagcgaaaattagagatacaatataaactaattaataatcggatgaatcgaaagatgagagagaaataataacagagaaaaatgccaatttcaccacagagaactttctgacatctcccgaatatgcaagaaaaagcgaagtgcacagccaagtggaagtgaactcggcggagaacgcattcgtctatttctattcggacaggcaaatcaaaagaacagcaaaaagcgacccctccgccccttcccgccgaaattagtcccgaaattgccctttttaaggtcccgcttctaccgcggcttctccctcaactattcgttggtctgtggctccaccgaaatttggcccgtccaaaacggtcccatggactctgtgctcagttcgcccggctacccaaaccctccgatgaccaacaaaaaccattcttgccattggaacattttgctcctttctcgacgcgacttgaacatccgatcgttggacatggacgtgagtttgttgtccgttcttccgtttccttttgtccgttcttccgtttcctttgtccgttcttccgtttccttttgtccgttcttccgtttcctttgtccgttcttccgtttccttttgtccgttcttccgtttcctttgtccgttcttccgtttcctttgtccgttcttccgtttccttttgtccgttcttccgtttcctttgtccgttcttccgtttcctttgtccgttcttccgtttgtctcactttcacttttcccattttccgttggctccgcgcgattggcagtccaacgaatgttccaccgattcgcttgacttttcccacttccctttcttccgcgagtcagcaacggcaaaaacatcgaattcgttttgtggccaagagcagttcaatctgaccatcagcggtggttacgttttcattcgcttccgcagcactttttccaggggaagggtcagtcgaagagcaaagcctttccaatgctttttcccctgaagggattcaaattggcactcgtcgaaagtgtccacgattgtgcctcttccctcatccgattggatcagcttacgcccctaagattactttcttcgcccgaatttccccatttgtcgcccaattcactcgattgccaatggattttgagtgcaccgccaggcagacggctcaaatttaccgtggacccaaagacctttttgcttatgggcacccgagacgacgatggaaagtgcgcaaaagggagaaaagaaataatggaaggaaaaaggggaaaatgaagggatagagagagagagagagaggaaaggagcaacaagaaaaaggaacggattgaaagatgccattttttgaccatttcagttgtgcgggggactttttggaggttcgagacggtccctccgaagcttcgccgttggttggccgttactgcaaaaacgaagcaccgagtagcattttttcgacgggagagcatcttcacgttcgatacgtaacaggttaagcatggggaagagatggacacatgcaaattagcctgatcagtgatcattatttggccggtaat

SEQ ID NO: 58457 - DNA, 1335 bp, Heterodera glycines
atgtttaatcattcgccttcgatcaatcctcttgatcttttattcatctatttttcagcgtgtgagaaggatttaactgctctgaatgggacaatctctcctccgaactttcctaatccctccccgcgtccgttcaaatgcacttaccgaataattgccgggcctcggcaggccattcgcatcaattttgaccaaattggcatcagcaccgatttcaacacgtgcaattaccaccgcgagagacatgcgcaaatggaggattatgttgaagtgaaaaagggggggggatggcaaattaaagacggaatatttgcttttttattaaacttttttcagttttcgggcggtcacccgtccaacgaagtggccaacagacggtacgtttgtgcccgttatccgttcattgcgccggacggagaaatggtggtgagcagcggcatccgtcccttttccataacctacagtatgcctttggattttgtccctaccgtatcctctgctgatactttttcttccaattcaaaggcacaagtggagcagcctcaaacaaagggtttctgctcagttacgagttgatcaacatcggatgcggcggtgtcctctccatcggatcggacgaagtggcgggagaggcgccacagctgaccagccccaactacccggactcgtacatggcattcatgttttgtgtttactttctccaagtgccaacggtaaacaaaagagagagtgaaaagagagagatagagagaggagagagagagagggagagaggggggagggaaatagcaggcaatcagagccaaaacaaataaataattttagggaagggctgtccgactatcttttgacgtgttcgacgtggaaaatgttgcgcatagagacaactgcgaatttgacagtgtgacggtgtacgacgaattcttcgaggacgaacagaaccatggcaaagttttgggcaagtgagtgaaaggcaacaaaatttaagcatttccatgcttacactaattatctaatcattacatgcttaattacccccaaccataaatttcccaatttgccttccttagattttgtggcaagtctttgcccccgccgcttctttcttccggtgcccaaatggcacttgtctttctcagcgaccgttctctcagtggcgccggtttcgccgcccgcttccaagccgtcgatttggcctcccattgcgataggactttcactgcccccgaggcacagtttgacttcgatgccagtgaatttgctcaatcggacaattgcgtctaccgaattgtggtccttttttatttaaacatttattcatttgcacttttttga

SEQ ID NO: 58458 - DNA, 740 bp, Heterodera glycines
atgccgccaagtggaacagttcctgcaaaaggagaagccccacaaacatttgatccttgtgttgaacaaagtcgacttggtgccaaattgggttacggtaaatgcatttttcaaccggcacaaatttataatttattccaaataattcggtcacgctttattttgtaatttatagcaaaaccttaattacattgcagaagaaatggctccaaattctgtccaaggaaattccgaccatcgctttccacgcgtccattcagcatagtttcggcaaaggcgcattgatcaatttgctacgacaattttaccggctccaccgcaaggaacggcaacagatcagtgttgggatgatcggttatccgaacgtcggaaaatcctccgtcattaacacacttagggccaaaaaagtgagtgaagcgcaaagggtggtcattgttgggcaagggcgtagccaggggcccccgaaactcaaaaaagtaaaaattttcagcaaattttatgcaattgcatatttttgaaaaatggacctcaaaatggcaacaacaaaaaatagccatttggcgacaaacggttacaaattcctgtaaaatacccccccccctaattcgggatttctaaaaaagaaaaatacgcccttaaaatcgaattgttgagttcagtccccccccccccccctcgaagcaagaatctggctacgctcttgttgttgggtactaaaaaaacgccaaaaaaatttaaaa

SEQ ID NO: 58459 - DNA, 1213 bp, Heterodera glycines
atggtcattctggattacattatgtgagcgatattgataatcattttcttttctaattttcaataatttaagacggaataccgaccgaggaaatgacaattggttgatttgttacacaccaccgacaacaaaagcaaaagaaggaaatggcaaacagagaagaagggttattgaaaagaaaagtttattccaatatttattttttctagtcatcaagcagcagtttgggcgagttgaagcgatcggacagtttgacccaattgaaggaggaattgggcaacgaaccggcaaaattcacggagcacggcaaaatcgtcgatatccatgagccggtcacttacagaagtgaaggtatcagtgcaaacaaactctttatcacttaattgtttgtttttaacccggtagggtccatcagcggtcgtttgtcctccaacagcagttgggaggacgtggaaatgccccaggtgaaagtcgccgccatcgacaacggactcgcctttccgtttaagcaccccgaccaatggagagcatgtgggtttggccgggcacctaccaaaagcacagactgacattgacaccccaattcagaccctttccaatgggcaaaactttcgatggcacagctcccgttcagtgaagaaactgtccacaaaatgttgccggttcttgaaaagagtgactttttgcgcgagttaggcaatgatttgcggaacatttttaaagtgggaaaatctaattaaaaaagaaataaaataaaaatttagacggataagggtttcgacaaaaagacgtttaacaagcagctcagtgtggtctatggccaaattttcaacctgcgcgaggcgttgagggaacggaagacgccggctcaattggttcaggtggggcttttggtgtgaggcgatatgttggaatttcttacaacgctcactagcagttgaaatgtgtctatattagtacggaataataactaatcacgtgtttcgaaaagttagtaacaataaaatgtctcataattttactccgaaaagttggcattgattttccaccttttgctttcagatgacgcccctgtacataatcgagatgaaaaagaatgtgttcaagcagaaagtgcacacgcgttccccgctcttttcatgctgttgactcagtgataggcctttattatcagacattttacgccatttaaaaagttgtaatattaaattta

SEQ ID NO: 58460 - DNA, 998 bp, Heterodera glycines
atgttgagtattactcagcccattctctacacgtatttgtttccgcttaactcgcatacagaaacggcaaaagcggcggaaagtcgaattggcattccctttataattcgccacattaattcttatttggcggcaaaaaacaaagagccaacagccgatgccaaagtgaacaaagcatttgccagaaaagcgcaggaaattttcacagaagcgtacaaagggttggcgaaacacggcactttcttcggcggcgatggcatgggacggagtgtgtgcattttgatggcattcaaacggctaattgagggcattttaccattgtgtatgacggacaaaaattgcagcaatttggaacagctcaaaaagtggagtgccaacaaaaattgtgcaacggacgaatgcaaaatgaatgcattcaatgtaaaaaaagaaagaaagtgacacgaaaaacagaaaaatattaaaaattattaaataaattttacaaaggatttttagtaataaatgttgataatatttaatcttaggaacaaagaaactttatggcatctattcacttggaaatgttgaggctatacatcggagaacaaagtgaatttgctgaatttataagaaaaacgcctggcgcaaaaaatcggatgcgcaaattgttagtcaaagaggcgaattatgaagagttgatggaaagttattcagcgactgtgcaaaacgaagaaggtgcgaaaaatatatttatggttaaggttatatttttaggtttttacctcttttttcgtgagttccctcggtctgaaacgcacgaaaatttgttttttataaacaacttttcgagttattagcacctatttttaggtttttatttttagaaccgaaaccctaaaaaaattgaaaaacctatttgacatattttggcgttttgcccaaaattgtaacattttttgtaaaatattatctaatcatgaatttacaaaccaaaagggacctcccattgattttta

SEQ ID NO: 58461 - DNA, 331 bp, Heterodera glycines
atggatccaattatggggattgaacggatggtggttggacccctgcccctggatcacattcgttgtttaaaaaaatgggtgaaatgtatgattttttaagcgggggcaggggtctggacccccgccccggggccttatactactgtcaacaaacattttttggcactttacaattactaccctgataataatgtctaattatttcaggcccttgtcgattcaattgttatttctcccccaactgacagtctgcaaattttcaatagccctgacattcaagcgatgactcgaaaacaatagtacgtgaccagtaaaccaaaaaaataataaa

SEQ ID NO: 58462 - DNA, 291 bp, Heterodera glycines
atggtgaacggttttttaaaatggtgtttatacatcaattatcacaaagtaatttggtctatctgtggcctaatggttagtgtgtttagttctttcggagaggggtaaaaagttcggtcccgacactatgtgattggatttttaaatgaattattagttataaattaatgctcaacacgaatacgtatcagtggcctaatggttagtgtgtttggttctttctgagagggggtaaaaagttcgatcccgacaccatgtgattggattttgaaatgaattatttagtcagaa

SEQ ID NO: 58463 - DNA, 784 bp, Heterodera glycines
catgtacttgtacgtgttcttacgttacttgctcagctcggctgtggggtttggtgtgctggcgcgactgtggggttctaattcgcgtttacggacgtaaactcaagcgcaccaatgctttgcatgctgtggcggagtgcctggattactggcattcctgctttgatttttcgacctgaactcagacgtgaacacccgctgaacttaagcatatcagtaagcggaggaaaagaaactaacgaggattcccgtagtaacggcgagtgaactgggaagagtccagcgctgaatcgcagctcctctggggttgcgaggtgtagcgtatagaccgtgagcttgggttggcccgcttgttcaagtttcccttgaccggggctccagagaaggtgcaagacctgtccaactggcggtgcctacccatctttacgtgtcttggagtcgggttgtttgggatcgcagcccaaatcaggtggtaaacttcatctaagactaaatacggccacgagtccgatagcgaacaagtaccgtgagggaaagttgcaaagcactttgaagagagagttaaagaggacgtgaaaccgatgaggtggaaacggacagagctggcgtatctggtctgcattcacccgtttgttgctgtacgttggcctgctagcctccagactggggtttgctgtccttctgttcagtggcgaatggggcatttgcaggcggagtgcgctgagatgctcggagtagctgcgtgagctcggtcttgaggccagcctttcggggtctggtaccc

SEQ ID NO: 58464 - DNA, 1768 bp, Heterodera glycines
gccaattcattgtccgatgcttcttttccattgttttgtcgtggctttcgctttcgtttccttaagacaccttttccacattttctacctttttgttatggatgggtcttttaacaattggaaattacacggccaagtcattcattttcatcttaaaatctttgccgtcatggcaatgccatcggcggaagggaaaagggaggggggggggggaagggtgaagcaaacgaatgaaaagcgaagtgacgtcacttgcctcttctctcactttttgcctttttcccaaataatccctcccggcaaaaagggcactacgaccggcgaggaatccctcggaagaaacaaacggtcaaagagagtgagacgaataaagaaagacggaaagggagtcgagaaaacgaagaattgagagacatagataggacagacagaaggaagaagcataattagccaagggacggaggggggagaggggggattatggaaaaagggacggatcggtcggaatcggaattagtggagatgatgaagacgaagaagcaatggacggggaataattaatccacggaggaatttgagaagggcaatattgtttagtaaataatatttatcaaaaacaaaacgaaggaaagagagtcgctttgaaagtccgcttttgcaccgacagatcagtctctcttttgctgaccttttctgctccttgctcatcatcccgttcagcttgttcagttctttgaggcccggttggcacttcgccggagacaattccggtagaatgcgttttgctctttgccaaattgcattcccacagctctttgcaaatgcactgtgtatgtgcatgtcatgttgatctgctccacggtacctttcaataatgaccgattgtccgtccgttcgacaattcgtccgtccgtttgttaggtgtacatcttcgcttggatcagtgttgacagatactccgcctttatgaagccgagtcgttacgaagttgctcataccgccactcggtgcaaatgttggatcttcttctcctgggccacttctctgctcatcgcctgtccaattcttatcgccaaaatggaggtcgcatcgttcgataatcgtcactttcccggcacttcgctttagtccaaatactcgccgcagttggagctttgtctgctcaattggacctccacaatggcatattccgttacgcttgccgtgctcgtcctggtcccttctctgtgcacaatggcattcacttccgctgccattattgcagctgtaaataaaccggacgaggttccccggtgtgccaagtttcagctatctgtcccactcattcagttggaagacttgcaacgaacaattctcgacaccgacccaaacttcgtcatttgtgtgtcccaattggcccatggctttaccctccccctccctttagctctgttcatcttcgtctctttcctactctcatggcttccgatcattgtgtttcagttgttgcccaattcgctggtgggccaatcggacctttccatgatgcaatttgtaagtgtcacaattcccaagtgtcgtccgcctttgtctctgctaatgccccttttccataggcattttcttggctggcaattggcggcggttcttccaaattgctcatttacaggcacttttctcccataattcgctattacctttccacttcagcttcaccagtactgagttccggaggttcctctgctgtttttcgtgctgcttgccccaaatatcttccaattcatttcca

SEQ ID NO: 58465 - DNA, 473 bp, Heterodera glycines
atgaaaggaaaagagaaaggaacgaagggagaaaaggaaagagaaatgtaagtaattggtgagtgattttcaaattcaaaattcgaaacaacaacttcgaaaaactgactaacataacaagctgcagaaaataggaataaaagtggaagactccgttagctttgtagctaaaattaaatagcgacgaagaaaatggaaatgaagccgtcactggtggaagcatgaaaattggccaggaaggagcgagggagcaaaagatagtcctttcaaagcattggcacaatcaaataggagccaaaagcaaaagcttaaaacgggagaaaggaaaggaatgccgaagcgagaaagaaaaaggcaaaggaagtcctttcagatagaattaatttgaaaattgggggggggggggggaaaggacgcaaaatgaatccgtccatttgtttattggcgaaatcggcaaataattactacatgta

SEQ ID NO: 58466 - DNA, 211 bp, Heterodera glycines
actttggcatacgaggaagctatggaggacgttgaattgttggaggaggaggaggaaggggtggaggcaaattcatgcggcgaaatggaaactgagggcggcaacggcacgtgaaagcactgcggccccccccccccttattgtgattattcattatctttattacatgtagtaattatttgccgatttcgccaataaacaaatggacgga

SEQ ID NO: 58467 - DNA, 1490 bp, Heterodera glycines
atgttcgcgacccgtttcaacggatttgcccagcaggattcacacgaatttattgcatttcttttggatggccttcacgaggacttaaatcggcggattaatcacagacaaatttctaacaataggatggatgaaactgaaaaaagggaggacaacgaggaagagggacaatgtgccgaagatgggaaaagtgaagagcaaaatgccatcgaagaaaagcgaaggaaagagccgaaagtgtcggaggaagcggacacttcgaagcaggtgaatagtgcaattcaactattgttgctgaactcgttttgatatgttcagtcaatttacagcagacagcggaggaggcgtgggaggagtacaaaagagtgaacgatagcattgtgaccgatctgctgcatggacagctgaagtcgtcattaacttgcaatggtagccgaacctccttttgttgttgttcagagacccgaactttgaaaggctttcatttcgaatattgaacgaaaatccgaaattcgcctctgacttaacaaaattttgaaattaatgagtgaaatggtgctcttttttatgacgaaagaaacgattcttcggtttcagtttgtggcaaagtgagtgtcaaattcgaccccttctgcttcctctccgtgccgattccgcctcgtcccctaaaggaatcctcctcaattatgccgatgccaacgaatggtcaaattttgaaaactgcagtaaaaagccgtaaaagctctgacaatttgatgcaattgactgcgagagaggaggaagtgagtacatttctgtccattgactggcggaaaataaatttgtccatttcagaggcatcgaaacgcagttgaaaatcttacgcttacacagcgaagccttcggtccaattattacggattggaatatttattggcatgtttacactgtgctttgctcatttctctgagtgtcatgcttcccttccagtggtttctgataattgccagagagtggctgattcgtccatggaccggctgggccactgaactttatcgccactttttttcgggtcccatttctctggagcaatgtttgggcagttttttctcggtcgattatttgcacggcgatgacatgtacaaatgcgaacagtgcaaaaggtgaggtgggcaggaagcgctttctcgtcacttgctcgcttattcagacttcgaaatgggactaaactctgttcgctgactcgccttccccaagtgttggtcatccatttaaagcgtttccgcaacgaagggatgtacaacgtcaaattgggctccaaagtcgcatttcccctcaccaacttggacttgcgtccatttatacactccgaggcacaatttgacccacccgaatgcccaaacccaaccaaatacgacctttgcgggttaatcactcacaagggacaaaacttggaatgtaagtttactctaaataagatggactatgaaacgatgactgaattcctatga

SEQ ID NO: 58468 - DNA, 469 bp, Heterodera glycines
atggaaaacagtcgtcggtatatgacacgacaggagttgcgtcgtctgttagacaatggagttgcagtcgaaattgaggacaacgagataaacgtcgcacatcagcaaggattgcggacgaattggacggattatgcggcggagaacttcgaagcgtcgcggaattttcaaccggccgccgtttttctggaaaatcatcagcgcgaaatagcttttagctcacttcgggtcccaattcgaacttcaagtcccaataatcagaaccgggaccccgttgcaccaccggctcagaattttgttctccaaaacatgctccctcgccgtttagacaacgacactctttcattggcgggcgaagaagtggagttggaccagcacaacgagaacgaactgcttggacttccgttggatggccgtggccggactgattcaatgttggaacaccaagtgtccgccattcacccaagag

SEQ ID NO: 58469 - DNA, 456 bp, Heterodera glycines
atggctttatactgccatcctttttttgtggaagttcattcgtttaattcaaaaaaaaagtggtgtaaaatgcagcgtccaacggtttgtatttactccgtttgaattgcttgtggcaaaaaatacaatagacagtggaccaaaccaaatggttggttctggtcggcagcattcggcgaaggtgaaaggatacgagcatactgatttgttataattatttaaattattcatattttaaataacatttattttaaggtgatatctcaatttaataaattcatttgaaagtctatgcaaaccgagatgattgtggatgaaaaacttcaaaattttagtaaagcaaaaagtcatgatccattttttatgaacaaaaagcatggccaattttatgtctactttctttagtttttttttgagattttaaattgattaagtgaaatagtgatatacaaaaga

SEQ ID NO: 58470 - DNA, 48 bp, Heterodera glycines
gccaggacgttttcgcgtggccattttcgcgtggccgttttcgcgtgg

SEQ ID NO: 58471 - DNA, 138 bp, Heterodera glycines
caaaaaaactcagtgtgggcgatccacaaaaaactcagtgtgggcgatccacaaaaaatctcagtgtgggcgatccacaaaaaatctcagggtgggcgatccacaaaaaatctcagtgtgggcgatccacaaaaaatc

SEQ ID NO: 58472 - DNA, 1556 bp, Heterodera glycines
atgcccaaaagtgccgaagaaagcccgctgaaaagtgccgaagaaatgacgaaaagtattgacgccgaagaaatgcggaaaagtgctgaagaaacgcagaaaaatgccgaagaaatgccgaaaagcgaaggagatatgcggaaaagtgctgaagaaacgcagaaaaatgccgaagaaatgcggaaaagtgctgaagaaacgcagaaaaatgccgaagaaatgccgaaaagcgaaggagatatgcggaaaagtgccgaagaaagcccgctgaaaagtaccggagaactcccgctcagcttcagcgaaatgccgaaaggctctttgcaaaaaatgaaatctttacccaaagacatgtcagcaagcattggagaaatgccaaaggatgttttgcagaaaatgcggtcactgcccgtcaacatgccagggaacattgaagaaatgccaaaacatgcattgccaaaagtgccatcaataaacgctctgccaccacacgacgaagaaatgcggaaaagtgccgaagaagtcgaagaaagcccactaaaaagtaccgaagaaagcccgctaaaaagtaccgaagaaatgcggaaaagtgccgaagaagtcgaagaaagcccactaaaaagtaccgaagaaagcccactaaaaagtaccgaagaaagcccgctaaaaagtaccgaagaaacgccgaaaagtgccgaagaaatgccgaaaagtgccggaaaactcccgcccaacttcagcgaaatgccgaatggctccttgcaaaaagtgaaatctttgcccaaagacatgcccgcaaacactgacgaagtgccaaaggatgttttgcagaaaatgcggtcactgccccttaacatgcatggacacgctgacgaaatgccaaaaataccaccaataaatgcagtgccagcaagcgttgaaaaaatatttaatgaagaacaggaaaaattgtcagcaaagccagaaattacggcaaaaaatgataaaacagtccaagaaagccgggaagagcccggccaaaagaatgaaaaccaagaaaatgaggtaaaaagtaaaaacaaattaaattttaattaattttcatattaagctaaatgcaaatgatcgggataaaattcaaagcccgaattttttaacgccaaattcaacgtttcgcgatgtttcggactcaatggacgatgaatttttcagtgcagagacagaattaaggcgaatgtcacgggaatcatcggaaaatatggcaaaaatgcttaaaaagaacagcctaggggatgataatgccaaagaaatttctatggaaagaacagaaaacactgaagaaattccacaggatacaccgacaaaattgccctcactgaatgcgataccatcgatagctgaagaaatgccgaaaactgacgatgcaatgcaaaaaagtgccgaggaaacccaatccgatataagtgagggcgtattgccaaaagtgccatcaatcaacactctgccatcaaaagacgaagaaatgcccaaaagtgccgaagaaagcccgctgaaaagtgccgaagaaatgacgaaaa

SEQ ID NO: 58473 - DNA, 692 bp, Heterodera glycines
atgtcaatttcgaacaattcaataaatgatggagatgatttgacgccagcagaaaatgagggtaaatgtttagaaaagggaaaattgtagaaaaattgaaaaattgaaatttagaatgtgaaattaaataaataaaattcaacatttaattactgtatttattgaattagagcccccaggggctctattgttcagccccctcaaaaaggggccttgattttaggagggctctaactcagagggtggctataattcagggggggggggctctaattcagtaaattcggtttaatattttcagaagtgaatggcgatgcaattagtttggacaacgatggtcaattcgatgggaaaaacagcaaattgtcactgatcgacaacagcttaaggtgaggggaaggaaaagttgaaacaatttggagaaatatttgaatttaatggaacaaaagtacttttgttgtaatttaaattcaggaatttcgtgaaaagattgccaaaatggaaatggaattgaaaatggccaaattggaactcgaaaatgtgagagttttgccataaaatttggaaaaagaacaaaagttaaaacagcagcaggaactgatgggcgaacagaaggaatttgaggaaaaaactgaattggagaaacagcaacacgaaactacgaccaaaggcgaggaagttttaagcgaata

SEQ ID NO: 58474 - DNA, 84 bp, Heterodera glycines
atgtgctgcgttggtagcattttatgtgttttgaaaggctgcggacaatccgtcagagggctatctgtcagtaatggacaatcg

SEQ ID NO: 58475 - DNA, 1029 bp, Heterodera glycines
cttctgatagagctttgcaaggcgctagtttatcagactgtcgtgaggcactaataaatgccgttgtcgatccgaccgtctgttatcagcgatcacatggtcaagttggttccatgttgcgcatgcctcctgaaggtggtcttcaatacatgcccatttacatacttggattgttaaaaaatgtaagtaaaacttataataattcttttattggtttaatttatgtccaaaagaaatccttaaccaatactcccgttaattattgttgcttgttatttttatatagtaatgatcgaatttcagagggcgttttcggattctctgcaaagggtcaccatcgatgaacgtgtggcaacttttctgcttttcaaaaatgctccgttggaagttctcttacttgagttgtgcccagctctttacgcttttcaccaaattctttactgcgaaccgaatcaggttgccggacaagcattttacccaatatagcaactgctaatcaattattgttaacgactgaaaatgattttctcaggatggacaggtcccttttcccgaccgtcttcctcctacttatgagcatatctcccaaaatggcatttatttgctcgacattggcacatttgtctatgtgtacgttggctctgccttaaatgtctgtattttgcgttctctttttggcaccgattcgttcgctaaattggattcggatgtaagtgaatgttcgactcttttgctatgactgtttcttttgagtcaacagtaattgaaattgacacttcgcaaagcaaacatttgcatgcctttcttcgccatttacaagaacagagagggaatatgtatgctccagctaaaattataaagtaagcgccttccgaaggaatagacgcgattcgaatttaatttagggatgacagtccaaggcgggaggcatttacgcgacggctcatccaggatcggtcggattcttcacattcttacaacgaatttatgcaattcctccaacgagaagtcagcaaagccagtaaatga

SEQ ID NO: 58476 - DNA, 1891 bp, Heterodera glycines
atgctgggacgcttcacgaaatcggtggacaaatccaaatcggagtcactcgaagagcgatcacaaccagcactttctgttgagaaaaaggagcgaccgaaaacagcaggtaactaagaaatgcaaaataagtgacaatttggggggtaatttggaaaaggccaaatgattggttaattgcccaattttggttagtccgccctttgaggaatgattgacatgggtggcgcttctgctcaaattgcctatgaacttccattgggccattccgatgctgcaacgggtgggcaagagaatgttcagctgctaaacctcggctgtcgtgacgacgaatcgcgtttccgtttccgattgttcgtcaccacttttcttggcttcggagtcaatgaaggagcaaaagcatacgaaaagtttttgtggaagcggttgaacaacaaaagacaagcggcaaattcgaccgaaacggacaatggaaaagacggcgcgaaagtgccgactgtcgttgacggatgtttgcctgtgaatatgctgaaattgagccatgccgaggagaattacgaccaattcgtacgaaaggttgcgtggttcaacgggggggggagtgaaaaaaatgccaaaacatttgttggcactttcagggaaatggcgactgggattcatgtgtcagcgacatcgtttcgctggttgaatttgtcaatccctaaccaacccctacgacttatcgtttagctgttcgagtccaactccaaatgttctccagccaaagaatgctttttcaacggagttcacgcccctccccaattgtccctttccgacgttgaattgtacgggttcagcgagtattggttcagcgtcgacgacgttctttcactgggcggcaaatacgaacacgacaaattcgaacaaaaggctaaggaattttgcgggcagccgtgggcagtgataaaagtgagtcactttaaccaaattcagtgagttgttcccaaattaaaatttgccattttgagaggaaagtcaaagcgcacttctaccaaaaggcggactcggagagattggagacgcaatgctttaagtcggcgtggatccacgccgtgttgcacaacggtttccacgtcgacgaaatccaacatcactttcaaagtgcatttcgaataaatggccaagaagtccaatgggtgctgatcatttaaatggttgcggtttatctattccaatttgaattaaggcgcttggtgcgattatttaccagatgcgatatttcccattgtttgctgaaagcaaagggattattcagccaaagcaaaaaaggtgtcctcagattataggtacgaattcttttacccatcgattttcagccgaattcgcccgcttttctccgcgggtccctccgttttctattttctttgtgttttgtctttggccgcgctactcattcgtattttatggaaatcaaagccagaggcaaatttcggtagcaaaaaggagagacaacggcaaaaattgttaaatattggcgactcgacgaggaactatcaaacagcccttgagaatttatattaagaaatgaattattgtcacacctcacttatttattaatacattgtatgtcatttaagttttgtcttatgtttgttttaatttttatattgtaaaatattgggactctaatgcaatttgcgcagcaaagctggcaactctcattgtcagtttcttacgcccaatgatatcagtagaaaggtgtgttctggtcggttttacgaaattttgtaacggttaaataccatggacacgtcatgggacgcgtaaaaccgactagaaccgaaaattgggccattagcggtccgaaacataagcgggtctctcagggacttgtttctggcaggataataaa

SEQ ID NO: 58477 - DNA, 670 bp, Heterodera glycines
atggtattcaaccggcgaattgcactcccggcacaccgtgccattggcttctgtaaacatctgagtaagggcaccgatcagtttggacttaaaggcaacagcgaaaaacagctggacgaaatgcccaaaattcgaggaataattttgggacttcgtgaagagttcaacacttttgtcatcgaaattatgttgacaagaattgaaaatgaaaagggtgccaatgaaaatgggacgaataaatcgttggaaaaaatgaacgaaattctgaaatttttggaagagaaaaatggcagcgcattttgtgatcagtcaatcatcgaaagtgcgaaacgaaattcgacaatcggaggcgaaaaacataatacatttttgatcgaataattttaaaaataactgatttgaaagcagtttcgcaaaatgtctgatttttgccccaaaaatgtgttctgattttgaaaaattgtcgatccgagccctggttttacacgacttttaaaatttaatttttttcgaaaatggggggaaaaggtaaaaaaattcagggggatgacaaaaaggataaatgttgacacgttaataggggacgaatgcttaaacgacagaaaacttcatgccatccaaatgtctacgtcaaacagagagaaagagggagaggatcaaatttcagtta

SEQ ID NO: 58478 - DNA, 402 bp, Heterodera glycines
atgagcgcctacatgggatccggccccgccgagcctgcaccgtcgtccggcgccgcggaaacctctccatcgtcaggagtcgcgagcgcctacatgggagcctcgcccgcgcacgagccaccagcggttggtttaagggggacacgagagcaaaagcatcactaatcttttgtttttgcagcatgagaagtcccggaacagagcgcctacatgtgagaagatgcaacaacgaccggcggatggatggacgaaacctgaagagcgagcgacctgtcagaagatgcaaagataaagaagatgtctcataatcgtgatctgtatttattgatgtattgtacatttgtatgcatatatcatttgctgtgtattatcactttaattccatctgtgttccgaaataaa

SEQ ID NO: 58479 - DNA, 176 bp, Heterodera glycines
aaacatcgattgataatgatatgatccgttttgcatttattttatcactacaaaatgattctccttcttcttcaagaattgataaagcagctaattgtaagcaccatacagatgaaaatgatgaaaagttggaggaacttttgttgatattgaatgacaacaccataaagcgagat

SEQ ID NO: 58480 - DNA, 1076 bp, Heterodera glycines
atggcttccgacattcaaatgatgcacttgaaaagagcatttgattggtatgaagagatgaagtcacagttggaaataatccgcttcaaaaaggtacaaaacttgcttagaactgatggattagctcgcaaatgaaagcaatggtaaaacattgcataccgtacgacatatgacaacgttgtataccgtacgcacaacattgactttggctactgtaaccctctaattaattcaaattcatttttatagaaaatttgaaaattttggataaattaatttctcttcggtttcagcaagcgcttgagaatgagtcggtggaagtgaattcgcgtcttgccaacgaagagtcgcgtgcgattgaattgcaaaaggagcggaaacgcaccgaagcggagtgcgagtcgttgcggaaaaacatcaccgacatggacgttggcatgcgcaaattggaggcggagaagcaggccaaggacaaccaggtaacggaaaagagcaattaattaattaattagcaataattagacaaacgaattgaaaattaattaatcaattggcgataattagcaatctaatcgaccattaactaatgaattggcaaaattagcaaacgaattgacaattttttaagttacggacactggccgatgaactgcacaagcaggaactgaccgagtccaaactggccaaggagcgcaaacagcagcaggaacttgcagccaaactgcagaacgacttgcaaatggaggcggagcgaaacgcggcggagaaagcgcaccgacagaaactgcaacaaactttggaggtggccaaagtttcaaattctttcaacggcacgccgtgccttaatttcaataaaacaaattgtcaaaaagtacagatatattattttcttttgttttaaagtcggttgaaaatgaaatggaccgcgagcgtcgtgcacgtgccgagcaggagaaagcgcgccgcaagttcgagggcgaagtgcgcattgcacgcgagaatttggacgagatgggcaagcagcggcaggacatggagacgagtctgaagcgcaaggaggccgaccttttcgcact

SEQ ID NO: 58481 - DNA, 330 bp, Heterodera glycines
ccaggactcaaatgtcccgctgaggccaaaaattttttctatttctggaaaaaaatcgaaaattttccaaaaaaattaccaatcgatagagctcaaaaaactatgttttggaagtggtcttcgtttttctgggaaaattcgttaaaaaatcctaaaattcaaaaacccgaaaaccgttttttaggcctagctcgaaaaattttgaaaattttcgaaattttaaaatttggaaaaatcgggcttttaaagctctacaataagtctgctggccaccctgcgctcaggtcaaagcctaatgagttattagcctggtactgaagtgggaaaaaa

SEQ ID NO: 58482 - DNA, 243 bp, Heterodera glycines
actctccctcctctctctgttctctgtttcgtatgtttcgttcattttttggcaacttttcggtgggccacgcagccccgaggacatttgcgactgggagcgcctgtggggcttcttccactgtctttgggtttgggtccgtctgacgctgttggccatcggatgggcttggattgctatgcaatatttcatcggcgccctctgttgtcgcgtcgcgttgaatttcgtcaaaaatcgctaccg

SEQ ID NO: 58483 - DNA, 1184 bp, Heterodera glycines
atggcacgcgaagaacagcccgtctcattggagcaggcggagaatgtgctgaagcggcaccaggacttcatgacgacgatggatgccaacgacgagaaaatgcgcgcggtggtgcaaatgggcgaccagttgtgcgcggacggacattacgcagcggacaaagtgcacaaaaaggcgcgaaacattgaggagagacgagcagccaaccgcgagaaggcgcaggcgatgctggacaaactccgcgaggcggtccaagtccagcagttcctcagcgactgcgaggagttacgcgagtggataggtgagaacgaattggggagcaaagggggagagacgggcggggggggaagcggagagggtgcggcggggtgaacatgaaggatgaagcgggggggagagcgagtgggggaagcgatggagggggcgcgagtggggaagaagcggagagggacgcggggtaggaaaatggaacgtcgagacgagtgcggtaatgcaagaaattgcgtggcgggtgacactttcctgaaaattattcaaattaagaggagaaaatgatccgggctcaggacgagacgtacagagacgcgaagacgatctcttcgaagttcatgcgtcaccaagcattccaagcggaattggcggccaacaaacggcgcctcgaagaggcaaagccaaaagcccccgggggagggaggataaaagtgccaattcccacggtttgttgttcagattcaccacgcggcggaacaactcgcggaggaaaagcccgaattccacgagatgatcgacccggaagtgctgcaactgtcgcagcagtgggaacaattggaacggacgacggaggaaaagggacagcgattgttcgacaccaaccgacaacagctctatgtgcaatccatcggagaagttggcacgaagtgccgtgcacatcaaaccattggcattttgtgacaggtcaaagactgggcccagcaaatcgagcgacagatcggcgagccgccctcggagccgcaagatttgaccaccgtcgacttggccatgcaacggcagcaacagttggagcaggaagtgagagggagggcattggcacgacgaaatgccaaaagaatggcactcaacggaattgtttttcagatggtacgcaaagtgatgcacttggagtcgttgcaggacatggagcctaa

SEQ ID NO: 58484 - DNA, 423 bp, Heterodera glycines
atgattatttcaaagttattgcttttgttattgagtgaagttttttatttgattccgctgggctcatctgatcgctctgacaaaacaaaacaaatgcatattgatcacccaaacaaatcggaatcaatgggctcatctgatcactctgacagaacaaaacaaatgcatattgatcatccaaacaaatccgtatctatgaattcatctgatcactctgataaattaaaacaaatgcatattgatcatccgaataaaaccgaatcaatggactcatctgatcactctgataaattaaaacaaatgcatcttgatcacccaaacaaatccgaatcaatgggctcatctgatcactctgacagaacacaaaacaaatgcatattgatcaccaaacaaatccgatcaatgggctctctgatactctga

SEQ ID NO: 58485 - DNA, 8672 bp, Heterodera glycines
atgccacatgtccacatctgcctgattctggactgggaggcaatgcgcgtcggaggcagaatacgaactcccgaggactacatcggcgagtacatctgtgctgaaattccaccaaagccagatgaaaatgcacgggatgagcatctccaacggcatctttacaccaccgtgacaacaaaaaacatccacacctgtgctgaacatcgttgtctggtggatggaaaatgcgtcaaaaaatttcctgtaaattactttgaaaacaattttaataaaagtaatgaaaaatagaagccgtatgagtacgacaacgtctactcggagaatgcttacccgcgctaccgtcgtcgtcctcctcctccgagtggcgaagaagctcaacaaaatcctgaacaatttggccgagtgttcgagtacaaggaccgctacggaaagctgatcaaaaaggataacgcacatgtcgtcgcctacaacccatttttgtcttccaaatacaaaactcagtatgctagaatattttatggacaaaattttaaaaaatattcagcatcaatgtcgagttcgtagctggtgatgggtgcgtcaagtacttgtgcaagtacgtgatgaagggagccgacatggcgttcatcaagatcagcggtcaagaagggacgctcgcctatgatgagtatcaccagttgcgactggctcgctacatcacatcgatggaagcggtcatgtcaatgtggggtactccgcttgtgaaacgctcacatattgtaagtaaaaatcacaaaaatattttaaaaaataaaaaataaaggtcgatgaactggacgtccatggcccggaaggtcaccgaattgcggttgatcaagcctttgatgatgaagaagaaagagcaggtgcacttgtcgaagctgccgaaaaggaggaagagaggcgcaaaactggtgaagagcgaaacacccagctcaccgcatactttgccttcaacaaacaacgctccagcacggatggcccactacacctaacttacgccacagcctacaaaaaactgcgttacgacaagaaaaatcgtcgttggcagccatacgtgattggagcgttggagggactaaagctgtgccgactgaagacagtgtctcctacaaacatggaccttttggtaaaaataacaattaatttagaaatctaatgaacttatctaggcaatccgccttcttttgcttgtcgtcgaggacccaacagggtgggaagatctgcgcagacacaatggcaccgttcatcggacctttgttgaagcagcacaagcccggggactgctcaacgacaacgagctgtggatgcgcaccattcgggaggctttcgcaaccaaaaaaagaccgaaacagtgcataagatggttagccgtcttcttcgccacggcaaacttgtccaaaccaatggacctgttcgactacgtgatggagatctccaacacctggctaaccgtttggtcgcttaacaacgctacaccagaggcaaaacgacaatacgtgctccgcgcgttggaatggtttctgctggccaatggtgtgcatccagactccgacaaaagggaagacggaaccttccaaacagcatgtgaaaaaattgggcttccaagaccagacggagttcaactgacaaaggatgattacatacaggtagcaattttaacaaaataaaaaaaataaaagaatttaaatacaatagttggtgttcttccgggacgacttggtcaacgcaagactacccgaggaaatgcgcgccgacaacgccaacacctcaatgcggaagcgctacgccgacatctacacagcagatccgaagccaaacaacgaacaacaaatgttggtggacgctgtgtttgatggtgtaaaggcagcaaacgaactgcgaaagggagactttgacgacaaagacctgaacatgcctcgactgttcatggtcactggcgaaggcggtgccggaaaaaccttcacttataatgttaggcattattgaaaataaaaagcattattctctaatttttagaagatcattgccaaagtgaaggcggccgggttcaactttttgccaatggcaacaacaggcattgcggcggaactcctgtacgaagggcaaacggttcacaagcgactttgccgacaacgacacattgacgcgtcaacatcactgaacgttgaccttgagagcaatttcgctgaaatgcttcgcaagattgacggcatgcttatcgatgagatcagcatgcagaaccgtgacgtcctggagtatgttgatcgcctgctgcgctttgttgttccgactgaccttttgaaaagtctgccgtttggcggaaaggtgatggacagctaaggaaaaacaattttttaataaattgttcaggcagtcgtaattggtggagattggaagcagctgactcccgttgtgcctggtggtggccaccttgaccagtacaatgcgtctgtgaagaactctgctctcttcaagcactttacaacgcaccgtctggtcaccaaccaccgactccagtccggccaacaacaataccgtgacttcctgaggcgagtcggcaccggtgtcatcaacgacatccaacaacgagtcaagctgcccaagcagattgttgaacccgaccgtgacgccctcctgcagttcgtcttcccgcaagagttgctggataagccaattgagaactggcaaaaattgtcggagcgcgcaattctctgcccactgaacaaggaaacgtttgagttgaacaacaaaattatggtaaaatacttttcatggaaaaataaagtgctaattaaattttaaattaggacatgatgaacgctggtaacaataatgacaacatcgatcgcatctacaccgcgataaccgtgccaattgttgatgatgtcgatgctcttcagctcgaaaacatcgcagccaacatcaaccaggaaaatttaatacgccaaacaccacctggcattccgcaacatcaactgcgcgtcaaagtcggagccgtcatgatggtcaccaacaacatctcggtcgaagagggtctctgcaacggaactcgcgtgcaagtgctgaaactctacgaaaacatcatccgttgcaaaatcctcaccggcacgcaccgtggagatgagcacgacctgcacaaggcgcggttccaatttggcggtgacccgaaggctctgcatgaaggtcctatacgatgtgagcgcatccaatttccgctccgacctggcagtgttatgaccatcaacaagtcccagggtaaatttcttttttttggttttttaactttcgtgatctaataatttaaggacaaacactgtcacatgtcggagttcttctggacaagtcacagtgcttctcccacggacagctctacactgccttgtcccgagttcgggaggataccaacatccgagtctgcacaaaaaacaccggcagacgggtcaaaaacatcgtcatgctcgagcttctggacaaagaagaccttgacaccgccacaatgggtcctccggacgacccgaatgacccagtaaaaattgatacaatcaattattttaataactctttggttaagtacccacgaggccctccaccagaccacgactctgacgacgacgatgacgacggaaaaggaccaccaaagccaccaacatcggcatttaggacaccaacaacacgctcacgacgaccatcttcgcctgacgaaccactcgctgatgatatcaccctggacaatcttcgcaaaataaagattgtcatgggtgatatcacgaagcagcgtgccgacatgcttgtcagcgacaagcgaggcaacacggacaacgccatcctccgtgcatgtgagccaaattctgaaggtctacaacaacaactgaagaccattcgacaaaccattcaaggccgagttcctgatggttacgtcgcagtcacaccaacatatggcaatttgactgaaaaagcaaaatgtgagcagaaaaagcgaaatttaatttaaaaatttaaaaatttaaagttattgctcacgtggccactccaaattgcaaaggacgggaccacactgctgatgacattcaaagtttgaagcagtgctacaccaaatctctgcaggagctgatcaatgagctgaaaaagaatggagaacagcaaacgcagataattgtaaaaaaataatatttaaaaagctgattttattgattaaaataggcttttccaccacttggaactggcgagcgcggcattccgcgagatgtcgcttcaagagctgcttttgacgctttgctcagttggcttgcgcaaaacccatcggacgcaaagaagatcggcgagatccgtttggtgccttttgatcgccctgatgaacgcctttacaaaatccaatggcaactggtgcattattcattttttaaaaataaaattttacgaacaatttttagatcaaacgcaaaataagcgagcgaaagggcaccaaagggtcaagagcaagctctgcggcgtcaagttgccgttcgctgtcaccagtcagtagcttggccgcaacaacgcctccaaaaacagcagcaaaaacgccacagataacaccaacaacaaaagacacacacgccaaaaaacatctggcaattgactcaaaaccaggaccatccaaccggtcttctggcgaaagcgttgctgtcgttccaccaccagttccgaaagtccagcagaaaaagtcaactgcgcaaaatgaccagcacgctgaagcaacaacatcatcaacaacagcaagcaaagcatttttgatgcgtgcccaaccagatggcaactgcttcttcaatgccatttgcttgacattgttcggatcagaaaaccacgcagaccaacttcgcaagcgaatgtgcacatttctccgaacaattcttgctgatcagcggctgtttttgcggcagaatcccaactacaacaccagggagagctttttgcgtcgcattgaccgcatgttgctccacggcactgatgaaggaataacaacattggaggagtatgccggacggagggaacaagaacgggactgggctcaggtgaacgacagcatgctgttggccatgttgttgcaacggcccatcgtgatcatcatgacaacgctgacgcaacgcgaaattgagcaacagagaccgcagtggaacgataatcgccaacatctatatgtctacttcccagacggcgaaatgcgggtagataaaaacgcaaatcataccttttaatattaaaaattcatgtagcaatctctgcgcaatgttcctgtggaccagctccaaaacttcacgatggtccaagacgttggaacccacgtggacagacggcctgtcaacaatgctattgtgctctactacaatggccacaaccactttgacaccgtcacttttgtaatgcaaaatttaatgttgaatatttaatttactaagatattaaggcgccacgtagttccgcggaaagagccggaaacgaagttgtctatgacgacaactacgtacctgcagcattgacaccagctgccgcaatgggttctccagctcaaccacagccaacaacaacggcccaaccctctcgtgaagttttggacagcggaccacttaaaatggctaaacaacagccagcaagccaacaaccagcagcagctccttctgtcgaggtcaatcgaagaggcaacaagctcgaaattcattctgaaagcccgcggaaaaccctgttgctagcagcaaagtatgctgtggccatgaacacggagacgctgaaggaaaacatcagtgaagcagaaaaggcaaagaaacaacatcttctgcaacagtgcactgcgtcgattcatcgacttagcgaacacatccgtgcggctacagatgcggaattccaagccaaacaacaacaggccatgttcgaaagcatccgacagacacccgtttcctcggactctgctgcgctgcaaaagtcctttgacaagcttcgcaagccattggcagagctctacaatgcaataaggaattaccttatgctttggcaagcgcttcgccaaatcgactctgcaaagtcctcgcttgcaagtctgaaggattggcaggatgacttcgaattttgcagcgaccgtcttcaaacgcttggtgaacaatggaaagaagctgacgacaagtttgaagacaaattttccaaagtctacaacgactgcgaaaacttcaacagcccaaagaagaaaggctccagcttcttttcgccattaaagtcgcttccaaagtgagattaaaaatgttcaaaaaatatttcaaacaataataaattaaggttcatgaagagcaaaaaagacagccaggatcaacaacacctggacgcacttttgtcagcattgcgtcggattttgtcggaaaaaaaggatgagatcgaagttgagatgaagaagaagcggaccgttcgcacttcgcaaacggcaacgcgtcgaagacagctggacgaaccgacaaggcgcagaacaagtgcatcgccaagcaaaatcagagcctccgatgtcaatgttgagcgcgcaaagaaggcagcagcagcagcagagtcccgcttctccactccggcaaagatgacatcagccgaaaagtcgcaattacaacgcgagcagcagcagcaaaggaggaatgaagaagcaaagaaacagatggatgcaaggctggctatagtgcaacaacatctgcacaagcaaatcgatcgacagaataatttggcagtgcgcaatcttcagtgggacagagaggccaaaatggaacaacgtatcatacaacggtaccatgcattccgcgccatggtggatgaagaatttcgcgcagctgtccaacaaggagcaacaattgattttgagcaatgtaacaaacaaaaaataagtaaaaacaataaaataacttaattgtagtcctcaattctgacgccgcgatacgctctctctgcgaggaaattctcgagatggccggccaagatgctgacgccgatgtggaagaactgatggcacaacaccaggccgtgattgagcggcaacagcgagcattagccgagcagcagtattggcgaaaatttgccggtaattggacattttcaaaataatttctcagagaattataggagacgcatccgcagagcagcccttacggccgacagaattggaactggagatccagcgctacaatcgagagcaccaagaacaggagagaaggctggcagaggaacgaatacagaaggagcagagagaagcagaaatgcttgagcgaaagatgcgccggatcaagcttgaacaaccaaaaagccaacaacacctggcaaaggactcaacacgaaagcgcacacaacaacaagcgcaaatttctacaccaacaaaggctgaaacaaaaagtaaaaatgctatataattttttgtgattttttcatattatttgaagagagtggcaaaaatggaactctgccgtcaccaggaaacgctcggaagcaaccacaacatgcagttagtcggctttacttcagtgaagcaaatgccggtaaaaataatttttaatgatagaaaaataataaaatacaataaatcagaacctgagcatgttgagtccgcttcatcgatgttgacgactgagcagcccatcgccatcattcagcctgaccccgaagccatacgggcacgggagatcatcgaccagcgactgaacatccaagaggcagattatgtggaagatgtccattgcggcagtgacgataagggtaacaaacagaataaaaattatttgcaaaaaaatttttagctcccggtccgcaccccaactttaatgttgtacacatggagatcgtgagcagcaaaaaagaagggcagtggcgagacaacaacgagacgtgcggtgtctgcacggaaccactgcttcgcggagatctcgtcactcagctgccctgtgacaccaatgtcaagcatatcttccacaccatctgcctacgccgttcgttgaccaccaaccggacatgtccgaagtgccgccgccccgtcaacatcccagacaacatatggtgaaaaagataaaaaaaaatatagcataaaatgtttgtttaggccgaccaaagactcgcatagtcagtcctacaaagactactttgctgagcaaagtcaaagcgcaacatcagcccgacctccggacgatgactttgtgatccgagcttggtaataaaaaattgaaaaagtttgaaaaaatttatcaaaaatacaggagtgtctacgaagaccttcgcaacggccagagagacgcctacgggagtgtgattcgtcaaccaatcgcgccccgtagagctttccagctcgtgatcgaccaaatccgggagggcagctctgaccttggcgaccgtcaactggagtgggacatcaccgacccacggaatgacgaggaacaagggctgcacatgtgcgagaccctcctgagagaaagaatggaggaggatgagaaggaggaaaaggagaagaaagagaaaaaatatttggaattttgattaaatttttatttatttgtacaattttatcttatcatttgttaatgtttttgttttctttttcataaatttttagtaatatttttgacaattattcagagtgcctcgcaacccaaaatagtggaaataaa

SEQ ID NO: 58486 - DNA, 267 bp, Heterodera glycines
atgtctaattctttagcacgatcttgtgtcatttcatcaaatgcattttgttcggtaggatcctcagccccagactcagatgacatttcatcataaattgttgagatagcatcaactataaatataggtttaattaaaaatattttcaacaaattacagtataaatcatctgaagcaatggaggatcggttcgatttgatccgtcctcttgaagatcgcggggtttcgctctcagatgaacttggaggccctataattacaaattga

SEQ ID NO: 58487 - DNA, 433 bp, Heterodera glycines
atgccaaccaagacacattttctgcctgctaaagagtcgtcgacggcattcttctatgcccgtcgtggcacgcaacgtgagcgatcaccatcgccgtgcggcggtgttcgtgtgacgccttcacctgagcgtttggcgcgtccatcaggtgtggaagtgccaccaaacaccgatttaacggtgtttaagaaaccaatcccggtaattagcttcgttgaaatcaattatatgtaagaaatgtaacatctagggacgaaattgggacgaagatcgtcgaaagcgtaacgaattgctttcggcgtactcttttgcgcaagatagagggattgcggcgcaacttcgtcgcctcattacggagatgaaggttttcgccgaagaggcgaaaaagaatgtggcccattcgcggggcgttggcattgaagtgcaaggaaaa

SEQ ID NO: 58488 - DNA, 2796 bp, Heterodera glycines
gaaacgggaaaggagagggagagggagagggagagggagagggagagggagagggagagggagagggagagggagagggagagggagagggatagggagagggagagggagagggagagggagagggtgagggtgagggagagttaagaaacgaaaagggtgttggatacggtgacggagacgggctgagttgtagacggagaccaaatggagacgtttgagaaacgaaaaatgtgatggagatagcaggcaagacgggctgagttggagaccgagaaggagagaagagggagatggagaccaagatgtaaatgcagtatgtttgatagagagttgacaaaccaaaaattaccacgataatggagacggtgatgaagcgaaaatatgatataaaattaaataataaaatttaaaataacaaaatttctgcaccaatcttttaaaaattattttctctattttctcgaagagttttgaatctatttctaaaaaggagacgtgctgagttggagacggtgaagaaatggagaaggttaagaaacgaaaaacggtgatggagacagcagccaagacggactgagttggagaccgagaaggagaggagagggagatggataccaaaattaaaattaactctacgaaaaatttttcagagttttgaagatattcataaaataaaacttaatcgaaatgcaaagtttaaattcaaattttaaggttaatgttgatgtgagagttattaaaagttttgatcaaatttttaaagataaaactttagtgactttttcaaaaaaattttatttaaagtaaaaattttataatatttgttaaattttctaacataaactaaaccaattaagccaaataattttttaataaagacaattcaaaataatcaattcaatttttgttattttatattttttttcagcataataaactcaaaatcaaaaaatgaaatctgttgtttatattgaaaatttaaaatgcttcactcttaagcatcggtttcttaatcaatttgttctttctttgtacgccgaagagtccgcaacctgaattttaataaaaataattatctcatagtaaatttttaaattaaaaatttaataattttgtgcaactgataatttgttaatattggaaatttagaaaattgtgcacagaaagggacatgtagaaaaaataatgtgttttttgaatttgggaaaaataggaaagggaaagggaaaatgtttttagaatttggtaaaattatgaaagggaaagggaaaaggaatttagaatttggtaaaattttgaaagggaaaaggaaaggggagagggaacgggaaaaggaatggtattttagaagtttggaaaattatgaaaaggaacgggaaaaggaacgggattttcgattttgggaaattattaaagggaaagggaaaaggaactggaaaaggaacgggattttagaatttgagaaaattatgaaaagtagtggaaaaggaataggattttagaattttttaaaattattaaaaggaacggaaaaaggaacgtgattttagaatttgggaaaattatgaaaaggaacgggattttggattttgggaaattatgaaaaggaacgggaaaaggaacgggattttagaatttgggaaaattatgaaaaggaacgaaaaaggaacgggattttcgattttgggaaattattaaagggaaagggaaaaggaacgggattttcgattttggaaaattattaaagggaaagggaaaaggaacgggaaaaggaacgggattttgaaatttgggaaaattatgaaaatgaacgggaaaaggaacgggattttcgattttgggaaattattaaagggaaagggaaaaggaccgggattttcgattgtgggaaattattaaagggaaagggaaaaggaacgggaaaaggaacgggattttaaaatttgggaaaattatgaaaatgaacgggaaaaggaacgggattttcgattttgggaaattattaaagggaaagggaaaaggaacgggattttagaatttgggaaaattatgaaagggaacgggattttggattttgggaaattatgaaaaggaacgggaaaaggaacgggattttagaatttgggaaaattatgaaaaggaacgaaaaaggaacgggattttcgattttgggaaattatgaaaaggaacgggaaaaggaacgggattttagaatttgggaaaattatgaaaaggaacgggaaaaggaacgggattttggattttgggaaaattatgaaaaggaacgggaaaaggaacgggattttcgattttgggaaattattaaagggaaagggaaaaggaacgggaaaaggaacgggatttttgaatttgggaaagttatgaaaagtaaaggaaaaggaataggattttcgattttgggaaattattaaagggaaagggaaaaggaacgggaaaaggaaagggattttagaatttgagaaaattatgaaaagtaaaggaaaaggaataggattttagaattttttaaaattattaaaaggaacggaaaaaggaacgtgattttagaatttgggaaaattatgaaaaggaacgggattttggattttgggaaattatgaaaaggaacgggaaaaggaacgggattttagaatttgggaaaattatgaaaaggaacgaaaaaggaacgggattttcgattttgggaaattattaaagggaaagggaaaaggaacgggattttcgattttggaaaattattaaagggaaagggaaaaggaacgggaaaaggaa

SEQ ID NO: 58489 - DNA, 662 bp, Heterodera glycines
atgcaatcattctttccggtcggcacacattttaccaaaaaaaatcaatcccaattcattttcaggtattgacaaacggaacacttctgatgatgaaactcacaaaaaaaagataagtcaaacaaatgaacaacaataattttatttataaaaacaattaacatttttacacaagcttaatttattaatttttcaggaatgccctgaaatattctgagctcgtgaggttgtgcgttataattggtaacatgcttttcaaatgttcaatgctttttcagatgttggtaattgcaacaaaagtgatgattggcgtcacacaaaacattttttgtaagacaagattggtcacatgcttttcaaatgttcaatgctttttcagatgttggttaatcgcaacaaaagtgctggttggcgtcacacaaaacattttttttacgcaaaaattggtcacatgcttttaaaatgttcaatactttttcagatgctggttaattgcaacaaaaagtaatgatgggcgccgcacaaaacattttttgtaagccaaaattggtcacatgcttttcaactgttcattgctttttgctttttcaggtgctgtattttgtcaccaaaaatttgatgatgaaaagagcacgcataattttattgaaagcaaaaataaa

SEQ ID NO: 58490 - DNA, 1937 bp, Heterodera glycines; identical to SEQ ID NO: 61

SEQ ID NO: 58491 - DNA, 708 bp, Heterodera glycines
atgcttgacacaacagcggaatcttttttaaaagtcctccgacgattcatcagtcggaggggaaaaccagatttaatttggagtgacaatgccacttcatttaaactgtctcaaaagacaattgagcaattgacaactccgaaaggagttggacaatatcacgaggaattccttgcacataataaaatgaagtggaaattcatcgcccaaatcagtccttgggcaggcggcgtttacgaacggcttgtccaattgtgcaaaaattgctttaaacgtacattggggagaagaatcctcaagtacgatgaacttaataccttcgtggccgaagtggaggccacacttaaccatcgaccaattacggttgtgtctgatggggaagatggcattcagccacttcgccccattgatttgcttcaaccagatttgcagatcaattgggagataacagcagaagaagcccatcccaatgataagcaaatctcttcgtctgagagattcgctgctttatttaaagcaaccagagaagctcatgaaagcttctggcacaaatggcacaacgattaccttctccttctaagggagagggaaaaatgggatcacaaaggtcctcatcttcaggataagggagagccaaaaaaggggatgattgcggaccgcctcagttgtgccccggcacgtttgggccccggcggtttttggatataa

SEQ ID NO: 58492 - DNA, 643 bp, Heterodera glycines
aattaaaccaatttataaaattcatattgataaaaatttaagacctaattaattgaattctagtaataaaagaagcctccgaaatgatgcgagttttcgatcatgagcatttataatatggcatacattaatgacgaaattgaaaaactcacataaattgaaattcatcactatatgtatttattaaatgtaaataatgaaaatataatctatgtcttttaaaaatcaaaaataatttataaatttaaaattaatatacagagtgcataacaatctataaaattaattttaaagaaactagcgcaggcgcgctcgcttcgctcgcgcacttcgcgctagctaaaggttaaaaaaatatttgtcatccttatccaacttgcctcacgctctatttttttctctcatctctttgtcgactcttttctttctctcgtctcttcttaatttactatttttccatctaacctcttttctttctctctatcctctttctctcatctctttccactctctctctcctctctctctctctctcctcactcttctccccttttatctttttttttctctctctctctctgtttcatttcattctatctatctctttcctctctctctctctcctcttttctcttctcgttcc

SEQ ID NO: 58493 - DNA, 570 bp, Heterodera glycines
atgttccgaaaaaatgtgttttatgcaaaaattgagaacaaaaaaatggcatcttataggatagttgcctacgatttagaatacacggtatttagttttttaggtgtaaaacaatattttttaatttagacgaatacgattttcgatgaaaaatcattaagaaaagagactattcataagcccaattttattagtgcccgatttatctgttcattatgtttgggagaaattaaggattgcgaaatttgtgggacgggacctcgtcatttaaactggtgtagtaaggatggaattgaccccctaaattgttttgttaaatggattataaatcttgaaaagtatgatacatatgcatatgcacattttgggggtaaggaataaatgaatttacaaggatttaaaaatttctttagggcggtatgattcgcattttgttttgagggaacttgcgaatttaggatataaacaaccggaattcttaacgaaatttttcaaaattgtgcaggctaatagagcacacttagggctttcgaatgataccaagaatgttggctttggttgacaaataaa

SEQ ID NO: 58494 - DNA, 695 bp, Heterodera glycines
atggatgggaaaaattatggtcttaagcatttgcaaattgtacaggatttttgggtaggtaaaacttcaaactttaaggattaatagttaaataaattactaatagatttttaggactcaaaatttccggggaaatttgaattgttgctttttcaagggatgttggacttcgtccgatttttaaggggaatggccccggtcaatataatgtgtgcgtttttcatgaaaaaaatcattgggatggtgggtttatatattttttttggtaataaaacattttttaggaattaaaagtattggacaatttttttctattaaaaataaatattgtataagctgtgaaaaaccctatcaaagagaagaaaaacatagtttggagtatgaagagaggtgcaaaaaatgctgcagaataggtaacaataaaaaagtaatcttctactggaaaatttaacgctttggtttcccatgccccccgtaaagaaatacatttaactgcgaaaaatgtaacagaattttttttaataaaaattgttttgagcatcacaaaaataaaatttgttttttgtatcaaaaatgtacaaaatgtcaatgcgaatttaggacagatacagaacatagctgctgtaaatttaaaaacataaattaaaatatttataaaattttagatcaaaaacattgcagaaaatgtcacttaa

SEQ ID NO: 58495 - DNA, 1514 bp, Heterodera glycines
atgaatgtaaggctaaaaagcatagctattcacaatttcgtcggaaatggaaaattcatctttaaagaaatgctctcagcgtttcatgggaaaaaagtgaatggtttggctttttataattcacaaataaatttaataattagtttacattcgattataaatttcagttcgttgtgttccattacttagtgttaagaaacgacgtccgacgccacatccgtttggactctttacaggagaaaatttgtacaagatttccttaattataattgatgaagtaaattattggtttctgccttacatttcttggataacctgtgatcgatctcaccatcgaatgcagctgcaacatattaaattttctaaaaataaaaagccattcttttcaccaaccttacgaattaacgtttttttcgtagtgatatataaaacatatattaagaaaaacgctgataaatatatttttaaaataaacatagtactgagaaccaaataaaaaaattctataaaaagctagacacaaaaattcatacatacatttttagattacaaaattaacaccaaaaaattatttaaatcttttaaattgataacgcctacatctaaaacattgttttaaaaaacaatttactatttcatttagattccatttatataaaataccaagtggaatatggcagaggtctgcaatggggtaagacaacacatgaactgccttcaaacgagagcttcagatttgagtaatttagaaatatataaccataaataaatttttgattcataagtccttaaacatgtataattaattattatgaaaatatgcgagaattggtaccttaatatgttggaaggtgaagattcatttgtatcaggggtgttgttgcaagtttcgcttttcgctttttcgctatttttgggcctttcgctttcgcccttcgttttttgggctgaagagcgaaaaaaagtacacccctaaagatacagtttattttttgcaagtcaatttctcgaaaaaaaatttttttgccacaataatattttaatataataaaatttttaatttataacggaaaaaataaacaataattttcaaaaaatgcaatatcgttttataattatttatatacaaaaatctacgattaaaaattgattatcgtcaaaaattaatccaaaatttgaaatttgttggtgagtatctttaaaataatgtaaaacgtatgtaaaaaatttccaacggccctaaaaatccttattctcttaaaactgtcattttggcaaaatcataacaaaaagtttcaagaaatttatgacaaaatatgttcaagaaaacttgcttttttgagtttctcaagtcataatttttttaaacttagtgaattttttgtaattttgcaggataatagaaaacaaaagatcaaagataatttgggcgaatgaataattttggattaaaaaacttcaagttgtcgacttgaagaagaactaaacaaacggaattcctttcataaaataaa

SEQ ID NO: 58496 - DNA, 914 bp, Heterodera glycines
atggaggtaatagtagatttagaataatgttactatatttcttcatattcatcttgattgataacgtaggttcgtcttgttgatcatcgatggtcgcataattaaacgcttcaattctcctgttttttccatttattttataatttttctcaatttatatttttcttaattataagcagggatgcaaaaaacatgcaaatgcatttttttcctggcttctccatgctctaaatagcaggaaaaacactttcgtttttgtgtttgcgtataaaaatcgggacttttatttgcatatttatgcatatttcgccattttttggaaaatttgttaacaaaaatgcaataaaaacggaaaatacacccctaagaatcggcgctaaaaaattcagaaaaatacacccctaagaatcgaccgaaaatttttaaaaacacaccactaagaattggaaattttctcaaaaattcttcccccaaatttttttttcattggaaaatttttgatttaaaaaatgtcaatatttgctaaaaagaattttataaaagaaatgtagcagctcattggcaagtgcatagtaatttttttaaattgaatttgaacccctaattttcaattttttagtgcatatttgtgcagattttacgatttgtgtgcataccgtatatgctctaattatagcccatgggggattatttttaaacctcctaagaatacaggggataattagagaatgggggataaatagagactgggggattatttttcaacctcctcagaaaggtgggatttggacttcaattcctgatcattgtcccaaaaccccaaaaaatttttttaaaaaatccgagaacctcgagcataataatttatttgaattcccgaaaaaaagtctttatttaatgaatcgaattttcta

SEQ ID NO: 58497 - DNA, 502 bp, Heterodera glycines
atggccatctctacacacttgacaagacaagtgccgatggaacgactaaattttggcgatgtgagttcaagaacagtggtgtgaacaagtgcaaaggacggatttggactcaggttgccatcagtttttaaattcaatgatctcaatttttttgattttaagcgttttaatacggagccaatttttgctgagtcagcaaaaatgctgatatcgattgcttttattcctattgccgatctgactgaagcagtcaatgtattggacgttgcgttccgaaattttccgcacatgcaaccgatgttggattttatgttaatcgaagtcataaacagccaacatttaccacgttcaggttgatgaacaattaaacgggtcgtacacttgaagatgggtcgcgaactgaaccgcgtttcaatcagaataattttcaattttgttattagaaaaaagtaaatgtaactggtaattagaaacaataacgaatcgtcgcccaactcaatga

SEQ ID NO: 58498 - DNA, 1821 bp, Heterodera glycines
atgaaggtgggccgctgctcattattgcaatgcacagcttggccgtggaagttcgttggagagacgaagggcgaagccgagagtttggactcattcaatcattttcacctcattcttcatttaaggatcgggacgatcctaagggaaggggggagttgtaaggattattcgacgcatttccctcatttaagtattccctattggccattatcaattcaatcatattttatccattcacacgcttttcctttttcgctgtaatgattctccgcccattcgcttcttttttctctttcccccagtgatcagttagtcagtcagttgttgagcagacttcaattattattccgatttctcgtttcgtgtaaatccaacaacgagtgaataaatatatcgacagtcaatgaatcgttgggattttggggcttagtcaatggccatggctttccccacttcctcccatgttccatccgggatagacggtgcggttggtctggggggcacagtgcgcatccctcactataataaatatttgactatttgggtaataattaaatgttggcaaacatttccggctacttccgtcaaaattaaatatatttatgtatttgacaaatttggtaataattaagtgttggcaaacacttccggctatttcagtcaaaattaaaatgtttatctaaattttgcataattattattaatattattattattatatatgttttcaatcaatttatcgaatttatatgcatatatttaaaatgcgattgttgaaaaaatattcaattacctttttatttgaatatatttatgaataagatattcattagcgtcaactaattaccatctcagcggaaatcctaaacagcttttagacatgaaaaacactcacatgatcataccaaattcgtagagccaacaaaatttcgaattccaatcccgagcttgattttgcgagatcccaatccgcaatctcgcatttcgcaaatttcgggattatgggattttgcgggatatatatctgcggatcccgttgtgtaaaaattttttagttccaatcccacgcggaatttatacctgcgtgatcccgtcaattttgaattccaatcccgcgcgggattttgctggatctcaatccgcaatcccgcattttggaaattgcgggattatgggattttgcgggatataatataccgagggatccgtccagtaaacatgtttagttccaatcccgcagtggaatcaaaatttcagtcaaaatttggcacattcttcaaatggcacaatttgtgaatttggtacaattatttaataatgctccccatatttgggcataattatttcaaataaaaagtttttcttttaaaggtcagctttttgattttggtcctctcattattgccaaatgcattattgtcaatcggttggtgtttatttagcttttcttttttaattgtaatgacaaatttattatgattttctagacacagaagctgtgaaggatatggcagatgaattttcagcgctaacatcctcaacatgggacattgttaatcagttgagatttgtcagtgaaaatgccgtgaaattcgttcgcgtcgccggccccgtgggcgccatcattgcgacagccattgatatcgcatttagtgtaaaaaatatttgattgaaaattatggtacttttctgttattcgaaagctcatgctctattagtcttacaaaagcaaaaagatttcatacatataaaaattttttaagaaaaatttcaaaatttgattttttttttttgcaattttcgtgttatatcttttttaga

SEQ ID NO: 58499 - DNA, 1205 bp, Heterodera glycines
atgcttaaaggatgtctgtacgttatcttagtgctgattgctgttagtttgattcggttgggcaaatgttagaggcgatttaagcattttggcccttaatttctccggaaaacttggaaaattcaacacaactccgcctaaaagacagatttctgtctgcaaaagaaatagaaatgtgaaaaaagatttgttctttcttatttagcttattttatcagtttctttttggtagttattgagatttgattcgtttttatcaagtgtctctattttaaattaacacccctttttcgggaaaaaattcataaaatttttttccatcgtcatttcgccttctcctttttagaatcttaatattttcagaattgctacgtacagttaaaaattcagctcgatcggttcatgggaagtggtcaaactcccaaaaaacagagtgtctttattttaaattaacacagtgtatttgggcattttataatttttgaaacaaatcgacaatttttaaatttaaaatttaaacaaaattttgagaatctatttctaaaaatgattttttcggacaatttccgatctttgggggtcaatagtctaatttagctgatgggagccgttctattagatcttttttggaaagctgccaaaatatgtacataaatatgtaaatgtggatataaatcgcggattatggaaaaatatggatatagaaattcatcctagaagcttcaaaccaagctaaaaacacgtttttcgtgcgtttcagggctcgcacagtccaattccatataattccaagccctaattataacttcacaggtgttggatacaaaaaattgctgatggcaacgaacggaaacgagaaccgctcgttcattttgctaaagtagtttggttggatttgatgagagcggtgagttttacggcaacggcgtagccagaccctttgctacgggggggggggggctcaagtcaaaaattcggtttttaggggttatattttttagttttttgaaatcccgaattagcggcatattttataaaattttagccgtttttcgccaaacaattactattttttgccattttgatctccatttttcaaaaatatggtaaaatgtgggtccggcgatgccgtcaagcgctaccgggaaaattttttgagaattttaatgcaatttgttaagaaaattgctcaacatttcaaagaa

SEQ ID NO: 58500 - DNA, 890 bp, Heterodera glycines
gaaatcacttggccaacaatttcacgcactcgtgcaaaatcggcaattggtgtttcggatatcgcagagagtaaagaggcgtatcaatctgtagcggaaaagataaaggatgaggttgaccaattaggtgcagaaaagtaagcaaaattgagtgcttattcgtgagcacagtatgatcaagaaacttttaaatattatgtgtttgttgatctttcagtattgaattttagaaaatccaaaaagatggccaaaaaagtctgcctaaacaaaaaatcaatttacaaaattaattcaaaaaatgagtcgattagaaaatctttcttattttatttttaaattgttcgaattttaaacgtctttttctattataaggttggaattcttgcgccttgtaaaaataatttggttttattctgctggttttcaaaaaaccgcttatttttatgttgctgaagttttagctgatgcgcatagtttcattttaaatgattaattttcctctttttttacaagtacaatgttcagatacgattacgcggtcatcgtttttcctaattggactgacccagaagcgatggcaatcattagcgaagctaattcatactttgaattgattgacgtaaagcaaatcaatgttatcgtagtccgaattgaagacaacgaaacaaattttgaattggcatgcaaagcaaatgaatggtttactccaaggatagaaacaaaaatgaaatataccataaagtaatttgtatttggtagagaaagattaccgtaattattttaatagagccgccccggggctctgtttttcaacctcccctcccccctcaaaaggggggctttatttcggaggggtggctctaattcaggggggggggggctataattca

SEQ ID NO: 58501 - DNA, 510 bp, Heterodera glycines
atgtggtgggatcacaaaagacatttaaagctcagtgatctcgcggatatgctgaaagaatggcttcaattttaccgtaacttagtcttggtacataattggaagtttttcagctccgctgccacaattactctcggtgaatgaaaaacattttaaatttatttttaaatttaaatttgatttttgacaggtgttactccgacctttgtcagatcggccagggccgaaaagggtttccggcacaaaattgtgccggcattatttgatgcagaaattttccatgttcacatgcttttgtgagtaatgcgccgacaaattcaatgagtcgagagcaatatgattagggataggatttttttcgtttttacaattgagtcattggatttcgaaattctttgttggatcaatttataaaaataattttattagcaaaaaaacgagcaatttttaatttttaccatcgaacacctcgaaatgtatttaatttgcaattttgcgggcgaaaaaaaa

SEQ ID NO: 58502 - DNA, 416 bp, Heterodera glycines
atgccctccatcatttccaaatcttcaattttgctgctttacccattgcttctcaccacgatggtgttcatttccacttcaacttcgtttcccctgctggtcacctacaatttcaatcaaccaatccaactgctcaaacttctcaaaattgacccgagggtaagcaaaatcataaataattttaattttctgaattcccgtaattaggttttagtaagcataaacaaaaaaatttttgcaagaaatatttgattaaaaataggattttttattcttgccgttttccgtaattacctttttagacaatttaaccttttttcgtaatgagataaaattcaacaaattgttaacatgtactaactcgaatatcactaaattttcagttataacttggaatctagatctaattatattca

SEQ ID NO: 58503 - DNA, 894 bp, Heterodera glycines
atgccggacggaaaggcgcctcatttcccccaacagcccgtggccaggcaaaatgacgacggctcgcttgagcttgaatgttttctggaggccaacccggtcccggaaatcaaatggttttatgaaaacgtgagttactctctcacaaatttcgtccatcaaatattaaattttttttattaaattcagaatgaactgaaaccaactgaacgattttcattccgactggacaacagagggtccgaggccttttcggccattctgcaaataaaagttcttgattacctttttttcattttttaaaatttttttcaaattttcaggatttggcggacagtgacgccggtgcctatcgctgtgccattgtgaatccgttcggcaagggcaatgccaacttcaatttgaaacttactggtaatttacaaaaaaaaaaaattttcttttaaaattcctaatttgcttttcctattttcagggttcagttcgccaacattcattgaaaaaccgcagatttcttcacgtgacgacggccgggtgatgatcatggagttcaaggtggagaaatgcattctataaacaaaaaattgtaaaaaaaatttttttaggctaaatccattctgaaaccgacttttgtgtggcaaaaaggggacgaaattgtggccgagtcggaccgttacaaaatcattctgaaggagacggggaaccacgaggtgaccaaaaagagggggaaggaattttggaaatttttttttgaaattttcttttaagtattacgcggcattggaaattgttgagccaaaaaaggaaaaggacgcgggacaatttgtgtgtacggctaaaaatgagtcgggaaaactgacagcaacattctcagtgaagttcgaaggtcattga

SEQ ID NO: 58504 - DNA, 1091 bp, Heterodera glycines
  unsure (1)..(1091): unsure at all n locations
atgatcagcagggagtcgctgatgctgttacgctccgtcggggagaggccgttcatgcgcttggacatgctcaacccgcaaatttatgcacactgccaactgttgcgcaaagtcagggtaagtgagtgagtgggggatttattttaggtagaattttgaacatttattcggccataaccggggttcaattttggtatagttttcaatcggtctacgcatttttagaatttgaggcatgtgttctctctgcacgtgctgtacttgttttcctgcaaagactccgttgctgaggatgccaaacgtcgcatttggccccaaaaacattggcacgaggacatccatttgtactcaattgcggtcagtttacgaccacacaaagtgtgtcttccatgtttgttttttcgctgctgcaggactttgagagtgtggccaatgggacaatggaacgccggctgaacgcgctgatcatctttgcccaatgccatatccagggctgtcagatctgtcttcaaaagggctttttctgcgagttgtgcaacgcttccgaccagccaatttaccctttccaaacggacatcactttacgggtgtgacagtttgttgcttttctgttcagttacaaggcccattcaaaattggaccccgtaacgaaatagtgccacttttaacaacaaaatctttttcagtgtcncaattgtgcgtctgtgttccacaaagagtgtgccaaaaaggctggtctggacgattgcattgncggtctgagcagcgagcagcaacaacaacaaaataaatgtccaaaatgccttagacgcgcaaaatacgcctcgacaacgacggggagcaacagcaacaacgcattggcacagttgcaaaataacacaaacatcaaatagaaataactaactcatggtcctttcttttttaatataattttaatgccttttcattttgcaagtattttcctgtgataaattttttatgttcgatagggttgtacatacattaacaaatattatgcttttagtttttcatgattatttacttgacttaatataaaacatttggtaaaacacgaaaaattttatcaaaaa

SEQ ID NO: 58505 - DNA, 549 bp, Heterodera glycines
atgattgcgcatgtcacggggcttaaagtgaggaaattgaaaacgaaaatgcctcatttttctaattttagggcggtgaatttgtccacacccttggcgatgctcacatttacctaaaccatgtcgaatcactcaaggaacaagtgatgatgagtgttagttcgttctatatatttttttacagatgggccgaactccgaaacccttcccacgaattgttttcaaacggccggatgggaatccaatcacgagcatcgacgactttacacccgaaagtgtactgctcgaggggtacgacccgttgccacccatcaaaatgcagatggcactttaatcaaacagcaatacctttttgaacaacattccacccacccattttttgctcatttatatttttttattttttgataaaatttttcgtgttttaccaaatgttttatattaagtcaagtaaataatcatgaaaaactaaaagcataatatttgttaatgtatgtacaaccctatcgaacataaaaaatttatcacaggaaaatacttgcaaaatga

SEQ ID NO: 58506 - DNA, 893 bp, Heterodera glycines
ctaggttacaacaactatcccttgatgcggattcttcaatacaagaaagtggtgaacaagagagaacaaacagtttaagttcatcttcaagcgatagttttattggtaaaacagttaaaattggataagaaagctttttaattaaatatgtaaattttataaaaacgaaataaaataaacaattctcgtcaaaattattttaaaatgtaaataattcagaatatcttgaacaatttggtctaacagacccagtggaagaacaaccagcaccaaacttgaacagtccaaacgaaaaccatgaagggtcatcaaattctaatgaatctggccataataataataataatataaacaatgatggaatacaacaaaataatgccaatggtattaataataataatgggacacaaacaaatgctgcaacatcagacgatccgagttcatcttcaacgggtgctcaaaacaatgatgatgcgacatcggcagaaaattgtccaatttgcttggaatcattaacaaatacggcaattgaggaaatgaagcaattaagctcatgccgagttttttattaaaaaaaattatatttataaaacaataattttttgttagcatcgctttcatcgagcttgtgttgaccgatggtaagctatttgaattgagatttaaaaattaactaatttaggcttgtacaaatttttcacgaaacttgcccagtttgccgtggccaagttgcttccgaggactttccacccgatcgtcaacgattgtctttttgtaaaaaaataatttatttctctttatattattattttaattaatgtaaaattctaattaatgttttttagttattgttgggccggaaggtaaattaatgaatatttacattaattaaa

SEQ ID NO: 58507 - DNA, 1130 bp, Heterodera glycines
  unsure (1)..(1130): unsure at all n locations
atgcgcttctactctttgtataaacgcggaattatatccgaaaaacgatggagatggatgaacaataaccaaactactgttcttcgtcaaaaagtactacttttactccgcgatgccgggattccgacaactgaaccggaatacgatgccgaaatatacatccatcaagtgcagggattgtggagcacaaaatatcccggtgattattttactttttatattgatttttattaatgaaataaattacattatttgttacaggcgagtataaaatattcatctttaatgactaccaaacccgacccatcacaaggtctgacgtcaatgaataccaattctctattattctctaccaccacgacaaacatttcgacggcatcaaaaccctttccaaattcttcaataaaaattattattgcctctcttgtgaaagcgtatacgagcgcaaatctcaacattcaatgaattgctcttcactctgccatggatgtcgggaggtgggcgttgactacccatgcgagccacaacagggatacttcaaaaaatgtgatcaatgtaacaacaatttctacaacaagatctgctatgaacgtcacctacacaaggatctatgcaccaaatttcagcgatgcgaggactgtggggtaatttataatgtaaagtatcacggtaaaacaggtcaccaatgcggggaaaagttttgtcgactttgcaagcaattccatgtaaaagaggatgatgaggataatccgtgcagtagctgttttatccaacccctaaaaccccataaacttaaaccatacaggatcatcgcttatgattttgaagcgacacaggataaaaaagtaggtaataaattcgaacacgaggtaaactttgcagcggctaccatcatttgtaccgattgcatcaatggaaattggaaggactcacttaaaggatcctcttgcaaaatttgtggaccccaccgcacaatcaccttcgcaccattcgacttctcaaacacgatagtggaccaaaaagtcaccactatgcacccgctgcgcgactttgtccaatggcttcttttcgaccacaacaaaaagttccaacagttgcctttgcacattttgngggccgctacgacatga

SEQ ID NO: 58508 - DNA, 769 bp, Heterodera glycines
atgccgtcctttttggttgttgccctgctgctgctgttgttgatgccgaaaattatgctgctgatggtaattcggaagattatgatgaggatgatcacgatgatcattatcctctattaatgccggactatgataataccccccattatttttgttcagcatggcattcgtctgatgattatgacgatgaggctgatgatgatggtggtagtaacggtgttgctgctgctgttgggcggcagcggtttcggaaccaagcgccgccgtccccacttgctgtgcccggcactgttgtttgatcagtgttgatgatgatgccattgttgtcgtcgtttccataatgacggcatttcattcattatatagctgcacaacacactgcgcaatgtgtggtggcagtggtgaaagcatcaaaacaacaacaattgagcagcagccaattccgttttgtcgcttattacggcgcgaatatttggcggcggcgtaatgatcggcggcagaacaccaacacaaaacaaataataataatattccggtcctatataacggtaaaaaaagcaatttatatatgtaaaagtaactgttcatgtgattgcagctctatgctaattattgttattgttttaattaaaaagcaattaaaatgtgcaattaaatgagaatgtgagtgatcgggtgagagttgcacagactctctctgatcaatgcataatttgattggcaaagggaaattatctgtttattccaagtctcaaatatatacaataaa

SEQ ID NO: 58509 - DNA, 1025 bp, Heterodera glycines
atggtcatttggtcatttcttgccatggtcggcccggtcaatggtttttgtgagaaggacgagaattatggcaatcagaaccatgatgatcaaaatgaagatgcaagtaaacacagtgaaagagaactgcagccacaccaaagtgcggtacagccgagtccgtctccgattcagccgcagcatttcctcctgctgctgctgatcacttttctgaagctgccgattagtgcttttgcctctctgcacttcctctcttcccctctttctctctctcttccccccccctctcccactcactctttcttttcctctccctcttccccgcactctttctttaatgctctgcttacctgcctctgatcactctcttctccatccccactttctccttcatcgtctgctgttttgtcctccaaattggccctttctttttctttctcgttttcccttttcttttgtatttccatcggataaagaaacatttctgaagccgaatttggcaagtaataagctttgcttgatctgctgctgtaatttgttttttcatttgagaaggatggcgaaggcgcggcggaaggcgacgaattgcgaatttccgccgcagggggaggggacggagagggggcgaagggcgacggggggtgccaattggtgtccatttgacgccggcgaggagacaacgaatggtcaacgaaaaatgatcgacatttgaagaagcaaaaaaagggggtgggggggtaattattattaaaattaaaaattaattaaaataatagagaaaaatttgagagagtgcaaataataggtcatgtgatggcgaagtgttggtttgtgaggacagtcgattggctgtggcgaaaaggcggccgactaaggccaaaggatggcagccgacacaattcattgatcagtgatcaatgaacagattttttattgtgcccattttgcattgatttcaagctttaatacatttttatgtggcgttcacctgactgggcaattaattgatgaattgcattgaacaa

SEQ ID NO: 58510 - DNA, 54 bp, Heterodera glycines
tattacttgccaaattcggcttcagaaatgtttctttatccgatggaaatacaa

SEQ ID NO: 58511 - DNA, 3658 bp, Heterodera glycines
atgaatgtcggagagattgcgtttttcttactgagtgttttggtccattggcaactgaccgatgccataagagtgattagcaacggattagcccctccggagattgttcatagtccgatggacgttaagcgtaagtgccattcattgccttcgaagtgccatttccattgtttcggttcagctcgttgtctgatcagagcagctcccctcgacctggtctttattctcgactcttctggctcactgagaaatcaattccaagatgagattgacgtcatccgacgcatcgttcgccacgtgaccattggggacacggcaactcgcgtgatgctcattcagttcaggcaagcaaaggcttttgcctgtcaaactgaccacagttcggtgctgtttcagtggtgtacagcatttggagttcgacttcaacaagttcacgcacagggacgagctactcagtgcccttgatgttcttcgacatgtttctggggtaaatgccgggggggcatgccatggggcacagtccaccgaaccgtgataatccatttgcctgtggaaggggggatttacgcacggtcacgagctcgagaacattggcctcgagaacaacaatcatagcatttttattctacggttgcgcttttttaagatcactcgagtcggcggcgcctttgaatttgccatttcggcgctggaaaatgccagccatggcatcagaccatcggcggtgcccaaaattgtctttttactttccgatggtcgaactcatgactttcccacggacagtgaaatggccgaaaaattgcggaagaaagtgtcaaattcggacatttgggcgtatggtgagccaattctgctgacaaattgttgttgtcattcttttatgcgaaacttttgctactaaaagctccttcttttttttttttgctttacgcctttttaaaattcgaaattattttaaatgttttaaaaattaattactttaggtacgggagaatatgtggcattggctgaactgatgaaaataacaaaagtaaagtgccattgggaagtgtcgcaatgtcaactttacctttcagaacgaatcgaaaatcattacgaataaaaacttggataaaattgagccaatgttcgccccgtggcacggcgttgaggtgggccttttttggggcgatgactaaccaccatttggccagataaggtctgtgaacagcgaccagtgtgtgtgaaggggtccgataaggtaacagcgtaaatgccattcgacacagttaaaataataataattaattggccgcccattcagccgctcgatttggcactgctcgtcgactccagcgagtccatcaaccaggtgttccaggagcaggtgcagttcatcatcaatcggatcatctccaacgtccacgtccatgccgaggctgtcagattggcactgataaccttttcaggacaagcatttgttgtgagtggcattttgcagttgttgagtcaaccccggagtataagccaaccttaagcatttcgggttcaacgacccaaaagtgggcaacaattcggaagtgattcgctacttaaacaccttgcggcccatcaaaggcacaacttcggctcatttggcattggcatctgcgctgcgtttgttcaacgacccaattcagaacagtttacgtaattcatccgttgaaaagcgaaataaatgaccagtttattactagcgaagagaccaaatgcgaccaaattggtagtgcttttttcggacggacgtatttcggaacccgtggaaaatgtcgctgaaatgctccgatcgatcggagtcgaaacaatggccgtttcgctgaaccatccgacaaattcgaatgagcgcgaattgttggccattgccggacgaaaggagcacgtcttcacgcagaagaacttgcaagaatttgagaagagcttcctgaagtttgtcggctttggctgcgatggcttcgaattgggagtgaatgccagtgagtggcgaaaggacacatttccccattttaattgcttaatctcggccattctccgagtcaacccattaaagcattttcaattcccatttctcagcgcctcgcatccgcggcgccactgacatcacttgcggacccgactcggtgactttgacggtcagaaccacgaagccaatgcagggaatggtcagtaaagttttttatgggatattattttgaaaaaatattaattttttaattagaaacgcttataggaaagttagaaaattaattaaacaattttctgtttttttcacgggggagatgaattgctcccctccaaatcagtctaatctccccaaatctctgtggattggcacccactaactccccttcctctcccctccccacagatatacgcgcaacgcttccacgatgaccctcagtgcgttttgcgctcaaatggtgccaaccgcgagaattctctgactttccgagttggtcagtgcggtgttcagaagacaccgattcgggtctgtttttgttttttgcaattcttagcccatttaaatgcgcttgctccgtgttcagaattcggctgagtcgggctacgtgttcaatgtgacggtcattttgcaattccatccgatcattgtgacaagggctgatcaggtgcctttcccatgctaacggaatggcgatcactccgattgcccccccccccccttccccagggtttggacgtgtcctgcgtgcaccaccagccggtctccgaaagagaattggaactgacctctcagcggtctctggtcacttcgcgttgctcctatcgcttgcaccgattcggccccgacaattgcattgcgttggatgcgaaagtgggcgaaagtctgttccacaagtgggaatgcgagacaggtgccattgggacgaaatgaccccatcgaatgccaaaaaaaactaccgccttttaggggacgaacatcgctttttggtgcacgactgttacgcaacttccgaacggaacaatgtgcagattttggacgagaatgggtgagtaagagctaaaggattgactgaataaacggaaaggcatttttagatgcgaaatcgacccccatttcattgaaacgcccgactattcgcaaatgcttctgaaggaaggcaacgaaagtggcgccaaacacgaaactcaaaacatttttgtctcccaggtaaatgcccaattcattagtgcatttttccgttcttcgagaattcattacccaatgattaaagggaatggccgccttcaaattccctgacgatgacaaattggtcttccgctgtttgatttccctctgcgatttgagcagttcggacgaatgtgcccaaatgatcgtaagaattggcccttttaagcgtcactttttgcgctttgacagcccccaaaatgcgactcgaaacggccgatggcctcggcgggggacgaagggacgtcgcattttgtgggcagaaacatttcgctgttcggatttgatgagacggacactgaggggccgaaaaaaaggcaaaggcggcgaagggacgtcggcacgcggaagggattcgcacggacagtggcggtggagacgcggacactaaacgtaatcgaaagcgaaggcatcagaccaccgacggccgaagcactcagatattgcgatgtgaga

SEQ ID NO: 58512 - DNA, 646 bp, Heterodera glycines
atgttaggggtgaaaattacggaaaaaacggtgccgtcgtccgctgtcccatcgacgagaaatgggcccacgccgccattagcaaagcaacgaccgtttgggcgggaggccaaccgtttgatgagtgaatggacaatgccaaacggagttcgagcatttgcctcaggccgctatgagccgccgggtgagcaaaaattatgtggcaaaagttttgggacggtgatccgacaaacgccaacagaatggcaccgtccgtgtccgactttgccaatttgtatttgcagcacagcgtccgccgatgcttccccgaatgccgagccatcagcccgacgacgattccttcggtgtttccgcacacaaaaagcagtcctccccgcaattgtccttccgctcacccaccgggcaatacgcgccgttgtggtcgcccgccggcgccgcattcgctgtgccgtccccggcccatctcggcgggattgcctattacgcgccgaactcgggcgatggaatgcatgggacgacggcagcggaagcggcggtgcatccgatcgctgatggaggacaggcgacgaagccgcccgttttgctcatcggcgcattccctccgtcggccaaagtgcgcccggtgagcggcgaaggaatggaatag

SEQ ID NO: 58513 - DNA, 60 bp, Heterodera glycines
atggcgtcaagcagcaattggaagccaacaaagccggcattgacaagcccattggaacgg

SEQ ID NO: 58514 - DNA, 868 bp, Heterodera glycines
atgattagttgctcgaaaggttaggcgctcaccgaggtcttaaatccccggcactctcttctatggttattttcttcttcaccgaaaattgatcacaaaaaagatgcttattagtattagctgtgatgtaattttgccaaaaaattcacttttttgttattttgtgagagtaaagaatggggaggagcagtgcgtatgctctgtttgctgccaatgcaatgatatgcaaacgattgttgaccaaaccgaacatggtcatgttctgtcgtgcattttggctgatagcgataagacggatgaccaaaggattattcaaaattttggagaataggaagagaagatcagggaaaagctgaatggcatgaaaggcacttttaacttattcaaatgacaattatggcgctgccgtcctccggaggcttacgcactttgctgaccaaaatgtacaaagcggtgcgttctcggaccaatttgaacaacggataaacgcaaaagagcaggaacagaacgcagagcagccaaaaagtgatttgagtgaattggcgcaattttgggtcgatcaacgactgatcagttgcactgctgcaattcattggcgagaatgcagttttttcgtaccaaaataccaagtttaataaatgcgagtgaaatgaataaaatttaattggtatgcactgtcttaaatattatacggcgaacaaattccacccttcaattatttggataacactaattatgtatgaataatttatcttttagcccaaccaaaaaataagccattgccaattaataaaaaatgccaaattataattaaatcggacatgggccacccgtatttctaaaaactaaacaagtaattacgcccaca

SEQ ID NO: 58515 - DNA, 304 bp, Heterodera glycines; identical to SEQ ID NO: 51570

SEQ ID NO: 58516 - DNA, 933 bp, Heterodera glycines
atgagccaaaaccgtgacgaaaactcgcagccacctgtactcgatggaccgtacccgctggcacaagagcgcaatgagtttgtggaagatgaagcaccggtgctgcttgagatgttggatcgtctgtcacaaggagtgggttttgttttgaattatttaaatttttttaatttttccattttggcttatgctaattgttgattttgtttagggaatttgccaagccatgggcctgttttcgtttgcacttgccgactgtttggccacatttcatacatttgccatactgttcgactgtgagacacctgtgccatttgacgagcagcacaagcgatacgtgttcgaacacagggacaaaccgcggctaatctacgtttcggaagatggtagcgctatacaggttgacggtgtggtgaagcaaggggaatttgtgatgagcatcgagacgatgtatctcgataagcgaaacggagttgatcacttttgcacattcctgcgcacttttggcatttgtttcttgatgtgccattgaatgtgtttatttgttgcctattcagagcagtaaattgtttgcataattctgtttaattattttttgtttacaaccaaaatattgatccgcatttttatgttataattttaattcatttttgaaatttttatttaaatggcaaacgaagacttccgcttgtccgaatgcatccgttttattgagcgaactgcccaagagtatgattgtgttctgccggttccacggcttgggtttgtcacggaaaattttcttaataattttttttttaaatagctcaaggcgcgatgagcacctggatgcctgtgttcttatggaatcagtgggctcaggccatcggctctacattttcgagtttgaggattgcctccaggtatttttaaaatatgaggtcaattaattaa

SEQ ID NO: 58517 - DNA, 156 bp, Heterodera glycines
gcatgcaaatgttcctcctctcctcaatgacactgttcacttccgcccacctgccaatccaatcggctgtcctcagttagccgtttcccccaacgtcgtcgcgcccatccatccgttcactacacaaccaacaaaactcaacccatcccggactcc

SEQ ID NO: 58518 - DNA, 56 bp, Heterodera glycines; identical to SEQ ID NO: 52733

SEQ ID NO: 58519 - DNA, 660 bp, Heterodera glycines
aaacaaaaaaatcgattttttcaagtgtccgtttggggtactcaaacaattatggggagcaaaaatccatcgcagaattaaagtacaggctatagggaagctattcccgaaggattcggtctccccataaatctgggcgcatcggttcggggggactgccccgaaaacaaaaaaatcgattttttcaagtgtccgtttggggtactcaaacaattatggggagcaaaaatccaacgcagaattaaagtacaggctatagggaagctattcccgaaggattcggtctccccataaatctgggcgcatcggttcggggggactgccccgaaaacaaaaaaatcgattttttcaagtgtccgtttggggtactcaaacaattatggggagcaaaaatccaacgcagaattaaagtacaggctatagggaagctattccggaaggattcggtctccccataaatctgggcgcatcggttcggggggactgccccgaaaacaaaaaaatcgattttttcaagtgtccgtttggggtactcaaacaattatggggagcaaaaatccaacgcagaattaaagtacaggctatagggaagctattcccgaaggattcggtctccccataaatctgggcgcatcggttcggggggactgccccgaaaac

SEQ ID NO: 58520 - DNA, 756 bp, Heterodera glycines
atgccattgtttggccttttgcccccatttttggctttgattttggtcagcggttcaaaggacgacagaatgaacagcggacattcgagcatttcaacaacaacaagtaaaaatgaataatgaaatatgaaggattgaaatggcacggcatttgggaatttgaaaatgggaattaattaatattgaagagaaaattaacttttattaaattaaaattaaatgttttcaaaactgaacctccgtaaaaatgaccatttaaagaaaatttgaagaaaacgtgccgaatttcacacaacaaaatgccaaaatattccgagaacttaaaacatttaaatgtccatccgtttgtcttataagtcattaaatctaccgcgaatttttttttctaaaattaatattaatttttttttttttttattgtttagttcggccgcagctcttagccaccgatgaggacgaagaacggctcggcattgacatgttccgcgggtacaatccgctgattcgtccttcgccgtgccgaaactcatccgtcgtgcacgtggactttggcatggccatggcaagtgccaaactcggcaaattttaagcagcaaattaacgaatatattttggaattgaagcataatatccaaaaacatgcacagattctgttgatcagcgtggatgagaagaatcaaatcatgcagtcaaatgtttggctgactttgcgatggaacgactgccgattgacgtgcgcaatggcaaccaattaaa

SEQ ID NO: 58521 - DNA, 1892 bp, Heterodera glycines
atgcggggatcctcacaacagagacggagtacgacgcggaagtttatatacatcaagtgcaagggttatggaacgtcaaatatcccggtgagtacaaaattttcatatttaacgattaccagatacgaccaatcaccaaatctgatgtcaccgactaccaattccctattcttctctaccacaacaacaaccactttgacggcatcaaaactctttcaaaatttttcaacaaaaagaactactgtctctcctgcgagtcgccgtactacaagaaaatcgagcactcattaaaatgctcttcactctgccacgggtgccgtgaggtgggagttgactatccctgcgatccccaacaaggatacagcaaaaaatgtgaccactgtaacaacaccttttacaacaacagctgttatgagcgccacctccacaaggatttgtgcaccaaatttcaacgctgtgaagattgtggggtaatttataacataaaggttcatgggagtgttgggcataaatgtggggaacagttttgtaaactttgcaagcaatttcatataaaagaagacgacgacgacgggatgaacccctgtacgaaatgtttcatccagcccctaaagcaacaacgaattaagtcatacaggatcatcgcatacgactttgaggcgacacaggacaagaaggtggagaaccggttcgagcatgaagttaactttgcagcggctaccatcatctgcaccgactgcattatcaacggcgactggaacaaatcacttcagggaaaaaagtgccaaatttgcggtcctcaccgctcaatcaccttttcaccttttgactacacggagacaacagtcgaccaaaaagtcgtcactcaacaaccgctgtgcgaattcgtccagtggcttcttttcgaccacaacaaaaagtttccaacagtcgcgtttgcacactttggggggcgctacgacatgacgatgatcatcaaggaggttttagcgcaaggaattcacaacccggacatcatcaaacaaggaaatcgcctctacgagctgaaatcaggaaaacgagcatggccccctcaccatctttcgcgacagctacaacctaatgcccattaaattatctggcctcatcaaatcttttgggcttcatataaaagataaacagcactttccccatatgttcaacaaatcatcaaactacaataaggtcctccagcaccttcctccacgtgaagactattgccctaaccaaaagaagaaggccgatctgcagaaatttgacgactggtacaatagtaattacaaccaaccttttaaccttaaggaaaaactccctgaatattgttgcaacgacgtacaaatactcacccatgccctcgtcgaattacgccgggaattcaaacaactgacacaacggaacggaaaacacggaggaattgacatcctgtggcaagccatgaccatcgccagcgcctgcgtcaagaactttgcactcaatcatctgaagcctaactcgcttgccttcgtattgtaaaaaggtatacatcaccacagattgaatagtgcactgggcatctaatacctccaatggtattcgcatattagcacagtcagcatacacacagctcacttatgttatgttgtatatgtgtgtaagcgtgaaggtcagatatgccaattggacgtttacatcacaggcgcaaatgggaagcgggaaaaaataatggaggtgaatggctgtctgtggcgcggttgtgaggagtgttttgatgagatggcattaaaatatgtaaattaagttcggaaagtctgtgagggagagtaggaaaagggaagagaagaaacatgaaatttttatgtgttaatgtagatttgtaggttatttgggaactcgaa

SEQ ID NO: 58522 - DNA, 121 bp, Heterodera glycines
atggacaaattcccaaacattttgttcatttggaagttaaccgagggaatcgaaggccaaatccaattcaaatgggacaatgtgatcacacagagttggatcaaccaaaaggagcttttgg

SEQ ID NO: 58523 - DNA, 891 bp, Heterodera glycines
  unsure (1)..(891): unsure at all n locations
atggacggattacgtgccgaaaagttcgacgtgggaatggcagaggcatactgcttgacggagtattcattggcacttttccatttcctgcaaattgcggtcacaatcgccacncaaagtcagccaatgtcgccgtttcagctgcatttgatgggccatttgagcaaaatgaaaaagtcggagggaacgccgacgggtaaaaagtgccaaaaagctaaaacgaatgatatatagaggagagagtgagagagagagagagagcggagaaagaaaaaagagaaagatggagagaggagtgagagggggggggggggagaggagaaatagttagagagagagcttcgtgatcaggggccccgaaaaccccggggaaatcacaaaaaattatgcaaaccaaaagagaaattttaatgggacatttttatttttcgtctcacttttgaatattttagaatttatcggaatttctacattaaatatgtttggtgcggaacgtatgaagctgctaaacatgggcacaaaagaacaaatggccgaggaattgaagtggagaagggacgaagtttggaggaattgcgtagagcaaacattggccaaaatcaaagaacacataaatatggtggaaaacaatcataatattaaatattaaatatacataaattaaggacactgagtaccaaaaattggcggaggaaaaattccatttgaatttcccgggttgggacgcactgttcgccaagagccgctttttcttcatcaattcgctgcccgaaattgattttgctcagtccaaaattttgaagagcgatcaacgggtcaaattcattggcggcttaaattttggccatccgtcggaaattgacgaaaaagcaatggaaaatgtaaaataaa

SEQ ID NO: 58524 - DNA, 671 bp, Heterodera glycines
atgacagtctttggagagcatttctacggagtgccaatcgtttgtgtgccgttcatcggggaccaattttacaacgcggaattgatggcatttcggcacattgggctggcagttgacagggaaaatgaccagcaaacagtgcaaaatgatctgatcggtgcattgtcagaggcattgggacggcagcagcggaaaaagtgaaaaaatttaaaataaaaaatgtgatttttaaaaacaattagcaatgactcggccgcgcactttgatttggccaaatttaaagctgtaagcgcggcatttcgccaaaagaatgtggcaaaaacaatcgctgacgcaatgaaagaaattgaaaaagaaattggccagcaggaaaaataagccattgaatttgaaaaatgtatagaatttaaattatgcagaattatattattctctgcccggcttagttacgctagtcaatccgaattgtcattttttgattcaaagataaattaaatcgccaaatttgaaaatagtttaaaaatgtaaaaaattaagagatataaaatttacgaaattctctaaattgaataattcccttataaatttttaccatttttagggtttaaaaagttcaattcagctgaggtggtctttctaatagagaagatctttgaaaattaatttttgaa

SEQ ID NO: 58525 - DNA, 1123 bp, Heterodera glycines
atgaatggtgccattgtcggtggatactcaattcgtatccaaaggtacacagagcaaaacaaactgttgtcatttattctcattgtcaggttcgatctgtcctcttctgctggtgttacgaaatcggcggatgcaaataatgagaaagcatcggatgagcaaatgcatcacatttctggcactgagtgccgcttcaatatgcagcatcttcgtccagctcagctgtaccgcttggcagttacggcacagagtgacgccggcccatcgccaaaatcggatattttggagtaccgaagtccgccgggagtacccgagaagcccagaaatgtgcacatcgaagtgattcttaaatctgaattttaacaaaaaatgaattttcttattaaggcaataagtacgacggaattgcggctcagttggatggagccgtccacagccaatggctctccgattgtctcttaccacgtgaactgcttcagattgtactcaaattctcgtcatcaactgcaaaacaacttagcagtagcaacagcattttcgagcagcaaacggcaactcgttagccaacaagtggaccatactttgttataaaattcattttatgtgctttttaacacagattgcccccggctctcaacggttgttgatcatacaatcgctggaagccgaaacggaatacgaattgaccattgaggcagaaaattctgtcggaaaaggcgaccgagtaatcattcgggtaaaaattggtaaatcggccgtgttaattataaatattcttcagcaaaaaactctcgtcgaaccgccagaaccaccacaaattttccttgcccaagcaactgcgaattcgttgaaattgaaatggagtgacggtggaggtacggacatttgaattggtaattactgtaaaactgcatcgttccattttcagaaaacaacagttccatcggtgcaaacggtcacggcaattattattactatttggagagggaaaatgagaacggcacttattcgcccgtttatgaagtgattattttttacttaattacttgctaccctttggtgttttattttcttttcggattccaaattttttgcgtttattattttgtctatatttttgcaa

SEQ ID NO: 58526 - DNA, 307 bp, Heterodera glycines
atgcctgatttagtgcacagtggtgccgaagtaatatcaattcagtcaacttccgaagtctgtgaaagacaatcaaatggttctgtatgtagagtcagtggaacaaccgaattaacaatattacccgctggacaaaaagtttcattagcattaaaagatgataaaggaaaaataatgggttcattagaattaattttacaatttttacgactacactgtaaccaacaaactttaaaatggttacggtcatataaaataaatgttatttcaaaaagacgctatccaacaatgggctcatgcacaaaaa

SEQ ID NO: 58527 - DNA, 530 bp, Heterodera glycines
atgattgcgcttgattttcaaccattttcagtggtcgaggacgaaggtttcacaaggcttttgaattttcttgcccctggctacaaacaaaagtaagaagcaatttttccgcacaatattatttagctcatattaaggaaacgaaagcatttttccgactcattaattcccaacatttatcaaaaattgtttgcaaaagtcaagtcaaacctagcaaaatcagacaatttttcatttacaatcgacggttggacttcaaggaatgaagcgcagtcattgatttcactaacagttcatttcattgatgaattattcgagccaaaattttatattttggaggcaagggcccgttcatgggcggcacacggccgaaaattacgttgaaattttaaatgtaataaaagattaatattctagaattaaatcaattttttaggattctttggaactctttggcattgagcagcacaaaatccacttatttatgcgcgatgctcaaagtacaatgcaggcaaccacgcgtggtttaa

SEQ ID NO: 58528 - DNA, 2229 bp, Heterodera glycines
gaatccgaaaaaatttgggatttagaaacaattggtataaaagataacccaatggaaaaagatgatgaagtagcattaaaaatgtttaaagacacaatttacagaaaagacgggcgatacgtagtaagttggccatggaaaggcccaaaagaggaattacctacaaattttacattagcttatcgtaggatgataagcattattgaaaaattaaagaaatccgaagagcaccttaaacagtacaatgaaatttttaaagaacaattaaaagaaggaattgttgaagaaagcgaaattaaaggatatgatgaacattttttgccgcaccattgtgtattggtagccggaaagaagccaagagtagtctatgatgcttcgtcaaaaatacggggcaaaaaatgcctcaatgatttattatttagaggccctatttatatgcctgagttaccaggactgttaatgagatcaagactttctaaaattgcactttggggagatatccaaagagctttttggacattagaattacaagaaaatgacagagatactgtaaaatatttgtggttgaaagatgttaataaaccaataacaaaagctaatctttgcgcatttcggttcaaaagagtgcctttcggtgtaatatcatctccatttttattaggtgcaacagtaagacaccatttagaaaatgaaaaatccgaattagctaatgaagttaaacaaaatacttttgtagacaatatttttgttggatgtaataattcagctgaagcaatcagaaattataaaaatttaaaaatacttttcgaaaatgcacaaatgaatataagagaatttatttccaattcagaagaagtgaataatcaaatacctgaaaaagatcgtttattaaaagaaaacccaaaagtactgggtataaattggtgcattaaaagagatacgtatattataaattttcctaaaatgcatgaaaatgaaaaattaagcagaagattagtactgaaggaattaaattctatttttgatccatgtggatggctagccccatgccttttacctgcaaaaattattttttaaagtctatgggaagaagaaagaaaatgggacgacaatttgaatattgataaaattaatgcatggaaagcagggatggagttccgaggcactaaaaattttcggaagtcggaactcggaattccgaggccccaaaaattttcggaagtcggaactctgaattccgaggccccaaaaattttcggaagtcggaactcggaattccgaggccccaaaaattttcggaagtcggaactccgacccaaaaaaggtcggaagtcggaactcggaatttttgaaaaattttacagaaattttaaaatatttcataagttaactttaaagttataaatcaaaattactaaatataaatgtatttatgtattaaaaaattaatattaaaaattaataatcaaattcaacaattgataaattggactgcaaaaaaatcaatttcctaacattgtctcccttaatccggtttcgcaaatccgtacaaatgagcccggctttagaaaacaatctttcgctttcaactgatccacaaggtgcgctcagaaattttcgggcaacacgacaacatttaaaccacgcgtggttgcctgcattgtactttgagcatcgcgcataaataagtggattttgtgctgctcaatgccaaagagttccaaagaatcctaaaaaattgatttaattctagaatattaatcttttattacatttaaaatttcaacgtaattttcggccgtgtgccgcccatgaacgggcccttgcctccaaaatataaaattttggctcgaataattcatcaatgaaatgaactgttagtgaaatcaatgactgcgcttcattccttgaagtccaaccgtcgattgtaaatgaaaaattgtctgattttgctaggtttgacttgacttttgcaaacaatttttgataaatgttgggaattaatgagtcggaaaaatgctttcgtttccttaatatgagctaaataatattgtgcggaaaaattgcttcttacttttgtttgtagccaggggcaagaaaattcaaaagccttgtgaaaccttcgtcctcgaccactgaaaatggttgaaaatcaagcgcaatcatttccgaaattttctgttccaataacgcctcgttttcacttcccgattcccatttttctaaaaa

SEQ ID NO: 58529 - DNA, 392 bp, Heterodera glycines
atgtatttttcttttcccgtggcaatcaccactcctgcgccaacagctcctgtaagaagtccgcataaggttcaagcccccagcggtgccgccagcatggcgaccaaataaatcctccaaaaatttttaaaattttatttgtattttttataatgtataaaaagatttttatttgtgcttattcacattttgattatttagtttgtgaattattataaattatcttaggtatttaaatatgtattcgaagcatttttttaatattttataacaaaatatgatttaatgatattgtactccagtcattaatttctaagtataatgatataatataattttaaaattaatatttttttggaattataatttatttatgcacaaggatgaataaa

SEQ ID NO: 58530 - DNA, 370 bp, Heterodera glycines
atgtcaggtcctattagaatgcggataaatccgtctttaagaaaattaactgaaagactggtagaaattagaccagtaattgatgcgcaacaaagagaccctgaggggattgatttattaagaaattcgttggtaaaaataaaaagatcagtgacgttcattgatgaaagaattgaacaatggcgcacatatatgacagaaattgaagttgatgaacgagcagcagaagaagcactttttgtaaatatgaacgcaaatcagcgccatgtaactgaatggttagaagatgcaagagaagcaattgatgaaatagaaataattttagtaaatgaagcagatgatggttcggacacattatcatttgaattag

SEQ ID NO: 58531 - DNA, 1005 bp, Heterodera glycines
atgattcgtcgcggctttcgcgacttttccatcgactacaccattctgatcatcattgtgatcgcacttctctttctgctcgtcgtcacgtgcgtcgtttaccaaaagttcaaagaccgcaacaatcgcgtggtgaacgtggacatgaaccaacgattggtgcagcagcaacagcaacaacagcagaaggagagcgatcgaggagttggaggagggcgaaatttaatgggcggaaaggtaaaaacggagggggtgggataaaaacggcataatgccattggaacaaaagcaattagccaggaaggggaagatagacggggcgaaaccaatcataggcattggttaatttggctaattaatcacgacagactccgcccatgagagtgacgtcatccgccgcgcacaaagggacggtggccactgcggcattggccaaagagagggcattggcatatgcgcggaacgcggcgagcgcacagccgccgccgttggagtcgcaggaaagcgcactttcatttccaatgcaacagctgcaaatggcagcgatggaactgaacgtaaatgcggaacaaaaacaaaaaatgtgaaaaagagcgacggatggcaccgaaaaagcgtcaaatttttattactttggtcacatttatgccaaatttatatcagcaaaaaataatttcaagatttcattaaaagccaaacgaaaacattcaatggcaaaaggaaccgacggacagtcgccaatggcacgcgccgaacgaagaacagccgacggaagcgaacaaaaggcagtcaccacgcattcgactgagtccgaatcagccgcaagaaggggaggaggaggaacaagaagggaagagagacaatggagatgaggagggggaagagagacgcaatttgggatacgagccaaaactcggaagaggaggaggaggagacggaagcggaccaggagcaggggcaggacgagaagcagcggatggcgaggaggagcatggcggacattga

SEQ ID NO: 58532 - DNA, 600 bp, Heterodera glycines
atggactacccaagaataaatgaaagtgaactcgcttttcccatcccttcggggattattgtcagtgggccgtcctcttcgggcaagacccagctggtccttcgcctgttacggcatgccaacgtgatgtttgacccgccgcccaaggcaataggtatgtgcaaagggggtttctgtgcagtgggctgttgctatttagtatgggcatacggtgagtactcgacgcagattcccgatctggagcggcagggagttgtcccccacgcaggtgccccgtctgacgagatgctgaaaaagctgccaaagccttgtctgattgtttacgatgacttgatgggtgacattgaggccaagaaattggccgatctgtacaccaaaaagtcacaccataacaatttttccgtgattttcctcacgcaaaacctgttcgataaatcaatgcgggtgccaaggtccaacgcccagtacatcttcctgatgcgggctcccaacgacatgcttagcattcgtaatttggccaaccagatgttccctcgcgagcagggattcctgatggatgcctaccgacaggcatgtgctctgccgtacggttacctgttg

SEQ ID NO: 58533 - DNA, 952 bp, Heterodera glycines
cggggtaagcagtgctggttcgtttcatcacggcaccgaattttttggctagtcagcaatcgttgcttaacttgccagatcggacgggtgcgcatgattccactgttccaagcaccccaccaaaagcaaaacgatataaccaaaatataaggaaaaattttttctccatcttcctttttgatactaaagcatcagagtgctaaaattaagttgtaaataaaatttggtgcgctttagagcactttctgaaaaaaatatttatgaaacaaaaaaatcgattttttcaagtgtccgtttggggtactcaaacatttatggggagcaaaaatccaacgcagaattaaagtacaggctatagggaagctattccggaaggattcggtctccccataaatctgggcgcatcggttcggggggactgccccgaaaacaaaaaaatcgattttttcaagtgtccgtttggggtactcaaacaattatggggagcaaaaatccaacgcagaattaaagtacaggctatagggaagctattcccgaaggattcggtctccccataaatctgggcgcatcggttcggggggactgccccgaaaacaaaaaaatcgattttttcaagtgtccgtttggggtactcaaacaattatggggagcaaaaatccaacgcagaattaaagtacaggctatagggaagctattcccgaaggattcggtctccccataaatctgggcgcatcggttcggggggactgccccgaaaacaaaaataaatcgattttttcaagtgtccgtttggggtactcaaacaattatggggagcaaaaatccaacgcagaattaaagtacaggctatagggaagctattcccgaaggattcggtctccccataaatctgggcgcatcggttcagggggactgccccgaaaacaaaaaaaataatttttttaagtggccg

SEQ ID NO: 58534 - DNA, 878 bp, Heterodera glycines
gacaagcccgagattgagctgacatgcaagacgcatttgcacgttgaccaaatgttcaaggacgtccttgacaagaagtacgacgctgtggtgatgcccggaggcagtcccggctcgaacaaattggcggaagtgagtgaaagaaaaactgtctcataggttacggtaataccgctgaataagaatcaatggggttacggtattatttttcctgtaatactgtcttattggcgggggtggcgacacattaacaaaagggtgctcccatctcaaatgtgacaagaaccgtttttcctttacgtcttactgttacggtactgatttgaaagcacttggtttatacggttcatcatgttacggtaccgctttgaaagcacttatttaatatagtaacagtttcttcaacaaagaatagaaccaagttttacagcttgcaatgtaatttttcgatttttttttgctggtggattactgtatgcatgtgcagcagcacctgtattcctacagtacactaacaaacctaccgttttcgaataaatttcctttgttcgtgttttttaaagacaattagtctcttaaatttcaacacttattctaatatgaaagccgaaatccaagcacgttctttgaatttcaagtacagaacattgacaacacaatctcgttaagatttaacaacacaaactcattaaaaaatttgactgttttatttaaaaaaaaatgttttaaattttttccaggacccccgggttggcgatgtgttgcgcaagcatcaggaagcgaatgcggtggtgggcgcaatttgtggctcaccgcttgcgctggtggcccacaatgtggccagaggcgccacactcacttcccatccgtccattaag

SEQ ID NO: 58535 - DNA, 1990 bp, Heterodera glycines
atggaagaagataatgccggagacataataaaatggctctacaaagattcgacaaaattggattgcagcagtgaaaaagtgaaagttacaagcgaacatttgcattccaaactttgccaagtgattaaaattaattgcctaatttcaattacttatttattttaaagaaattaattccaggtcaaattgcgagggaatctgctcggttttaagccattggattttgcttctgaaccttttctgattgtatgtgaaaaaataaacgtccaacgttcggaacaaaacaaaaattctttggccattcggcaaagcaacaaagaattgcacttggaatttcagtcggagaaacaatgtgaccagtgggtagttaaggtcctttttatcattggttaatttttgttgaagaattttgtaaattcagcttatgacttgctctcatcgtatagtccaagccgaatacgaccaggtttaatgaacacattcgccctttattacgccaatttctgtcgattgtcccttgaataggtcctttacaatcgcttcactcagcctttgcccgcttcgtctctaagccaacaaatggtcaacaatttcgcctactttctcaccgcccctttcagtcgtgaacaattcttttctttgtctcaggtggcttttttttaaatatctttgaattcccctttttgattcagtctcacaattttccctctcgtcaaatcaaatgccaagaagtgatgtacgagagcaaattgtccatggtcgtgccgcgagaaatccttcgactttcgcataaatgggcgacggaattacgcgacgaattattggacaaactttggggcgtaaagaatgccgccattttggagactttgcacaacgcaattcgtcacctcaactcgaacattgaagttggtcgtctggccttcgtctgcttttccgtacggtgtgctctttttaagatttgcactcaagcgaacgaatttctcggctcttacgcgggtccttccttcaggtgttttcgttgtcccattttaaattttagcggttgtcggtccaatttcgacagaatttccctcagaattttcgcaaaaatttctataaagtcaaaagtttccttttttggccatcctgtgaaaaataccgtgtctcctttctgttcgtgcccaccaatctccacgtgcagactttccttatcgacgaccgacccgccactgcttttctcaccatcggcgcaattgccgctttgcctttgcgcttttcatccggcggacttttcagaattcggtcggttcaatttactctcatttaaaaaaaattacttttatccattaaagcagtaaattttccgccgctttgggatcaatcgctttggaccattcaaatgaaaatttattttactcgcgacgacaaattttgttggcgatgaaacgaaaaattggtgaattaagcagaaacattgacattaaatggcgcatttcgggggacggaaaaacggacgaaattggcaatggaatatttcaggaaatacagcaggtaataatggcattccaacaatagagaatcacttgcattctcatattttaagatgcatgaacaaataatcgatttcgtcaatgccttccccaacattttcaatttggtcgattctctctgtgagggtggactcgcccaattacagcacaaaggagccgactccgtcccgaaggattcgttgcgcaatcaaatggacaatctcaacgcgcagttcgagtcgctcagctccaaaatggtcgccgtcgaacgaattgcgacggccaacgaccgctcgcagaatttggcagaatgcgaacagagtgcccgtgccgccgtccactcgacgctggacgctcttcacaatttgacgtgctccctctcctccggccaattcctcgcgctcgtccaaagtctgcgcaaggcgagcgattgccaaacatttttccacttacaactgagaagcgacgcgttgctttctttg

SEQ ID NO: 58536 - DNA, 576 bp, Heterodera glycines
atgggaggagaagagaggaagggaagagaagaggaggaacaagaagaggagggaagagaggaagtgaaaataaaagaagagggggaaaagaagaaaagaaaagagataaaaagtgaagagaatggatggagagggggagggaagaaaagagaagtgacgggaagagaggggatgggaggagaagagaggaagggaagagaagaggaggaacaagaagaggagggaagagaggaagtgaaaataaaagaagagggggaaaagaagaaaagaaaagagataaaaagtgaagagaatggatggagagggggagggaagaaaagagaagtgacgggaagagaggggatgggaggagaagagaggaagggaagagaagaggaggaacaagaagaggagggaagagaggaagtgaaaataaaagaagagggggaaaagaagaaaagaaaagagataaaaagtgaagagaatggatggagagggggagggaagaaaagagaagtgacgggaagagaggggatgggaggagaagagaggaagggaagagaagaggaggaacaagaagaggagggaagagaggaa

SEQ ID NO: 58537 - DNA, 182 bp, Heterodera glycines
atgatttctttaaacgaggcaagtggattgcgtggccgtcttaaagtctgtgatggcaatttgtcgttgttacgcgagaagttggcgactgatccggacagttatgcagaggaatttaacgaacagtttgaacatttcaaacggctgctcaaattgctcgaacttcaaccggtgctccacag

SEQ ID NO: 58538 - DNA, 689 bp, Heterodera glycines
gagctcgaagacttggatccggaaaacagtggatggaaatattgggagaaatgggaggagcgaagacagcagcaaatgttgcgccatgacgaactaaagtatttgggtggaacgagcaaacaaaccccattttacttctcccgtctgttttttttcagatacaaatatttttggcttcaaaattcgcctgccgttcagacgcacatgcgcttcaccactgaaaaatacaaaacacacaaggtgattttacgaattcacatttgtcagctgttgttgtggttggttagtcggggtggccaactcagtcccaatcaaagtttgggcgtcataactttttgcttttttcgttcaaatccaaatgcttgccgataaaaatccgaccctagttcttaacttattttcttatcatttgccaatttcccggcgtgccaagcggaaccgctggacgacttaattttagaaatttttaataaaagggtattttatcgaaaaacttgctaaaaagttatcatttctcccgcagtacacttaattttggaaaatcatactgttctcttcctcctttcacagttcctcactattcccgtgacgacgccgggcgtttatttgaagcatacgcgtcgactgcgtctcaaacagcgggtgtggaagtcgttggaagagtcggagcaaatgatgaaggaaaatga

SEQ ID NO: 58539 - DNA, 672 bp, Heterodera glycines
atgtggctgaatgtgagacgaactacgaaaagtttcaagtgaccaaatttaaagcaaaataattattttatgtttatttaaaaataatttaatttttttaaaatattcgctaatcaaataaaaaaaaataattgcttttaattttttataataattttgcttttaatttgatcacttgcacttttcgtgcttcatctctcttccatttgtacagtatttgatcattgtaaatataacaagaatcaattaggctggtcggaagtgccttctgctcagcgacagttcaatggttttggcgtccagtgacccatcaggctcacaatcagttgcaaacatggccgctacttctgctccggttgttcatctgtccaatgctgaacccgaactatttgctgaacttttgtcccgaggctttgtgcaaaagtcggtaaaaattaggaatcagaactagagtgccacgggaccgggaatttttgcaaaaaccgggaccgggacttgccgggacctgagaagccgggaccgggacttcgatttttttcgggaccgggaaccgggaccaaccgggaatttttaaaaattcaaaaaaattcaaaaattaaaaaaaaattcaaattttaattttttttttttcaactgaaaattaaattttcattttgttttttatttaataaa

SEQ ID NO: 58540 - DNA, 634 bp, Heterodera glycines
atgggcaatttttgggagaaagatagaactatttttagtttttgtttgttaatttaattgtttggtatgccatataaaaaatattaagctctcggttaaccaaagcatggaagtaaaacacgaaaaaattttccttggtataaaatcctgaactgacttttatatgtattaaaagggcgattttctcgcaaattttcactacgtgtagagaagtaagaaaaaaaatttccacttggtttgggcttctaagataaaataaattctccaattgtaacagatcgccttgcatcagcttaccttcactaattttctttatgtccatcatattcattttatatgaaaattttattcccgttttagatgtctcggccaaacattcagagtttcccgtgccctccgcgcgttctctgctcgacggtcgcttcagtccccgtcgttcgcacgtggtcaccacgcccgctgaggacagcgccagctacgaccagcagttcttcgataatccgttgcacctcaaatgggccgaccgaacacaacaaaacaatgattatgctgatgatgacaataaccaaatgacctccgtccgaaaaatgacactttcctaattttttctatatatttattattaactaataaa

SEQ ID NO: 58541 - DNA, 701 bp, Heterodera glycines
  unsure (1)..(701): unsure at all n locations
atgagtataaatgttataagaagtgaaaaaaatgaaaaaatgaacaatttatgaaaaataaaaaataatgagaaaaaagcaacttttaggactaaacgagaacatgaacaaaaaaggcagattaaacgagtccaaagaaaagaacgggaaaatttatgaaagccattcatttttcaagatggaattgctgtcaaaagaggaggaagaatctctgaagaggttgaagagaaagctcgaacatcaactctgagggtccagcaaagtctgaccgaaagcgaaaaatggaaatccggaacgtcggatgatgatccagtgggaccacaggagtgggaagaaaatgaggaagaaacgatgaaaaagggcgaagaaatgaagaaaaaagaggaggaggagaagaaaggaagagagggaaaagaaaaagagacggaaaagaagaaggaagagatgaagcagaaggacgagacggaaaccaaacgaagcctcagcgtcggaacaacgaaagacgatgaaatctcgattgtggattctgaagaaagagaaagagatgccttcgaaaacccgccgaagccgacaaacgagcgaatggcattnttgggagtcgactttgaacaatgaggcaaaaaaggattcgcgagaggacaaagagaaagccttaaaaaatacagngccaaggtattgtcgtaagctccagaaaacgaaca

SEQ ID NO: 58542 - DNA, 474 bp, Heterodera glycines
atgcgactgatcggccgaacgcaaacttttcaagtggacgaagaagcggaggaaggggaggacgaggctaaggaaagcgtggaaatgagctacagactgaacggattcactaattcgaccaaattcgaagtgcgcgtggagtgcgagccggggaaagtgaacgaggaaatggtgggcaaaaggagcgaccgaaatttccaatggcacggaccaaaagggagtgccaaaacaaaaaaggatgccattggcatggactaataatgtctctctcatttagtactcatttgaactaatccgggaggaggaacgttaacattgcgaaatatcaaagaatgaaatttagggcattcaaaatgatatttttatgttgtttataaaagaatattgagcgagaaaatgttaattgatttgaatgataaatttttatttcatctaattggattgatcactttcacgccctaaattagcaaacaa

SEQ ID NO: 58543 - DNA, 2057 bp, Heterodera glycines
  unsure (1)..(2057): unsure at all n locations
aaagaaattgtgtcacaattatgcacaaagctaacgtcggcgagtgcggacgaaatcgaagcgttgccgggcctcggaacggcgcccaactttaagcattattctggtgatacgaagagcaataatggccgagaaaagccctaaagtcctattgtgtggccaaaaatccaattctgagttcaaaatgacgagagctttttcatttcaaatgatcagagtccaaagcccaagagccaattcccgagaatttgatcccgaaaaccctgtcttttattctcgcgattccaacacttaatcaccccacaaaggctacctgaaatcggcggacaaacactttctgcactattggttcgtcacctcgcagaatgacccgtgtcgggaccctctggtcggtcggattaggtcaaaatcggctttagcccaaaactgctcacaggtcttttggttcaacgggggccccggctgctcctcgttgggcggcctcctggaggagttgggcccttacctggtcaactcggacggacggacgctgcgcttaaacccgcactcgtggaacaaaaacgcatcggtgggccaaattcagcttggaaattttcaagagtttggccaaggtggtgttcatcgagtcgccggtcggagtcggcttctcctactcggctgacgaagaacgcgtaatgtcgggcgatgagtcggtcagtcgaaggaattcacggaaaaatattaattagcaatttatgaggcacttgcctaattgcctaattatcaaaaacatttgcttttgagaccgcccaaggcaattacgaggcggtgaagcagttcttcctcaaattcccgctgttccgtaccaatcgcgtgtttataacgggcgaatcctacgccggaatttacgtgcccacgctggttgccaaaattgtggacggacaagccgacttccccatcaatttggaggtgattggaaattgaaaaaaaaacaattacttcggcaattaaagggaatggcaattggaaatggctttatgaacgaagcaattgacactgatactttggcacgattcgcttattttcatggatttgttggagagactgaatggaatgcaattgaaaagcactgctgcggaggatgcgcaggcatttcgaaatattttttattgtcaatgatcgtttgcgattaagacaattgtaatttgggcgaacaattcggagaatgtcgcgcaatggttcagtaattatggcaaaatatgcatcgctttttccttcgcaggtgcgcgacataatattgttctgctggacgggagggattaacgtttacgacatttaccgcgactgctgtgaatttgctaattaattttttaaaattttaaacccattaatttccattagttccgcagcacagtaaaatggccgcaattcgacggggaattctccgtgcaaaagcatttcattcaaacgacacgaatctttgggaggtaatttcctaactaattgtaggtttaattcgcttattaaaacagccattggaggagattaatttccgcggaggtgccccgtgtttggacggtaaaaattaacggcgattattactaattagagataattagaccacgcgataaccaactacctgaacactccacgaggtaagttcactttaactgctactgtcggaaaaggtaacaaattttagtgcgtgaaacgcttcacattccgccgaatgtcccaaattgggaaagttgcaagtaaaaaatgagtggacataaaccaaagtttcagcaatcatttttatttagcgattgggttggcatactgtacacgacagaatactgtaattatattgattagtgatcagagtttaaatgctcttttaattttagccgacatgtcgccttttgtgaggaaggcgatcaatgccaatttgcgggtgctgctttactccggagacactgacatggcctgcaactttctgtcgggccaacacttttcagcgcaactggggccttgcggttgccnaatggttttttttggcattttnaaatcattttttanatttaacagacaatcgc

SEQ ID NO: 58544 - DNA, 921 bp, Heterodera glycines
accgcccaaggcaattacgaggcggtgaagcagttcttcctcaaattcccgctgttccgtaccaatcgcgtgtttataacgggcgaatcctacgccggaatttacgtgcccacgctggttgccaaaattgtggacggacaagccgacttccccatcaatttggaggtgattggaaattgaaaaaaaacaattactttggcaattaaagggaatggcaattggcaacggacacatgcatacgtcgatgaattttgatacgatggcacgttttgcctattctcatggcttattggcggagtcatcgtggaaagagttggagaacgaatgctgcaggggatgcgtaggtggaaaaagtgtttcttacaaatggatcaccaaaaaagggagacttcagatacttgcgatttgggtgtactgtacggagaatgccacagaaaggtacggtaaccaccttttgaaatggcaaccaaatgcattaaaggttttgaatatcatgcgttttgtttggcgtggcggactgaacgtttacgacatttatcgcgattgtggtcagtcctcgaatttacccacttcccctcaaaatgaccaagggtcctaatttctggcctttcagaccatcaaccgaactcaaaacgaatgaaagcgattcgaaatggcattttcaaaagtgccaataaaaccgaccggtggaatattattggagaagagctggacgcaaaagcaggcaaagttggcagtctttcaaaatcagataacttaaaggaaaatgaaattgcgcgcgagtcattacgggagattaagccgtgcgcaaacggtgggcaaatggaaaataaataattaaaaaatatgtaaaaaggaaataaaattacaaattaaattattaagacgaagaaagtgcacaatatttgaacactccaaaag

SEQ ID NO: 58545 - DNA, 2564 bp, Heterodera glycines
atgaaggttagttgaataattaaatgttcaaaaataaaaatgaaaatttttaatcatttcacaatagaggtaaaaaatcaaatttttaattatacaaataaaaaactctaatgacaaaaaatattcacttttccaatttttattttgcgattttgcacccttttaaaaaattaaaaagtgaattttaaaatgaaagaataattaaatattttcatttaaattatctaatatattaattttgcaatgtgtgtgtgtgtgtcacaaatattttgaattatttattgacacgaaatcttttttaaaaaataaaaaaattattgacaaaactatttcttaagactttcatcatcatcatcacagaatgttgaaatattaaagaaaagaatgttttgcattattttacctgtttatattcatataaatctttcggactcgctaatttttcatttttttagcattgattaattattgtttcatcaatcgttacaaaatgttgaaataataaaataaaataaaataatgtttttgtattgttttatgtacctgtttatttcatactaatctatcacacccgctaatttttcactttttagcattgattaattattttttcattaaccgttactttttgtacctgtttattcatattaatctatcacacccgctaatttttcactttttagcattgattaattattttttcatcaatcgttacaaaatgttgaaataattaaataaaataaaataatgtttttgtattgttttatgtacctgtttatttcatactaatctatcacacccgctaatttttcactttttagcattgattaattattttttcatcaatcgttacaaaatgttgaaataagtaaataaaataatgtttttgtattatacctgtttttttcatattagtctttcgcactcgctaatttttgttctttttagcattgtttaattattttatattttttaatttttaataaactacgttttatatttttaagattatcaattcttatattattcctgcaaaaattatggtacgcaaaaaacaaattttttcgaaagaacgggttgaaagctcccgcgaaaaaagcagatatgacgggttccaagctcccgaaaaaagcggtaataacgggttccaagctcccgataaaagcggaacagacatacaaacacaaacgatgaaaatttttgaaaagaaagactatgatattggaatagaagaaacaatagaaatcataaatatagacgacgatgaactatcagactattcagatatacaatcttctagccaaataaataatacaactcttagaaaaatgaaacagcgaaaaaaaatgaatattgatcaaaaagaaagcgaaaagcaaaaaaatcgcgaaagaatggctttaaatcgtaaattttttctagaagaaagtcaggctgaaaagcaaaaaaaccgtgaaagaatggctttaaaacgaaaaatttttttagaagaaagtcaggcggaaaagcaaaaaaatcgtgaaagaatggcttcaaaacgtaaaaaaggattaaatgaaaaaattgaatcttatatttgtgcagatagtttaagtgttagaaaacacaaacttggaccaatgaacaacgaatgtgtgcattgtcattctttaaatttttcagaagaaatagtcgcaggcaaaaaatcagaatttaaaaattgctgccattatggaaaagtattgatttcagattttcctgaaaaaaattttcctgttggattaaaaaatttatttattcgaaatgatgtaaaatgtcgtatgttttttgaaaatattagatatttaaatagcactttgtcaatggcttcaattaatcctttaagatataaatttaaacataatcgaggaccatattgtttccgaatttctggccaaatttttcataaaatgaatatagcacttcttccggatgaaaaagaggaaccaactaatggacaattatttattgtcgatacgggggacgcagtaaatttgatgaaacaatcaaactcaaaaatagataatgacttattgaattatttatataatttaattaaatcagaaaatccttttgctaaagcttttgtaatgatgaaagaagaagaagacgctgaaaaggaaagagctaaacaagaaggaagagaaccaattgaaatgaaattattgtttggtctagccccgaatatggacaaaaatcgatataaattgcctagggcaaacgaagttgctgttgtttttgtacctggagcagatggagaaatacctgagtcaaaaattgttgtaagagaaagaggaaaagaattaaagattttagatagtcttgacaaaaatgtaacacctttatgttatcctttgttttttccaaggggaacacctggctggcacccagaaatgaaacaaacaaatggctataaaagtctaacaagactacaatatgctggatgctgtatggctgtaagatgtgagtttaatccgatgttatttggagggagattatttcagcaatggggtgctgatgaatatgtctgaattgataatgataga

SEQ ID NO: 58546 - DNA, 1387 bp, Heterodera glycines; identical to SEQ ID NO: 27872

SEQ ID NO: 58547 - DNA, 106 bp, Heterodera glycines
aacaaagatgaatttttgtccaaacttccgttcgccaaagtcccagtgtttgtccatgacaatttagtgctgtccgaaagtatggcaatcattgaatatttggacg

SEQ ID NO: 58548 - DNA, 1529 bp, Heterodera glycines
  unsure (1)..(1529): unsure at all n locations
ccatggctttcttcaacgcgcccgcccactccacctcctggtccatcgtcatcatcaacttatgcccgcgcacgccacaacactcagcagcagcagcagcagcctcgctcttcgccgcctcccatccgtgcttgttcaatcaccgcacaacgttccatggcggcaattgtccgtcaaatgaacacaaatgatgctgctgttgcccgggacgagcgccgttcgcgtgagcgtcgtcgtcttcgtcaactcaatgctcagccgcgccagggtcgccgactctcgacgccccgctcttcacgcgggcgcaacacgttgtcaccgcgcccgccccacaacgtcatcaccattgatgagtcggatgcggaagaagaggcgctgggcgtggcgcaacagcagccgcttgcggacgaagaccagcatttttacgacgacgagatgctgacgattgaagatcaaattgcgcaagggctcgtcgagggggcagccaacgaagtggtgatgatgggcaaccacccgctggctgccgccgaccgcgtctggatgatcgggaccgcatttgagatgagcacgctgccctcatcggtcaagggcattgtcgagcacgacgaagcggggcgcagaaatctgatgtgttgcatatgtcacgaatggatcatcggcggcggccaacgggtggtgcgcccgtcatgtggacatttcctccacgcctgctgttttgagcgtgaggcgaaattgcggcgagtgtgccccatttgttcagcccattttataagtgggaaaagaatgactcgttagggtcaaatttccggtggaggacgccattgaccgctcaaaataattaattaaaaaataaaaaacattttaattttttcttcatttcgcatttttgcttttttgttcaacatttctcattcattccattctttttatcatatttttatgttgttgccaatttttatatattttttctgccatttttaataaaacattcatttttatatttcaaaattcagtaaatttattcatttttccttgtgtgtgtgtgtatgtgttttgatgtgattagggggnggggggggttgcttacagaaaatgagaagcgctagggctttgggggagagaaatggtgccatttcattggaagggctttcacaaaatggtgaaatagggacatgcgcaaaaatggctttttgcatttatagtgtaatgcctggcgtcaaattgggcgaggtcggccctcgttcaccgatcagtctgatcacgacagcagcagcaccaatggctccgaccatcagcagcacgtcagcggagcgccgccgatgcgcgacagcagagatccggcggtgtcaaatttgggcagcagcagcagcagtggaagtgccgccgaaagtgccaacgttgcgccgagcgatgacgaagccgatgccggcgaagccgacgggcagcgactgaaccgtttctgcaaagtgattggcgcctgggagcgcaccgagtgccgtagccgcaacacgcgttgtgaggcggttgag

SEQ ID NO: 58549 - DNA, 2025 bp, Heterodera glycines
  unsure (1)..(2025): unsure at all n locations
atggctttctctaaacaatttgctgtttttatatttttactgcttcaacattcaattcgatctcaacaacaacagcaacaacaacaaaatgtgatcgagcaagtgaatttaaaaatttaattttaaaatgaatttttcggtataaaaaaataaatttcaaaaaaaatttgggtttttttgaaatttgaaaattttgtcagcaatctccgtctgcaacagctgctgagcaaactttgccattgtcagagttgcacaacacgttgaaccagttcctgtaccaactgaagcagaccggcgaaaaagttgtggcacaaacgccgcaaattgcgtcgccgttgttgttcaacgccgccgccgcagccgccgccatgggacaacagcagcaacggcacagtgccggtgatggtggtgccgcaacggctggcggcgggtgggataaaagcgcgacaattagggaggggggaggaagttnggagggtttttaggctagagtcggtaggctgggtgaataaaaattttgagaaatttcgaatttccgaattaaaaatctgcttttggtattagtaaatacctaaaatttgtgcagattattggggtttccagtgagaatcggtagaaattttttaatttttttttttatttttaaacatatttttaaaatttatcaaaaatatatacataaaatgtgccgtatttttccaatacctaaaaactccttttttgtcgaatgaatctattgtacgtaattgaggatgttatctcttccgtgccccggggctgcccaccctttatttcccaaggtttggttttttcagcggcactcccccctctgctgtgcgtccgttcgtcccgcttggtcatgttccgcttttccccagctctttgctggtgccaaccgcggcccatttgccgccaacttttcgactgcccgctaccgtaatggaacaggtgggttacagtacagtgtagtcaaatcgtaacccaataaaaatgaatttattactattgaacagcataaagctttcccaatggaaggctctccatcaaatccgccggtggtcattctgtctccgatgaacaacaatcaactgcagcactcaaaacggcacaaaattggcagcgccgaaacaactgctggtgacagtaccacaaatggcacaacgacagacattgtatcaactacggtagcacacagtttcacacacatattactgtcattatccaatccgtactcttaatatttatgcttcattttttaaacagattgttgccgcaccacctttgagctttagccaaacccctgagcagcagaatacagtatccgatgatcctcccactacggtatccgagttggagaatacggtacatgacgatgggcacgcaaccgttgcagcaacagatgtaaatgccaacaccagacaacaacagcagcaggttgtcgctgctgctgtcgttccaccgttggcggtgccaattgaaattgaaacaacgaatgacacatcgccaaatgtgacgggtaaatttttttttagggaagcaattactgtattagccggcggtactgttaccgcgtttggtttcgctaagaatggcacggccaatttttagtgcctgtgccatttgcatcgccagcgcagactccgccactcagcgtggaaacaactactgtaacggagccgacggtggttgacgattacagtagtcaaaggcagcgcattttttttgtgcccggaggcgtaaaaagcattgaatccaacggaagccgacagggtacggtatggggagaatgggatgattacagtaattgtttttgctaaaacatcataaaaaatttgaattttttaaaaattttcagcacttactgctgttgatcttgaggcttttctgagatcagctaacgtcgcgcgcatactttcgacttgggtcagtgatcaatcgttgactgatccattaactgttcagaaattcggtcatcaatttttggctgatcgatcggatttagcaattttttctaatgggttttga

SEQ ID NO: 58550 - DNA, 204 bp, Heterodera glycines
atgacatcctcacaagacaccaagctgttcttggcattggtcgagagagtgttggagcaggaagttgcacgacgactagcggaacaacaaccgaacaacaacaacaacaacggggacagcaacaacagcgagtacggggacaactccacacaacgcatgtcaccgccgcaacacaaccacgcggcggcggtgaacaccgctgtt

SEQ ID NO: 58551 - DNA, 401 bp, Heterodera glycines
atggccgcttccgacgtgttcgaggcaatgttccgttttgactccgcaaatgccacgacttccacttcaaaacgtaataaaactgttggcttaaaaacattccctcaagatttgggggaaaagtaaaatttagagattttttggtattttacagttaattttcaaggacatttttttgttttttcgaaatacatagagaaattagtgcaccccctaagaatgtcctaaaaattgaaatttcccgattttcagcgccttcggatttggccagcagcagcaaccctgtggtggtcagcgacgtcgacgccgatgtgttcagggcgatgttgggctttatttatgcggacgatttgagtgggatgaacggcgacaatttgttcgacgtgctttacgctgggtaa

SEQ ID NO: 58552 - DNA, 110 bp, Heterodera glycines
atgtggattcttattgaaaaatcaaaaattctttttgaaaatcatctgcttcgtcattctttttccatgtcgcttttacctcatttaatctttgtcggattatcgcactg

SEQ ID NO: 58553 - DNA, 58 bp, Heterodera glycines
agcccgtgaacagctgcatcggatgcaagtgccgccgttgctgtacgcctaacagttg

SEQ ID NO: 58554 - DNA, 267 bp, Heterodera glycines
tataaaaataaaagtgatttttggtttcgggaccaaaggggggtgacaggatttttgattgaaaaatttttttcaccaaaaatcttccaaaaacatgtcattagggctattttatgacgctgatcacgaatacgtgatcagattttacttttgacatcgtcaagacctcagaatccctgtgtgattggggattctgaggcatcattttgaggggggagggggcaggttcggatccggacggtgtaacattatttttctgtgcatttt

SEQ ID NO: 58555 - DNA, 778 bp, Heterodera glycines
atggcctctgttgatgagaatgagcagcttgtgcaggaaattgtcgggaatgttctgtcggaatcagcaaaaggtacagacagacaatcgagcaaaatgagatgtgtaaattctttccatcttttcagaccaccagcaagaggagggaacggtaggttttctgagcaattacagggaattggataactgaggaacaccatgaaaaactaagcatcttatactggtttaacataaaacgcagaatatgaggttatcgttagtactggttcaaataagaggaaatttggcaccccattctccatgatgacaaattcaggaacaccaattgatggacgaagtcgtcaagatggacagcaccgatgccgaggcggaggaccatggagggattggacatgaagtggcaatttcggtcagtgacgtcaagcaggaagggtacgcagtggaaagtccggtgggagaggaagaggagaaagaaacggagggacaaaacgacggcgcaatgcgacagattgccgacaaagttggggtaggcgaatggaacggttcggacaaatcgaacacttgggggaaaacacggagtgttttctagggactttcactggacgaagacaaaacagcgaacaccgacgccgtcgtggaaccgccgatggccacggaagagaaggcggcggacgttggcaacgacaaaccgtcgggagagaatttgaatgaggaaaacaacgaaagcaaagtgggcacaaatggggttcatttaaccctaaaaccattttttgtgtag

SEQ ID NO: 58556 - DNA, 2115 bp, Heterodera glycines
atgctccgaatacggtccgccaacaggtgtgctcggcttcgcctgtacgcgctctattaacagggtaattgaggtgaaggacatcaacagcattgcgcccgtcgccgccgctgcccaacccattagggaagagcgacgacgacggatttgggacattttgatggatttaatttatacccacaggattacaaacaaataaatattggaccaatttgagtggttgttcttgagttgggtgaactgtttggttggctattgaaatgacggcggaccgaaaattacattcggtaaaaatgggggggggggtgagaaaattgtgcacacatttttcaagattgatcactcaactaaactgatcgatcaattattacatcttacctgcaaaataattccagcaacagcagcaggtggttggagactcgacctgtctccacggacgagattctcgtttaaaaaagggttaaaaacggtctccggcgaaaaaaaaattaaacattaaacaacaatttttcgtaggattggactgcttgctgctgctgctgctgcatggaggtgcttttgtagtttaatcatcatcattattattattggttgatttttggttgatctgtaaaacagaaaatgttacttgcccggtggaattcgaattttgaaaaatgtaaaaataaaataggaaattggaaattgaatattcattaaaaaaaatttgaaatttttttcccataaattgtttttcattttatataccgaaaattttatcattttattatggagaaattaggtcctaattggcatgaatcgttatttaccaattttagaattgtggttttagcgaattttttttttactttaaaataaatttgttttcacatgataagaatgttatttaaaatttccaaaaatataaaacaattttttcttattctcttatctttttttttgattatttttcttacacaaattctttccaaagcaaaaactcctcttcattttcattatttttaatgaatttatcattttattatttacagttatttctcgcaagaaattaattgctttccattcataaaaatgattttgtttttgcctttacttgttttcatttattatgcacttcgctacctttgggtatgtgaaaataattaaaaatattatattattttaaataaaatttaaactttttaaatgaatgacccaattttttaatttaaaatattatcataaaattaaaaatttaaatttttgcataaaactcccctaccaaatccaggaattaatcccgcttcaaaatgcttcgaaacgcgctgtttttgtcaccggatgtgactctggttttggttatttgttggcacttaaattggcacaatatggaatgctcacatatgctggatgccttactaaacaggtatggcatgcgcaattttgcatggttttcagtaattagactcagaaaataagataattagatgataatcaccaaaaaaataaaaataaaattttattgtggtctaacaaccattttttgattattgatgacaaaaaattctgaattcttgctgaaaaagtgaaggttttacgataacacattttggcattttctcaaaattaatgcttacaatattccaatgattaatttacggcaccaatttcggcagtaagaatttttttttaaattcaattatactttttgtttggaaaaatatatttatgttagccatattattctttcactacacaatagcagtatgtttaagggacgcgatgaactgattgaggaagcaaaaaaacgtggaattgcggcaaaactcaaaacagtgccattggacatcacccaggaccaatctgtgaatgatgcagcggattttgttcgcaaagatttgaattctgttggaaacattggcgagttgttgttctgtcctggacttattttgattttttttttaatttaattaaaaaataataattttttatttacagaattgtgggctcttgtgaacaatgccggcatattcaggtacatttgcttttcatggatgatattttattaaatttaaattgaattttatagctgttttgggcctgatgcttggacatcgattgatgagtgagaataaa

SEQ ID NO: 58557 - DNA, 157 bp, Heterodera glycines
atgtcccaaatccgtcgtcgtcgctcttccctaatgggttgggcagcggcggcgacgggcgcaatgctgttgatgtccttcacctcaattaccctgttaatagagcgcgtacaggcgaagccgagcacacctgttggcggaccgtattcggagcatg

SEQ ID NO: 58558 - DNA, 1218 bp, Heterodera glycines
atgcttttccttcctcgtcttggtactaattgtcgtctgtgtccattagccttgggcaaaattgtcattgtgctgcttcattttgtctgctttatcaaagtggtggacggtgaagatgaacatcagcagcaacagctgcaaattgaccatggcggagctgaacaaagtattgaaatttgaattggaaaaatgattgataggcttagtcgggttttgaaatccgcttgaaaaagttgtatcctacacataaccttacttttctgccccccggcattattcggactcaattttggccaaaatacctactggactcgtttaacccgaatttttgggataaaattaaaaccctggattgggaactcttaattatagcaagattcgaactttatcagggatttggtgttttataaatgccggccaaaaaataaggaatttaaaaattatttttatttgaatttaccactaattttcattactgctttaagtctgcttcgagccaagagatttgggtgtttcgtgcccaaaggacggaccgggaaaaagcaaaatgttttattacaacaaaattttgggtatttttttaaattttaattttaaatattttttttatttaggttcttgccaaccatttatctacaaaggatgtgcaggaaatttgaatagatttatctcggcgacagaatgccgaaaaacatgttcaaaattgtccaaaaagacccaagaatgggttttaggtgaggcaaggaaattaaaatgaatcaacggattaaagcgggatttaaagctggaaagaataaaaatttgtgatccgaacattcaaaaaattcagctgaacggtgtaatgccagtcacctcatcccggatggtcattacatcgaatgtgttgcagggaaatgcccggaagggcataagtgccatcccgccgatggtatatgctgcccaagaaaaggtaaacattatctggaattgagtacggtatcatatccagacatgtcccattattaggttaacgaacggtaaaaccaattacggtattaaattattcaaaaataaattcagagtacgtctgttctcttcaagataattctggcacttttgctgacggagtgccggataagcctcgcttcgcgtggagtgccgacattaaggtgcttttagcgtttttggttttgagcaccgcctaattaggctcgctcattagcccgttttggaatttta

SEQ ID NO: 58559 - DNA, 98 bp, Heterodera glycines
  unsure (1)..(98): unsure at all n locations
agaagatatttcccgatgaatattttttntgttattcattntattaaattatgttaaaattttaaatagacttttccaggaataaaattcatttttta

SEQ ID NO: 58560 - DNA, 1057 bp, Heterodera glycines
atgctaaacagaaacaaagcaaagtcagtacaaacgggaccaaacccggagtttccagaaagaagcaaagcaaagtttgtacaaatggaaacaaatccccaattgacagacggaagtgaaggaaattcgataagccaaaaatcaacaaacttaagaaggcttaaaagtgagagcaatactgataaaagaaggtttttggaatcaaaaaaagaaaatcttcgaatggctgactcgtcgcgtgattatggtcccagacatcgacaattccctggccatgaaatatcgccgaatcggtcccaacgatatcatgatcattatcatacacattcaacgcgatatgcccctgaaatatcgtcgagtcggtcccaacgatattatgatcattatcatacacattcaacgcgtccttcttatcggcgaaattcatcaccagaccgacagtcttctgctatacaacaaggatcacaacattctgagaattattcaacgacagatgctgatcgaaatggaagagactcatcgcaacagcaccatcaacattacagccatccaagctcgtcaaagagtcaacggagttattcttcgcctgatcagaaaagagcatcttcgtcggaaagtcgtagaactaattattcttcttctttggaccaatatattgatcctcagtctgcacaagcacaaattattcaaaatccaacccaagacgaccaaacttcagaacacagttccaaagaaacaaatcaacaaaaacaaccggtatatgaacagaatttagaaaatcaactatatgaccctctgcagccttcatctttaaccaccaacgcgcaagcatacaatcaacctaaactgttacaaacttctcatgcttcacatggacagccaatgtttttgccgatgaattatcaccagcctttattgcaggcacaagctgttaatgtatcgactcagcctgctggctttcctttacatgcttatccactgcaaaatccgactcaaaccaattttatttatcaatcaggtatgctcacatgataacagccatagacagactcggata

SEQ ID NO: 58561 - DNA, 1207 bp, Heterodera glycines
atgccatgtttgcttgtgccagtgtgcgttggatcagctcggcttctcccccgcggagaagggatgggtgcgcgagttggccacggcgtgcgttctcatcggcgaggcgcaatttggcgaacggcacggcatggacatttcctttgtggaggaaatggcaggtgcattcattgccagatgagaaaatatttgtccccaaaaagccgcgaacgctttacagaagttgaagcggtggctgaactgctcggcatccgtgccaatgctttggtggacgcactcactcaggcaaagccaaccaatttgaaatctccagacatttacgattctcgactcattaatcacgtccgttcagccatccatccgcgtcggtgacgcgctcatccgccgctcgcagccattgcggaaaacgctttgtgccgcccagtctttggccaaatgcgtgtacgaacgactgttctcgtgggtgctgtccaaatgcaattcggccatacggcggggccgaacagggagtggccaaagcgatgaaacggacggcggaagagaggccaacggaatggtcggagtgttggacatggccggcttcgaaataatgccgtgcaattctttcgagcagctttggtttggctgtgcatcttcgaatccaaaagtggcgcccattaagcattaattacaccaatgagcgacttcagcagtttttcaacgaatttatgttcattagggagcaggaggagtacttgcgagagggaatcagctgggaatttgtgaaggtaaggcgaaacgggggatgactcatttgaaatggggcgatgactcatcaaacaaacgaaggacttcggcagagacttgcagccgaccatcgatctgatcgaaaaggttgtcgactacgtccatttgggcatttgtcatttggcaatttcagccactcggcattctgtcgctgctgcaagaggagtgcattgtgccgaatggctctgatcagtcgcttctcgacaagttcgtccttcggctgtcttccgcctcccccggggccacatttttcaaggccaaacaatccaatcggtaatcagcagctgttcttccccatgtgtactgaacagatatcccctcatcaaacagagtgccaaccccccatcacttcacaatcgcccattatgccggccccgtcagttattccgtggacggatggctggagaagaacagagacgcg

SEQ ID NO: 58562 - DNA, 1204 bp, Heterodera glycines; identical to SEQ ID NO: 27893

SEQ ID NO: 58563 - DNA, 790 bp, Heterodera glycines
  unsure (1)..(790): unsure at all n locations
atggcatttgcacttttttggttgtcgggaatgtgcacagttagtgccgatgatgtttaatctttgggtttggcgtgaaccctccgcgatattttgcgtcataattttttttcttactaaaatgagttttgaatagcggcgggcgcaggaacagaggtcggtgataaaagggcattttacatttttattttcgttcgaaattttttctttgaaaaatgttccctggtggctctgatgtttaacggaattcgagttcgtttaatttattaagctaatatgccgtcttaaggtgttggattcaaaaaatgaaaaactgtgtctaaaaatggcatttgcatttattctttgacatttttttggcgaaatattcccatgatgcttaatctttgtgtttggtttgcactcgtgcgcacattctaaggactcgtttctctgaagaatgatttttcagggaaaaacgatgcgaaaaaatgtcgcaaaaattacaattcggcgaaatgagcggcgaaaaataaatttgatcacacggacaatgattgatgagcgcagcagaatgattttattctgttgctgctgctgctgatgagcaaacgcagcagagcagcgcaaatgtggaaataattatgaattataaaaatcaaaaagaaaaaatattcgaaaaaaaaatnttatttaattaaattaaataggcaaaaagaaaattgatattaaaaagtactaaattcaatntaagaaaaagtggaaaatatatcaagagaaaagtttgttgaaatgaatttgaattaataaa

SEQ ID NO: 58564 - DNA, 696 bp, Heterodera glycines
atgacacaaatggctaacagacaaccgaaacggctcattgtcatcaaaagcaatataaacactacgccggcaagtaaaataccaaggttgtcgataaataaaaatcgaaagaatttaattcatatttaaatctggaaatccggtctctgggaatgacaattcatcctcccttcatgtttaagagttggagggcatgaccatttcacgccaagtcaacataaaactcctaaaaggaagcgacgaaatctgactgccgaatttaaaagttgcgggaacacaaagaggaaaaagttaataaaaagcataggataagcggatgatgaactctttaaaggtattgcgtggatgcaacttcgccattgggtcggccaaggtcggcatcgacaagcggagggagcaaaagtcggaagaacgtggaacttgtcaagccgacgaatacaaaaaaaattttggattattttgaacgggttcaaaatgctgcatcttctccatcttttcaatgatttttttttcttatttgaattgaagtaaattccaatttttcagagtaaattatgcgtgtcatccaaatttgttaattaacatttactcttttgcattaacacatgttcaaaaggaactcaattaattgttttcggatgttcgatttttcggaagaccctttggtcctctcttttttgtcctctgcgcaaacga

SEQ ID NO: 58565 - DNA, 373 bp, Heterodera glycines
tatgtcccctctcttaacagttcatttccaggtaattacctttatgctgtttgggtaggggtcggaattgacaaaagtactttcatgttgaggatcatatcttctaacgcattttatttcttaaatttaagtgcgaagtttgcggacaaattttgtcaattcattttttgtacaatgcgctgcttcacctttctctgaccatcttttatgtggctcctctttttcaaaggcttttatttgggatttacaggtgttcataacgtttgtaattgtttacatttgttcagttttaggaggatcgcaaatattttcacgacatttcgtctcattatggaaaaaatcatgcacataaaaggaataaaaaaatgttacc

SEQ ID NO: 58566 - DNA, 1135 bp, Heterodera glycines
atgtctctgctgaaaagcgtcgactccaaactcggcgatgaaattctcgccaccatcgtggaaacgacggacattcgactcgacgacatcgaaggaaatgcaatggcaaaattagcgctggaagaaagtgttgttctgcctgcactaaacccgaaactcttcacgggtctgcgggcgccgtgcaccggaattttgttatttgggcctccggggaatggcaaaacgatgctcgtgggttattaggcaaattcattggctaataaatgaaaatttaaggcaaaagccgtggcgagtgagtgccattcgacgttctttagcatttcggcagcgacaattatgtccaaatgggtgggcgacggagaacgactggtgaaagcgcttttccaagtggccagaaatgcacagccatccatcattttcatcggtaaaattaaaaaagggaaatgagtaattcaaagacatcgaacccaataacatcagatgaagtcgattcgatgctttgtcagcgttttgagcaagaggacggagcagcaaggcgagtgaagacggagtttttggttcagttggacggatgttcttcggaaaaggaggcaaatggccacgttttggtgttggcagcaacgaatcgcccccaagaattggacgaaggcattttgagacgatttcctcagcgaattttcatcgatttgccggacaaaaaagcacgttttcaaatgattcgaaggacttttgaactgaacagcaccaacttacaaattgaagatgccgaattggagtaatccgtccggtactcatttgtcaaccaaagccatttttcaggaaaatcgctgcaatgactgacaattactcgtattccgatttgaaggccctctgtcgagccgccgccctttttcccgtgcaaagtgcgagaatggaaaacagggatttgaggcgatgtacggctgaacaattgcgcccagtgaatgtagccgatttggaaaatgccattcgcagtgttaggccttcaatcaatgccgaaagcaggaagaaattgatcggatttgcggaaaaccacgcaaaccaacagacataatttatttttgtataaactcaattattgttttttttgttacaaaattgttgctaaaagcattca

SEQ ID NO: 58567 - DNA, 736 bp, Heterodera glycines
atggcaaggcggtacatgataatgtttgacagtttaaaggaacaacaagaaggggaagttcgcagcactgaagcaatgtccgaattggtcggttttggggcatcggaattaaaaatggaacacaatttgttgaagttgcaagggatcgcttccttcaccaaaagtgttcaacagacgctgaacagttacgaggtgcgcaaattgggggacaaagtgcaggggtacgtgatgaacttcacggaaacggagcaaaaggtgcgggaggcgacgaacgaggacccgtggggtgaggagggcaaatgtaccgattggaaggaaaagcaaagaatttaaggaccgacggggccgcaaatgcaggaaatcgccagcttcaccttccaatacgaactttacacaggtgactgactaatcactgcgttgttttgcaattcattttttatacagaagttatgggaatgctatggaagcgaatgtttcaggagaataaattggcatggcgacgcgtctacaaagtaaaacgtgaaccaataaattcattcatttattaatgttgccatttcagtcactggttttactgaattatctgatcaaaaatggtagtgaacgtgtgatcagaaccgcgagggaccacgtcttcgaaatgcgatccctcgaaaattacaaatgtgtggacgagcggggcaaagacgaaggaatgaatggtctgtctgaatttggttggccttttgttggatga

SEQ ID NO: 58568 - DNA, 767 bp, Heterodera glycines
atgctgttcggtgtcctttttgctcacaaacggtacggacttcgcaaatacttttacgtgcttctcatcgtcaccggaatggccatctttttgtacaaacctcagaagggcagtgtcggctttcagttaggcagtggcgaattgtttctgtgtctgtcgttggcaatggacggattcactggcgccgtccaaggtgccctcctttccttccccataaatgcatttctcacccccccctttttcagacagaattcgccattaccacaccaccgacaaatggaccatgatgttctcgatgaacgccttctcttccgccttcctcaccttaattcttctcgccagcggcgaactctttcagtttttccgattcgtcgccgcttaccctttcattcttcagcaaatgcttctcttctcgctgtccggtgcggttggccaggtcctctcgtcccatcccttttttccattctccgtttaattaatttgctcgttttcagtgttttatcttcaaaacggtcaccgatttcggccctctcacctgttccatcatcacaactcttcgaaaactcttcagtctcgttttttcgatcatcatcttttcccacccttacacaaatcgacacgtgctcggcattatttttgtgtttgccgcgttgattttggatgccattgacagtcggaaaagccatggaaaagcaaaaggggacgaaaagccaccagcaaaggacgggcttctccaagaagcgactgcgcaggagaaagaaaactga

SEQ ID NO: 58569 - DNA, 327 bp, Heterodera glycines
  unsure (1)..(327): unsure at all n locations
atggacncaagcaaaggcttttacaacagagaagaggaaaaattgacattggccattgatgtcacagtgaaagatgaaaaaatggacaaattcattttggaacaaagcaattccaatgggacaatttggatggacattgaaaaagtgtcggaatttgcacaagaagtcacttggagtgaacgtaaaagtgaagcggtgcacatcaacggattttcattgcgaatattagcacaaataagtccgaaaaatggaagcactggcaatgagaaattgttgggaatttaccttttgtgtgcttctccaacagaaggtgtaattaaaggctaa

SEQ ID NO: 58570 - DNA, 328 bp, Heterodera glycines
atggaaatttttgacgagtttaccatttccgatgaaaattcaatttcgttttttaccgactcaaaatttttaatggagtcttctttcgctgcaatgtaaaatttataaaaaaaatattatcctaattgtagaaaatacctaaaaaatattaaaatattttagcgaggccctgctcgacagtttttggctgaaattcaaagatgtgggaaacgttcttgaacaaaatgtgccattagcacaaatcattttatgggcgtgggacgacaacggggcacaagtcatcaaagaagtgattaccgaccaaaatgctgtttcacaaaattcttaa

SEQ ID NO: 58571 - DNA, 140 bp, Heterodera glycines
attagcaagaacattatggtaaacaagtttttaccgctgatcattttcgtttttctgctgattgacaccgccatatgtcgccatcaccatcggcactcccatcatcaccatcaacaaaatgagcagccggagatgatcag

SEQ ID NO: 58572 - DNA, 1065 bp, Heterodera glycines
atgcagcatgagcctgcggacccgcatttccctaaacgaaagaagcatcaagtgaattttgtcactgcaaaagtggcatgcccggattgcatttcgaccggaaaatggaaagaaagccttattggaaaattctgcaaaatttgcggctatcatccgacaataacattcagtcaaatgccgttccgtgagacaacggtcgacagacaaacaattgaccgccaccctcttgttgcattcgttaaatggcttctctacaaacttccaaatcaatacgaaacaattgcctattcccatttcggcggacgtttcgacatggtcttggtctttcgggaacttttcatggagggactgaacccctcaatgatcagaaagggaaaccgtctgttcgagatgagggtataattgtccatgcgttttttatttaataattttcccatctcaggtgaaaagcagaaagaacttaaacccgaatgtgacatttcgtgattcttggaatttgattccgggactgctcgcctcaatggtgcccatgttcggcttggacgtgcaggacaagcccttctttccacacatggccaacaaacctgacaattatgggtgcaaaattttaccggcgaaagcagattacctggccgacggaatgatcccagagaaacggaaacaatttgatcaatggtaccagcaaaacaaaaatattccgtttctgctggatgaagcattggcaaggtgaatatgaataaatcaattttgacaaaataataaaaaattaagctattgtaaaaatgatgtcgacattttaatggctggactcatcgcttttcgaggcgaatttttggagatgacaaaacgaccggcaggtctcgatggaaaagcagacagagcggcgtacaaaacagcgcataacggcattgaccctgttcgacattgcgtcacaattgcgtcagcctgcatgcgccattttcgaactaatcacctaaaacctggacatttggcacttgtgccagagaagggttacgacagctgtggagataatcagagtgaactggctctcaattttatgcagtg

SEQ ID NO: 58573 - DNA, 3413 bp, Heterodera glycines
atgaatgaagacaatgcgaaagatcgtctggaggaatttattggcgccgagaaaacagaaaaagctcaattactgcttagattaaatggggaagagtacaaaggatttgtgaaggaaatgaaagagaaagaaaaattggaaaagagtgaagaggaaaaagaaagaaacaaaaagaaaagagaagaggcggatgaaataatgagaaaactaatcgaagaggaaagaaaaaaagaagaattgaagaaaagaatggaggaaatgcaacgagagaaaaaagaaagaagactgaagcaacgagagttgcagagaatgaaagaaaaagagaccgaaatggacaacggggacggaagagagcaacagaatgaagacagagaagccagtgaagggagtcagagtgaggaaaatagttcttcattggcagagagttttgtcataacgccaaaaagtgtgccgaaggaaagaaaaaacggaatatttgaaaataaggaacagaacggagagaaagaaaaaaaggaaaatgaattattgtttggaagagaagaatggcaaaatgagttggacaaaacaaaactgatcggtgagttatttggggagcgggaagtaggagaccgggattgatcaccaatggcacaatattagcatccgccaagttatgatcaataattcctaatttacggtatataattctgacaaatttattgaaaatgtataccatttttcttaaaatttaagtaaattctcaaatagttcctcggaagcgtgtatctttaatgcctgtccccaaaagttccttagttttttatatttgatattttcgttactaataattaaaatacgcataaagtaaaaaaaataaccgcgttattttaaggtcatggtaagtaaatatactaaatattttaaattatttattctttgtaaaattggttaatttatcataaaatttaaaggatttaagagataaaaaataaattcccaaaaagaaaatcacaatttactagagtgcagcgggaccgggacctgaacacggacaactgagtaccaaggtcccggttttgaccagttttgaccgggatcgggaaattcccggttttcccagccaaaaagtcccggtttttcaacccaaaaagtcccggtcccggtcttgcccaaatttcccggtcccgctgcactctacaatttacaataactatttctttttaaataatgtttattgttcatttaagattttacatctgatcaatttttacatgaaaaaattgatgcatttctccaaaatccatcagagacaaagaaacacatgttggacattggggtattcgtaaacgaacttcggcatcggatggaaatgatcagacaattaagcaaatttgagggaaatttggaaatggaacaggcagaaattgccgtaaaaatagaaagaatggctaaaattgatgagaaatggacgcaattgaaaagggaattgatgagggataatttgatcagagatcggacacaatttgagggagtgatcagtaaaatgtaccgtcttttgaagcaaatgatttcaatcggagaagcgaaagaattgcaggaagaaaaggaagagagaaaaatggtggccaatcagttagctacggtagggcgagaatcaaacgcggaatgggaagaagatacggtagaagacagagaaaaagctgcgataaagtcagtcaaaattcaattgcacaagaataaattggcaaaagcaatcttttcgaaagaaaaacgggcaaatgaaaacgcagagaaaaacacattttgggaaatggacagagagcaaaaaagtgaaattcttatggaactctttgaatacgagcgacggaaaacaaaaatgatcagccgatttgaagaacatttggagggatggcagaaattggaggagcagcaggaaattggttatttaaaataaataatatttgcaaatttaaaaataaaataaaataattatttattaaacaataattcattgtttaaataaaataatttcagacagaaatttacggggacaaaaaaatgcccagcaaatctattttgactttgctcgcccccatttggaggttaatttccccgaaatttcccaacaaattcgcaacgaccaattggaaaacattcagcagaaaaatatggtaatttttggcactttctaacaaaattgaacacataattttacagtttaccgattttataaaagaaatcccaaaaagtgacgcaaattcagtcggtgccgcatttgacacattgaaatcaattatcgaaaaatgggtaaaaattgttgtttattatttgaatttatattacagttcatcttgggcttttgtaccttccgtaaaaataattagcatggggaagaagcgtcagtcacaacatatacattttttagtttcataaaataatattttgaaaagagccgaatccttagctttttataattaagaatttcccgacaaattattggctttaatataattaactctttaataatccgctgaccattttcccatttcagtcaaatggcgccgcccgtctcatcgtttcgggctcacatttccttggaacgcgcactgccgactcggacattgatgccatttgtgtggtgccccaaaaagagtcccttaggggggaaagggagaaatttctcggctttttcaattgcgttttgaccattcaaagggagcaacgaatttgttctgacaattcgctgcactgccaattttgcaaagtgagcaaaaacaaaatggaacagagaatttaaattgtttaaaaaaacttaattaaaaatataattaacgcatttatgagaaatatatacaaaaatttgaaaatattgttgaaaatatgggaaaattttttttgatattctttcatcttagaggaatatatttttgaaaattttaaaggccgatgattttcatgttgataattaggcacataaactcaaaatcaggtaaaaacaattcattttaatatttcagcacgcaaatgtggaatatttgaccaaattcccgagtgtccatatccaattgataaagctgaaactgctcggcgttgagttcgacctttccttggtctctgtgccggacatggaattgctgccggacgaaccgttggaagcagtcgacgtggaactgatgatggaaatgatagccaaccaaagagtgccgtccgaagttatgctcaaaacgatggctggtaaaagaatataatttacctaattgattcataattaagctttcaattttatttttaattgcttctgtccccataggttatttggacagccaccaaatgattggactaatcgcgccaagaaaccggccaaagttcagaagcttcgtcattgccttaaaacactgggcaaaacgtgaatttaatttattcaaatttttgaa

SEQ ID NO: 58574 - DNA, 861 bp, Heterodera glycines
  unsure (1)..(861): unsure at all n locations
atgccggtgaaattaacgcaacaaattggcacaacttttgacgcgttcgcttggaacacgtcggcagatgggcaaaaaggcgcattaatgccaataataacgccgggaaaattggcgcaaaactgtgcaattaacgtaaacgaatcgacaattaaaatattacaagacgaaatgagagaaggtggttaattgggcaattaaaatgatattttctgtcccttttctttttcagctcatttgtatttgaccaaaaggaccgccgcaaattttggccaattgttttctcagcgaaatttcgttgaaaaagttggctaaatacattgtaattaatttgctaattgttcttcaccctttttacagttcgaccattttttgatcatttcatgcattgtcagcctaaacggtcaaattggtcaattttgtgactttgtccaaagaaaaattcgtcaacgtttggccaatttggatcaaattttggaaagattcgtccattatagccaagtaaatccggcaaagaatggcgcagattgggcgcacagcgacaacaaatgtcccgagaaaatgcgacagcgcttcgaaaacattgagtgaggctgaagcggcaatagcggcgccattaaatgaaaagaaattatatatttatttaatcgcttggcaatagcttaacaaaatttcctataaatatgtagagctttagaattgtgccaaactttaaaatttggccaattcggaaaaagtattanaaacctacaaattgcatccctatttattaatttaaaagaaaagagaacaggccacgaccccgggtccgatctataagaagtttagttcttggtgatttgacgggagttgggtggttca

SEQ ID NO: 58575 - DNA, 941 bp, Heterodera glycines
atggcgcccactacacgacttatgcagcacaaggtcgtctgtatgtgccatggctccgtgcccaactggcggccgaaagtggccaagggttgctgcacttccgacgccaacagatcggctctttgcaggaggtgcgtgtcaaacgatgctctattaattcctcactaattgtaagctggtcgactcggatcagttccgtttggtggtgaattgtgccggattggacggcggacgcttggcgggcgatgatggcacttccgtctacccgaacagaggcattggcatcgaagttagtggccaaggctttatttggtcagatgttaaagcgccttttctttctttgcctcttattttaaaggttgaagtgactggacattcccatttcaactactgggaagatggcatcttttgccttccgttgtatggcaaaggaatggccaaagaaaatttcttccaattttcagtgtgtcaaatggccgctttttaattggcacagttcgacaggacaattgttggcagttggaagtgactgaggaggaaaagcgcacaatttggacacgttttgttgatttgcaaccgaactttagagtaattgaaaaatcataaacacaaattaatgttgatattaacataaaatattcatgggtattttttgtttcttcaaaggatgccaaaattgtctccacgtggtgtgggctgaggccaaaccggcacggcggagttcgacttgagcatcagttgcgcaccaaatccaacggcacaggaacagtgcatgtgaattcttgcaaaaacttcaatatcccaattagagggtttagggcaatgggttttttttggtctcttaattaaagaagattcggaatgatatggggaagggtaatttggaattctgagcgaatttaattatacttttatagatcatgaagaattttcattggtaa

SEQ ID NO: 58576 - DNA, 127 bp, Heterodera glycines
ctatgacccgaccggcattactcatgttcgactcagcccgatggagaaacttcaggaccaaatgctggaagctgctaaagaacgtggaacccgcgattctaagggctattgggttggaaaacaatag

SEQ ID NO: 58577 - DNA, 1378 bp, Heterodera glycines
atggctggacccgactctcgttttattctcgaattcttcaaccgtgaggctaaagagattggagtaacgcaggaattgcttgacaattcacaggtttttgactttatgatcgtttgaattttatttttttttattcagccgtccgatcagttgatccaggcctactactttctgtgtgatttgatttttgaaaatgtcggcaccaccaaagagaacgagtatgaaatggccactgaactgacgagggctcgtccccagatgatcatccgaacgcaacagcattggtacgttggtttttgttattttgatcttacaattagtattttcgtatagttttatatacattgcatccacaatttgttcagcaatttggtgtacaacaagttgttcgatggttctaacgaatttctctactccgatctatttcaaccggacccctgcagaacgaagatgcaaattgctcaactgattcgcttgtacaccacaaagtgtgacattgccaaagagctttcggcggtggacaatcacattgtgagtgtataatttggcggagtttactagttttagtttatcaattgggctaatttagtcggaatttacaaatttaaggatgaacaaatgaaagcgcatgactttgagaagaactgtgaacgttccacacatgctgtatgagatgatgtgtaattaattatacgcggaagagtttttcccttttagcaactgaaagatcgcgaagaagcgcttaaccgcatggagaagcgaaatgacgaaatgggcagcaaagtgcgacgactcaaggacaaattgaacgatcgacaagcgctagcggaggatgagaaaagaaatgtcgaacgcattgacaaaattttgttgggggcacagtgcgaaaatgcaagtgaaaaatgaaatgctgaaaaaggggcggaaaattgtcaaaaactttggatttattaacatattattagtgatttttcgcttatttttaataaaaattataggacgaatgcaagaaattgtttgcccaggaagaggaaaaccgcaagcgattggacaacaacattgtgaactcaccggaacgcatcatcgaagagctgtccaacatggaggtcgaagtggaggacatccgtcgcaaaaatgatcaagcagtgtcagttgtccattcgttcggtttttgtaattggtcatttattttgttaggcaaaacgaccgaaagttggagagggaatacggcgaacaactcgtgaccagcaaatgcgtggagagtctgatcaacagcatgcaacaattggagatgatgcaggaacaaatggtggagatgcgggcgaaggaagaagagcgacgaaaggtcgtcccatttggtgatttaataccagtttaa

SEQ ID NO: 58578 - DNA, 646 bp, Heterodera glycines
atgggtcaaatcaaaaaattaatgtgtttgtgcacatctacaaactcttggctttcgaatgacccagggttgtttgggtccggacccgggaagtgccctaaaaagggaggacaagcgacaagcactttggtcgcgatttctgtgtgtcattggttcgatttcttatttttgttttctgttcacttttgttttccgttcaccttttttgtttgccatttttaattttatttatatcgatggtgaaatttgggtgatgcaaatgtacgaaaatggcccttaagaaatgggccgttaatgtacgggacacaaaagtcgggccgtaaatgtcgggcgccgcaaatgtccgattttggcttgggacgaaaaattcaatcctttttgcgtagttcaagtcctgaaagtggttatgagtgtctttgcgattgatatacatttcgtccatttttggctctggactatatgaacgatatatgccaaatcacgcgagctatttattaattagcaaactaattaaggaattggtacaagtggctaatgagttggacaacgaggaggacacattgacattggaagccgacattcagatcaccaattaaccaagagatgaaaacaaaatatcatgtttgttttatcatttgataaggta

SEQ ID NO: 58579 - DNA, 429 bp, Heterodera glycines
  unsure (1)..(429): unsure at all n locations
atgggtcaatcanaaaaattaatgtgtttgtgcacatctacaaactcttggctttcgaatgacccagggttgttgggtcccggaccgggaaagtgccctaataagggaggacaagcgacaagcactntggtcncaatttctccaaaaaagaaaganaatntaattaatttgtaagggaggtgtggaagcggaccaatagtcaagtggttagtgtgtctgcctttggttatgtggtgtcattggttcgatttcttatttttgttttctgttcacttttgttttccgttcaccttttttgtttgccatttttaattttatttattttattttagttttttcattaattaaatttattaaaaaagatatttggaacggagcgccctctagagacagtgcaaatagcgaagctatttcaattttaaaaataaa

SEQ ID NO: 58580 - DNA, 573 bp, Heterodera glycines
gtgaccaaaatggaaacataaaaatgccatgcaaaacggcacttcaaatattgcaggggacgggggggaaacagaatttggcaccaaatttatgcagggaaagaaggcatgccaaagttataaattgtaaaattaaaaaagaaatatttatataattatatttttaaacttaaattaattagaattttgtcattttttaaaaaagatatattataccgttttcaattctttaagtaaccacggcaaaattaatcaggaaacaaaaagaattttgaaattaattaaaaaataaatttaattatttgggaatttgttttatgttttcaaaattagccaatttccattcattggtttggcgttatggtggcattccttttggcctgcgcttttggcggaaaacaaaacaaagcatgatggggatgaatgaatgtccatgtgccgagacagaaatgagaaagaaatcagaaaccgtgaacaaatttttgtgaaggtgttgttggctaggggccatctttttttgtcgagggcaaactgagaaaattcagtgaatttttaatcgaattttccacaatg

SEQ ID NO: 58581 - DNA, 3988 bp, Heterodera glycines
aaggaaacggaggaacagtttgaccaaatgccatggcatttgttggcccatcacgcggcattgggctggtcccaatggagcgaatggagcgcatgcacgcgaaaggtgcaaagaattgggaatttgtttaaaatattttttaattttaaatttatttagggtaaaaatatttgtttaaattaaattaaatcgaatgattgttagatattttttaaaattattttaaagaatgtttaattttaaatttattttaggcaatttttaaatgaaatgaaataataaaaccaatcaaaattaattggttccattcttttaattaccatttttaattcattttcaaataaatataaaataatatattgtttgaaaatatttatagatttagtgaaattaaattaaattttacttatttttattatttatttatttatttttctaccaattgggatgtaaattatgtaagaaaaatccttaaatatgtaaaatgtatgttgtttaggtatttaaaaattgttttatgtacattttcaaaaaaaagttttatgaatttcttttaatttttttccattatttttttcaattccactttttttttggaatttacaaatttgtctttaaaattaatgccaaattagaattttagtgcggtggcgagggcatgcaattccaactgcgccgctgcctggacatgtactgctcgggaccgtcgtccaggcatcgaatttgtgccgaaaaagtgtgccttttgcataaaataaataaataataaattattttatgttaaattaaaatttattttaaaataattttttaattttattatttaatttatatttttaataaaaaaactattttcccctcccccttcaaaataatttaattcaaaattaattttccatttttaaaagctttgtcctccaaatggttccttttccactcattctgccgttgccattgaatgtgctcttcgttcatcgccagagaatgaattgttgcctgtgaccagcatacaaaatgtataaaaatatataattttacaatttaataattaatttcttttaattttacaaataaaatatttttattcaaaatcttttattttaatcgaaattattattcatttttcttttctttcattcttaattgttggttaattaattataaattattttcatattaaattaataattaaaattgtttttattcattttctacccaatttgtccaaaagtgttccgccctccattgtgtgtcccgtcggaatggcactgtgcacacttttggcatggcattacgtgatggcaccaaatgccatctgagccacggactcccaactgttgaggccgtttgtttgcatgggaagtgagttttttcaaatggcacggcaccattgtagatgattattaccgtataattataatagatcattacagtatataatttgtagggaatttttgaccgtataaaattgtagaagatcattaccgtataccaattgtagagggttatactgtatttcagtcgtcgagggttattaccgtatagcaattgtagaggcttataccgtacaccaattgtgggggattatactgtatttcagtcgtcgagggttattaccgtatagcaattgtagaggcttataccgtacaccaattgtgggggattatactgtgttccagtggtggaaaagtttttttcctttccccggcagatgccgctcagttggctgtgacggcattgtgggctcgtcggcacgggaggatcagtgcggcgtgtgcgccggtgatggctccagctgcgcggacgagctgttccagtggcgggacacgggccatttcagtccgtgcgacaaaagttgcggaccgaacagtacgccaaaaggggggaggggagggagggcaaattcaaaaaaatttaaattgcgcgtcccgaaaaaaggcattcgcgtgtcggtgtccgtgtgcgtcaacattcacacggaacgcgtggtgccggaacgcatgtgcgccgaccgggtgaggcccaggccgcaaatccggcgctgcgagcacatcgtttgtccagcaaagtgagcgcgggacggatcagtccccaaaaagtgggcaccgatcgatgatttgttgccattttggtcttatgccctgatccggtgcttaattcacttaacctggcctgatcagagctaccccattttgtctgatcagtgttggcctagtccaatcatggcttggacagatcattaatgcttgattcaatagtttgtcaccagaataaccatttttgtctaatcaatgcctgattggatgggctatgccggattttttggtttggcttaattatctctcaggaattctgtctaatcactgatacgtttgacagtgaccgttcaaatcagacatcatcaaattgatcagagtgcaaaccctcctcaatagacaaaaaaaaactggcattgatcacttgactaaggcaaacatttgtccacatttttaggggggtttaaaatttattttctagccattcgatgaagcccaaaattaggcatcagtaagtttgtttttaccctgaaatttttgccgaactgtgcgcattttgtgccgtttaaatttcgcttttcagtaccaggttcgttgttgttcgcatgtgtgttcagtgaatggttgtcgtcacgtcattttttgcaattcaaatgcttctcgctcatgccaagctgtttaagcagttcaaactgttgcttttgcgtgccaatttaattttcaattatttttgcttttttcgaaaatgccatccgtagtttttttttgtttgctaagaaaataattcatccaacttttttcaaagaaaatgccatcctcggattttgtcatgaaaatggcatatcctacatatataaaattgggaaaaatcaatcattattgaatttttcaacaaagcgaaaatgccgccattcctcaatatatttttttttctttctaaaaaatgtcaatatttaaaattggcgaacttttgccaaggcaaaatgccaccttcggttttttcccttaaccattgccattattttgtccaaaaatttcgtttttgtttaccaagaaatgccatttttaaaaacgctaaatgttatgcttattccgctagcctatgttttgcccctgttttcttattgccatttttctaaacaatttttgtgccattgtccccccccccctccctaaaagatggtttgccggcgaatgggccgactgttcggtcacctgcggcaccgggcaacagcgacgtgaggtgttctgtgttgaacgggttgatgctaatgttgaccggcgtgtgaacgtgcaacactgcttgccgagccaaaaaccggtgaattttttttttggattttttttaaattttcgaaaaatccaaaccaattttggcaccatttgtaacccccacttactgatcagttgtgatcagcttcacgattttgatcaatccttaacaaactctggtggtgctaattggccatcagcagtagtaatgctataaattgccgtcgttccttaattacattaccgtaacttaacattaatcacagtaccgtcctttccttaatcacactaccaccctttccttaactacactatcgtactttccttaattagtctaccgtattcattttctcccccccccccccccccctctcaaatggggaaggcgttataaatggaattttgtaattatatcagctctccaatgttagagcggcatttaaattttgaaggtggacgtgcgcaagtgcagcagtgaggcgtgcccggaatggtgggccggcgagtggggcgcgtgctccgccaactgtgggcgcggagtgcgacgccgaacggttggacgggcggggggggggcaaaatgccaaacaaaaatttaaattaataagtgtaaatcgaatgccaataaagcaattagaatgccaaaaatactgatttttggaggggtttatgggggcaaca

SEQ ID NO: 58582 - DNA, 1300 bp, Heterodera glycines
atgccagaaaatttgaaattttccacacaaaatttgcaccgtttccattcctctgtctcctcgtcactgttgtcgtcgttatacggtgccgcagcaaccacagaaagtgacagcacaaaaacagaggacagtaaaaggaataatgaggctaactgtaagctacagtatggcgacgatggcaacattatgccaaaaagggctgaaaatcaaggggagaatggccaagaaaggaccgaacaaaatggcgttgggccaagaaccctagtgttggctacggcttggcttaatcccattgaccgagaattgccaaaaatgccagaattaaaaggaacaaaggtagattccattgaccgggaataccatattggaaagtacagtatcccctccccccatctctcagaaaaaaacgtctgcaaacctaaaaaatttgccagaaaatgtcttacaaaaaccaaacaatgattgaaaacagaaactatatgcaatacctccctcctatccctgtaaaaaagccgtccgcgtaaaatcccagcgccggaaagggtggcacgagagtgggggaaggggtcgagagttggggctcaagcttcaccctcccaccagagttgtagtgtgatgagtaagtgttttgatgggtgggcgggaggaagtgggcaagaaacaacaaaaacccttgaggggacggacggacggacgacggttggcttggccccaagcgaatgaatggccaaatggggggggggtaaaacaacggcacaaaaggaggggagggggaaaacccctcggggcattttcagggggagtccaccaccattttcgggatggaagggtccccaaaatgggcccgggggaggaaattggttggaccaaaagtgtttggcgttgtgtactgtgtgtgtttgatgatgtgatgagtgaccatcaccaccatcatcatctgctgctgggcataacaaatgcttaaggggcgcttaattgaacatttttgccattgtgcccccgggggccaatggcaatgccaaaaagatggactttgtgcaagaattgtgccaaagtgaaaattcataatgtttttttaaagtggatatcattttggttctggaataaaatcaaaatgtaaaggaaaagaagaaattaagaatttaaaagtttcataaaatcaaaaaaggatttaaaatagaattttaattatattttttattaaaatatattttaggtaatttaaatgcgaaaattatattctccgaccctttttgaagcatgaattgatgtgtttgcactatttaaattgattaataaa

SEQ ID NO: 58583 - DNA, 398 bp, Heterodera glycines
atgccacggcactgtacaattaccggaagtgccgcacgtgccgcggtacgcttcatgcgtgcaatgttcatttctggacggaacaatcggattctgtcgtcaatgccacggtaagccttcatgccttcgaacagttcaatcgcataatgaagcacctttttgtgtgattaacaattagaaacaaatccccaaaatttataatttcatttgtttagaaatattcgaatatttttcattcaaattaatttaaattgtttaaataatgtgttgaaggattataatggaaaaaaaatttttatttatatataaattaagaatttttatttgaagaattccaatttttcagattgtatgctttttcgaaatttcaaatttcaaattttcattttaatatttaa

SEQ ID NO: 58584 - DNA, 342 bp, Heterodera glycines
atggacacagagaattggggaggaaatgggacgaaaattacaaagacgccgagcaaaacgccaacccagccacagaggacacgcaacaaaagttcatcaaacgaaacgagtgacagcgaagtgcaaacgaccgcggcgaggccatcgacagcgacgccggggaaagcggaactgaaaagacgcaccacggaagacacaagcgacagcgaagcagaaacgccggcaaaaagcaaagtgttggcgagggcaactccgaagaagcagcagaaagaggcggaaacggccaaaaagccggcaccgaagccgacggagggcacttcctcggaggactcaagcggatga

SEQ ID NO: 58585 - DNA, 209 bp, Heterodera glycines
gtcagtggaagcgttgaagacgaattggccaaaatcaaagtggtcttacgacagcacgagaggaggatccgattgcttgaggtgaatggcatttatacggaaaaattaaaaaacaattcaggaccaattggcggatgccaacatggccaatgcttatggaatatgaaaatggatggccatataaaaggaatgacccgccgaagggatga

SEQ ID NO: 58586 - DNA, 893 bp, Heterodera glycines
atgtcggcaaattgcgcaggtgtcaaaccgcaaagagcaattttcaccaaggacgggcgcgtgttcagcaccggattcaccaagcgatccgagcgattgtatgctcttcgtcacccggacaatttgtcccagccgataatgcaagacgagtgagtgacaaattcgtggtacagtacccataataatgtgcctgtcatgtccaatgctctcagattggacacgtccaatggcgtgctgttcccgctgtacgatgaggactcgggcttgtgctatttgatgggcaaaggcgactgtgccatccgttactacgaaatcaacgaagacccgccgtacgtccactacattaacacgcacacaacctcggaaccccagcggggatttgcctttatgccgaaacggggaatgaattcgttggaaaacgaaatcaatcggtgggagacaaagggacgaaaaacgaacggaaaaatgcatttagcatttacaaagtgaccacaaaaggagtcgttgacatccttcaattctttgtgcctcggaaatccgatctgtggcaagtaaatgaattttggactgaaaatgcaattcaataacaaatggttttgccaaggccgacctttacccggacacgcgcagcttaatacccgctttgacagcagaagaattcgttggcggcaaaaacgcaccgccgaatttaattccggtgaaccccgaggcagcaaaggcggggccaaaagtgcaagtggcaaaaaaggcaaacattttggcacaaatgccaccgtgagcaaatgaaaagttgccaatttaaagaaagcgagactccattaagccaacaagaacatccgcccgaaccgccgatgcaaaggccggcgccccctcagcagcagcgagccgcgccg

SEQ ID NO: 58587 - DNA, 75 bp, Heterodera glycines; identical to SEQ ID NO: 54636

SEQ ID NO: 58588 - DNA, 792 bp, Heterodera glycines
atggccaccgcaaaaacgaatgcccgaacaaggactcaaaatgccgaaagtgagtgtggcaatgttggacactgggctgtgatatgtaagacaaaacagggctccaattggccaaggaggcaagggaagccagtaaaccaggtcaacactgagtgccaaaaagcacacgacattggaacactggccaagtctgaagaagtcaaatcgatttctgtgccaccagcgatgataaagcttcagctgagtaaaaaggcgacagatttcgaattggactgtggcgcagatgtcacactcatcaccaagaatgattggatgtccatcggaaggccgaaacttggacaaacttcaggattgatggcatatggaaaaaagccgatcaaagtccttggatcgttcaaaacggatgtggtgtacaacggcaaagaagtgaatgccgaaatttatgtcgtggacggcgaaggaaaaaatttgtgtgggagagatttgattggtgaattacaaatcgatctcaacaaagcgttcgggatccgatcagtcaacgaggtcaatagcaaggcagtgaaccgagagcttggagcggtgcttctgaagtacggcgaggtcttcaatgacggactcggtcgatgcacaaggcaaatttcgctgaaatttaagccggaagtgcaatcgaagaagtgcaaaccgcgtcccgtgccttttgcattgagacccgaagtggagaaggtcatcgacaagtgggtcaaagatggagtgttggagcaagtgacaacttctgaaagggcaacaccgctg

SEQ ID NO: 58589 - DNA, 869 bp, Heterodera glycines
atcgcttctatgcccgccttgttctacaccattttggttatgatggaccagcaaatcacagcagtgatcatcaatcggaaggacaacaaattgaaggtgggcgaagagaaatgccaatcttttgctgattgattgccattcggtgccaactcagaaaggctgcggatatcacttggatttgctgattatcaggtgggttgactattgatcagaacgaccagcagctgatcttccgctgattgatcacttcagtttgctcgtcctcatctgttcctttcttggccttcccttttacgttgccgccactgtgctcagtgtgatgcatgtggaggtgaaattaatcaatgaaccaattcatttgctaatcgctgagtgattgccaatttgagtctctcaaagaaaacggcgattgtacggtgcccggggaacgacaaaagttgcttggtgttaagtgagccgtttacaatgatcaatctgctaaatggacaattaatcccaatttccaaatccccccccccccagggaacagcgattgtccgccattctctcccacatttttatcggctgttcagtgtttctgacccctcttgtcaaagtctgttcttccatagccacctttgtttcccaactttgcttttaaaaggtcgtgcctttgcccgtcctcaccggcattttcctttatatgggcgtcgtttctctcatcggccaacaatttgtccaacgcatcgctttgctttttatgccggtcaaataccaagtgaaaaagcaataaaagagtgtttgagcaataaacaaataattaagccggattacgtgtggctgagaaatgtgccgaccaaacgcattcacacattcacaatggttttaac

SEQ ID NO: 58590 - DNA, 331 bp, Heterodera glycines
  unsure (1)..(331): unsure at all n locations
aaaatatttttaaaagatgttattcatctcccttttgatagaaaaagcatcagagagccttatttaacttttaattaacatttggtgcgtttcagagcacgttctaaaaaatatttatgaattaattttgcaaaataataaataattaatgaaaaagtcagaatttcgaaaaattttaaaaacaacaagcgttggcattttttcaggttaagttagtcctttacaatggagaaggcctgcaaaatttggagagattatatcgattttagcgcgctaggttcgatgaaactttttaaaatatgagcctaaactttttggnctgtttaaaaag

SEQ ID NO: 58591 - DNA, 1248 bp, Heterodera glycines
atggccgggaaaatttttgtggtaaatgaaagaattttttatgtaaaataattttaaatattaaaaatttaggtcactggcgcaaacaagggcattggttacggcattgcgcgtgggttggcccaacaagtgaatggtgccaccatttacatgacgggtcattttttatgggtgcacccccaaaacctcgctgccgaaatttatataaaaaattccataactgaaatttttcaagaataaaaccatataatttttttcaaatttcaaacttcgaaattatgaaaattttgctagctttttttagaaaaatttaaaaaatatataataataataaataataaaactttgaaaatattgctaaaaaatttaaaattttcttacaaaaaaaattctgatatttttgaaaaattaaagtttgaattggtggcgcgattttgtcccgtgcactatttattttattttatttttttaatttaaatattttgactttcagcacgaacgccttcactgggcgaaaaggcattggatgacttggagaaggaattgggcacaaaacgcatttcaaaattggcatttcatcagttggacatcactgatgagaaaagttgtgccgattttgcggcatttttgaagaaaacccacggcggattggacgtgctcatcaacaatgccggctttgcgtacaaagtcggcatttttggatttaggatttaagggtggcaaaattttgcctcttaaaactgcagcaaaatgcgacagaatcggccgcaatccaagccgatgttacgattggtgtcaattattatggtaccaaattgatcagtgatcagctgggcccactgatcagagacgggggaaggtgaggggaaggggcgcaattgacggcacttttccgttagggaccgcaattctttaccattgccgaaaatttggcatgacgaatgacgaagaagtgccgttaatggatgacaataatacataattaggcagcctaataaatttgccaatgtatttttttgtatgtgtcagaattgtgaatgtgtgcagtcaagcaggtgtaatgggcagtcaaattggtgtgatgggcaacctgtacaaacagtcactgattgatcagttcaaacgtgccgatctcacttcggacgatatcaacacatttgtggaggaatacaaaaagtgggaacattaaatcccaaccattttctttttttcggaaattttcggtgggataaattttaaaaaaataaa

SEQ ID NO: 58592 - DNA, 304 bp, Heterodera glycines
atgggaatgggtgacacattgttgtgcaaagccatagaaccattccgccgtttaaaactgagcaccgaagaatttgtacttattcgagcaatcatttactccaatatgggttagaagttttttataaaaaatttctacaagaaaatttatataattaatgacaaattcaattaaatttttagtttcgccagggcttagtgaccaggcacagaaattattattatctgaagcggagaaatattcttcacagttaatgagcattgtacaggtagctttctttcttttttgcaattggttctcttga

SEQ ID NO: 58593 - DNA, 374 bp, Heterodera glycines
atgcacgcgttttgcgctcgagctatttatcatcgggcttgtcaatccaaagcgaaacaacaaagatgctgttttgaacgaataaagggcataggttattttgaagaagtgtcaaagaacatgcagcaataagcctgcaaaatctaataagtggaaaatacaagagtatagaatttattttcagaaagtgtccacagacttttggaaaaatatatttgcaatttatcaacaattttgagaagtgagttagaaatgataaacttcacgattcaaaccaattttcgttgctctaattaaccgcgataaaaacattcaaatcaattaatagcttctgagataataaggtttatcataaaatttcaattaaaaataaa

SEQ ID NO: 58594 - DNA, 374 bp, Heterodera glycines
atgcacacgttttgcgctcgagctatttatcatcgggcttgtcaatccaaagcgaaacaacaaagatgctgttttgaacgaataaagggcataggttattttgaagaagtgtcaaagaacatgcagcaataagcctgcaaaatctaataagtggaaaatacatgagtatagaatttattttcagaaagtgtccacagacttttggaaaaatatatttgcaatttatcaacaattttgagaagtgagttagaaatgataaacttcacgattcaaccaattttcgttgctctaattaaccgcgataaaaacattcgaatcaattaaatagcttctgagataataaggtttatcataaaatttcatttaaaaataaa

SEQ ID NO: 58595 - DNA, 641 bp, Heterodera glycines
  unsure (1)..(641): unsure at all n locations
atgagccgtaacgaacttgtcggttttctcctgcgacagatcaaattccatcccatcttcgccaataatttcttctcttcctccgattctggcctaatccattgggatgccagtgctttggcccaaggagcgaagtgagttcagccgaccgaaggcaccaccccattttattggcataatcttccgtttgcagtttaaatccgccaacaaacggaagagaaatgactggccacgaatctgctgcgggttggtgatttgctaatcgacactaatgagccgaccatgctgatttccatttctttcaaatttagacatgcggacgaccggagaaaatgaacacaccaacatttggttgattgactattgtgaatccaaactaatttcatgttcaggttgtctccccatgcttcgacgagcgttaatttggttttcaaattcaattaatcacttttaatttttcaaaatcttaagcgagtgcttattgacgaggaccctcttctgctgagttctttcgacgttgtgaacggtgcgatcgtcgccgcttctcatacggctgaattgngtgtttatgagcaatgataaatttacaaattgaaaaataatcagctgactggaaatctcattattattttgttacaata

SEQ ID NO: 58596 - DNA, 660 bp, Heterodera glycines
atgaccaccgaaaatgaggtatggcacaaaaatcaaatgcaattcggataataactaatattcattgagggcaaaaaagtcacacaaaataagttcttattgtagtgatcaattatttagccattttttaaaaatgtgacaacccaacaattttttggaaaatttctatataattaaagtttgctttttcaattataaataatattatgaatgtcatatttttgtgcctttgtagctgggcgaatatgatgttttcgttacaattgccattttggataaaacctgctgaacgggatttccatcccgcgcccttcaaattgaatttgccgattaaataaaatctatctgctttttggttttaagccatttttccatattttgcgtcattcgtgtttaacaaagcacctctcagaggagaatcgcagtatagcaatcatcctaatgtcatttgtattttgatgagcccaattgtttttcatggaaaatattttctaaccccctagaaatttttctttcgaattaccccgatttttcagatttttcatcgacaaaaattggggtgtaatgcattttggaaaactcaactaacactgcataaaagacagggttctgttgtgactgggacgtatatactattattcctttgaatttataaaaaaa

SEQ ID NO: 58597 - DNA, 938 bp, Heterodera glycines
atggctgttcgccgaagggtagcacaccatgaagccggccacattatggcaaaccacctaaataagcatgggactgagtgcttagcagtaaaattttgaattgatagaattaaaaattcattaatttcagtcagatgtagtgccggaagggattaatgatggatacacttggatttattttcgcgaaaaatatacacttgcgcaagtaatggcaacactacagtattttttaggttggtttttcaaatttaacccaaaatttgttttgcatcttaaggaggtgcggcatcagaaaaaacaatatttggtgtttacgacaaaagtgcggccgaaagcgattggcttcaggccgacacggctacacatgcaagcgtaatttaatttttttcgtttatagttctctttattttcataaaaattttgagaaataattaaattaaaggtctaccgctacgaagataaaaaagaaaaagtggtggaaaaagtaggtatccttaacagcgcaaattaccattacgatggcaagatacgggaacgcatagcgaaaaaaatcaacaaaaactttgaattcgtgtgcaaacagttcaaaaaaagagaagtcaaggaagcaataaagcaggtatctcttttagagcaattcaaaaattcaagggtttaccttgtcaacgcgttgcttcaacgaaatgtattgcagtgcaaccaataaaacggttagagatattttccaatgatgaataatcatttttatagaattattgggcacattaaacgatcgaaacgttcattctactgacagggatggagctcgtctgaaaaaagtaaacataattatattaacaaagcattagtgtgattaatttctttgggaaatacaaatgcttattccattatcttattataaagagtaatttcactcagatttgtcattttaaaataaa

SEQ ID NO: 58598 - DNA, 506 bp, Heterodera glycines
atgcgaaaactgatcattttggctcttctcagtttgttcttcattttggtcgcatcggaaggaaaggaaggcggcgatggcgcggaaggaggtgaggggaaagcaatgccaaaaagagtaaatgaaatttattagaagagggaccaggccaaggtggtggtggtaaagaaggcgaaggaggaggagaaggaggaggtgaaggaggaaaaggcggacatggaacaggaggaaaagggggacgaggaggagggggaccaggaggaggacacggagtaggaggaggagcaagaggagaagaagaaggaggaaaagggggacaaggaggaggacatggaggaggaggagaagaagatggaggaggagggagaggagcgggacacggacgaggaagaggaggcgcacgcggaggaggacatgggggaggaggagaagaacatggagaaggaggaggaggagggagagcaggaggaaacggacgaggaggaagaggaggcggaatcagagaa

SEQ ID NO: 58599 - DNA, 848 bp, Heterodera glycines
atgccccgtttttcgggatatttttgtctgattttgtcaagatttcgacgatttggtttggtatccgactgataagctaaatatgtctgtttacaactttggacaatcataaaataattaataattaattacccattttgccactttcattccttcgtttccctttcgcttttcaaatgctatttttttcgtttccgaattttgcttcaattgattattcagcttaacgttggcattttgcaatacgggataaaatggcatttttcagttaagtccattttttagttttccgtgtatatttcattcgttcgttcctcttcagaagaaaattcatttgcatattttctgccctaaccattaatttaattatttaaagaattaattaatcagataacacaaatgaattacacattaatttgcttttccattttgcttcaatttacgctattttgggcttcaatttgtgcagcagacaatggtcctccattaacaattaaacaattaatttatatataattgagtgttttttcaaattccatttaaaatcgttcttttttctttttttacttttcactttttaagtgccttttcatttgccatttcccttcaaaactttcactgatgggcccagcaaaactttgctgaaaattatgttcaattacagcaagaaacgtttctcaattctgaaccaaaaatttgacatttttcctgcggaaaattttaaaaatgtttttttgacgcattgcaaattcgtaaatgaaaattttggaggagtcaaagcatggaaagagcaattggggcgcaaaaaaatgagaaaagccacacgaaattggccaacttttaaaaaa

SEQ ID NO: 58600 - DNA, 1088 bp, Heterodera glycines
  unsure (1)..(1088): unsure at all n locations
atgaaatggttggaaaacgcagtaatggacgaatcaaacggactgaatatgaagggaatttacgagaaaattttggaagaatttgacaaccgtcggcacaatcaatattcggcggaacgatcattcggaatgggtaattagcaaaatatcatttgcgttcactaattggataagtgagtcaagggtggccggaaaagccattcccgaaaatgaaaatcaaaattaaattattaattcccatcccaaatatttaattttcagcctgctcagcggaatttttcaagttgcattcgctgaattatttgagtcaatttgttctcagacaaattgtccaatcggcgctgacttcgcaagcgaattttatgtacaaaatatttcaaactgaaatgaagcatttgtacgaagaattgcacatatttctacgagaacattttgggacggtggttggccaaattggcattagcagcagagaaaaaggaaatgacgaaattgaagacggagagacggacggagacggggaagacacaacgggggagagtgacgaggacagcgacggagatgagcagcagaagcaacagcaaaaccaagcagtgccagcacaagcaccaaggcatcgtgaccaacacgagcgcaatgacgatggccatggacatggtggcagaggaaaagccgaagagagtgccgttgcggaggaacagccgcgggagcaatgccaagacgaactcaaacacccgaaacaaattggagaagcagcactaagtgagcaacaagtggaagcagtaactgaaccaacagaagcagcagcagcagacaaagggggaaacggtggntggtgggtggcggaaaaattggcgaatttgtgcaacatggccacaatcaacaagaagggggagacgagggaagagttgaggacacttccgacgaggacgaagtgtaccatgacatggacgaagaccaattttgaggaggaggagaaagagggaggaggaggaaattgcggatgagaaataccaaaacccggaaaattagccaaagaacggaccaattgngggggagaaagtgccaatgaacaatggagaaagtgaaaa

SEQ ID NO: 58601 - DNA, 606 bp, Heterodera glycines
atggccgaagtcgcactttttcaaatggcaatggcatgtatggccaatcgaatggattttcaaatggccgatttggcggctccagtgtctattcaaatagcggccggtcgaatagctttccaaatggtggatttggcggctccagtggcttttcatcgatgggacataactcgggcggacttcacggctttgggtccggcccaccttctggaggctacggatacggaagcggttttggtggaagaaaatgaaaaaatgaccgaaagtgatcggcgagagaatgatttgtgctgttgccttttatacatgcaaaattaaatggaaaaacgcatttcaccagcagaacacttttttaaatcaaatcacagagaattaaaaaaaagaaaagcgaaggaaaccgcaaaaaaaaaatcacaaaaaatcactcgccaatacataattggcttaaaaatcggtctgtttcgtttcgcaatgcttttaggattcatcttcgtcccaattgatcggctttttatcagtccgctgctgctgaaaatgccaacggagccatgccaagcatatgcaaaagcaattgagcaaaacaaacgcggggacacttctgcataa

SEQ ID NO: 58602 - DNA, 96 bp, Heterodera glycines
atgcaaattggcgatcaattagtggaaattgacggcgaaagttgcattgggatgagtcacgagcgagccattggcatgatcaaggagaggcaatgc

SEQ ID NO: 58603 - DNA, 79 bp, Heterodera glycines
ttacgcgtcccatgacattttacgcgtcccatcacattttacgcgtcccaacaacactttacgcgtcccatgacatttt

SEQ ID NO: 58604 - DNA, 2341 bp, Heterodera glycines
atgcggaaatttcggcagcaaattttgtcacttttccattttgtggtgctgcatattttaatcgcaattaatagcagaataataaatggtaattaattagcgttttatcaaaattttcctctgttttgggccaatttgcctccgatgcgccggtgtccgtccgcggcaacccaaattacgacggacgcgcgctgaacattccgctggacttggatggcacgttggagctgtaccaacactggatggaccaggcataattaacgaactaattaattaataatcaatcttacggtgattaaattgtgggttaaaatttttatctaaaaagtttgcttaatttcgtaggcattcagcggaatgttcgctgccgtggccaatcaaaagtaaattaattcacaaataattggaataaaatttattttaaaaattaaatgtaataataaaaaatattaggatgtcaaaaacgagcgaaaacgttcgggaagagatgggacgatgctcaaaacaagttggaaaatggaaaatatttaaattaataacaataaaataataataataattaatatttattaaatatttatttaatgaattgtctgtcattaactaattagggcaaaattataggtcaaagatgttatatcgcatgcgaattgcttgtcaagattattgaaaggcgaatttgaggacaaaaagcccatttttcagaatagcaacagcccaatggtgaaaaatattgaaatttcaataaataaattaaattaaattaaaatccgccaaaaatgattcaacagaaaaggaagtcgcggttggaattgtacaaatcaaaaggccaacaaaattacggcatcaaaaacatggacctaatgtcgtcaaaagtgccaaaaaaattattggcgcaaaattacggcacaaaatttgccgaggaagacatgcaaaagcacaagcgaatgcggcggcaaagcagcggaaaaagtgggcgaaaaccgacaaaaaaaaatataaacaaattttagacgagaaattcttcgtgaaaacagcgcccaaatattttctgcgcgaacgaaccgcccaaatgagcccattgggagcggtggcacaactgctgacaaagtcgctaatggcagccaaaaataaaacggaaatggccgagtaaaacgaattaaaatataaaaaatttaaatttaatatttgggattgactcggcgctttgggaagcgttaaattggctaaaattctctttcaaaaaatattttaaattaattttggtattcaaaaaaagccattttaaagtgttgttctgaatttaaaagacaaaactcagttcagctttacagtgttttaaatgttttcagatggcaaaatacgatagagaaaatccgacaaacttcgaaacggagaaaaacgatgagaaaacagaaaatggaaccagaaaaaggcaaataatttaaaaaaaaaaaataatataaataccgtttcagctttattgaaattgcagcagcaaattgcgggaaatggacaaaataataatgcgggggaacaaattccatttggagaggtaaaaagggggggggggaattgaaatgggcaattaaaatggagggggaataataaaataaattaaaagtgaatttatttttaaatggggaaaattaaaaaataaaaagaaggtgctaatggcataaaatctaaataaacccagcaaaattggtcccgaaatctgaataaggaatgcttcagctttcttttctttcctatctctgccgctgtactgctccaactttgtgcacaaagttggagcagtacaaaaaagcgtagaatgagtgataggcaaaaataaaagcaaaatgaaatactcaccttttttcagggtaacttttataaaaaatatactcttgagtattttaaaccatttaaagaaaagaaatttcttaattaaaagatggacgaaatattggagcgcggaaatcggacggaaattcgtcaaatcattcggatggcacagcgccaaaaatcggcacgacgcaacggcaaaaaggacaaaaaaatggacccggacaaactcgtccaggcaaattgagggggggggggagcaattagcgaagcaattaattaattaactaattaattttccaattggcttcagttggttcgccagggcgtcactttgggctttgcgctggcgggccaaaacacgacgggttgggacgagaagacaatgcgattggtgtcaccacgcttcctgagtgtggtggcagaggaggaaatggcatcggacaatgaaacggtggaaaaaatggaaaataatcgaatgaaaaaagttggcacaatgccaacggagtga

SEQ ID NO: 58605 - DNA, 245 bp, Heterodera glycines
gaagccgcgggaattaacgaagaagcgaagaaaatagcggacgaaacggagaaagaggaaaagggtgggaaaagaaaaggaaattggaatttaaaaaacaaaaattggcaattgttgcagaagttaaaactgtgccaacaattggtacggcggcggacaatggcacgagactaaatttgaccgaaatttggaaaaagtcgcgcggaatgtacgaaaaagaggtgcccaaattggcattcaattag

SEQ ID NO: 58606 - DNA, 1525 bp, Heterodera glycines
  unsure (1)..(1525): unsure at all n locations
atggccggcctgcccatggcgccaatgcaaatgcaccaaatgatggcccagcggccgccaccgccgccccaaatgggccaaatgttcgcgccgccgccccctccgatgtcccggtaaattaattatcattcattatcaacaaaaaaatttttaagttttttttttacccaaatttttaatcaaagtttatattttattaccataatgaaaaagaagctctttttgtttgcaaggttagataagaaaaaaacgagaagcatttaaattttttgaattaccggcggagaaaataggtcaaattagaaaagttgcgtgcgtgcgggactgaacctgcgcttgggttgaatcccaagtggcgtgctttaaccattgcgctttttgcgcggcaacaattgatgctgatgcaaagttttttgttttttccatttttttttggttatagatttttgtactataaatcaatttcaaacaaaatcaaaatagaaaaagtgcggaatgaatgttctcaatgagttagttacaatactgtcgtgcgaatggcgcaatgtttaaggcgcggccctaacgattcaatttagcggggttcggttccgcatgcactgagttcttttttttaattttttatctattaattaattaatctataaaaaatcggaatttgttcaaacttgtaataaagtaacatttttttaaaagaatttagtctttaaaaataacctttttttactaaaaaaaaacttgtgtcaattttttcttttaaatttgtctcctctcgtcttgcgtctgttcatttatttgtgccaccaatttcttttgcagacagagcattccgccnccaccgccgccgcctccgcagccgcccactccgaccatgacgcctcagccgccgccaccgccgcntcagcggtcttagaaactatttntattggaaaattacagggacaaaaaatttccaaaaaatcgctgaaatttttgacaaaatttgcatatttttcgcagatttacatcaaaaaattgctggttttatgtcttttcgagaaaaagtcttggagggagtaccgacaaggaaaaatcgaaaattttcagcaaaatactacaccttcgaatttcgtttgaccctccccccccacctttttcatatatggccgcctgaattttttaaaattttatttagtgaaaaaaatttttttttgggaggttgggaaacgtactgcacccgtaacggcattgggttaacgaggtttctccagtactaattgacccttgccgctaattttctcttgttgtgctaaagccttattcccgctatgaaaaccattttttttaatttgccaatttttttcagcccctccaccgccgcctccgtccgcttgaccgacgacgacaaatttggcgcttgctgctggttgatgttttgtgaaagaatgcggacaatatgatctttttgcggatgctatcacatttatttatttgttgttttctctttttccaaatcactttttcaacattggcattttgcattaaa

SEQ ID NO: 58607 - DNA, 205 bp, Heterodera glycines
atgaaattgcgcaagaattatttttgttcgaatagtgggtttaattcattaaaaaaaaattttttttttaattttctattaaaattctttgtttaagtttcagaaaattctttaaaaacacctggaatcctgaagaaatcaattccttatatagtacaatttattttgaataaattttccatcaaattccttgtttagggttcca

SEQ ID NO: 58608 - DNA, 826 bp, Heterodera glycines
atggcttcatgcaaatcacccattagccttctttgcatgctgctgatcatgctgctgatcgatccatgcttcaacatcagtctctttaatcccgcttgttcgtttgtttttcaattaattaaatccctaatttatccattaattaattttgtacaatatttcagctgatgattgtgttgtggccattcgtaaccggactcagattccaccgggggtcagtcacagtctgttaaaaatcaatactattttggcgttttgcctaagatttactaacaaaaatgcaataaaaacggaaaatacacccctaataatcgattcgaaaattttcaaaaaatacactcccctatgaatcgactttatttggcataattaatcgtgccaaaaattaaaaaaaaaaattgtctccaaatacaatgtgccataattgttatttttgaaactagggttaagccccgacatgtttcggggaattacgaaagccgtaaattgcacttgaaataagatggaagtatctttaaatgagtttttaaacttttttattctggactttttctttttgtgtttttttagactttttatgaaaatttcctccccgacgaaggtgttgctccccgacattttttaaaatttctccagccatccccgacaaattctttcggggaatttcctccccgttccccgacattttgctccccgaggctcggggaggaaccctaatcttaatccataaatttttgagacaaaaaaaaaacgacaaattattttgaattcacaaaattttttttaaaaacttcatacattatgtttaaatgttaattgtgagata

SEQ ID NO: 58609 - DNA, 1396 bp, Heterodera glycines
atgtccggagggacgagtttctttcctcaaccaaatcactttttggtggttcaacggaatggcgcgacttggccaccagcggcctttggaaatggacgacctttgggacttgttggaagaagaccaatcagaatatttgctggagaaattcgaaaaaatacgagcaaaacaattaaaaggtaaggtcatttatctaattgggtagcgcctcatttcctcccttcccctcttttttaactaaatttatttatttataatatttcaaaaatgtaaaatggttttctatgtttgtgcttggtttaagaattttcagttacaaattatttcatttgagtttttcctatcggcaccgccaaaccaattcttctatttcaagatttgactcaaaaattgtcatttttggcgagagtctcttataaaaatactgccaaatttttagataagtaattcttctcccttaatgttagccattttttgttgaaaaaactgcgttgctaaaacttgatataaaaagcaaaattattttagtaaaaaatagtttttgctgtcgaaattttagctctgttgtgcttattaatgcgaacactagacaaaaaaaaaacatctagttgtaagaaatataaattttaaaaatttatcttttttgtttgttttttgttttaccggtgggggtgaacatcctttttccaccctcaattctcatagcacacggagagaaacatgcggaggaaaacggtaccaaagtgaagctttttcccaccgatggagcggcagaaaaggaacttttgcagataagttcaacgcgtgagcgtcatttttaatatcacaaaaatttaatttttagatggattccaaatcgattggacgagccaacaagaaagggaaggggccgaaaggcgatgctccgctgtcaatcatttggccgcttttcctcacgttcaaatggccttcctttggggctgctttttgcaaaatcgcctatgatttgcttaattttgttgcccccttcttgctgagtaaactcatcgcatttaccgaagaccactcacaacccctttggcgaggcatcgcaattggtgagaccacatggaacagctaacaatgagagtttttatcatagaaacttataagaaaatttcttgaaaaaattgaaatttttttagcaatttaatgtttatggttttattaaaattttccaaacaaaataaaatttttgaaagttgtaagtttgaaattaaaaaaaaaattgggtaaaaattccattgttttctccagtgttattttaaatagttcagcgctggggaacaaaaagaaggaatttgtagccgcttttcgccaaaaaaacgacatttctccggtattgaattcggcctcaggattcaacttacaatcttag

SEQ ID NO: 58610 - DNA, 1016 bp, Heterodera glycines
atgcaaagggagcttgcattgtatgaacagcgcagcaacgaattgacagccaaggcggaccaattgcaggagactttgttggaccgggagcgcgaattggacacattgcgtgaccagttcaagaaggtttgtgcttttcttggtgctatcttttccccggatgtttcgatacttttttgcgcttatacctttattccttttgtgtcaattggcccgagaccgcaaatccctaatttttagggcactccgagtgcccgccccctgctggtgtctcggaataacttttttgttttgttttttagtccctaagtgaccagacgtcccggctgaacgagttggaggcggagttgcgtgctcgtgagcggttggccaacgtctacaaggccaacagtgaagcggcaaatgccgaaattgctgaactcaacgacaccgaagtgcgactccaagcgcagctcaaagaggccgaacaaagtaaatgatttgatcagttattttaaatttctaatttttattccgaatttcaagttgttcacagttacaccgctgaaatggagagggcggccgaggagcagaagaaaactatcacagaaaaaggtttgaattgcttttttatacaaaatttgtaaagattaaatttcagacgccgagatcaagcgtctcaacgatgaagtggtcaagtccactgagctgctgaatgccggattcagacgtaagtacgggcaatgccggaccccttacaagcacatagagttacactgatgtaattcccatcaaaaagtggaattttcttgcaactagccaaattccccattcctggtaccttcataaacatgctttttccctcaaaagtttgctcactccgtctgttttcagtgaaccgtgccgacgaagacctcatccaactgtcgccggctgccgctgtggcgagcagtttgttgaagagtggcatgtcgctgacatccatttacgcggaacattggtcgcgtggtggccgaattggacaagaaaaacgatga

SEQ ID NO: 58611 - DNA, 1663 bp, Heterodera glycines
atgcccccatcgaacatccatcatcatataggcctaactgaccctattgtgctaccgatacggccacctgagcagaacacagccgacactctgatgggcgaactggaaaagctgggacagtcggacggagacgaagacgtgcatggcggaggaatgagcaagcgatccctgttgctcagtgaaccggttcaaattgtcatcacctgcattgcaccgccggttggagcagctccgcgcttccaccattatcagcactggggttacaacgaaaggcagttgatccgaatacggaatgtcggtgaccatttctgcctgttccacgcgttgattgccgcccgttcttacactgatcatgacttgacaaaaatgattgcaccacagcaacaacaatgccatcaaggggacgtaagcagcagcagcagcagtgatcatcttattaacgtgccgtccgctgctgcaacagcagtgatgaggaggccggatttttgcgcaaatcatgaagtactgaatcgtcttctgtccagcccgggtcgaatgcaagaagcggtccgggggttgatgctgcatgccggcattgaccctgatgggcaagcatacggggtggagcatgtcccgcatgtccaaaaccattgggtcagtgccatttttgaaaatgctttctgccgcataatttggcaaatttttttttttaacaggatcggctctatccgggaatgtaccgcattgtgctgtttgaggaccgccctgaggaactaccgaggcctatctggaaggggccgatggggcgctgctttgtggtcgctttgttcatgtccggcggacatttcgacgcaatcaaaaaagtcaactgttttttcaagcttggccgtaaatattgtattgactgcgaatgcgtctacaccactgatgccaaacacaccatatcatgcaaaagccggtgtgctcagtgtacaagaggttattttgtgggccgtgtgcgcaaaattttgttcattgttgttgttgttgtacagtaggaccacagcaaccatgtgcgagggaaccaggcgtcagcatacattgctctcaatgcaatcgcttctttttttcacgcatttgttttgatgctcatcggagcggacaagcgtgcagactgctgaaacgatgcacaaaatgcagtcgaacattccaaaatgatgccaaaaacccgcaccagtgttacaccagtttttgtgggcgctgtaatgtacgttttttttgttaagcggtggataaggacaacaaatttttcacaaaaatgcgcaggtataccacgaaaaagatgctgcttgtttcatcaaaaaaattcctgtcccgaaacaaaagcaaaactaccgcattttgtgctgggacacggaaacgcggctcgaacacctacaagaagcgggtcatcagcggcacaaagttaaccatttgtcggtcaacatcacgtgcacggaatgctgcgattctgtgacaggcgaatgcgtagaatgtgcgatatgcacaaccgaggagggaattttgtgcagaaagaaggactggtcggttcttcttcctttcttaatacatgcttgctcacatttttgccgacaggagtgaagcgaatggtgatgaaccgctcagggattttgtcgaatgggttctccgtgcttggagcaataaa

SEQ ID NO: 58612 - DNA, 520 bp, Heterodera glycines
gctcatgcagatgcttaaaacatttcttctccttttttcacatgatcacacaatcaatgttttacctgacaaatagtgctcgagatgggtagcacatcgtatccccctgttatatcacgcatcaatatttttctgaactgcacaattgccttcagaagaatctccgtatcattttggcaatatgattgaagctcgtccggcaaatagaagggtgttgttgttttattttcctcatacctatgggaaatggggaacccccaccactgaaataaccctatagttttgcttaccaactgacaaatttatcgtatttttctcgtttcattgagccagcacagtagtcttctattggcggcaaatgcggaagcctcacgtcatagttttcccttaaaagcattattttttgacaaatgtcacagctttcggaaaaaccttcggttgaaagcatagggaaaaaaaggtttctctgcacagtccaaattgaaagtttttggcagttgatcgagacgaacgggcatca

SEQ ID NO: 58613 - DNA, 537 bp, Heterodera glycines
atgccctgtaagaaaaagcttacggaagcgctttattgtgagtcctgcgatcaccatgcggtctcgcctttgaacaacctttacttgcgcatcgatttgcgtgactgtgaagacattgagacgagcaagcagattaccgcattttcatccacggccgtcaaatatcttggcctaaagattgacgagttttcacgtttagcggagcagcgtccaaagaagctggcctccctgcttcaatcaaaaattgaagaaactatcgcgctcaaattgattgtcaaggtaaatattttgcgcacatgacattttcacaaattttgcccaattttcaaggcaaaaggtgagacgctggactgggtcatcagttcaatccgggtgcctgagcaggtaacggcggttgatgatagtgtggatgcgcaaaaaggcgggagcaaagatggaaacggcaatgacggtgatgatgatgatgacatctacacgatcgacgatgctgagtgcacgcgaatgccgccaccgaagcgtccaagaaaaaccgaatga

SEQ ID NO: 58614 - DNA, 1120 bp, Heterodera glycines; identical to SEQ ID NO: 27954

SEQ ID NO: 58615 - DNA, 1457 bp, Heterodera glycines
  unsure (1)..(1457): unsure at all n locations
atgattggaaaaattgaaaccgcaataccagcgatattgngttagttncattgattattctccccanttaatttaaaaatgcctttgacgccaaaaaatgaatttcttaaangaaaaatgatacccaacttttttttttattggatttggtccgtcaaataaggaaaaatttatttacctcataaatgggggcagccatttcggcatcctaaaatcggggattggtgacaaccccgtttcgaatcccccccccccgaaggaaatgtccgggcccgccgccccccccccctttttttgggtttcccccccttccccccttcccccccaaaaaaaatcccaacctgaaaaagggcgggggggtttggtgttttttccccccccccccctttttatgcaaaaccccccccttttccggaaatttcaaaaaaagaaaaaaaccccccctttttttggggagaaaaaaaaaaagggtggggggagaatttttttttaaaaaaaaaaaaatttttttttttgaagcccccctttttttttaaaatattttttttttttttttttttaaaaaaaaaaacacccccccccccccccggggggagttttttttttttttttttttccccgccccttttttttgggggggggggaaaaaaaaaaaaaaaaaaaaaaggggggggggggggggggtggcccccccccccccccccccccccccccggggtttttttttttttttttaaaaaaaaatattccccccccccccccccccgcgccccggattttaaaaaaaaaaaaaaaaaaaagaaaaaaaaaaaaaagggggggggggggggggggggggggggttttttttttttttttttttttttttttttggggggggggggggggggccccaaaaaaaaaaaaaaaaaaaaaaagggggggggggggggggggcccctttttttttttttcccccggggggtttgtgaaaaaaaaaaaaaaaaaacctttttttttttttttaaaagggcccccccccccccccccccggggggccccccgggttttttttagaaaaaaaatttccccccccaaaaaaaaaaagttttttttttttttaaaaaaacaaaaaaattttttttttttttttaaaaaaaaaattttttcccccaaaaaaaaaaaaaaattttttttaaaaaaaaaaaaaaaaaaaaatttttgggttaaaaaaggggtttttgaaatcccaggaaaaaaaattttttttttttaaaattttttagtataaatttattccagggaatcccataaatatttttccgctttaaaaaataattttaaaaaaattttggaaaaaattaaattaattccactccatttccctttactggccaaaggaattttatatatgttttgtttttatagcatttttaacaatcaccgatattaaaatttattaaattaaagtaaataaa

SEQ ID NO: 58616 - DNA, 1148 bp, Heterodera glycines
atggtaaatttattaaatttcttattatttttttctttatttagacagttcaacccagaaatagtggtccacaaagtcggtccgcaaatgtcggctaaccctttttgggtggggggggggtaaattactacgttataacttctcccaaatgaagacgaaacgaatggaatgagccggaggagaaaatattccatttaaaagagggaggatgcagcaaaaaaccataaaaaatttaaagttcattgtcagcaatttccttattttccatttccagaaggaggaaaccaaactgagtcccgaggaggaattgcagaagcaacaggatttgaactcgaagaaagccgtcataaatgcttatgcggaaaagctgaagggtcttattcaaacggacaaagacagcacagcgaagtaagcaaattgataaatttggagtttaagacaaggaaattccagactgaataatgcgctgacggatatgaacattgcttctaaaaacagaaattatcgtcaaatttctttgagacaacggtcggcttcgacaagttcgaccagctcaacttcaagcactgtaagctccacttccaccacttcgtccgattcttcttcgaccacttcttcgtcctcatcctcctcctccacgtcgactgacagccaagaaaagaatgacaatacgcaacggacaacggggagaagcagtccgaagggagttgagcctccgaagcagccgatcatgttgaagcggatgattggagccaacagaacagtgaaaaatgggcagcacgtacccaccgtacaagtcgaaaaccgagtcccacagaaggtcacgaaaatattgcctttggagtctgcccaggcgaaaaagggccgttttgtggcagcctttaaaattgcaccgactgccgctcatttgcccattgccaactacggcacaaaaagcgcagcagtggccaaagcatttgtcaacagtgacggcggagaagacggagaggaagaaacactcccgaagaatgcgcacaacaaaatggaagaaaaccccaatcaaaaactgcaaaaacagttgacggatgacaaaatagaagagcattcatttccaacgacaatggcacacccttcaaaagtggaggaaatgaaaatgccaagcgaagact

SEQ ID NO: 58617 - DNA, 678 bp, Heterodera glycines
atgtacttttttctgttttgtttaccgatcggtctatgcgcttcttccgctcagatcaccacttccctgatgatgatggtgttcgtcgtggtgcccgaggtgagccgatcactctctctctctctttctctccgcttctctctctctatctctctcttccctctctctctctcgcactcactatctctctctcactctttatctctctctctctctctttctctctctctatctccccctctctttctctctctctcccccctctcttgatctctctctctcctcctctctctctctctcctcctctctctatctctctctctctctctgctcacctgtcaaagggtctgacttttcagtggcttgccgactcgcagaacgacgccaagagattcaatcaaacccgtcacatcaaagtgattccgccaaaaatgttggcccatgccgatgagctgaacaccgtcctcgactttggggtgcaccctccggcaaatgcctttgatgagtcatccccccccccttcagggctaccttcaatattcctacctcttttacgggttctacagcagtgaaacggtgctgaagggtgtcgtcattccgtataatgttccggtcgcttatttctgcgtcaatttgttcctgttggtcttcagcattttcatcattttgaagaagtga

SEQ ID NO: 58618 - DNA, 132 bp, Heterodera glycines
ggtcgattcttaggggtgtattttttgattttattgcatttttgttaaggaattttccaaaaaatcttgaaatagtgaaaaaatagtgacaaaacgccaaaatagtgatttttaactacctattttagtgac

SEQ ID NO: 58619 - DNA, 1153 bp, Heterodera glycines
atgtggcaacgaatcaaagaccgagttcttatttatgatcgaatgggcaggggaacggtgcacggcgagacatcaatcaaatatgagtttaaaacggacgaagtaaataataaaatcgtgttttggttaaactgaaaattgtcaggattttgggaaatggctgaccggatccgactcggaatggagcgagggcttttccaagtgcaaattgtacagaagcgaccgtggctcggcaatctttgagggcacactcagcacacgactggtcaaagtaacgtcacaattttaaaataaacttttcaaaattatcatgaaaaaattctctgtcaaacggtaaaaagtaataaatttttgagtgggaactaattatggcttcgtgcaaaatttaatttggtttttgttcgaatttggggttcagattgtcggcatggatttctatgtataatcaccgaccctgaaaaattcctgacttttgttattttatttttttatccaaaaaatactattttaaaaccatttctggcgattttggccatcaaattggaaatcttggtatccttcgaaagctctttccatagtttaaaatttcaggatggtaaaactcaaagagcaggatggtgttcgatgcgttcgctgaacgacaaaaaagccttcgataggaaaaattttttttcggactggtcccactacacccatcttctgatcaaggtctaagcaacaaatccttgcaatttcaatattttttcttttaagtgccgtggcgatggtcgcacttacaaagtgatgttgcacattccgcagtttatggacatcacttggggcaattcctacacgtatttgctgcacacccacggcggcccccattggcaattcgaaatgattcccttttcacgcttcgttttcacagtcgaagggcgtgcaattgatgttcaatatccgttggaccctcgggcggcgaggtaacgaatcggtctgaatttacttccctgtgagcctaaaacttttgagctcgattggaatcactctcatggacagaattgaggggccatttcgtctggaaatcgactttattggtgccacacatgacataagtcacctcgaaaagcatgcttatgagaaatacaatattcccctaggcaatccgatgttgtaa

SEQ ID NO: 58620 - DNA, 267 bp, Heterodera glycines
  unsure (1)..(267): unsure at all n locations
agctcagcccatcaacacaaaccgcatatattgacacaattggtacaaaaattcacaaatttattgtacncactgtttttatttctatgagatttcagttggcggtcacttaccacacgccgcccgaaatccgacggaagacgaattagtgggaccgaataaacgaaacatttaaattgaaaattaataacggattaccaagcgagaagcacatgtgctacagacgttgttttatttaaacgaataaagaataaacggcggaaaaga

SEQ ID NO: 58621 - DNA, 1575 bp, Heterodera glycines
atgccacggaagcttctgcaccaactccctatcagcagcaacaaacggaggatcagctcgaattgccgacctccgtaccctccgctgccgactcccagcgccaacaccgcgccacccaacaaccgcagagattcttcaaatccggatcggttggttacatttactaaaaaatcattaaatactgggggtactttgtgcagtttacggggcaaatttcacatacattttcaaaaaaactgaattttagaaatcaaagaaaatgttttatggggttttcgaggtcgctgatcacgaaaccgggctcagaccagcggcaagaagcccatgagaattcgaatttcacatacatatatactcttaatgagtttaaataatcttttattgcggtttagatgactttaagctcattttcatgtattttaatcttgttcggtccaaaaacttcaaattcgaacatttttaattttcgactttttgttcgagttctggtcaggggttcgaaattggccgaaacggatgcctcgtcatcaccgacctcaaaaagccccttgaaacttattttcattaatttttaaacataaccatgtaaaataagtacatttataggcatttgaaaatgtttgttaaatctgccccgtaaactgcacaagtaccaatacatgtgcaagtggtgccccaaatgaacaacacgaccataaaatatttgacaattttaatgcattgtacaagcatcaaaattaaacattattggtattactaggtcgttgcataaaaaagggcgctttttcaaaatgactttttttaagacttgattaacgtttgttatgtcttttttgtgtgtaattcttttatctgaatgttctcgtcatgtttttgccaaaaattttgattttgtccttttatatctaaagttacagtccaaaaaattgggtaaggtcaacaaaatttggctaccattttacaccaatgtccataacttgagttaaaattgtcaaaacgacttaaaacttggtcagattatgaaatttgatgagcttaacaagaaaaagcctgaaagaaatttttctgaaaaagaaaaaacaaaattttttggccatgtttattttggccaagtttccaaatctattggccaaaccgaaagtcaaaaacaaaatccaaaataattccatcggggttttgaggctttttatgcccttaaataatataaaaaattacagaatcgcacaagtttccaaaattgtgttatgggcgattattcgaatttctgaaaacgaaggccaaggagaaaacacttgtctttggacaaaggatttttcttatattttttgaacacatgcaaaattattccagcatagtttatccgtaggaaatccttgttttaaatccttttttaaaattttaaacaacttccctaaagccttttttggccatttttcaaaaagtgggaaaatttgggattttttggccataacttttttaaaaattgtttgagtgcattaaaattgacgccattcaattcatctcgttattctgcatcagatgatattaaatttattagaatttgttacactttta

SEQ ID NO: 58622 - DNA, 912 bp, Heterodera glycines
atggagaaaaacgaaccttatgagaacagtgtcgtcgaagacgatgaatttcatgtgctgcagccacacaatttcgttggtccgttcgggcagcgcagcgcactcttgaggaagccgcggaatttgggcatatgaaagagacggatctgaaaaagtaaaaaaaaaaacaatttactaatttggacagatggaaaacggatgcacccaaaattttgccgccaaaaactttaaaaaattttcaaactttgaattctttcaagaaaaaaactactatatttctccacccccaccttcctcccgacaatatttaattttaagcgttttttagtaaattaaaaaaatcagaatttttttttttgtgaaggagagagagaactctgctcaaattttcttttatgtagcattttacaaaaacaattgataaatgaaataataaaatacccgatgaaaatttgttttttgtttttttttggtttcggcctgtaaatttttttttctgactaattttaggccatatgggcgaaaaataacatgttaaaatgaccatgggaagggatgggaatgcccacacctaaagttacggcactgttgtcaattatttttttaacatattattaaaatcaaaccgtcaatagacatgcccaaagtgatgagcaagcatataagggccctaaattcaatttgtgcgctgtgaaaatttttttcaattacattgagtagaattttgtagattgcaatcggaatgtgacgagttgataccaaatgggacccgaacgaggctttagtgctgaggactgaaattggaccattggcgccttctcattgccagcctctgtgaatggaaaaagagcgaaatataaatttttataataatttttttcagtgaaaatttatcgaagtcaggcaccatag

SEQ ID NO: 58623 - DNA, 793 bp, Heterodera glycines
atggtccaatttcagtcctcagcactaaagcctcgttcgggtcccatttggtatcaactcgtcacattccgattgcaatctacaaaattctactcaatgtaattgaaaaaaattttcacagcgcacaaattgaatttagggcccttatatgcttgctcatcactttgggcatgtctattgacggtttgattttaataatatgttaaaaaaataattgacaacagtgccgtaactttaggtgtgggcattcccatcccttcccatggtcattttaacatgttatttttcgcccatatggcctaaaattagtcagaaaaaaaaatttacaggccgaaaccaaaaaaaaacaaaaaacaaattttcatcgggtattttattatttcatttatcaattgtttttgtaaaatgctacataaaagaaaatttgagcagagttctctctctccttcacaaaaaaaaaaattctgatttttttaatttactaaaaaacgcttaaaattaaatattgtcgggaggaaggtgggggtggagaaatatagtagtttttttcttgaaagaattcaaagtttgaaaattttttaaagtttttggcggcaaaattttgggtgcatccgttttccatctgtccaaattagtaaattgtttttttttttactttttcagatccgtctctttcatatgcccaaattccgcggcttcctcaagagtgcgctgcgctgcccgaacggaccaacgaaattgtgtggctgcagcacatgaaattcatcgtcttcgacgacactgttctcataag

SEQ ID NO: 58624 - DNA, 659 bp, Heterodera glycines
  unsure (1)..(659): unsure at all n locations
atgcccgtcgtttttgactcggaatcttcagatgaagaagncattnatccttttgttaatgaataattttagtctctaggtgattttttgaatatttttttaaatttaaatatgccgcagtcaaatggatgatgcagaatgccaaaaatttatctgctaaggaatttactcaaattgatcaggataatgaaaatatttggataattttggccaatttatacaaaataaataaataaaattaaactcaggaattgaagaaaaattaagagatatttcacaaattggttttggttattgatactcaatgattaatttaatcccaaattatgcataactattaacctaccgttcaaacattgagaaattataaaaaaacaacaattttttaggcttggctgacaaaagtgcccggcaacaaaacagctgcgaaaattcgccgaaacggcatggcacaaatggcaccgacaaaacgtctccggctcgtacgttaaaaaatcaaattatgttaaattaaaaaaaattaattttagaaaataattcaaagtacttgtccatgtggcaaaatcctgcattattggtcaaaatcctaaatttaaaaaatttattacacaaaactgaataatggattcaaaatcattttttaaatttatagaaataaa

SEQ ID NO: 58625 - DNA, 241 bp, Heterodera glycines
atgggtttaaatagtgagcaaagaggaaaagcaaaagcaaaaaagggtaagtaggtaaaagatgtaaggatacgtagaaaattaaagggatgagcacgaacttttatttttgtaattaattatttaattgtaatattatttaaattatattgttataggtttattggaagattatggaattatatttttatttggtgaattcggtttaaatagtgaagaaagagggaatgcaaaaatttaa

SEQ ID NO: 58626 - DNA, 1066 bp, Heterodera glycines
atgatgctgcttccgccaatgattttcttggccctctctttggcatttcttttgaacaacaatggcacatttggtggcagttgtacgtccaaagatggcgtcatggtcagcaatggacaaatgaagcaggaacaactgaagaaaaaacgtcagggcacaacgccaaaagcgcgtgatttatcgagaaggaattcaagtacctcaacatcaattggatcagaaatcgacattaatggtaaacaaaatatttgaataataaataaaaatgataaaaaagataattaaaatgcatttttatttgttagcattttattatactggggaatcgaaacattttttattgaattcataataatttcttgacatttttaatttacactttgttaggaccgagaatttaatcggcaagcgaaaaataatcttattattaattaaaattaaaattctaacatgattatcatcggcatcaattgagctttatacgagaaaaattttctgtaaaaattggttaactttgcgctgtaatttattactaatttacccatagaattcggaatagcgaaactaagttaattactgattttcaggaacatttctgaaaaaactacaatgtcgaaaaaacaaaaatattttttctaaaaataatagtttttttgggtaaaaaaagactgtcagaaattacaaaaatgctgctacttctgctacttactactaagattttattttaacgatgtttttggcccagtaaaaatcttttttaaatcaaagtgccaatgccatttgcagatacaatcaacttcatcaaagagaccactcgagatggctacacatcgccaatgcaaagttctcgtttttcggattcgcagatgccttttccaccactctcaccaaacgttactcattttgctgttgataaatcgagtcgagtaagtgatcagtgaatcctttgtaacataaaactttataaaatttaaactttcacgaaattttcaaatattccctaaatttctttaaatatttccaatttttcaaagtttttcaggaatttttccaagtgagggtgtag

SEQ ID NO: 58627 - DNA, 656 bp, Heterodera glycines
atggcagatgaaatttggcgggatttgacgcatcttcgcaaaaaatcatccaacggatggcaaatgcacgacagagaacggcgcgaattgcaaatgtcacatggggaaagccgcggctttttggaccgattggagcgaagtgagtcgatgttacggtaatacagaaggaaatgaccgattggcattcagaatcgtacaaaggcagacaaaggatgaagcaacgcgaaggcgagccgacaaaagagaaacatagcaaacagcagaaggggcagggcaaacggaaggaaaagccaccgaattgggagctgtacatcaaaagaataccacttgaggaaggcatggcgaagagcaaaaaagtgccaaagccaaacccaaccgaagcatggacaaagcgaaacggcacagccctaacggagaggggagaaatagagggaccgacggagcgaaaggcaatggcaaaggcacagggagtgccgacttatggggaaaaagcagcccaaagaagtcaaactgacaatgagcagcgcgtggaaccgatcgaatgtccgaaggggccgccggggtttgcagggaaagcggggcacgacggcatcccgggggtgccgggtgttcatggaaaaaaggtgaaagggaaacgaaatgagtgtaacgattaa

SEQ ID NO: 58628 - DNA, 1217 bp, Heterodera glycines
atgaaccgccggtaaaataatatttagacaaaattttcctttactctgatttgattttccacaatttcagttggatttgcaacgacgtgtggatggacattttccctcattttgaccgtcttcaactcggactctaattggcacttctttcgtcacgtttcgaatttttggtcgacaaacatttcgatggcacaagcgaattgccaattttggaagaatatcgtattgcgcaagaacaaagtgacagcggtgccagaattgcgtgtgtttattgacaatgccaattatgtgccctttccggtgcccgaccattcgctgcccaagaaaattcgttttatgcatcttcggatttggtaattcaaattccgacatggattaacggatacaatgttcctattttcagctacatcgaccattctgtcatcgcatttatccgtgccaatcagcaaatgttcgacaaaggaacaaacttggagttcttctatgtgtcttggaacgaaaccttttttgtccagccaatttggaatgctttgatccgccatattttgccaatttttgtgccaaatattcgccaattgaaatttccaagtgctgatcatctgtactgtttgcttcgtttcacttctccaaaagtgctctccgatctcaacattcattcaatcgatgctgatcgtctgttcccaaatgccattgattctggtgaccaattgctcgatgagatttgtggtgattctgatcagccacttgcatattctgctggccaaattctgtctgaatggcttcacatcccggcaaaagatggccaactgaagaaattgatttgctggagtgattcgtcagaaatcgctgatttagtcaacaatttcaagaaggtgtgtggacacattttcgttggattgactgtcattgattttcatttcccttttttagaaatttatccgtgccaccacttcttccgccagctatcaaattcaatttactgttcatgtgccaacggaaattgtgccatttcaattggtgaacgaacggaccaacgaaaagctcacattggagaaagcagaaaacaatgatgaaagtatggatgaagaagatgatgatgaatgggatgagcgatggataatgaagcgatgtcaaattggggagactacggccgcgctaaaccaaaattcgggcaatttgaacaatgtcagctttacgttttatgtgaattgcattgg

SEQ ID NO: 58629 - DNA, 816 bp, Heterodera glycines
atggacgcaattcttgcaaccgattggctccacaatgcgttcccagagcgaaagacaacaacaacaacaacaacaacaacaatttctagtgtggaagaagaattagacgatgccgtcaaagcagtgagttttacacaaaaataaatttaaaaaataaaataaaaaaataaatgaataaataaaatcaaggaagagcaaatcagttggcttaaaattatcgaagaggaggaggagcgaggaaatgaattgcaaactggtgaaatggaagtggaacgagcgaaaggtttggttgtttacaagaaaaaaatgaaaaaaaatttagagattgagccgccaaagcgacaacacttacagtccaagtgtagctgtaacgaaaagcaaaagagtgtcccgctgattgactttctctgccaacactacaaatgttctgttaaagagcttcacgttctgcttcagacgctgaacaaacgtcgcgaaatttcggaaatgttgcgctctcagcttcagttacgcaccaaccatctgcgtcctgcctggaaaaattttcgcgtccattgcaacgaactgacaattcatcctgctcaaactgcatatgccatgcgcggttatcttggcattacggttttttaaatttaaatttatcagctcctcaattgtatagatgatatacattgtttttaggtccgtatttactactatgtgaaacatggcgtaaagctcgtttatcctcagcttccctgtgttcttcaatttggcggtggtgaccattgttctctgtttccgcttgagtgtctgagcgtcataaaagatgcctga

SEQ ID NO: 58630 - DNA, 385 bp, Heterodera glycines
atgaatgacgtggcaattctacgcgaaagtgtgctccaatttcgcaaaattattgctgagaatacgaatgggctcgatccgttcaaagtcgcatccacagcagctggccttgctttggcaactctgcgtcgctgctttcttccaatgaataagctggttaacgcgccagagggtggctatctaagggggaggagagcatctgctgaatcggcacgttacattcgttactatgaaatgacccatccgggggtgcatgttcaatctgcacagtggtccattggtgaagctaacgttgaggacactggttatcgccttgatggattagttacacgagatccacctgaacgggaccttgccattgagtatatgggctgcttttatcacg

SEQ ID NO: 58631 - DNA, 2279 bp, Heterodera glycines
atgaatcgttttgaccaaaatgatttcactataacttctgttcatcaaatgcgcaatcgccctcggaacacaattggagaaattgcggaagtgagttttgcgccacttgaagaagtagaacggcccgaccgcgtgcttgagcgtcttgtgcgacggttgtttgatcgagtgcttgatgggcgttcggcacctatgctaatcgggcttcaattacacccaccgacctttgaaaatccatttacaattccgcttcgtcctcccgagcagaacaatcccgccgcaattgctgatttaattcaaagacttaacgatcaatctgccgctggcatagatctaacagctggcacaactgtgacaaaagtacttgcggtatggccaatgcaagcagatcagagcgacgctggaagatcaggtttaaatcttttttctttttttttttttgcaaaattttttaaataggtgcatgcagtcttgaggatgaacatcgattggtgaacactgttcgctcgttgattcgcattaaaaatccgaatgatcgtctttgtttggccagagctgtgttgcttggcttgcatgattggcgggcacgaacaccaggtggcggtggaattcccgctttcaaaagctacgcgaatcgccagcatacccacgggcctgaggcacgtaacttattgcgtcgcgccggaataccaagaaacaagcatatgtacacaattgacgatgttcaaaaattacaagcttggattgatcagcgttatggccatggagaaattcgaattgcggtttttgagaaggaacgtgagtaccgaattgtgttcaaggcagcatcaggcgaggcggccaagttcaatttatgtcttttgttggaaaatcaacatttcaattacgttggacgaattgagcaactatttcgtgtgcaaggatattgcattgattgtgaacgtcgcgtgacacgttggtaccacccccaggaatgcaaagtcgtttgccgtctgtgtttacgctttggtgtcgggtacccgtgcaaacaacattcacgagcagatggaacagctagcaatcgtctttgcagtgaatgtctattcgtttttcccaatgacgactgctacgcctatcacctgagcaatcgagcaccttcagctatgcatagccaggaagggggaggaagaggaggacgaacttttcgtccaatatgtgaatggagaagggcatgcagacaatgtggagccattacttatgcgaactatccgcataagtgtccagcactaattagtcaaacgggatggatgcgttgtccacgctgttctgggccacatccgattggatacccatgttttatacaacctctgaaagataaacctactagcggaagaagaagaagagagagaagaatgcgacaaccaaatcatcataatggtaataataataatgatgatgatagtggtaacgatagaggccatgatgatgatggtaatgaagtggaggaggaggaggaggaagatgatgatgacgcaaacagtccaaaaaaggcagtcaggctttgtttttttgatgctgaaacgtcccaggatttaccacttcaacttcgcaccaaggttgtacagaagcatgtcccgctgctcattattgctgaaataatctgcgaagcgtgcataaatgaaggaatttcggttcactctggtgttggacaatacgcaaatggatgtgtgtgcagtccccctgtgggaccaaggggacgtcgttggtgttccccgccatttttaaatgtgcctggagatgacagtgctctaccagcctgtgtcaattacaacccacgaagactgtttttccatagttttgacaatgccaacaatgacccagtggacgactttatcaattttctcacgggaactggcccgcatggtgtcaaaacaatttgtttgtcgcataatggtggaaaatacgacattcacttgatactggagacacttcaccggcgcaatttaccacaaaagcgtatttgcacaatagggctgaaaattttttcgatgactttgaaggggaaccaccaacgggatgtggtgttcaaagattcgctgaacttttttttctgtgagttggatgcactgccacgcacatttggattgaacaccgaagttgcgacaacaaaaccgttttttccttatctgttcattcggcgtgaaaatttgcatcaaagattgcgtggtttaccgcccaaagaattttatcaacctgatcacatgaaagcacaaaaaagagatgccttttttcattggtga

SEQ ID NO: 58632 - DNA, 1013 bp, Heterodera glycines
atggcaagcgccgaacgtcagccgttcttttacagattcggcatcttttacccacaaggaatggagaaaagagaagctgaattttcggtatggcgttttatttacatttttggctgcttttctgctcgtatttttgtaaatctccgcataaaaatgcatttttatccgtcctttttcggggcccataccaaaagaatcgagtaactggtaagtttgccctgagtagctgcggtaagattcttaccctgggttggcccagggtaaacatgtgaccttgctttttaaaaaattaaaaaagatgatattaaaaaattcattttgctaatttgtaagttgtacttaaagtctgctctattcaatgataaaattttcgttaaacttttttgtttttcactgagctagggagcatcaaaaattttgaaaattcttaaatttttttgttgattttttgtctatattacttttaccggttcaaaataatgattattcgattttggacaattttattttcccttttttttaaatattcgacctttggaacatgaaatacccacaaaaatatactgcgttttgcgtttaataactttccttataagtaatataatttcttgatataattcgatagctctaaatgtcctctataatcctataaaatttcatagaattaatgaaataatgaaagagttatgatttagtaatgatactaaaagaaacgggtaaaccaggtaattcgctaattttgctacttttctttcagatttgcgaaaaccccgaggaccacaactgccgttcgttgccgctggcggtggatgcgaatgatcacctcaattattttggagtcaattcggaggagtatctgaaggcgggatgcccccgagacatgctcctctgatgggaatggcactccctttgctcttccgatgagattggcactccttttgccattgccaattgatcctttttttaatcatttttcggtcgttttttctctgatttgccctttaattctgtaa

SEQ ID NO: 58633 - DNA, 831 bp, Heterodera glycines
atgaagaaacaccaaaagaaactgaaaacgacgccaaaagtgtcgacaccaccgcctgtctcaagccctgctaaaccaacaactgtaaaaccgtcagctcctcctccatctgtcacaacaccagcgcctcccacaattgcaaagccaccagtaaccacccctcctacaaccacaaaaccaacaacaccggtccctccaccagccgtacaaccaacaacaccggtccctccaccatccgtacaaacaacaacaccggtccctccaccagccgtacaaccaacaaccacccctcaaccgacaaagacaccagtaaccgtccctaccccgaccacaacaccggtccctccaccaccaaagacaacaactgaggtaaagagcccatctgctaagccaacaattccggcaccgccagcgcaactaaagagttcggcactgtctccgaaagcacccatttctactgttaaaccgccacctccagtttcgctttccgctaaatctaaatcgccgccatctcctccggaagaatctccaccacactatgatgaagaaaaagacataaccgtaaagccaacatcgcctgtaaaaccaacaattactgcgcctccagcacagctaaaaagtccggcagcaactcaagtcatcaaacctcctcaacagccaactaaaccgttggctccgcctccaggcgctccacctcgttttccagctgctgcggtgtcaccacccccgccgacgtcagcagctcaaattgacccgtcgcgtttgattcacacgctcgatccaccaaaaatttatttcaaaactcctccggccaacgttgaaagtgtttga

SEQ ID NO: 58634 - DNA, 145 bp, Heterodera glycines
gaattttttaaaaattttaaaaatttttttgaatttttaaaatttccctgttagtcccggtcccgaagaaaaatcgaggtcccggtcccggcttctcaggtcccggcaagtcccggtcccggttttgcccaaaattcccggtccc

SEQ ID NO: 58635 - DNA, 1070 bp, Heterodera glycines
  unsure (1)..(1070): unsure at all n locations
atgaaggacagctcagtcccgcgngaatagcaaatgctaatcgaacatgcgcaaattgtgcaacgcaattcgcacagcccttacagcaaattcgccgtcggcgctgccattttgaacaacgacggacagattttcagaggaggcaaagcaaaagcggacggacgcttttcacttgaattgtcccttcccattcagcaaatgtggaaaatgcttcttacggggcgacaatttgtgccgaaaggagcggtaaaataaaaaaataaattttaaaaattgtttattttcaaatgccaactttttcagcaatttgttccgcaattgccgcaattgggcccaccaaattttgcccaaaagcaatttgtgtagtcagtgagtcacgagaaattgagaagataatgaaaaaataatgaaagtttagccgatttgactgaacccggcgcaccgtgcggcatttgtcgtcaaactttggtcgaattcggtgacatggcggtgggttaattttataaacattctcaaagtgttcatccattagcaatacatggagaaagaatattcattcatttcacactaaacacattgaccaatttaatttcttttccattttcttttcggcaacgaattatttggtcgtttgataacattttaattattattattctttgaaaatgataattacttttggttggcgaataaatttcaagtcattaaccaaatgggtcacatttatttatacgtttgaatttggtttatcagcagaaaagagaagagattgctgaaaattaattacccctattaattgtggttatttatttatttatctttgtcaatttgtcttccattattaaatcgtccttttgctcccccccccccctctaattaaggttcttttctcccaattaaggtccttctctattcgcgtcccagcaaaaaattgttaaaaacgcgcgtccaaaatctgatcccaatggcattcactcccaacgcattgaacactttcaaaagtgacgcatcgatgagcaattaaccgaatgaatggacgcgcatttgaacagtgattgatcaaaccaatt

SEQ ID NO: 58636 - DNA, 830 bp, Heterodera glycines; identical to SEQ ID NO: 27978

SEQ ID NO: 58637 - DNA, 647 bp, Heterodera glycines
  unsure (1)..(647): unsure at all n locations
atggaccctgagcagggcgcgggcggattcgtcggatatgcgtatgttattaatgtggatgtaagatcgatagaaaaaaggaaaatacaaccctaaaatcccaattttttgacttcaagcnccaccccccatattatgcaatagggggaggggccgacccccccccccccccgccccgcccccccccnctgaatttgttcgtatgagggcccgaaaaggggagggggggggacttcgtatttgttgggataaaatgtggggaaaagttggagacgaaggggtaagagagagtgacttcgtgaagtcggctagtaatcacaaaatttggtcatttttagtgaaaatctgttaacaaattgcactcaaattttcagaaataacccctaagaaatgggtttctttttaaaattacacttcataaaaactccgtccccttttagtattgctggaaggcattggacaagaaggaggaattggagaaaaaggaggagcaattggagaagaaggaagagaaattggagaagaaggaggagcaattggagaagaaggaagagaaattggagaagaaggaggagcaattggagaagaaggaaaagggcaacgacgcagcagcagcgaagaaagaggaaaggaagcgaaagaagggg

SEQ ID NO: 58638 - DNA, 620 bp, Heterodera glycines
atgtcttcatttgctaaattggatgctaaaaaagtgcttattgttgtgacgggagcaagccgtgggattggacgagaattggcccttcaaatggccaagttttttgcgacgaatgaatgttttttcgttcttttggctcgcggaaaagaagcgcttgaggcggttggggatcaaattcgcaaggagttcggtgtcatttacaacttatacaaaggcctagactaagcctttgctttaggcttaagattgcttgggctcaaccgcctattatattttcaatatagtttttctgcagaaacccctcggctgttgttgaactcgtttttgcggacttggcaacacaaccctttgcgttgggcagcattaacagccgaataaaggcgtggagaggtagtcattggacaaaagttattccatgcgcttattccgcttttaccaattcagaaaccgttccgtttgacctctgtttgctcttccacaacgccgggactgtcggtgaaatggccaaaaaatcatccgaactaagcgacgaggcgcaatggcacgagtttttgcaggccaatttggtgtcagcgattttattgaacaacggagtttatgcggccttaaacaatgcagag

SEQ ID NO: 58639 - DNA, 141 bp, Heterodera glycines
aatgctttatctgtgcctgtgatactttcccgataaaccgtcattttgtggccagttgctatcagctttaacctttcatttaaaacatgttctctttgttttgtcttgcataattgccaaagtataaatggtggaaagaaa

SEQ ID NO: 58640 - DNA, 6981 bp, Heterodera glycines
atgtcgggatttttgcggacaaaaatcgcaatagagctaaaggctcttgaaaaggcgaaaactgcaacagaattgcatgttgagccggaccaaactctgaccacattggaaaatgcgattctcctggaaagcgcggcagagagaataaagtcagaggtggaagcagtgaatgccaaaattgaacaaatttggacatcagcaagcaaatggcatgacctcatacaaaaaatggacaaggacgaacgaaaaagtgaacagacagtgtatgatcaatttcaaacaacggagaaactgaacacaaaaatggaaacagccaacacaaagctaaccgaactgaaggacctggcgatgaaggtggaagctggagcaaagctgcaacgctcaaaagcagatagagacgcgcgagtggagcaaagagaacatgcaaaagcaatgtcgaagtcgaatgcagaagcagacaaagggaataaccgtgcgagaggcaatgaaatgactgccgcattgtaccaattgccaacactaagaattaagccgtttgggggagacaaacgggaatggcccatgtttgaagaagcatttaaagtggctgtggaccaaaagccaggaagtaaaacggagaagctgaatttgttgaaatcgctggttgagcgagaggccgcattgcttatcggaggcctacgcctggaagagaaaaattacgaaattgccatgaagctgttaaaggacacctatggcgacaaaggcgaatatgtaaggaggttgcacacggagttgtcgaacctcaagagatgcttttcggtggaagacacaaagcatttttgcatggaattggaacgcctggcaagagaattggaagcagcggaagaagacattgaagggccgccaatttatttaatgcttgagaagaagctatacaagcctttcctgcgtgaaattctggaagagaaagcaaaaaatccagacttttgggacacgtcatccctccgaaaggccttaggaagtgcattgagcaaagagctagcaatcaaagaagtcatgagggagtatggcttcgaaggcaaagaggcaaatccagagcatggattcaaacgacaattaaggcggaacagattcggaggctcagtcaatgtagccacaacacatttcggaaaacccaacggagagcgaagaaaaattccggaacaaaaaatgccaaatccgaggcaaggccagcgaagttttcagcagacgccacgaaattccgcattccgagaccgtaagggacaaggaagaagcccaaaaattcaacggaatccaacggcagttaacactcaaggggaactgcttctgtgtgttttctgtggagggaaacacagacacgacagttgcgaaaaggcaaggacggtgcaacaacgatttgcagtcctccaggagaagggcttatgctacaaatgcctgaagtcaaatcatatcggaagaaattgcccatgcccgatgaaatgtttcaagtgccagcaagcacacccaacggcattatgccatcaggcaaacccacaaagggtaacagaatggaaaaacatggcaaaccgagtcatgaacgtccgggaagaagagaaaccggacaaaagagacgaattcaaagaagtctcattcacgccctcgcaatgcaattcagtgcaaggaaattcgcgagtcctgctgagaacagcagaggtgaccatcttcaatccatccaatccaaaaagaagcatggtcgcatcagtttttgtggatgacggaagtgaacgctcattcatccgtgccaatgtggcaaaacaattaggccttccggtgattgaaacggaagagtgccatttgactggttttggcgagaaagaagccaaacgctacgtgagcaatgttgtccgcgtaggatttctgggagtcaacggagacccatatatatgcgcactcaatgaaatggaattcattgtgaaagcgatgcccatcgtaacgctgaattcgatggatgaagcggaattaaacaagaaaaaactttcccttccatcgcggccaagacagccagacattctgttgggaatggatgtcagacatgacctgaaaataagagacgaaacagaaaagttgccaagtggattcacattgtcaacgtctcgagtcgggcggatgataagtggttatggccaagtccagggcccaatggacatgagtgtgcaagtgacgtacactggagcactcataagtgccttacaatgtgccagtagcagaagagatgctgacgaagaaattgaagaacagataaagacatttttcgggctgaacataatcggaatgagtgacaatccagaagaaaacgacaaagaagaagtgatgagaacgttcagaaaaagcttgacattcaaagaaggaagatatgaatgtggcctaccatggaacgaaagagtaaaggatttgccgacaaattttcaacaagcgagggcaagactttgtggcacagtgaaaaaattgcgagaattaaatttggtggacgaataccaaaaaattttcaatgagtgggagaggaacgggataatcgaaagagtgccggatccaacacaaacaactggaccggtacattatctcccacatcggcccgtgataaaaatggacaaggccacgacaaaaataagaattgtgatggatgcatccgcgaagccagcaaaccgcaaaggagccccatcgttgaacgaatgcttgcacacagggccgttgttgttaaacgaattgaccgggatccttctaagatggagaagaatgaaggatctaatcctggcggacatcgaaaaagccttcctccaattatcagtgagagaggaggacagagacgcgaccagatttctgtggctggaggatccacaaaagacagaaatttcaagcccaacatatgtgaaaaccgttgtgtttcggttctgtcgggtctcatttggattgacaacttcaccatttcttttaaatgcaaccatccgtgaacatctctcattctacgacacggttctaccgcaaaccataatggagaatttgtacgtggacaacatactgatcaatgtgaagaagaatgaagacatggcgcaaatttgccatgaatcgatcgagctgttccgtcaagggggaatgaagctgcaggaatttttctgcagtaagccgatcgccatacgaagccttcctgtggaattattggccaaaaaccaaaaggagataaaagttctcggaattccgtggacgaatgaggatgatgaaatttgcttccgatttaaaaaatttgccggaaagcacacgaagaggaacatcttggcacacattgcaaaaatttatgaccctttggggttagtggcgcctgcagtgctcccagcaaagcattttttgcaaaaacgttttgaagccaaaaacggctgggatgaaggattggaagaagaattgattcatgaatggaatcaaatcatggagacttggcaaacgaaagaggggacagaggtccaaattcgattcgcacgaagagtcgacaacgaagacgaagtggacaaggaaatgcattgcttcgcagatgcgagcggaaaaggcttaggcgttgccatttacatccgggaatcgacagaaaaaatgagcgccaatttggtgtttgcaaagagcctggtgaagccctccaacatatcagatgttgcggcaacaattccaaaaatggaattacaatccataacgctgggagtgaagttgttaaagtacgtgctccaacatctcaaactcaaaccaacacagacaacaatttggactgacagcttgtgttccgttgaacgaattaaggagcataagaaatgcgatcgatttgtttcaaatcgattagcaaaaatacgtggacagtttgaagtcaaacatttggtcagtgcagataatcccgcggacgtggcatcacgcggcacaacaccaagagagttgagcagaaatttgttatggaagcatggccccaaatggttatcagaagaaaaggccctgtggccaaaaccagcaaaggtttatcacccagatgaagagaagctcagggcaagtgcggaagatgaagaagtgaaaacagccgcagtcatgaatgaggtgcctttccaaccaaccattgatgtgaaccggtactccagctggaaaaaggccaaaaccgtgggtgcctatgtcttacgctggatacattcggtggcaaaaaacggatacaatggaaatttgttgccaattctgagcaaaatgggcccaaaaaagcacgggaaccaagacaagggcgtactgtcagtgcccgaattatgtgcatccgaacatttgctgatatgggaagcacaacaacaatttccaacggaggaaaaaacaaaggaaaatcttcgtctgttcaaagacaaagaaatctggagatgccgaggacgcattggagaagcaacagtaaaggaggaaacgaaattcccgattttcttgcctcctgaagcatggaccacaaaactcattgtgctggaagcacactggaaaatgaagcatccaactcacagtactctgttggggtacatgagggaaaagtactggatacccaaaggaagaaggttcatcagaaacacgatattgtctgatcgacacggatgtttgaattgccgcaaagagaggcttaaaccatatgcctatccacaaatgccaaacttgcccagtgaacgagttgcgatgataaggccatttgagaagacgggcgttgactattttggcccattaacaataaaaggcggagttaaagtctacatcgcactttatacctgtctcgtaatacgagcggttcatttggaagtggccgatgattgtacggcaacagaatttttgaggacctttcgaaggttcagctcacgccgcggcctcccaagcctaatgtggtcagataatggcaccaattttattgctggagcagagtgcataaaagaggaatggagaagagaaatactggtggaaaccagccactcaggagtgagttggaaattcaacgtaccacgagcaccctggcaaggtggcgcatgggaaagactggtgggcatcaccagaagtgcgttacaaagaacagtgggaaaaagcctaatggaaaggcaagaattcgatacgcttgtttgcgaaatcgaagccgtggtgaacacaaggcctcttacattccaatcagaagaagaattcacacaaccgctcagacccgtcgattttttattgccatataaacgtgtggaaacaagccttccattgtcggacgaagacccaagggatcccgactatgcataccaaccccgaaaaaagggagaattgcatcaattgatgagagttgcaataaaaagaatcgatcgattctggaaacagtggaaaacggagtacttactttcactcagagaaagagatcgaaccaaccgagcagaaggaagtctcccaagagagggggatattgtcctgattgaagaagaggaagacccacggtccatttggacgatgggaaaagtcgaaaagcttttgaaggggagggatggactcgtgcgcacggcacgagtacacacaaaaggaaaaactctggttcgagcgattaaccttttgtaccctctagaaattaacacttctgcggaggacgaagtcagtcaaattcaagtgactgccattatggattcaccaagtgctgtgatggaaggcggggacccgcaaactgtcacaacggagtcaagtctgcctccagggacagtgatgcaggattcacaaatcgtcacgacagaatcgtctcctgtcagaggaaggaatgagcggcaagctgtgaaagagagaattcgaaagagacagccaacggaggaagtcagaggcaaaggcaaattgaagaagaatgggccatatgatccactgcgaccgggcaactacagaattcctcgccgaaacccgttctttccgtcacaagtagcgtacaatgagcaaacacgcacgtatcgacgacgacgggggaggacgattgatctttcgggattgaggaagttgttcgctggattgggcggcactgaattcgtgagacgagagctgcaagagaaggctaacccggctctaagagaagaaaggctgcgaaaagataaagtcaaattcatggaagatgacgccaggcgcgtcgctgagcgtgaaagaaaggcagcagaggagaaattggaaaaatcaatgaaggattctcaacggcaaacgaatgtcgaatcatcgtcgggcggaacgacacgtaatcctttcgaatcgatggaagtgcttcccggagaccccgagccagaagttcctttggaggaattggcacgccaggagaaatttgatagggaaatggcacttgaacagaggaagatgtatgaaaaacgaagagcagagagaaatgctgagaaggatcggatgcgttggggactaccacgcggagtggttcggagaaaggggcattatgcaccgcatcgagggatcaacaaaaggcggaaatggcaccgtggacggcaccttaatgagatccaaactgggcggaagtaccgacgtccacgtggccatgacatttctccgctacggcaaccaaatggcgccacaaccgaattgctggccccaagtttggagatggaaaggcaaattcggaatgacaagcgagcacgggacgagagccagtcaaaggagcccgtgcggtcccagcgacgactcaaaggcagagatccgttggacgaacagttgaaaagagggcaaaaaggacaacaagctgaagagaaccccgacagaataaagctggcaccagcaagtcccggctaccgacgtaccatcaattattcgctgtttacgcgatgtgagcctggtgtaaagggacacgaaggttgtctaaggaattgcaccatgggaagtctgtcccacggccggctaaccaaaatcccgcaagccgaatcgaagcggtctgcctggcccaagccttcgcattcgattggctag

SEQ ID NO: 58641 - DNA, 413 bp, Heterodera glycines
ttgtacctcttctaatcactgttcttcctcttttaatcactattgtacctcttttaatcacagatgtacctcttctaatcactgttcttcctcttttaatcactattgtacctcttttaatcacagttgtacctcttctaatcactgttcttcctcttttaatcactattgtacctcttttaatcagagatgtacctcttctaatcactgttcttcctcttttaatcactattgtacctcttttaatcacagttgtacctcttctaatcactgttcttcctcttttaatcactattgtacctcttttaatcactgttgtgcctcttttaatcactgttgtacctcttctcacactgttgtacctcttctcatcactgttgtacctgttctcatcacttttgtacctcttctaa

SEQ ID NO: 58642 - DNA, 842 bp, Heterodera glycines
atggccaaggaaaagccgaaggaaatcgaacaaaacaagacgagaaacatagagaagagcataaaagaaagaccattagtaaggggcaaaccgatggaagggacagagaatggagaggaagggacaaaagagcacatggaagagagaaaaacggaggagagaatgtgagggaagacgaacagacgaaagactgcggaacgactgatccaatcttatatttccaattttgctttcttgattcaaagtatcaaatatgtattcagaccaattactaagaaattgtgtcgtgttgaatgaggaccgcagccgggggaatccccggtcaaaccgggggacgggaagccccgtacggggacaccgtgatgaaacaatttgaattatttactaaagaaagtaggaatttctctttgattgcacatttttaaatttatgttagggttattttccctttttcttctaattgtaagttcgataaatagatttatttattttattatataatataataacttttatttaaaagggtaaaaagaggcgataaaatgtttgtttagaaagaatgaaagggtgtgaatagacccgcgagacaaagcttattgttagagaagggtcgtaaatccaatcttaaaggcaaaaacaaattaaacaaaatcgaatggaaaattgttgttaatgatgagaaagaccccggtggaaaattaaaggaaaaattaacggaatacaaaaaaataatggaaagagtgagaaacacaaaagtaaatgttacatgtgatgaggacgagcaaaattagaatatgaaagattcaacgtgtgggacgaagacgccgctaacatcgtatgaa

SEQ ID NO: 58643 - DNA, 709 bp, Heterodera glycines
  unsure (1)..(709): unsure at all n locations
atgaaaatgtaatcattgaccagactttcgggtgcaaactcattgacttggtttcggctgcctttttcggagaaggaatagtcttntcgtatttctacggcaccatggaatactgctcacccgaaggtgcccaatccgatgaaatgcttctgctcacccaaagtattcgaattcagtgctcagtgggaacaaatacttggggcccgaggttgagatgtggtccgtaggcattttgctgtacaccctcgtcttcttcgagaatccctttcgttcctctcacgaaattgtggatgccgaaatcgaacttccctgggaaatttctgagggattgtaccaggtaagtgaagactgaacactgtttttgcatccgcttttccctccacaggtcttaagttggctgcttcagccgggcccaaaattacgcgcgactattagcgaaatcaagcgccattggtggctaactcaacgcgtcgatccgcggaattacaattttatggaagtgctcagaaaacacggtgggcttttctttgctactttggtacaatggctgactttaggacagcctccatttacttctttgctcaacatctctgatcttaatctcgaggggtcttccgtttccaatttgtgcagcaatttggccgccatttcgcttagctccgccattaactctgatcgtgaaacggatgccaacggacagaagaaagaa

SEQ ID NO: 58644 - DNA, 707 bp, Heterodera glycines
atgaatccatcccttcggcattctttcagcatcgaaaacattttaacaaaaggcgtaaattttggggccttttctgagtaagtccgaaatgaaattgtttacaaaattttttcttaggcaagaatttgccaacaaatctctccaacgattttcgccatcttttccattctcgtgagatttgtttaaaaattattatgaaaattggctaaaatattaaggccattgcttccgcaccatttcctcggccgctgttttgacaaagtgccaacatttgtcttagaaccgccgccaaaagcatttccaactgaatttagcagcgcattttttgagcggaataatggagaacgaaaaggtgttagaagttagaacactcaaataccgtaacataaatgcaaaaatcccacggtaaacccgtaaaatacggtaaagcacagtaatcgtaaggaagaagctgactgctgggcgcttaaaatgctgaaagcgataagatccataaaaagaaagagcggatgtgcctcgatagctcaatggtagagctgcccatgagtgggtggacgagtgggttctattcccacccgatgcctaacattttgccattccttatttaatatatcacctaaagaaatgtaaaatattaatagaaaagtacatttaaattttaatcgatgcgtctctctttttgattcgtaattttagtcgaatttgaa

SEQ ID NO: 58645 - DNA, 530 bp, Heterodera glycines
agcgaagtttggaaaggtcgcggctcccccaacaaaatgaagtggtcaatttgccattttcccctctcattttgcctttccacagaatccttccgttgggcggcactttggcatggctcggcgacttcaaacagccgcactttcaagcgggagtcaaagcgattaaaaagggtcggcaaaaatggggggaaaagccggataattggccacttaattattccctttcagtgtatggcgtagagccggactttaccaggtaaagcgagaaattgaagcggcaaaacaaacaaaatgatcatttctaagggagggcggctccatcccagtgactctgaccttccaaaacctaacgggaaagagtgtgatgcttttgccgatgggcgcttcggacgacatggcacattcgcaggtcaaaaaggaggaaggatgggagaaatcaaaggaaaatgaatatttagaacgagaaactgaacgtgaccaactacgtgaacggcatgaagatgttcgcggcctacattttcgagtgcgcc

SEQ ID NO: 58646 - DNA, 1115 bp, Heterodera glycines
atgattaacggtggatcgcatgctggcaacaaattggccatgcaggagtttatggtgctgcccactggagcgaaaacattcaaagaggccatgcaaattgggtccgaaatttaccaccatttgaagaaggcatgcattttaatattgttgagtgactctaagacaatgtctattttaggtcatcaaagaacgctatggattggatgcaacttcagtcggagatgagggaggatttgcaccgaacatccaaaacaacagagagggattggatctgctcaaagaagcgttcgccgcatctggacaccaggacaaggttaatacactttttgaagtatacaatttatcctttaaggtcattattggtatggatgttgcggcaagcgaattctataaagagggaaaatatgacttggacttcaaaaagtggaactgtttttttttttgcgttgtaaaattcattttaagtccaaacaccgataaagcgcagtggttgaccggagaacagctcgccgatatgtacaagtccttcatcaacgactatcccgttgtgtccattgaagatgccttcgaccaagacgactgggaaaattggagcaagttgcaggctgccatagacattcaacttgtcggcgacgatttgacagtcaccaacccgaaacggattcagaaggcggtgcagaaaaaggcatgcaactgcttgttgcttaaggttagtctgaagtcatttaacttaatttgacaaaatattggttgaggtcaaccaaattggcacggtcactgagtcaatcgaagcttcaaaactggcacgaaaaagcggatggggagttatggtgagagggtggggatattacaccaatggaatgaaatatcactttaggtttctcaccgttctggcgaaacggaagacaccttcattgctgatttggttgttggactcgccactggacaagtgagtgaacacattcattaaaaataatggtgttttctagatcaagactggcgcgccgtgccgttctgagcgtttggccaaatacaatcgtattatgcgcattgaggaggaattgggcactgacgctgtctacaccgggaaaaggttccgaaaaccgcaaaactaa

SEQ ID NO: 58647 - DNA, 58 bp, Heterodera glycines
aacaaaatttaaaaaacgggcgcgaagcgcccgttcgaggccgcgaagcggcctaaag

SEQ ID NO: 58648 - DNA, 286 bp, Heterodera glycines
atgcttgggcaagcattgacacccgcacactttgcacgagacgcgcccattcggtgtgtgggcagcaccttaacagagataaaacgtaaaaatgattatttccattaaattaaggcctaataaaaagtttttaaaattgttttatcgtgtttctcttacatttacaacgatcacaatgcttatgaaagcaaggaaaaagactgatgcttggcgtaaattcatcattgtttgcgctgttgttgatttcggcacgacaaacatcgcagatcaaaaccatgatgtgtaa

SEQ ID NO: 58649 - DNA, 1075 bp, Heterodera glycines
caaaagacatggctataattttttttaattttaaaaattaggatcagacctcaaagtggcaaagaaaaggaagagcccatttgtctgagcgtaactcctggtgaaccacaacttacaatttcgcgcgataaaacttttacatatggttccaaagattaagtttaatttttaaaaatcggctggttttttagatttcgtcttcgaccaaatgactttacaaaagactgtttatgacaaatgcgtgagggaactcgttgatggtgctttcgaaggatacaatgccactgtttttgcatatggacaggttttttgtttaaatttgaataagtttttcaaagtttaccgtcatagactggcagcggtaaaacattcaccatgggcaccagcttggagggcgacccggccaagaggggcatcataccaaatgcggcacagcaaatcttcgatgaaattgaggaaaggcgtgaacaagcccgcagatctggcaaagtgatcccctcatttgaagtttcagctcagtttattgaggttggttggtggttgtgaccagcaaaaatcggtaatattgtagctgccccacccccatgttttgaaaaaaaaattttgttttcaaaaaacatgaaaatatgtttcctggggttttcggggtcgctaatcacgaatccggcattcaattcgatcaattccgggtatttttacttggaatgaaataaataaatgcctttgcgcttttataaatattaaatgccaaataagcatttttatttgaaatatatataatattgatgatcatgcattactagagcttggatttttatgtgctaaattcctgaaatataataaaattttgctaaaaatgctgaaatttgtgctaaaaaccaaaaaaaatgccaaattatgtgcgaaaatatgattgaataaaatcgtctgccaatttttcggatgaaaatgttctgagtgtacagacattttattaattaaaaaacttgggttttactgggtgcttatttctttaaattgccatttggctctcggatggggccccctccccggggggaaaatcgaaaacattttt

SEQ ID NO: 58650 - DNA, 701 bp, Heterodera glycines
atgggcaccagcttggagggcgacccggccaagaggggcatcataccaaatgcggcacagcaaatcttcgatgaaattgaggaaaggcgtgaacaagcccgcagatctggcaaagtgatcccctcatttgaagtttcagctcagtttattgaggttggttggtggttgtgaccagcaaaaatcggtaatattgtagctgccccacccccatgttttgaaaaaaaatttgttttcaaaaaacatgaaaacatgtttcctggggttttcggggtcgctaatcacgaatccggcattcaattcgatcaattccgaaccttggactcgagttcggataaaaagtcgtgaattcaaatttttcgaatttccatttatattgtatatttgtgcgtcaacttttgtagctgtacaacgaagaactcattgatcttttgtcaccggaccgggactcatcctccatcaagatcaaggaggacccgaaaaaccacgaaattttgctgatgggcgcatcatcgcgaaatgtcacttcgcaggaggccattctgtccgcgctggccattggtgcccaaaaccgaacaactgcagcgactaacatgaacaaacagtcgtcacgctcacatgccattttcaccttgaacatcaagcagactcgagtggtgccggttgatgtactggatttttttgggagggggcggcactggtaa

SEQ ID NO: 58651 - DNA, 1214 bp, Heterodera glycines
atgggcacaggagctgaagtggaaacgttgcacgccaagttccatttcattgatttggccggctctgagcgtttgagcagaacgggcgccaccggtgaccgagcaaaagagagcatcagcatcaattccggactggtaaatgaggggagatgtgtctgggcataccaaatccagggctatatataatcatttgggctcaaaactgacaatgagaccaaaatgattttctttggttcactatttagttttttcacgttttacatttttttaaaaaagccatggtttgattgagcagattagccatccatcacacccctttacaatgacttaaacttggatttttgaaaattcaaagttttcatattgaaatattgggaaaattattaatgcacagcaatttggtaagcttttacaatccacagcttgcacttggtaatgtcatttcggctttgggcggtgcaaaaggtcgaattggtagtgtccatgttccgtatcgcgactcgaagctcactcgtctcctccaggactcacttggcggaaacaggttggaattgcaatttcttttctgacaaagtaatcactgtttagtcgaacatttatgcttacgtgtgtcagtcctaatgaagtggatgccaatgagacgctcagctcgttgaattatgccaaccgagccaaaaatataaagaacaaggtcaaaagtatttcaccgttactcaattgtcttattttttaggtggttgccaatcagaataaatctagcaccctgattacggatcttcgcatcaaaattcaactgctagaagctgaactccatgaatggaagacggtatttagattgatttcaatattgttggttcatgatcaatcaccacttttaggggaagagacgtaggtctgggcacattgcagttactgagcctgaggacaaaaacagtaccgaacaagtttttggttgcttggcgagattggatgaggaggaggaagcggaggatgctgacaatgaggaagaacctggagagatggaacacgaacgaatctgtacggacttggacaaactgcaggagaatatcagcagcaaagagcgacttatggccaactacgagaaggaactcgagaagattaagcaggaaatcaaccgcttggaagagacgaagaaggaaaacaaacaggaaatcaaccgcttggaagagacgaagaaggaaaacagcggatga

SEQ ID NO: 58652 - DNA, 632 bp, Heterodera glycines
atggaggaaatgcaaaaattgaagaagaaggtgggttactactttctttgataaaggactcacaacctgaatttcaaaattaattttgtgctaccggtagtaataagttcattgccgtaatttttttcaataacataggttttcaaaaaaaagccatagaattttctaaaaaaaattttgcggcgacgtttatttctcggcgcgcttttggccggcgatgtttgggtgtaccgtgcgcatgcttttatgttgtgcagcatttttttacttttaaaatattttgaaattgtggcccagaacaaaaaagtaccccaaaaaaatgttaaattttatttagaaacctttatctgctaactaaactcatattcaggaaaggcgtaagacaatgttcgaaacgaacaatccacgaaagcctctaacgccaataaacgagcaactgactccagagagtaaacatctcgagcgcctgaacacgacatacattgttgatacgccatctgaggaacagaagaaagggcgtttattgggagaattaccggaggaaaaggattccaattatcaaattcccccccttttgagtggttgttgtccgaaaggaccttctgtttaaacatatgattatatggtacaaa

SEQ ID NO: 58653 - DNA, 864 bp, Heterodera glycines
atgcaaagtgtccaatcgtcggccaccggggcagtgaccgccgcttccaccgttccgttgagcattcagaatgaagtttgttttcgctggaagtatttaaataaacaaacaagccaataaaactgattttaatttcagattttgtggatcaaacaggacgctctccaagttcgcaacgccgtcattctcttggagcaggagaaggacagtcttcgcaaagcaattcgcaaactcaaggtttgcggatagaaagaaacaaatttaacggtgaaatttgcgttgggttggtttaagcttttttaattttcatgatttttttacaaaaaaatccctttttagttggagaatggccgcctgaagacaaaggtgaaaactttgaacgaaaaggtggcaaagattagcaacgaggaaatggacgatgaagagggaaaattggcgcctgaatctgaattggactatgacgaactaaaccgaggggatttctacctaatcggaggtgtccatggtaagtttcgaacttttttgtgaagtggtaaacatatataaaatcttgaaagttgtgaaagactgaattactaaaaacctataaattcaattttagacccgatcagtcttcgttttgaagctgcgatccgtgaccaaaatgccgtcgaacataaaagtgccgaacgctactactggtacaaaatggcggaattctttggtgacgaggaagccatgaagagcattctgcacgcgcagaatgtccaacaggccgaagaggccatgaaaaacatcaaaggcttcgacgttgccgaatgggacaaagtcagttggaatgagaaacattggtggaaaggaaaagggttttcaggtcaaacttaa

SEQ ID NO: 58654 - DNA, 374 bp, Heterodera glycines
cggtaggggtcaactccgtctggccaactccgtctcagcaatgttcaaaaagctataacttttttctttgttggccaaacttcacaatcatggtatcattcgaaagccctagatgtttagaagatatttataagctatttctcagtgattaatcagctctcaaaaaagttgtcagttgaaaaccgcaaaaaaggcagaattttcgaagttttttatttctatctttttttatagttcgaaattttctgtaatttttagtaggctaatagagcctgtgaagagcttttgaatgatatcaagattgtttgattcggtcaataacttcaagagttatattgactcaaagttggctcagacggagttggcccgttccg

SEQ ID NO: 58655 - DNA, 263 bp, Heterodera glycines
aaggattcgtctccccataaatctggcgcatcgttcggggggactgccccgaaaacaaaaaaatcgatttttcaagtgtccgtttggggtactcaaacaattatggggagcaaaaatccaacgcagaattaaagtacaggctatagggaagctattccggaaggattcggtctccccataaatctgggcgcatcggctcggggggactgccccgaaaacaaaaaaatcgattttttcaagtgtccgtttggggtactcaaaca

SEQ ID NO: 58656 - DNA, 255 bp, Heterodera glycines
atggccacacctactcaaattgaattatattttaatgttgcgttgagtttggtcaagaaagctggtaatgtaagtaccatattagtaaaatgtacaaaccatttttaaacggttttagcttgcgaagaatgcatatgctcagcctttgggtgtggtcaagacaaaaagctcacccaccgattttgttactgaaacggaccaggctgtggagaaacttttaatttctggactttctgaacgttttcccgaccacaa

SEQ ID NO: 58657 - DNA, 1055 bp, Heterodera glycines
atggtccccaacaccgcaaagaaggacgttcttcttcgactgttccagctcgaattgcaaaccgcgaagaagcgtgaccgtaagtacaccaacagactgtcgatttataattgaccaccgaagtcaaacggactgatttattattcgcggattcgttcttttttccagccgtcaatgggaaaatacgcaatacgatggtatttgtgaacaccaagcgagacgctgatgttgtttccacctacttgaaccaattcgactttaacaccaccacaattaatgggtgagtagtccgttctctttaattcagtcttcttccctctccctttaaagaaatcgtccgcaagaaatgcgtgaaaaggcattatccgattttcgtgccggcgtgtaccaggtcactaaaaaagcccaaccatttttcaaaaattcatcagattgtcgtcacaacggatgtttgcgcccgtggacacgacctcaaggatttggaccatgtcatcaatatggaccttcccgcgtctggagaagggattgacgacagtttcacgacgtatgtgcaccgaattggtcgtaccggtcgtttgcagcagggctcggctaccactttctttgacattcaagccgatgcgaccatggcggagggatttgtccaggcaattttagaaaacaattttcatgctttaatataattttcagagtcttcaagaagcgactcagccggtgccagactggctcaacaaattggttgctcgagagcccatcgctggttctggccaagtcactgacgaggagctgcttggcattttgtgaaacaaccctttgatcgttgcaatctttttcttttatcattattgcgatcatttggatttttattattatatgcttaccaatgattttgatcttctctcttttttatgtttacaaaatgtgcttggcgcgagataaattggagttcatatgtgcctgttttcttatgtttatttatattgttatcattcgaaagcactgagtttgaagaagttaatactaagaaattaagcaatacctattttaacatttaa

SEQ ID NO: 58658 - DNA, 664 bp, Heterodera glycines
atgggaattccatggcacggatggtgggaaatgtttcatcccggacaaacattatatgattcaagtgggaatgaggtacagtatttttttaagtttgataacgaaatctttctatagataattagtatacgtacatatgtccagaatcataaggagccggcaaaatctgcctccgaaagacataagtggggcagcaatgttgattttctagcagctgcaaaattattccaaattaatgttatcgtatgtagtccaaaccctcagagaaaagaagattttggaatacaatatgtatggaatatttatactccggatatgctggatacggtatccatttaaatacgataaatcaaaatattaggcatatttagatgcttgttggccagtcgagagaatataagtcaatttttatattttttgaattgggacatttcaaagcaattatagatcctgcggagttaaagcaaaactagcttattataaaattaaaagcatttgcataattttctttaaataataacaaaaatttgctctttaaataatcaagtataattttattaaaatagtaaattgatttgctttttaattggttgattaatcatattcaaatataattagttaaaagattaaattaaaaaccaatataaaatatttagtttgctta

SEQ ID NO: 58659 - DNA, 501 bp, Heterodera glycines
atgcattttttgggtcgcccgtatctatcggctcgttttggtaagattgatcagaatagtgtgtatttaaatatttaaggttaaatactttttaaataaaattacacttttcttgtattgataaaaattaaatgatattaattaataattgcatggggtttaatgtatattatattttcagttccattcattatagttggtgctacgtcatttcgcgacaagtgcaaaaagggcacttcgcgacagtgcaaaaattgggcacttcgcgaaaaatgcaaaaattgggcacttcgcgacagtgcaaaaatggtgtaaaaatggggcgtttcgcgacagtgcaaaaatgggcacttcgcgaaacgtgcaaatttaaccgaaagagaccgggcctcatcagtacggtgtctctttgggttaatttatttaaattaattattatttgtgtttcggccctaaaccgtatacacacaaagccacagcaatcaagcaaagcaaaataaa

SEQ ID NO: 58660 - DNA, 735 bp, Heterodera glycines
atggatttttgtaaaattttgctggtggagtgtgagttggcagtgaaaaagtgcagcccaaacatggcccgtttttaaaccttcgaattgcctcccgcccccattcctctgtgaagtatttgaaaaaccatattatgaaagagaaaagatggggaatggggaggaaatccctgtcaaatttttgtcgcgaatgaatgaagaaatttaaaaatgtcgggttgaaacataactcttcgggaggaaattttcataaaaagtcgaaaaaaaacaacagaaatttttaagaatcctttttccagaatttgttatggttttttaaattcgaattctttcactccaaaaatcttgtaaggtatttgaaaggttatattttagaattcatataaattccaaactctctagatagagatccataaacatttttttaaatgtcagaaaaaaattctatatcaaataatatttctcttctccttacctttccttcctcattaattagtggaattgattaattctaatggataaatgttttctatgcacttgaaaggacaatcaattacacgccctcccccccccccatttttttgtatttttagtcacaatgttatagttgagagtaaagtgaagcctataaaatttatatttagttgtattttagcttttatttgttctatttgctgccttcaacctttgacaaaggctatggacccaacagcgactgtgagttttgataattaa

SEQ ID NO: 58661 - DNA, 172 bp, Heterodera glycines
atgtttggtggcattatggttggtactgttgcggacagattagggcgccgtaaatcacttctgtacaacaatatattggcgatcattgctgcggcactgataacactggcaaaatatgtgaatatttattatttgatcatcattggacaattcattattggatcgaatgttg

SEQ ID NO: 58662 - DNA, 562 bp, Heterodera glycines
atgtcccaccaaccatttgctaatttcgaaattgtacggcttgaagcgatgatcattgggttagaaatcgacaaggaccaactgcaacgagatgtttatcatcttaaaaataggaaaacacaaatccataacaaaaaaatcgaattgctacaacaaaaggaacaattaataagagaaataagtgtgttgagagagacaaaggcaactttggtcaacgagatgaaagatttgagagaagaaatattggaattacgagatatggatggttccaatgacgacgacccactttgcgccgtttgctataccagaaaagtcgtcagcgtttaatgcaaaactaattttggatattttagagaaattatgcatgcattccatgtggtcatcgtgccctctgcaaccgatgcgccgaaactgtttcaattgatgggcgttgccccttttgccgtgaagaacttattggggtgtttaaaatattcagtccctaatttttttgtgaccgaacacacacacacattgttgattgatgatttttctagaattaattttagcacaaaataataaa

SEQ ID NO: 58663 - DNA, 711 bp, Heterodera glycines
ctgttcaatgcttccgagcattttttcgaaggggctgagaaactatttgaaatttggttcgataatgaccagcagaagcgagaaaatggccacaaaagcacactgagaaccattcccgagaacgaactgcggcaacttctgaacacggccgggtgccacattctccaggcaactaaaaagcagagaatggcaataaaaatgatagatatgtagccattgtttccggaagtttagtccgaaacgttttatatataggcttacgagaatcaccgtgcacaatacatatgacatcaatttgagcaaaataataaactaatttgtcaggtgcttagaacagctgaaatcgatgcgtatttgctaaggtaaacacaaggccttctaattgtaagtattccaatgttctttgtttctttgacccattagcgagagcagcatgttcatctcggatcgacgtctcattttgaagacgtgcggacagacgcggccgttgcttgtgatcgaaaagttgttggagttggcacggaaacattgccaaatggacacagtgaccaatgtgcgtgtggtgggaattggccttttgctctgagttttgtcctttcaatctctgtcgttattgctttgccaggtgtattattcgcgtaagaatttcttccggcctcatttacagccccaactccacgccactttcgacgaggaagtggattaccttga

SEQ ID NO: 58664 - DNA, 140 bp, Heterodera glycines
atggacaatgccgacggggaatgtgccgaagacggatgcgtcagcgatgttgaagccggaagtggtgccgaggacggggatgaactgttggatgacgacggcgttaatcaacagcagcacttgagaagtgatgaatcaga

SEQ ID NO: 58665 - DNA, 439 bp, Heterodera glycines
atgcaatagtaagtgaaccattttactgtatgttacacgtatcatattgtgttgcaatgaaaggagatttaaacttaattaattagtattttgcattaaaacaaacaaaacaaaaaataacgaaggaaaacatttctcttgacttttttgagctttatgaacaattttcttctctacattattatcattcatatgtattaaaatttcagttgcagttgcgtcttttttggattctcattaaaaagagaatcttttattaccgggccattgaccagaatcgcatatggttactcgagtaatggaaaattgtgggccaactcggcgaatcttgaaactgcacgctcctatggagaaaatgatgtggtcggatgcggcgttaatttggccactcgacagatctttttcaccaaaaatggaaaacgcatgggttggtaaaata

SEQ ID NO: 58666 - DNA, 619 bp, Heterodera glycines
atgctaatttcgaacattttgactttttgtttgaatttgagcccggggctcagaattcagaaggtatctcataaaattcttcttttatactacagtacgtaatgctacagaacattatttatttgtatcacttacgcattttccggtaacgtaaatttctttcgaataaaactcaagttcaagaaaaaaataacaactttttaaatttcaaaaaataattacaaaaatcgttgaagagttgaaaaattttcagaaatttttcctgaaattttcatagaaaaaactgccacttcggtccaccagaaatttaaaaaactttattttttagaatttaccattttataattatggaaaatgaataataaatgaattatgttttttttgttcagatgcgggcggcttgtacattttggcaaatgcttcatctctcagtgactacttcccattcgttatgctgttcaacaacgaagacatgatttatgcaaatttcgaacaggaattcatattcaatttggccactctttaaaaaacgattgcttttaattatttgcgaaaaactgaattatcaaattattatttttttgtcggcgaagagcgcgcgtgaatattttgctcataa

SEQ ID NO: 58667 - DNA, 955 bp, Heterodera glycines
ggcgcggagaaagtactttctgtcagtgggcaaattcacagcccttccatcgagcctgacagaatggaagtacatggtaattcaagtctatattcacagataaacatcggagggcgtcagattaaaaattctttgagaaaattattcactttcaatagatttacagtgaaagcgatttcttcaatagcaaacaaagcttacagtaatatgtcacagtaacgtctttcgaaatttcatttagacctggggaacgtcaccgctggtagttcttctaccggtcggtctttacacacgttgtgtacttttgcctcggttggtgctgccaatgattacgttcccgctggtgttgtcacggctccgttggctctcagcggttcaaaaatcaattgcatcggtcgttctcttgtcgtttttcaagaaggttcgggttttgtttcgcttttcccttaccgtttcagtttttgcttgattatttccattccctatgtttcagggcgttccgcattgggaagtggcgtaatcggttacgcgaaggacacgcgcattttctcggacgagtttgacgaagtgattttccattattagcaaattgcagcctttttaaaatgttttttaatttttagatctttcgtaatttgattacacagtacagaaatgtgaacgtctcagattgttggcttgttctcagagacggcacaagttcaaatccagattgtcgcgcgttcttcgacatgttggatgagattttggcgacggaagaagtaagtatcttatcattggattattagttaaaattaacaacttttcagaaaccattgctttttctattacattttcaaattccaattaaatttactcattttacgctttttcaggttcaggaatacaccggacctcgaaaggcgatctgttcgttggtcaatgtggaaaaccaagctgtgaacgggtcaatcac

SEQ ID NO: 58668 - DNA, 808 bp, Heterodera glycines
  unsure (1)..(808): unsure at all n locations
atggtcatagtgtacggacactccactatnatacaatttaaaatgctgaaaaccaatcaaaaatngaaagtgaattaaaaaattttattttgtaattttgtagcgttttttatgggctatcaaatagcaccattcattattttgtagatgctctttatacatttagcaaattctcaaatatttttagattaatgatagtatttttttttgaaaatccattaaaataaaaaaatcctttcctaatttagcgttttttaatatataaatttaaatgcttttccttttcttactactgtgcataagttggacaaaatgcaaaattttcatttatttaacttaatttgaattaaataataattggaatttcaaatatttttttcgctatattattataaattaaattgagatataacactcaaaaaatcattgttttttaattaaaaatattttctttttagtcccttgaccctaattctgtgccggactctgctgaaactgtgataatgtccgacttcgccttcgctatttcagccattttcggtacgaaatttattaatttttaaatcccattaaattacgtccatttaaatctaataattattattcttttaatatgactgtgcattttctgactcattctgcgtaatgaagtgatatgaattcagatgaaaaagaaaaaaattttggtttggtcaaccaaaacgacaatatttatggtgataaaatgattataaaaaatgcaataataataatattgttttggggttctcttcttttggcgaattgagaacctgttaagtttacagca

SEQ ID NO: 58669 - DNA, 772 bp, Heterodera glycines
atgacagcgaaaacgaagggaattctgagcaccacgaataaaacgccgaaaatgatggatgcgacgataattttgaagaagaatgcgccatcatcaacttcgaactcggaaaaacaaaagcgaggcatttgtctttggtctgaaggtgggaaatttgatagagaattatgaaaagttgtcaaaggttttcggtacacgcacgaaaaaaacgtccgatggaggtgcactgtgtgtgctgccatgcccgcgtgacaattgcggacaaaagtgacagcacatgtccggttttctcggacaaaaagaacaatcatttgcctaagcccccgaaacaaaatgtttgggaggcatttaattcattagacaaagaagaatttggcggaaattcgacggcaaaaaactcgagcgcgtgaaagccgaaccccgaatcaggacaaattgcggctggatggcgaggacatcgtgctctacgacagtcgcactgtcagaattggagcaaagaacgttgtgctcgtttttgggtgcgaacgggttgtctcattaggggccaaagacagaatttatatttaattttttagagtttggacatttgagcaaaaacagtgcaacatggcatttggacgggacaattatgccgaaattcacgatgttattacggatcttggtctgcaggtcgaaggatacgcagaaaaattgaaggactattcgacgcggcgacattatgacgggcagcgcattaggcagagcaactttcaatagcatacatatttaaaga

SEQ ID NO: 58670 - DNA, 1056 bp, Heterodera glycines
atggccaaggaggaggagacaggtgggggagggcgaaaagcattggaaaatgccggggaacactcatttgtcagggaggaagcacgccgtcctttacgtgatggacttgacggggctgaagtatgaccgcaatctgatcactctcttggcaatataaaattggccaatttggggccaattagcatcattcccttcagagaggggctctcagtgccatttccgcctttataaccgaacattacgttgagatgatccacgaatttgtgctcgtcaatgctccgagttttattagcacaatttggtaagaatgcccactaatcgacccatcgatcgatcggatatttatggccaaattaaggaccatcgcaaagccattgctgcccgagagaacacgcaacaaagtgcaaatattgggcaagtcgacttggcgaagcgaaattttgcaaatggcatgtgccgaagcactgccatcgttctggaatactgaaggggaagagaaggtgaacaaagaaaaagaaatgccgaaaaaggggaaaagtgatttggaaaaggcggcgattggcattttgggagggagaaaagactgatttggcattcattacttagtaccattttacagcacttcttggccaatctgaagcgatctccaccgattgacgtgtcaaattaccacaaaaatggtcagcttccgcccggcttttacacttcgcttacaattggcgctggcaaatgcggcacaatcgaagtggaagcgacaaaagggcaaacgcttcgttggcaaatcgaatcggacggccatttttcctttgcggttcacttcaaaagtgacgaaacttcgccccgtctcgtctacccacgactgaatgttggtggaagaacaaaaactgatcggacagaacgaattgtgtgccatttcagcaaattcccggcccaacttttgtgcctgtcgacgaccatttgcaatgcgacgcgaccggcgtttatcagatttggatttccaacgaacacgcgtggatacactcgctcaaaatgcgttaccgaatcagcaaagaatga

SEQ ID NO: 58671 - DNA, 534 bp, Heterodera glycines
atggctggcgcgggtttccaacatttcgacgcgtacactcagctgacggaccgctcggaggtggaggaattggacacgcttttcagacagtggcgcaaaacgcggagcaatttgcaattcttcaagttctttttcgaggaaaatggatacgaatgcgaacaggtcaaaaaagcagcggaattctattcgcaaaatgccatcaaatccgagcagttattccaatcttgctactacggcaaacgcgaaatcccatgctgcgatttgttcaagccaaattgtaagtgcggagattgacaatgagctgaccccgtccaagcgacccccccccccacgaattcttaaatagattataaatgaatttattaaatttaaatattaaaaaatttaaagtgctatcttcgctcaaaactcaaatatttttactcagcaaaaatttgcaagttttaaaatttagtgactgtgaccgcctaatttgaaaatagtttttttgcaaaaaaatataaatctatgaaaattcagaaaattttgaataaa

SEQ ID NO: 58672 - DNA, 285 bp, Heterodera glycines
atggcacgaccccaacggaacggcactgaaccgatcgcttataaagagtcagccaaagacgagttgcgaccggcaatgggactatcgggaagtgcgataagagaacagcaacagaagaagaagaagacgaatatcgaaggaagagagaaaatggaagaaataggaggagaagggaaggaaggaaagaaggaagagggcggaggaggaggaggaggagcaacgggacgagaaggaagcggatgcacactgatgtgacacaacaccggtcaatactgactctggtta

SEQ ID NO: 58673 - DNA, 822 bp, Heterodera glycines
atcaccgcctactcgcgggacgtcaagttggaggtggacaagcagagcgacacgttcaagcccggccttccctacagcgttgtggtggcactgaagcaaatggacgacacgccggccaagtcgtcgctgccgcgccgtgtccagctgaccaccttctaccgtggtgcgcaggcacagcaacagcaaccgctgcaacaacaacaggaggacaaggaggtcaaggtgttggagttggacgcccatgggacagcaatgctacagttgttggtcagtttactgtaatgggaagacggtactatgtgattagttaattaccggtctgatcaactttgtatataagctaagctgacgatatctgatcactattttttaattgatctgttaaatgatagtatttgattgtttttattctcagtattttttgatagaatcgatcgactgacacagtatatcccttaattacaatattacgatatcaacaaacaattaattggtctatcaattggcaatctttgattcttctctgtttcactcttcgtttcttgattgagctgctgatcaatattcattactcaattaatatgtagataattaattcatttatcggtcttcactagtaccccagttcaaccgatcaatcgatattttttgcatgaaccgatcaatctttctcactacctcataattattcgatcaatgttattccagatcactaactaatcgatttttcactcccagttcgatccgatcaatcaaagcactctccttgcccatttcagcccccgctgaacagtaccagtgcccgggtggaggcctcctacg

SEQ ID NO: 58674 - DNA, 394 bp, Heterodera glycines
atgtttccaaggtgtttttctcttatgggcttggcgttggtgcacttgtggcattgggctcatacaacaaatatcacaacaatgtttacaagtgattaaaattagcatgcccggcggctaattcatttggattaattagcgttaattaattcattagcctaaaacaaacaacccccatttacagacaagcattgactgtttgctgtgtgaacagcgggacaagtgtttttgcgggtattacataatcccattaattaattgttggggtaacaaaaaaattgtttaattgattttttaattgtttcttgtgccttttgtatcaatttagctaatgatccctgattagggggatgacaaaaatctccgccgctcaaaaaatccgggaagaccaaaa

SEQ ID NO: 58675 - DNA, 164 bp, Heterodera glycines
caaagtcaggcggactcggacaatgatgatgcggcgccgaagggacgccgtggccctggaggcgggcccggaaagcgccaacgcgtcaccaaatcgccggccaaccccaaactgtacgccaagctgaacgcatgtttgaacacactgctcaactacaagacgag

SEQ ID NO: 58676 - DNA, 183 bp, Heterodera glycines
atggctgattggaatgattttttcggatctttacgaaaatatttgaattattttcgcgcacaccattcacaaggactttcttataacgctttaacagcaagcagtaatactcagacaatttctgacgctgaacttgctggccttttgtcatggactcggtttgcttcagctgttgcaaaaaaa

SEQ ID NO: 58677 - DNA, 1030 bp, Heterodera glycines; identical to SEQ ID NO: 28017

SEQ ID NO: 58678 - DNA, 304 bp, Heterodera glycines; identical to SEQ ID NO: 51570

SEQ ID NO: 58679 - DNA, 101 bp, Heterodera glycines; identical to SEQ ID NO: 53576

SEQ ID NO: 58680 - DNA, 589 bp, Heterodera glycines
atgctcctcgccatttgtgtttccgcccgccaattggccgtcatccatctccaacaaatcctccgcgcattcaaagttgcacaacagccgacggtgtcctgcacaaacattgccaacatcgaacaatgccatattgcggtggtcagcaactcggaacatcaccgcgacaaacggtccttccctcctccacctttcgctccctcttccctccttattcatcgtccgtttccatttcagtttcgtttacattgccacaatcgacgaaattgtcgtgctccaatacgtcgccaaattgggcttcttttctccggtcgctcaaatcaaaacggaggagccgtgcacttgcatttgctccgcttcgtttggtttcgttttcggagccgacaatttccattttgcgcgatttgatgacaatttcgcaatgccttctcctcttgtggtggaaaattgtcccttcgattttcccgtcgccgctgtcgaaatttcggacaacgaatttttgttggcatttcacagtaacagcaaactcattgacaatgaatttgctcgcctaatcaatgctcatttcagactttggactgttcgttaa

SEQ ID NO: 58681 - DNA, 9261 bp, Heterodera glycines
atggatggaggtgatgtgcttgtgattggcgttgataccagtcgtcctccaaaggcaacgccgttcgagaagttcatgcttcgcaagaaaggagttgagggactcacttctgaggatccgctgattggtttgtttttctcatgtgtgcattattattaataatattttagttggtatttgcgcaaactatctgaaaaacccttacaaattctgcggagattattacttccagccttgcacgtttgttttccgttgtgatatttgttgggcaattgtgactaatttaggcaggacgttttggagccaactatgctgtcatacaaaatgagctggattttggacaaagttaagaagaaccgttcaaaaccaccgtctacggtaaaaaataattacaaataattgtgttgtacttaaatgataagtaaaataaatttaagattttcatcattcgcgatggtgttagtgagggaatggttccgaacgttagttgggctggaagaatcacgacggattgtaaaagtgtgctttagaacattcacgacgaatttccttcctatgtgaaggcgtgtaagaaatatgacccgacttgggagcccaaattcgtctattgcatcgtcgacaagaatcacaacaaacgtttcttcgttaaggggcagcaacaagtcgagaatactgctccaggttttattcagcgaaaatcattttgttcatcgttttttgtaggggcggttattgattcgaaagtggtacgcgtcgacatccacgagttttggatgcagtcacatgttccgctcaaggtttcggttggaatgacaaatttatctatgtattttgttttaggggacatcaaaaatgccacaatacatttttcccgtcaatgatcccaaggccaacaacaacgaattgcaggggtaactggcaatcagttgcggtattatacacaactaattttttgtagtttcttgcttgctctctgctgcagctggcaaattgttacgctggctccggctttgccaaattctcgtgcccaccagagggcggctgtcgcaagagatcgcagggtttgttagttgtagtgacgttttcaaaaatttcattaaggtcattctggagcatgggcagcctcttatttgcacaatttgccttcagcgcatttacgtgaaccaggtgcacatctccacaacatgcggccatttcttccattctcgttgtttgtggcgctatgttttccgtcacaacggaaggcattgcccggtgtgccgtgggcgtttgaggccttggacgattggcgttcttcgggagcgtcacggagagtaatatcgggtattttgatttgatctgacataatcttgatccatgcctttcgacaacttttatttattctttcgaacttaatttttgtttaacttttgggattgccacttggcgcttgccttttattttgattttgtgcgcataaatctgcttgctatccaatcaaatagattgttttcttcagggcggtgcatatattacggttttttaagtaaatgaaaagggaaaatttttggcaatcatgtgaccattggtcctgaaaattttttaaaatttttttttctgaaaattctaacaatttctgtgggtattttgaggcgctgagcacgaatccggcttcattttaacctatttataacacctgacctgaactcgaattaagtagaaattagggattttttcgatttttagtctaaaatggtttaaacgattttattgaagcactgatgagtatcagtcatgactttcagttcgtttccgtgtgtgtaaacaaaggttgaagaaaatgtgaaatttaaaagaagttgaatttttgttagaatttgtcggggttcggaattagagtactcattgggtttgggtccacattttggtcctacacttcagaataaaaaacattaactatactaatttgatgtgtaggtatgtcacattttaaatggattatttatcgaagcgaaaacctttgaaaaaaagaaagtaaaaaatgaggtatttatgtaaacaaaaaaacacaggagatagtgttgagaaaaagataaacaaaaaaagaaagagaactaaaggaagaaagaaagggagggaagttggggatatagtgagtgacactgggcttgaccccatagtgccttccatgacgcactttgtttgtgttgcatttttgatccactcacataaatttttatttgtttgtttggttggtatttacttacacataaatgttgaaaatattgttttttttaattacaattgagatttttttcttaacaatttaagaagaaattcagagcattgtttgaaaccaaatattaaacatgtcatctctttctgaggaggtcaagaaagttaagtaggctgctgtaagactcaatgtatttgtattcagtagatttttactaattgtttaagaacattcctcctccggcagcttgtaacagatatgtcgaaggcttttcaagtgtttatgtgtatgtttgcagttaaattaatgcgtttgagacactgaagttatttaggttcgaaactcgaccatcttcacatggcggtgcttttgcgttccgctatgacgttgaaatggtgcagctcagccgaaacaaaagtttgacttcgggcggtggcgacgatgggaaaaatggattgcttcgcaccgtttgtttcgatttgatcaagttcgtgcacgactcgacgcagggatttggacaagcggtaatttcctcttaaatcgcatgcaattattttactttacttttaggcacacttcgtttacgacaaccgtaaaatcttattcacgaacaagcgaatcgaacaatttgtttgttttttgtcttttaacattatgtaattatataattttaggcattggaaattgacacggaaaaaatccaaggaatcgttcgcgatttcttgcgtgggtcttcggtcaaaattgagattaaaccttgtcagactgataaacatgagctggatctcaacgacgtcttttcttccatctcgcgccgtcctgatgagcagtctgacagatctttgcgcactttccttgaaatgctgacttcccagccatttctcaatgcgtaattagcagtatttaattatttttcaagtttaatcttagtgggacccatgacatcattggtgctggtcgtctttttaagcgtcagatctgcaaagagctcgaagatggaattgtcacacgcgagggcattgctaagggagttcgcgttattgacaacaatggtgaaccaaaggcggctttggttgctgacggtttgctttgttttctgtttgttgagtgcttaagttttctttttagtgaagacttgtgcattcttcgcaagtcgtaaccttgaggaaatcgtcatggagatggtgcagaaaagacggttcaacatcaacaatgcttcccagatggaccgattctggtccgatttcaatcacttgtttcgcggcgttagcggctacctgacctatgcaccgtcgcgcgtcattgtcattgatgcgatcagtcaacggaagatggccgagattaggttttgagagttttgtggatcaattaaaacttggttctagttttgacgttgatggtcgtcctatgtctatggtcgactttttccgtactaagaagaacattccgataaatggacaattgccagccgttcgccagcaacaggaccgagaggttttctttttttaacaaaattagaactgtttttaaccacattatcggttgtagacattgttcccaatgtcgtgtgttatcatcttgcctggtcagcgagtgcccatcgacaagatgtccgaatttatttcgcgcgagcttcttagtgtaaaatatttttttttatccctcgcattctcttatactattataggcaaacacgactaattcgagcaaacggtacgccgacattgaagcggaagtgagaaaaatcgggaccggcacgtcaagtgcatttatgagtcattttggagtgaagcttatcggtggaaagaatgatgtgaaaattggcatgcacgaaatgccccaggtaatctattcttacctttttgttcacctaattaaccaattttagatcaaatttggagggaatgtgatgggctatttccaagacagagtagcaatcttatttaaatcacttgctatttgctcgttataggtgaacccaggtgttcgttttctcgagacgagcactttgatgaaggcatgggtcgttggttttacgcgtcaagttggagagggagatgtccggtagaattatggaatagggcattcgcctgtttactgttttttttaaattttagtaactttattcaacaagttgtggttatgggtcgaaagaggggcatgcatttgccagacccgcaatacgagtgcatcgaattggagaacatttctgaacgtatgcagcaactctcggaccgccgaattcagtttttgctctacatcgacaaaaaattcgtcaaatcacacggtggcaatgcccatatttttttttgtttaacttaaatctgtagcaattttgaaactcaacgagaagaagtatggtctgctgactcaacatgtcacattcgaagtggccagcaaagcgcgtgctatgactctgtcgaatgtgctgaataaaatgaacatgaagtgggcttagcgaacattcagtgactttattttgttttcaggcttttcggcttcaattacatgcctatgttcccgcaagcgtcgttcgtttttctgcattaaaatttcttatattctatcttatagtaagagcaaattcaacatggatggaggtgatgtgcttgtgattggcgttgataccagtcgtcctccaaaggcaacgccgttcgagaagttcatgcttcgcaagaaaggagttgagggactcacttctgaggatccgctgattggtttgtttttctcatgtgtgcattattattaataatattttagttggtatttgcgcaaactatctgaaaaacccttacaaattctgcggagattattacttccagccttgcacgtttgttttccgttgtgatatttgttgggcaattgtgactaatttaggcaggacgttttggagccaactatgctgtcatacaaaatgagctggattttggacaaagttaagaagaaccgttcaaaaccaccgtctacggtaaaaaataattacaaataattgtgttgtacttaaatgataagtaaaataaatttaagattttcatcattcgcgatggtgttagtgagggaatggttccgaaatccctatcttttaaacaattgttggtttcgaggttaattccatttcgagcaaattaattctctaaaactacatcagcagcaaagtttttgactgactcatagttatatgtttaattaaatccgacttttaggcatttttaaaacaaacaaaaacattaatgggggaccagcttcgcaattttcaaattacttccaaaatgtgcatttgggagtttttttaagtgcccatcatcctttaaattgtctcatttaaactttattagcaattggaaattgaacggctccaaaatcaattggaggagagcacaaacacaatacgaagggtccaagaggaattggaaattgcgaggaaaacggccaatggcgttctgtgggaattggaagagagtgaattggcaccgaaatcggaggcagaaattggcgaattgaagaacagaatcactgttttggagacacgacttaaaaaggcattcatttgcgaacccaaaatttggattaattaaaatttgtagaaaaaagtcgaaatggaactgttgcaagagacgatgaagggccaaacagaatcattccaccgcgaaattttggaattaaaagccgaaaaaagggtcaaagaggcggagattgcagaaatgagggaaaaattgcgaacgaacgaagcaaatggtcagaaacgagaggtaattaattaattagcttaaattgagtcaatcggttgtgcttttcgaacttgttattaattgacgtttcagtacctggaccagctcaaccaaaagttgggctctttggacacaaagaacgaaagccttcgcgacgaagtcggcactttgaagaaggggaacaaagagatggagcaggttttggcacggagcggggggaaggggtcgaacggaattgaccatttaagcgctacaaacaatgtgaggaggaaaaagcggcactccaacaggaaattaactcacttttgaaacagatcagcgcttcatctgggttattttccccattttttgcctccccctcaaaagcatctttcagctcttccgacatcgtttcgtcacgcctcatggatgagattgaacggctgaagcaacagaaggcgcagttgcgctgtgagcatgttcagcttaagcggaaatacacggagttggaaacggaaactgccaaattcggtggacttgcggtcctttccaaaatctaaatgcaatttttaaattcgttttttattattctattcagaaggaaatgaaactgctgaattcgacagtcggtgaattgcgcagcaaaatcgaatcggccgaagctgagaaaaaagcgattgaaaatgaaaatgaactgctcaaagaacgccaaaaaaagatggaaaccgaaatgaaagagaaggcatggcattggcccattgttaagcggctttttagtgcaaaggaccaattgaattggcatccttttgtcctttgctttttattagtcacttttagctcgaaaaagaatgattaaaattattcaatcagatttgtcaaattcattcggtgtttttgttggtgtcattcgatattctaaaactgctttcatttggctaatagtatttccactttcagattgataaaatgcagcggctgtgccgtgagaatgaggagtgtgagaattcgcggctgaagttactccaatccgagttggaccttcagaggagaaaatgcgacggaatgaaacggtcaatgggcgaattggacatgcaatgcgaaaaactgatggttgattttgaaagacagcgaattcaattgaaatattaattaattggcaatttagacgcaacttcgcttaacggacgcggagaaacgaaaggcgcaaaacgaaaacgaattgctgaaaagggaaatcgaaaaactgagcggccaactgacggaaaagatcaaaatggaaaatgaaaacgcatcgctgaaggaccgcagcaaatggctgaaggacaaaatagtctttttggaggtgcatttcaatgcttgtaaagtcatgtcattcctaaattttaagagtgagcttaaagagacgagcactgaccatcggacggtgccaatgcgaattagcatacataaaataagcaaaatgtttaaggaattggcaaatttggctgaccaattgggcgcaacttctgcggggacatcaaagggaaaagagagtgaaaatagcggagaggtgagaaaggtttaaaaacggcaccaaaattggcaattgaaggtgccgaagatggaagcacggttgaggcagcaagaggcggagcttcgctcattacaacggaaagtggaacaatacgaaagggagaataattcacaaagagaggaaatggagaagatgagagaagaagcgacgaaaacaaagcaggagaacatcattttgagacaggtggcagagacagagagaaagagagagacggaggagaaaaggggcgaacagagagagagatgggaagagaggggaggacgacgaaagagaaaagggatcgtaaagagagagagaggaggacgaaagaaggaatgccaattataaattaatgtattgaatcatttaagaattttgacgtctgtctgaagaaggcggaaacattcaaatccgaattggacgcattcaaagaagcgaatgatcagctgaaatcagaaaacgagcgagaaaaagtgaggacaaaaaacaccaaaataaagaattatggaaaaccttttgttttgatcagaattccaccagtgatcagttgtacgaattgcgagccgacctcgaacagaaggagaaattgatcgcctatttgcaaagcgtcgttcagccgaagcaaatgcaaaagctcccgcgccatcgctcctctctcctctccgatggctctgatctttcagtccgtcggacaattagttctgtttggatttttagagattaatttaggaaatcgaaatggagtacaaacagtgccttcagctggaaaaggagagaaatcagctgaaaaataatctcgagaatcgacgcagaggtgaaattcctttcattgataaacaaattacgaaaatgattaacagggcacttctcatttcattaattaatgccttggctttagtgttggatgaaaagcaaaacgaaatgacgccgacacggccaatgctccgcgaagagaccgtacgttttcacgacgcattgtcaccagcgcgcaactctcagtcgaagctgaagcaagcctttgcttttgattttctatcatttggttttgctttgcaggaacagttcgactgactccgcgcacagtgcgccccgatttccgggcagaatgcggcacgacattccccaccggtggaagcggcactttgtcacagtggcaacggtcctatcggtctctttccgtcaagttttgaagtccctctatttccagaataaatgccaagtctgcatggacggtctcccccactttcgactcgtcctccgatgccgcgactgttcccttacggtgcacccgcactgtcgtggcaacgtggtcaacacgtgcggtcttccgaaagaatggtggccatttctacctggacacacattcgatctccttccaaccaatgacccgctggggtaaactttggcctttttcctccgcctccgctgctttgcccagtcctgatcaatcaacccattggctcaacgcatgggcagtgatcgacgacaaccgactgtccttttacgacagcgatcagttggcagtcagtgaaggcgcactgccctttttgagcatcgatttggaccgggaccactggcgcatttacaaccaaacgacggacaaaccgctggacgggattcggggcactgaaatgtccatgttgatcgaacttaaactgcccgagtaacaaaatacagtaaaatgatcatttttaatggaatattctgttcagctacattctgttcatgttggctccgactgttcaggccaaacaacgctgggtctattccctgcaaatggccaccag

SEQ ID NO: 58682 - DNA, 191 bp, Heterodera glycines
actcaacgagaagaagtatggtctgctgactcaacatctccccttcgaagtggccagcaaagcgcgtgctatgactctgtctaatgtgctgaataaaatgaacatgaagtgggcttagcgaacattcagtgactttattttgttttcaggcttttcggcttcaattacatgcctatgttcccgcaagcgtc

SEQ ID NO: 58683 - DNA, 114 bp, Heterodera glycines
acaagaaaatttattcaatgctttttagacttagctcgtcaagagctttcggatgataccaaatttatcaagattagatcgttttaaaaaagttagaagtgtcaaatctctcaa

SEQ ID NO: 58684 - DNA, 477 bp, Heterodera glycines
ttgcaaagaaattctgtgggacttattgtggcacctctctattagactcttgtctaatagctcctgtaatctggttttgcaactttcaaaaaagtaacaaattacgaattagcaattttatattcgaaaattttgcagttgataattgttgctataaccacgatgtgtgctacataaaaaaatatcagaaacgttacgattgtgatattaaattttgcaattgccttaatgaatatcctaattgctttctaacaaaagtctgttctccaactcatatcttaaatattttattttttagaatatattatgctggtcagttcatatttttggagaacgttttaaagaaggataaaaataattattttattttaccgtcaatagatatgcatatgtattttaaattttttattgttatgtaaacttctaatatatatatatttatatacataatcatatgagttggcggttttaagaaac

SEQ ID NO: 58685 - DNA, 804 bp, Heterodera glycines
atgccgacggagctgtaccgtacggatttgctgcagcgcgtcaggcagcacaatgccgttggtctccccgcgggtggtgccgtgccgtggcagtcgaagtcgtcgtttgctcttcagcagttggacggtggtggcaccggtgccaatgccgaggagtgccgccacggtgagcaaccgccggtgctgctccgcgtgacggacagatggcgtgaggaatggagccacggcgtgcaaattccgtggggcatcggtggcggcggcgcacagagtgccaacaatttcgagcgcaccgaactgttccctcacctgtcgttgttggccgccaacgacatttttgaactgttcgttatatattttttttttgcctaataaatctactaaaaataatgactctttttgtggcactatgggacatttttctgcgaatttacaaaattttcaaacaaatttctattaaaaaaattttcaaaaatttgatcgactttcaagaaattaagcctaaaaaagtcaaaaagccttatttttgaacattttttcacccaaatttttatgccgaagagcaaaaaattaaatggaaaaaaattttcagaccttccgaattggtgacggcggacggaggcgacgccgacggcgactgcgtcggggcccaaattcgacggatgacaaacgaaaagccggacaaagtgtggcaccttcgcctcttcttcgaacgggttggcaaaacaagcgaacgcgcaaaaagcaaacgaaaaacactaaaatttttcaaaaaatggttaatagccttcaacctcgaaaaataaa

SEQ ID NO: 58686 - DNA, 264 bp, Heterodera glycines
atggctagtcagcgattcatactttatggcaaatcctatttttattataatattgatgattatgataaggcagcacagatgattaatcaagtaagattctttaggaatcattaaaaattaaaatttaaaaataataataaagtaacttaaaaatacatgaaaattttataaaatattatttatttactattacagtttatgcgcgtgtcatgtgatgcgaaaaatcaatttcaataggtgaagctgatttatttgcaaatgcaa

SEQ ID NO: 58687 - DNA, 317 bp, Heterodera glycines
atggaattgcagaaagagcttgtttcaatttgtcgttccgcatgggtacgtttaatattttttacaaattttcggggtttttatttatacataattttattatagacctgcgaggcaaggggtcccgcgtgggattttgcgggtcccagtctgcaatcccgcatttttggaacatgcaagaaggaggggttaatccagcggagtcccggcagataaaatttttttagcttcattcccgcaacggacacgaaaatttgattttttgtacggtcccgcagggtcggagataaaacactaaatattttttgactaattta

SEQ ID NO: 58688 - DNA, 356 bp, Heterodera glycines
atgttgccaaattgttcaacaaatgatgaacgaattttctatctcagtttaaaggttgatttgcttcgttacgcttgtaaacatgaaacattagagtcgtgtaagttaaaagatgaaaaatattactaataaacattttgcttaatacattatgttgcttcagaaaaacaaaatttacatattttcccgtttcagttaaaacccaagctgaagccgcatataatcttgccaaaactgaagctgtggccaaattgagacctgaaaatcccattcgcattgggattgccttaaattttggcattttttatgaaagcattctcaaaagcaatgcacttgcctacaaaattggaaaggaa

SEQ ID NO: 58689 - DNA, 1029 bp, Heterodera glycines
atgtttagcacaaatttcacaccgactgtatcgataaatggtaaaataactaattttactgtgcatcatcagattatacattgttacagggttaaacaacacaataattgtccaatttgtcgcacacagacatttaaaatttcaattctcagaagaggtttttaagattacgtattattgtgaataaattgctttgttaagcaaagccaattgcgcaacaacaagaagagcaagacggacatcgtcaagttgaacaacaagcagatgagcaccaacaattagaacagcaagaagggcagcagcaagaacaaccgagacaagttgaacaccaagtagatgaaatccaagaagggcagcaagaacatcaagagggccagcaagaattaggacaacaactggaccaacagagacaagtcgaacaacaagaagggcataaaggggattggcaagaagaaaccgaacaagaagtagaacaacaaggggatcgccaagaagaacaaaacgtacagcaagaagaagaagggcatgttgaacaacgtaaagagcaaaacgaacagcaaggagaacaactgcaaggagaaagacagcaaatggagaaggaagaaatacaaacagaaaaacaggaaattgaagaaggagaggaggaagaaaagcaccaaatggaacaaaagagtggagacaatgaggaagaaggagaaggaggacagcaaaagaagagcagcaatgactatgaggacaacaacaacaaggagtaaaacatgaataatccaatcaaatgcaaaaattgcaatcgatgagaaagtcattgtgatacataatttattataataattaataatttttaaatagtgaagaggcttaacaatttcccatttctctcttccttgctccaaatatcgtactgtataatttttgtagtcattaaattgtgtaaacattaaaatgattattttcaaacattttgatatatccaacaaatgatacaattttcattaaatccccagacagcatttggaaatttattttcaa

SEQ ID NO: 58690 - DNA, 395 bp, Heterodera glycines
atggtttttagccatgacagcaaatttaattctttaaaaatttcatataattataattttagccggaaaatgaagcattaattgtatttgtgaggggcaagtccaattttgacaaattttgcatggaaaataaggagagattgcatgaaatttgcgataaattgccaaaagaatccactgatgctcaaagaaaagaatatttgacgcagaaatatgaggcccatcttggcgttttgtatttaatgagagagaattggcattgtgccaaaattgttgatgaaaatgcaggacaaaatcgtgcagattgtgaaatatttcgcaaatatttcgaaattttctatgaatatttattcacagtgaacgccgaaggttttttggcatattatttaaaatag

SEQ ID NO: 58691 - DNA, 440 bp, Heterodera glycines
atgcctttgaaggactgccaacgtttcatccgtaagcttgtgatcaatgggtatttggacgaacggttggtcaccacggcacaccaaactgtgatcggctacataagcgtagcgtcgaaagggcgtcagtttttgatagattacaaaaggaacccgggagcagtggaacgggtgagaaaacaatgaaaggggcccaattatttggcggcttttcaggtcaatttgtacatgggcgaaccgaaaaaacaggacaagcgacgcagttcgaccgcctcaaatgcgtcgaatttgacgaggcaaaaatccatggaggagtaatggtggtattttcatatgattgtgtatctctttgcgggttttaatgcattttcttgtttcttttgcctatttttctatgaccattttctgtaagatatttgcatctaaatttttgtaataaa

SEQ ID NO: 58692 - DNA, 1274 bp, Heterodera glycines
atttcctgtgcccttctccgagggtcaatggattctgttgaagtggagtccatttattcagatttgtcgtccgttgaaccgaccatcaaattgctatatgtcacacccgaaatggtatgaagtaaagtaaatctcgatttatttattcattttttgcagattagtgcatcaagacgattaaacgacgcattcatttccctttttcggcgcaatttattggcacgatttgtggtgagtcattattttatgcctgattaggtgtagtcttccgttgtgtttgtttcttgccccaattttcaaatttgctttttcctttaaggtggacgaggcgcactgtgtgtcccagtggggccacgactttaggctcgactacacccggttgagcaccgttctcgagccgtaccgttccggcaaagacaaagtgccggtgatggcattgacagccaccgcgactcaacgcatcattgacgacgtgaagcagcagctaaacatcgccaattgcaaaatgtttggtgttttttttgccattggactgcgatgttacagaaattgcgttacaggttcacctccagttttgtgcgccccaacctcgtctacgacgtggtggacaaatcccaggccaacttcaaaaaggtggtggatcacattcgcaagatgtacccgaatggctccgggatcatctactgtctttccaagtgaaaactttgcatcttttaaattaaaatctctttgcgcttccacagaaaagactgcgaggatgtggcgaaaatggtcggcggtggtgcgcagccataccatgccgatttggcggaacagcgaagagtggacacacagcgaaaatggatgtccaacagtattcagatactatgcgcaactgttggtgggcaaaattgttactaatatcatgcatatttgaattttgttgctgtttttttttcaatcggcttaaaatttaattgggatttttgatagttacaactgcacattccattcgaataatccttttttagttgaatcaaaaatggagtaatacaataaatgtattttgctaatcgtaaaatttataatgaatttaaattcggttaatatttagcgtttggcatgggtatcgacaagccggacgtgcgcttcatcatccatcacacaatcccacagacattggagtgttactaccaggagactggccgagctggacgagacaaccaagttgcgcattgtattctcatgtacaatttcaacgaccatttgcggatcaaaaggctaatcgaaagtga

SEQ ID NO: 58693 - DNA, 1150 bp, Heterodera glycines
atgatgccaggaactcttccgcaagttactcgttacaattttgttccaattgatgaaactataaaatttcccgtctttcattgctgcaatggatctcatcaggaatctttccaccaatcgtttggtcaaaaagcgccgaatgagccattaaaaaaacgcgattcttctgtagaacttctcaatgacaataattcatttttcaaaatacgcgattcttcggcagaatttcacaatgatggtaattcatttgaattaatagcctattcttggactttttgctgagttttagtaaagctgctcggagttggaggacagtctcatcaagggcctttccacgagtttatcgatgacggtaaaacattgagtccgatgaataaatctcttttttcagtttcggattggattttttaaatttaaaccaacccacaaatataacctgtacccattaagatatgccaatttaagattttttctagattttctattcgagaaggcggagcaacacccaccaattgtcgttgccaacccatcagcaccgaatggcccattcaaaatacgcgattcttcggcagaatttcacaatgatggtaattcatttgaattaatagcctattcttggactttttgctgagttttagtaaacctgctcggagttggaggacaaaaggatgtgttcagaaaattgaaggtggtcttccattatttatttctcatttttcgcggaagtttaagattaagacaccttttctggaataaatttattccaatattataacacaataagagaacaaatagttattttcaggcccgtagctaggggcgggaattccctcttcccgaaatggaaaaaaatttcaacataaaattagtgaccccgttcgttcattttattggcctttgcattttcaggacgtgtttggcttttcctatttccgcttcaagcaaaagccggcggtggtcgccgctcttttggggcacgattgttttattgtgatgccaacgggtggagacagtattggaatttgaatgttttaccaccacttttagggtctgggaagagtttgtgctaccaactgccagctgtgctccatcccggcgttacaatcgtcatttctccgcttctttccctgatgcaggatcaaattattaa

SEQ ID NO: 58694 - DNA, 1365 bp, Heterodera glycines
atgtccgaaaatgttaggggccgaaaagcaaaaaatgttgtttttcaagaaaaacctcctccgaattttttctggttacggacctcaccaaagttttttttttgaaaaagaaaaattccaaaaaatatttattcaaaatttgaattttcagttgcttgcgcgagattgtgaacaattttgcgcacacacgcatcaccgaaactgcgctgggcccgaccatccaggcggggctggacgcgttgcgcagcgcggaccgggccggcaaactgttcattttccacacgtcgttgcccgtgctggacggtgcgccgggccagctgaagaaccgggaggagcgcaagctgttgggcacggacaaggagaaggtgtgttttttgaaaaatttgtttttgaaaaaacactaatttagcaaaaatttcaaaaaaatcggtgaaaaatgccagccgaaaagttgcaggacaaaatttttggactattaacagttttaccattgaaaattcaaaatttatattctattttacgcacagaccatgctgacgccgtccatcgacttctacgccaagctgggcgaggagtgcgtgaagtggggctgtgccgtcgacttgtttctgttccccaacgcttttgtggacgtggcaaacattgcgccggcggtgaccaccaccggcggcatcatctacaaataccaatactttgacgtgcgtttttgcaatatttaatttctgaattacgtcctaatttgttttaaaatcccatgcctgacctcaaaatgatgagcatttttgattgttgctgtaaaaattctacttaaatttcaaaaatttggtaattcgtatagtcagagtcaggtcaatatcgacccttaaaaagcgccggaaaatgtttttggtggttctttaaacaaaaaaggaggaagggggtacaagctagacattattaccaacgtttgtcttaaattgtatttgcaaaatttggaacccgaacatcccatccattgagaattttccttgctggtacccccccccagacctagcctcacccaaattttccaagaaatttcgctaaatttttcaaaaaacccacaaatttttgatgaaaatatgctaaaaatggctcgaaatcacaaaatttggtcattttttggacaaaatctgttaacaaaccgcatttaaaaccgcaaaaaatttcccggcccggaccccctgtcccccaaaaaatgtttttggaaaaaccgcgccacaaaaaaaacgggtgtgaaaagcaaaaaaaggtcgtcgccgggggaggtaccccccccccaagccaaaatcctgggaccgtccctgcacccccgccctcagcgttttttttttgaatcgtaataaa

SEQ ID NO: 58695 - DNA, 176 bp, Heterodera glycines
aactattttctgaatttgactggccctgatggggccgaaaaagaggaaaagccccgctggcagttgctgtacacggccaaaaccgagtacggcatggagcagctgaatgccgaggcatggaacgcggtggcacaacgcattgagcgggagccggcgatggcgcggaaattcaatcg

SEQ ID NO: 58696 - DNA, 1545 bp, Heterodera glycines
tggtggtattggaagggacaacgtgacgcaaaatcgaaagatttgttcaaaaacactacccaaatggcacgacctatgcagactttgccaaatccgtaagccaaacgcataaaaatcacatgaattgaaaaacaccttttttgttcaccgccgttgacttcgatgcaaataatttcgccgaaatcgtaaagtcctcgggcgcacggtgagaaaggaaaagcgatttgttctgattcgttgccctttcgtgtcaccgaagtcataaggcataaaatgccaattttcagatattttgttttgacttcaaagcatcacgaagggtttacggtatgttttctgtttggtcgatcttttgcaattttttcgttgattcgaagctttggccaagcgcgacttcgtggaattggaatgccgtcgatgtttccacttttcctttctttccttaatgccatttttgcaagatcggcccccatcgggaccttgtgaaggcactctccgattcgattcgtgcccaaaatattcgtttcggactttatttttcacttttcgattggttccatcctctctttctgaacgatgttaaaaagtaacgcttttgaattattaaggggggttaattattaaagtgtttaaggcacagaacggacttcgttcaggcaatttgtaaaataattaatttgggacttcgttctttttttagacggtttcttatcctcaattacttgaaattgttaacggatatcaccccgaagtcatttggagcgacggggttcgcttgattgagccattttttaattggggaatttcttcctatttttgcgaaggattgggaacagcccgacacttattggcgctctaaagaattccttgcgtggctttataacgaaaggtcactttcggatttgatttttccataataaaggaatattcaaatgcttcagtccggtgaaggaaaaagtggtggtcaatgaccgttggggcagtggaatagccggaaagcatggcggttttttgacttaccaggatcattacggtaggatttggacagagaatcgagaaaatgaaaaaaaaacaattgcagacccaggccatttgctagcacggaaatgggaaaattgcctgactgtttgatttcaccttaagccttcgcaatatgttactgtatttgacaatttcagttggacaaacgttcgtggggctatcgtcgttatttgaaggcactcaattccgtttttaatttttggtttaaatctgattaagccctccgatgttctttcattggccgaattgatcaatcaattagtgcgtacaatttcgtgtggagggaatatgctgcttaatgttggccccgaccacaccggtcgcattgtgcccatttttgagcagagacttcgcgaatttggcgaatggatgaatgttaactcggaggccatttatggaaggcaaagatttttgaagtcgttttttgacttggtcctcttttagcaaggcatggatccaccaaagcgatggcccaactatttggttgctattggtactttcatt

SEQ ID NO: 58697 - DNA, 687 bp, Heterodera glycines
atggatttggtgaccagcttggagatgatggatgcaatttacgagggcggaagtgttgaccgacgaatgatggacagtgccattgagaaggcacttgagctacagcaagagagagtgagcgttgagtaccatgacaattagcaaacagaattttgaataccataagattagcatttggatgtgccatgagccaatgagcattcagaaattcaaaaagcaaattcgaaatgccaaagtcggcgttccaaaatgccaccaaaatttggcacaccattttgccacttgctcaagggcgaaatgatcacccagctgactgagcaagacgacccggagggtcggctggcacaaaactgtctgcacgccatggcagtggcattttgcatctcagtgatcgccgctgtgctgctgatcagttttgcggtgctttttgttgtggtgattgtgaagcggaaggtgaacagaaaggcaacgttcgattttcagttgaggaattttttgttttgaaaattttttaatttttaaaatatttttgaaaccctaggtccagcattgcaaagtgatcagcgaatttgccaacaaaagactgatatattcgataatgtgataaacaaaagtgtgcaatttgtctctttaattttcattttttcatatatttttctcaattttacccgaaacattccgaataaa

SEQ ID NO: 58698 - DNA, 150 bp, Heterodera glycines
gcattggctgaagggaataatacgaaaatgggcatcttcatttttttacccggctctactggcatataccgtatctcctgtatcaaatacccaccgttcctctggttaatactcataccgtatatatcaaaacaaaattcaaattggcac

SEQ ID NO: 58699 - DNA, 1501 bp, Heterodera glycines
atgaagccgaacctcgcggtgtataattatgcagctggtagtgcaactgctgttcccagtgatcagtggaccaacaacgagactggcgaagaactgcttgggaagggccaaatgctggcaactttgccggatttgagtgagtgtggggaaggcaccgaaaaatatgctatatgtcgaaaacggcatttgccggtcgtcattcgtggaacaataagcagttggccaaaggagcggcacacccggacattttgataggggacaaatgcccaaaaaggaagaattggcacccatggccatggccattgatggaagatacaaaaatcgaaatccctttgaatttgtttttcccatgctcaggtgatccgtgctttcgacgctatgctaacaggtgcctgcccttttatctgccgtggctttactaattcagtgccattcattaatcccccgtccccgaccatttagtattattgtcaatgcgcaaccgttcgagcgtcggtcgagcatttcgttgatcaactgtaaggtaattttctggttgaccccaactcgacctcgagagggaaattgccagaaagctcgacagtcccggaaaatttattccatacgcttattcccaaaggtgcaatgccttcgctctccggtgggcctttactcgtgccgctccttcgtctacgacaatttgaaccaagtgtgcgacttgtttgcccacgtcggtgaccaatcgccggcaaagtgagcgtggaaatcgtgccaaataactcaaattatcagtgccataatttaaatgtcaattattggtgggacattcgaaattgggcattaaaaaaactttatttttgcctcggtacttattctacgctattcaactgctccctttccttgtaaaggcttctccgtttcaaaacgcgtgactatttcgagccgacctccgccattcattgtgccatcgacgaaaatggcaacccccggggcaccgttgttgttccgctctctgccgcaatggcaccgacacccgtgccactgactacggacatttccatcagcaaagcatcgctatcattcactgacagtggggccatagaccatggggaattggaagaggaatctgagaaaagtgcaataataatcctaagaaagtccgggataagatacctcttcgggatgccgaattcttaaaacagaattcatgttttgtgcccatgccaagtttcttccaacaatttcggcatttttatcaggtcccccctccattgtgccgcctcgtcagccgacttcggtggcacccgcaactgcaactggagagcagtcggaggaggccgaggaagaggaggaggaggaaaatagtcaacaattggccacaatgagcagcaccagcaaaagggaggaggacgagcaggggaagaagcggaacggagcagggacgggagagcagcagaaggagagagagtgcacggagaagcaaagtgagggggagggaggagaaaaagaggaagacgaatag

SEQ ID NO: 58700 - DNA, 791 bp, Heterodera glycines
cacaaagagaaattggtcgccgcttattcggaggcagggcaaaaaattgaggcattggaacggaaattgcgcctccaatgtttgatcgaggtaagtgttgttttgggagataatatatgatggaaaaacaggccatatgggtttaaaacgcggaaagtattgttaatttttataggaccatcagcagccgacggatgagtctcatgtccaagaggcggacatagatagaaacgaagaagcggaggaggaagaggaagagccgagaagaaggaaaggagcggaagatgacgagggggaggaggaggaagatggacaggatgaggacgaagatgaacaggatgaggacgaagatgaacaggaggaggaggaacaagaggatgaggaggagctggacgaagacgagtgcaaggacagcccggcgtacatcccgaaacaaggttttgataaatttgcataatgtacgggacacgggctattgattgtgtgaaaaatccactttttacacccctcaccccatttgcacgttaaaatcaaattgctttttttttgggttttctgcattgaaaacaagggattgactaaagtacatttcaaacataaaccagacttaaggaaaaccgaaggtgctattcccgaatgtcatgtgatttcaaaaattgctcaaatcgttgatttttcgttttttacataatttttttaacattaactatttgagctgaaatagttttattatacaatttggtgttctgcaccgaattatcgaccacatctattttttaaattacattaaa

SEQ ID NO: 58701 - DNA, 649 bp, Heterodera glycines
aaaaaatcgattttttcaagtgtccgtttggggtactcaaacatttatggggagcaaaaatccaacgcagaattaaagtacaggctatagggaagctattcccgaaggattcggtctccccataaatctgggcgcatcggttcggggggactgccccgaaaacaaaaaaatcgattttttcaagtgtccgtttggggtactcaaacaattatggggagcaaaaatccaacgcagaattaaagtacaggctatagggaagctattcccgaaggattcggtctccccataaatctgggcgcatcggttcggggggactgcccgaaaacaaaaaaatcgattttttcaagtgtccgtttggggtactcaaacaattatggggagcaaaaatccaacgcagaattaaagtacaggctatagggaagctattcccgaaggattcggtctccccataaatctgggcgcatcggttgggggactgcccgaaaacaaaaaaatcgattttttcaagtgtccgtttggggtactcaaacaattatggggagcaaaaatccaacgcagaattaaagtacaggctatagggaagctattcccgaaggattcggtctcccataaatctgggcgcatcggtttggggggactgcccgaaaac

SEQ ID NO: 58702 - DNA, 483 bp, Heterodera glycines
gtcccccctaccgatgcgctcagatttatggggagaccgaattcttcgggaatagcttccctatagcctgtactttaatttctgcgttggatttttgctccccataattgtttgagtaccccaaacggacacttgaaaaaatcgatttttttgttttcgggcagtccccccaaaccgatgcgcccagatttatggggagaccgaatccttcgggaatagcttccctatagcctgtactttaattctgcgttggatttttgctccccataattgtttgagtaccccaaacggacacttgaaaaaatcgatttttttgttttcgggcagtccccccaaaccgatgcgcccagatttatgggagaccgaatccttcgggaatagcttccctatagcctgtactttaattctgcgttggatttttgctccccataattgtttgagtaccccaaacggacacttgaaaaaatcgatttttttgttttc

SEQ ID NO: 58703 - DNA, 158 bp, Heterodera glycines
ctcattttaagtggtacaaaatgagtattattgacattgacgctgaacaaaataaccattcttttgctgttgattctcagtccaacaattattttttggtcggccgcggcggtgacaaatcgattttactcaacgaaacgagcggcaattcgtatgct

SEQ ID NO: 58704 - DNA, 56 bp, Heterodera glycines
tgaaccgtttctgtgaaattatgcctatttttaggccacataaattcgtaatttat

SEQ ID NO: 58705 - DNA, 479 bp, Heterodera glycines
atgtatttaactgtgcttttccgcttcatttttgacgattatcctcatgttttgctatacaaactaataaatattcgttctgaaaaggcagtatatatgtttgaacagctcgaaaaagaatttgatgaagacggtttaacggaaataatcaaacataaattatatgggtttatcagtgatggagcttctgtaatgcgtggaacacgaggtggtttatttgctcatttagaaaagttcataaatcatgataaaaaactcacgggaatccattgctttgctcatcgtttttcagtcatgtcataagaatgtttatgactggcaattaaaactcagactatgaggctgattttctgtgtgcaactgatggcaaaagatatgaacatgctcaatatatgttaagacaacaagcacatacacgatcgactgccgaagagaatctagttgttggaatttcccctcctattcctgaattcaataaa

SEQ ID NO: 58706 - DNA, 927 bp, Heterodera glycines
atgagttacagtgacagcagtcggcatttgaaagctccattcatcttattgttaaacaaagtatttttaagttatggaccaggcgtggatatttggagtgccgggtaaatttttatttgttttttaattaaatttttctttttttacttacaattagatgcattttggccgaatttttcaccaaaaagcccgtctttcaaggacaatctgaacaccaacagctggaattaatttctcaattttgtggctcctattcgcccgaggtttggccaggagtgttgaaattgcccaattattcgacaatgcgacaacggacaatttacccgcggaagctgcgcgaaaaattctcattgttcgaccaaatgattatttttttactaacgctttatttttcaattccaccaacttcctctttattacagtatgccggatccggtgctcgacttgctcgacctgttgctgcagttggaccctggcaaacgaccaaccgcgtcacaggcgttgaaccacagttggctaagcaaggtggaaccaagcctggtgccgacgctggaactgccgcaggatcaggactgtgtacgaacccaacaatgcattacattttacacatttattacattgcattacgcttttgaatttgacggggtggggaattggccaaaaattaattggaaagcattctcatttaaagcattttacatgccattattcttggtgtcttcttttgatgctattgatttatcaaatttttttggagccgacaatttgccctaaatttagcatgaaatgtggtcaaaacgtcgtcgacagttggcacgtcaacaaagtgccacttcttcactgacttcttcaaatttttcggcggacaagaaacagcagtcacaacagtagtgatgaatgtgcattgaccattttagccgtaataaa

SEQ ID NO: 58707 - DNA, 1141 bp, Heterodera glycines
ggtcaaaaatcaatacatcaacatttttcgatgtaaaagaaaatggaagaattgtggtcaaaaattcagacaaatactgtcttttttatagtgttgttttgagtcaactatatcaaacaataggcactgaaatttcgtactcaatgtttcgaagaattctcagtaacgctaaacgacaacgaatttatgtggatgatttgatccgaaatgctaaaattgaaccgaataagaaaaactatggaattgacgagttgagacaaattcaagagtatttgaaccaagaatttcccggaaaatttttaattgcggcttttacaaaggtaaatttttaagattattttttccctaaatatatttaggaatgggggataaaaccaatatacaagggagacggaccaaaaaaatacattgtttgcgtttttcatgagaatgatcactgggatggtaagcgtgtttttcaattagattattacaaaaaaaatttaggattaaaaagcgtaaaacaatttttcaacataaaacattattattgtatatattgtgaacagacattccgagaaaaaattagacacacggtcaactgtgtaattaaatgtcagcgttgtggcggatggggtattattttagggacgggtaataataatttataaaaatttttaggtttaaattttccatgtgaaaaagaagggcgtgagcccattgaatgtttaaaatgtaatcgacttttctttagcgatttctgttttcaaaatcatctaaaattagcttgcaaattatacagaaggtgtacattatgtgatagcgaatacaacactcgtaacaaacatatttgcggtaaaatgtttcttttaaaaatgttttttttcacatgtttaggaataaaattctgtaacgtttgcaaagtaaaacacgccaaatcagagagttgttacatcaagaaaattaatattcccaagaatttaccaagatatcgtattgttagctatgatattgaatgttcagtaagcatcgaaaaaagctaatttacaaatttttaaattgaatttagacggataattctttttccgagggaaaattcgagcataaagttgtctttttatctgctcgattcacgtgcagcgattgtgacaatgaaaataaa

SEQ ID NO: 58708 - DNA, 2018 bp, Heterodera glycines
atttaagaattttttttttaaattttataattaaatacacattttgttggtccaagaagtccgacaaattgtttcgccatggataagccaagttgttcgacttgttgccggaaaaccgtacattgaattcgattttacagtaggacctcttccaaaaaatttgaggtggactaattaatgaattaatgaatttgatattaaattgggcaaatttatgttattttggtcttaatttagtgaccttaaaacaattgaagtgatcacacgttacacaatgagcgaactaaactctgaaggaattttttggactgattcaaacggacggcaaatgatgaaaagacggtgagaaaacaattagctcattaattaaatgattttatcgtttcttgaaataatttgaattaattaaataaacaaataaatttattatttgagtatttaatgaagtagagaaattttagttttgacgtgtttcttaaatttgccattataaatttttaaatctaaaaaatatttaaagaaatgtaaaactttaattaattcgaaaaaatttaattttttcaaagaattttaatggaaaaatttttgacaaaaaaggaatcctaagactttgaatcgaaggattttttttttaattttttaatatttgggaattttgcttgatatatttcttcaaaatctaaatctgagtcttttcgttttaaagtattccattaattaaatattctttatttttttaattttaaaaattttcatgatttttgaaaatttgtggggaatggcacttttatgaaatgtactagtaaaatttgaatttcagccgcaatgattcgtcattctttgagggcaccgaaccggtggcagccaattattacccagtgaacaggcaaaatttaattacctaattaattttttttttaaaactttccccaaaatttagccgaatttatgtacatgacgacaaaacgcggatggtcattttgacagaccggtcccagggtggcgcttcactggcggacggacaaatcgaattgatggtacggtaggggcgggcggtagtggaaatggttgaagcggggatacggtaaatgctttttcggcagagcatttatctgtttgcctttcttggacatgccgtaaactgtaacagttgcagcgcactaacaaacaatttttaaaagggtttgttcagggcgttgccattcgtccgtgaatgacaaggacgtccttgaaataggacactcttacttgaaaatttaaaaatattcctgaattcgagatgtccttgaaaaatgaacaaaaaaaaatattggataaattcattctggcgaaaaatactatttttattgcatatgataaattttaagtgtccttgaatttaatgaaattttcgcgttatgtccttggatcgtgaaaatcagagggggggggggggtgaaatgacaaaattaggcccaaagattcagaatttttttgttttttccattagcttcatcgccgcgctttttgggatgacggattcggcgtggaagaagctttggacgagccgggcgaggacggcaatgggctaatcatccgaggccggcattggctgttgcttggcgatgcttcatcggccgcgcatcggttggccaaaaaatttttgaaaattctatttaaatatagtttattttaatttttgacccttttccctggaaatgttccaaattggcgcctcacaaatgttggcattttcgccatttgttgatggagacattatgcaatacaaggccaactatcgaacacaggtgattggaatttatgaaaaatataacgaattaaattttaaaaattcaccgaattcaaactgaaaatttacagaatttataaattcaaaaatatataatgagggggaatttctcatctcgccctctctctctctctcgccctcgctctctctctttctcttctcgctcctctttctcccgctctcttctctatgtttctttctctcgcacagtctctctcttgctctttct

SEQ ID NO: 58709 - DNA, 852 bp, Heterodera glycines
atgagccgtcttcagcagcgatttcattcatcgcccggaaaacgtgaagggattgagccgttgaatttgtctgaatgttgcaacacgaaggattatacgaacagttccgcttcagcttcggcacgttcattgcctcgggcaaaaagtgccgtttttaccgaaaacggcgtcgtagatgaaaagcagcgggacaaagacggacagcggcaaacatcagcctcaaccgatgaaaagtacaaatttaataataatttaattggcgattttcaaccggcttaagactggacggcaacccgccttctgcctgcactgtcctttcggctgtcgtgctgcaaaagagtgccgatgtatggccaattcggtccagtccgagcgttggcggcactttggcggcgccatttgactcggcacactccaggcaattgtggcactaattgcttcaaaattttattgctttgcttaatttggctcactttgatgcccgttttttgccttttcagcaaagaccttcacccgctgacggaccgtcgtcgccgctcgagcatcattctgaacaagcggatgccaatgcgcaagacggagtccggcgaattgggcgatcggaccgcgtccaaattgacgctggacgaggagctgtacgacattctgcacgcatttctgtacgtttttgatttgtgacttaatatttaaaaaaaatatatatatatatatataaacaatagctgccaactgtacttattttgacatgaaatattattttgtgcttattcgttgattttagtacaaaaattgtaatttttaggcccgaaaaattttaaaatcgcttattttagtataaaatctgttaataaa

SEQ ID NO: 58710 - DNA, 2984 bp, Heterodera glycines
atgccatttccggcctgtctaactcttatttttacagttccgtccggcattttaattgcagaagaagtggtcggcattgaacaataccgtagccaatcgaaaatgtgtggcacttccgaaggattactgtacggcccattgcaattcccgagccattggcgaaatttgacatttgggaaaattattttggacattgaaaaagtgtcggaatttgtgggagaaaaagtggggagtcgccgattcagtgaaactgttcaaatcagaggacttccttggaatattttggcaaaaataaacggaaaaactgatgaaaaatgtctgggcttttatcttaaatgtgcagcagcagaagaaggtaaagtaaatcaaatgctaattattttacattaaaagttgtcttaatttaaattaagatgagaattggtgctgtgaatgttccgcaacttttcgaattgtttcgcaaaagttcgacgtggagaattctactggcaaatttttcggacaaatttttgatcacacagcggatcaagcaggattccatggattcatttcatttgcggtgagtggttgtttattaattgatccattatggttaattaaggaattgctggaccctaacaatgaattttacagcaacaatgaggacaaagtgacattgacagttgactttatcttaaaagatgctaaaatgggccaattttctgctccaaaaacagcagacaaaacaatttttatggaaattgaaaaagcttccgaatttttttgcgaaatcattggaagtgagcgaaaaagcgaaactgtgctcatcaaaggacttccgtggaaaattgtggccaaaataaaccgaagcgctgatgatgagaaatgtttgggcttttaccttttatgtgccgtcccgaaagaaagtgagtggaattaattaaaaataatttaaaacaataaaaaccagcagggctttattaaattatgctattatatggtggcaaaatctgttaataaatatcacaaaaaatcaacattttcgggcggggcaccaccggaacctctctaagttttttttttgaaaattggtacaaaaacacaccagaaaaaacgggatgcaataaaaggggctgatgggtcgactaagatttttcgaatggatcggacggtaaaagttgatcggaattcaaattattaacggtccataaatttgactagtttgttgcttttcaaagcttttttgcggcgtaatttttcaaaaaaaaaaccaggaacacgaggggtccggtggtgccgtcggcaccgtcggagaatttttgaaaatttacggcgatttgttaacagattttgtctaaaattgaccaaatgtcgcactttttgactcaatttctacaggattattaagtaaaagccgatccggcggtgccaaaaggcgccgccgggaaattcacaaattttgaatgaaattttcgatgaaaatgagttaattttaattaaatttattatttaattaattcaaaaatatttggcattttgtccataaaatttttcaaaaaaatcaataaaatcccgcagaatcccgcacaaaaaatcaaatttgccgctacgggaccggaactcaaaattctttgcggactgggatcccgcgggattaatcccgcattttccaaaaaatgcgggattgcggactgggatcctgcaaaatcccgcgcgggatcccgtcccgagccggtctctgggaatactgaaaataatcagcggaagcaaaaaattattgtttattgtttattgtcagtaaagaaaaaagagtccacaaaagggaaaatccgcttacattgaggacaaaacattaattaaaaatgtcctcaagaaagcgcaaaacaattaaaacgagatcaccgccaaaataaaatataatatgaaatcaataaaataaataaatagcgaccaaatcacttttagttttaatggattaaaaattcgactttaatttttccggtctattttacaggaatgaaatagttttagttttatttttaaattgatttaatgagtttatttcaataagctttttatcgagttggttccaaattttagttacccgccctgcaaaaggtataaattttttgaataaattttgaccaattttctacataatgtccttgattccgttatgtccttgtaaatcagtatatacgtccttggaaagagagagtttaaacgatacgagcactgaataatataatattaatttgctttaagcaccgaattggagtcgcaagtgttcggcaacttttcgaattgtttcgggtgtacctagggaatggttcgaacgccgcattgttatcaatgaaacacctattcacggatttgattatttcgttacattttcgtatttggtaagaaaatattttctttttgggaatacaaaaaatatttaattaggacatatatttttaggtatttaccttttcccgagctccctatattatgaaacgaacgaaaaatatttttttatttgtgcttgttaagctattttttattattagtgcatattttctgattttattgttagggtggccgaacgtttcgtcactgaacctttcgtcactaaacttttcgtcactgaacctttcgtcactgaaataaaataaagaattatttattagtgaaaactatttttttttaaataaagttatgtatttgaaattttggagtgtctgatcagtgatcaccgtaaaaaatttttaatggacgtcaaaatttctcgtttcccaaacatgagtgcctaaatgtaattccccaaatgctatttccaatagcggtaaaaaattcttaactatctacttttacatatttctgtaatttagctatggaatctgactcatcgcctcgaaattgctctttcaagaatctacaattcgttagaagcgtggcatatcatttgtcgggaccttcttgatttgttgcctattttcacaatgcaccggaaaatcgtataa

SEQ ID NO: 58711 - DNA, 958 bp, Heterodera glycines
atgacacataaatcagtgagtaaggtgtatagagagagcgcagcagacgcagaccgatcatcagagtaagagaaaaaaagaccagcaaattgccgacgaagaaatttaaaaaaaaataaaattgaaatttggccaaaaagggagtgcgttttcaagggattggcgtgtgttttgtccttttccaattctttccctcctcctcttccttccgctttttcttcctcctcctccgactgttcgattctctcctcccttttcactcgtccgctttcttctcttttgttctgctctggaacaaaaacattatcagttcgatcgtattttaccaagggcggagtctgtatttatttgatcaaaattatccctcggcctatcggcccttttccttcaccaaaacccctaggttttttacgaaaatcttccccattttaagctatttgggtgtgattaaacgagaatttcgagacgtcctcggtgagctgctgcccattagaactttgatcagcagagacagaacactttctattagagaccggacgggatcggggtcccgcgggattaaattcgggatcccgacctcgggatccgtcccgagcgatatttaaattcatcgggattgatcgggatcgggatttcatcgggatccctcccgaccattttaccaatcccgcggggtcccgcgtgattgaagtcacgataatttttcgaaaaatctccattttttaattaagatcttgaattttcaattaaaaaatattgtcatttgctaatttttcttaaaaatcccaaaaaaattttcacagttctccaaaattccattaaaattttcaaaatttgacgcaaaagttgaccattttgtgacttttttctttcaaaaaagaattataaaatttttttttatattaggtagtcatggcacaacgatttctaagaattctgtccaaaaaatcataataaa

SEQ ID NO: 58712 - DNA, 618 bp, Heterodera glycines
tactttgtcctcctgctcatcctggcaatgatcgagttcgtcacggtgttggcactgtacacgaaccgtgccgagctggtcgactcggtgcacaacgcgttcattgcgagtgccaaaacggcggacggccggcgcaatttgaagcccatccagacggcgctgcactgctgcggggccaccatcgagacgcagaagctgtacctggacgagcagctgtgcccccaggaattggccaaggcggtaaattcaatattcttaatcaatttgtccaaaatttaaatgttcacttacggtgcctaatgagatcgctggtcccaattgttccatttttttgaaatctgatccaaaatggcaaaattgacgaaaatggctaaaaattgcttattttttaaagataaattattacaaattttcacattagcgcacaaatggcattatttgcaaattgtgccaccctcttctcaggaggactgcttctccgtgctgaagtacaaaatggacagcaacgcagtgctggccagtgcccttatgctgttggtcgcccagttcttcgccatggttttctcctgcattctgtgccgggcaatccgcgagcgcagtcccgtctattatgcttaa

SEQ ID NO: 58713 - DNA, 662 bp, Heterodera glycines
gttttcggggcagtccccccgaaccgatgcgcccagatttatggggagaccgaatccttcgggagtagcttccctatagcctgtactttaattctgcgttggatttttgctccccataattgtttgagtaccccaaacggacacttgaaaaaatcgatttatttttgttttcggggcagtccccccgaaccgatgcgcccagatttatggggagaccgaatccttcgggaatagcttccctatagcctgtactttaattctgcgttggatttttgctccccataattgtttgagtaccccaaacggacacttgaaaaaatcgatttttttgttttcggggcagtccccccgaaccgatgcgcccagatttatggggagaccgaatccttcgggaatagcttccctatagcctgtactttaattctgcgttggatttttgctccccataattgtttgagtaccccaaacggacacttgaaaaaatcgatttttttgttttcggggcagtccccccgaaccgatgcgcccagatttatggggagaccgaatccttcgggaatagcttccctatagcctgtactttaattctgcgatggatttttgctccccataattgtttgagtaccccaaacggacacttgtaaaaatcgattttgttgttt

SEQ ID NO: 58714 - DNA, 573 bp, Heterodera glycines
atgaatacatattggcattttgaaatgtatctatgcaattttaaattaattaaaattaagaaattaattctgttgttgaatcatgaagatggcatcaattgggccagtgccgactgcgccgacccaaaattggcagccaaatttatggaaagcatcagaaaaattccaaattgggctgaccgagttcatttcgacgcactttcaaaattaatcccaaaatttgcgtattttcaaggcattttttgctacggaacgcccactgctgatttctttcacataaaggccaaactcaacgtaattgtgcagacaaatgttttacacgccattgaacgaacatttcccgaaattttgcattttggtaagaaaaattggggaaaatcaaagaatgaataaaaagtaaatatgaaaaatgagttattttttagggtttacgaaaaattttttaaagccctattaattgcccaaaaggctcatttgaagcaaaaattattaatgacaaaatcctttacaaaagttaggtccgtcggttgagaagggaaaaaagttggcgaattttcagtacgaaataataaa

SEQ ID NO: 58715 - DNA, 661 bp, Heterodera glycines
atgagaaacaaaacgaaggtaatacgcatagaattacgctttaatttatattatttatgtcaaaagaaaacaacatttataagtttggtgcgcaaagcgttttttctatgaaaacaaattaaatacgtttctttattaatcgggatgggaattaagtcgaatgatctttttttgctgactttaaatctttttttgctgactttaaatgacctttaaataacaaagtgttctacactttgtttgaagcttctaacatgcattttctttgactttttttttctactttttgggattttatgaatttttggcacttttataacaaggcttccaaaaatatggattaattgcgaaatatggccataaaatatggaccaaaaatcgatggacataaatttttcaaaattgaggctataatttctcaaaattgagggtataatttcttaaaatttcttctaattcgataaatgcatggcttcgatatctgaggatttttcctcattttgtggtcttttagagggtcgaagaggattttttggaccaaatggttgcattctccgaccaacgacggacagccgaagcgattgcgttgtttttgttattgttctccaacaaatttggaatgggtcaacaatttgaagaaggtgtgaccacattccgttaa

SEQ ID NO: 58716 - DNA, 720 bp, Heterodera glycines
atgccagcgggaggacagcagccagcagctgctgtgacccaagccattgcacaagtgccagccatacctgtggcgatcaatgctgctgctggtgccaatattcagcagccggctgctgcgaatcatgcttatcagccacctccagtaccggtcgccaatgctcttaatatgccaatgccgccggcagctgctcctcatgccactgctcggcttccgcagcttagtcttcccattttttcgggcgaaccgatggaatggccttccttttggcaaagttttgagagtgctgtcgatcgtgccaccctcgagcccgtcgacaaacttaattacctccacgggtgcttacgtggtgaggctgctcgcgccgttacagcctaccgtggaggggaaaattacgtccatgccatcgccgcactgaggcgactcttcggggatccacggaaaattgccgaggcacttcagtccgaactgatcaatcttcggtcggtggacgatagcgttggatcactgcaacacttcctcgagactttggaacgtgtgtgccgccaactttcgaacctcaacatgccggatgacagcccattcatgtaccaaatcatccgcagcaaactgccgtccactggaactcgtcaaaatggaacgtgcggcaggcatcccatggggtactcctcagctcagagctggactcgccaaagttctcggagtcagagaagaggttga

SEQ ID NO: 58717 - DNA, 666 bp, Heterodera glycines
atgactgacatttattataaaatagcctcctttgaccattcctacttgaataaaattaatcaatctgaattattctcaatgattgatgaaattgttgaaaagtttcaactttgtaatgttgaagaaacgaggtcattatcgagatgggtatactgtatgctactagttttgctgtggatagcaattgttatgacaggaatttttctctattttaattccttgattcgaaatatgtgtaagcttatgcatatatgtagagacgaaaatgacacaacgacgataaatcggattctagcgggaaacacaaagaccagagaacactacttgggatgcttcccttgcgacaaactcccaaacaaaatcaaccagtatccttcaacattggtggcgaacaatgacccatccaataaagagggaacgcattggatagcaatgttcatcgttgacgacagaaccgtctactactttgacagttttgggcgtactccgaacagatgtatcagccactttttgcggaattatgaaaaagtgatttcgaataagccaactattcagtcagtgttcagtgagaattgcggctactattgcatttattttgttcattttatgtgctcatttggaggaagaaattatgagagtaattttgaaaaaatgacaaaaaagtag

SEQ ID NO: 58718 - DNA, 541 bp, Heterodera glycines
gttttttccaacgattaaaaattgtgttgcagttattgatataaagactaggcttaatctcgaaaaaatttatattatttctccttctacaaaatatacccctaaacgaatgaatgcagtcattatgaatgtttacaacccaaatgcaactgctattatctttggtacgggaaaatttgtgtgcacaggagcagctaatgagaaagaatgtaggcaagctgcggagcaagtcaccgaacgaattcgatagtgcgggtattacgatgcccaaattcaggaatttaaagtacaaaatttggtagcaacagcagacgttggttttcatatacgcttaggacctctgtccgactttctaggcgccaaatattgttccttcacccccgagttatttcccggtctcgtgtatagaaaccaaaacccaaaaatatcaatcatagtattttcaagcggtaaattaaacttaacaggctctagatcaaaagaagaaattgattttgtatttaatcaattttatcaaattatctgcaatttcaaatattca

SEQ ID NO: 58719 - DNA, 2347 bp, Heterodera glycines
atggatcgattagacacagtaattgcttctcttctgaactgtcccgcacgtaacttgtgcgactgcttaaatcacctggatgagattcaaaaagtagaaaaatacctcaaaggaaaaactctacaaacaacatacaaaaatcaactaggtgagtacaaaggttttgagtacggtggaattaccaaagaatgtgcccgtaagcaaatggcttacaatggtttcaagaatgtgaccgtcgaccagcatttttatgtacggcaccgcatttgtcttcgctacgctaataatccttgcgtgattgagaagcatagaaatggacacgaacgattctacccacttgagcttgtgaaagtgaaacacggagacaaaagcgatatttatttgggacaaaatttcccaaagtctatacctttacttgacgaaaataattcaaaaataatgacaattattatgattcttgtcgtttatggtgaatatttgaaattgcagataatttgataaaattgattaaatacaaaatcaatttcttcttttgatctagagcctgttaagtttaatttaccgcttgaaaatactatgattgatatttttgggttttggtttctatacacgagaccgggaaataactcgggggtgaaggaacaatatttggcgcctagaaagtcggacagaggtcctaagcgtatatgaaaaccaacgtctgctgttgctaccaaattttgtactttaaattcctgaatttgggcatcgtaatacccgcactatcgaattcgttcggtgacttgctccgcagcttgcctacattctttctcattagctgctcctgtgcacacaaattttcccgtaccaaagataatagcagttgcatttgggttgtaaacattcataatgactgcattcattcgtttaggggtatattttgtagaaggagaaataatataaattttttcgagattaagcctagtctttatatcaataactgcaacacaatttttaatcgttggaaaaaacattttaaatgaataatgggagaaaatttttcctatttatacaaaataaattgaatttagttataatttattcctaaattaattttaaacttttaattaatttttatttaatattaatttgaattttatttcaactttaattataataattcatttaattttatttttagctaacaatttatcacaatcgggctctcaaatagcccctgcgggcgctcaagtggtagcatacctacactcaatagaatttgagttacctctgaccaacagctggtgctttccattatcaccagcgggctcttaaatgacacacacgtgcgctcaaatggtccctgcgtgcggtcaaatggcctggcatccctttcctccccaaagggcacgacggctgatgtccgtcccatcgatccctccaataggcttttaattttttttaattttattattttatttaattaattttttttaatcaatcaaaacccttcaataggcttgggttcaccccgcacccgtccaataggctttggtttttaaatttattatttttaatttatttaatttaattttaattaattttattttaatttaatttattttttaatcttttttttatttatttttttttaatttcaattaatttgaactttaacttttatttaattttaatcctattttaatctaatttcatttattaatttaatataattttagttttatcaactttaattctaattcatttaactcgaattttatttttagcgctcaaatttaacaagcgggctcacaaaaggcccctgcgtgcgctcagatggcacgcgcgagcgctcaaatggtccctacgtgcgctcaaatggcatacgcgagcgcttaaatggcacacacgcgggcgctcaggtggcatgcgtcccttcccttccccataaggcatgacagctgacgcccatcctctgcctccctttcccttctctaataggatttggccttgggttttatacttcagatgttttttcaattatttacctcttctgggattggatatatttattataggtgttttttaaaggtttaaatttggtactgaaacgtccctttccactgggactgaaatggcggggctgaaaattaagggcgaaaatctgcaccagtaactactaggaaccccaaaaaaaatattaaattaaaacctttgaactcccgatcccgctcccggaaaattggacactagaaaattggacaccaatggaaatttggacaccggaaaattggacaccgaaaattggacactagaaaattggacaccaatggaaatttggacaccggaaaattggacactgttgtaa

SEQ ID NO: 58720 - DNA, 802 bp, Heterodera glycines
  unsure (1)..(802): unsure at all n locations
atgagacttcggcaacaagccgcttcacaaaatccattgccaacaagacaagcaattgccaatgttcgtgagaatatgccatttgaagccattattgctggaccctcttcttcgagtctggcaaggaactacagaaactatgttgtccaagaacggggcgaaaggggtgatgatcagcttgatttggccgatactgcacaaattcaaattcccgaaaatcttcgggtaaactttgtctttgatggatttgtcgataatctccggatgttggtttttgctaccgaatctggaagaaaccttttggcacggtttgggcagcatgcggcaatcgatgggacttttaaggtgtcaactattcaatgttaaagttacagaaattaattgtttagtgtgctccggcccatttcactcaaatttacacgatttctgttttggtggataaggtcgctgttccttgtatttatgggcttttgcgatcaaaatccgagaatacttattcaactgttagtcaatttgtaaattaattgctttaaattaacacaatcagatgtttcaatcagtgattcagcatgttgttgattggcacccacaaacattcatgatggattttgaattaagcgcatttaatgctgttaatcgggtaaaatatacatatgttaattttgttttataaagaaaatttaaaggtttttccgaatgccgaacggtctgggtgtttgtttcattttgcgcagtgcgtttatcgaggattgcaccgattgccaaatcttanccnccattttaaaggatgagcagcaaagaa

SEQ ID NO: 58721 - DNA, 517 bp, Heterodera glycines
atgtttgtcatgcaaaatgctgaccaacaacaacttcccgatttggccattctgcgttcgagcacttcccatgtgccattgtttgtttcttccgggtgggcaattgagttcgatctggccgcaaatattgcgctggaatgcattgatcaaaatccgatcagattggtgggtgatcgatcaataattgatcagttaaaattgtaaaatccagagtgatcttcggtcgagaacaaagctgaacgaactttttgagagatgataaaaagagaatgctttattgtattatattctaagtgttgttaaaatgcttttaatatattttttattttcgtgattattctcttcgaattctaactgatgaacaatgtccgctgcccaatcacattaaaaaaattgctttggtcatgtagagcagagtatggttgatttgctactgataattttcggctttttggctccgtccaaaagtttctgttctgaaaacacaaaatgtgtcgcaccagaaacacctaataaa

SEQ ID NO: 58722 - DNA, 434 bp, Heterodera glycines
atgccgagcctcgaatctgtgcctgaacgcattaactttgacgaggaggaggaaaagaccttgcagaaatggcgagacgaaaacacttttcagacatcgcttgagtaagtttcgaatttgattttttcgacaaattgagagccctttcggctatgttttggtcattgaccgtttcgttaagcatgagtcgtggtcgacctcattacactttctacgatgggccaccatttgccaccggacttcctcattacggacatattttggccggtccttagttttttccaatgtgaaaaattggcgcatattcgttacattttagggaccatcaaagacattgtcacgcgctgggctcatcagagcggcttttatgtcgaacggcgttttggttgggacacccacggacttcccgtggagtacgaagtggacaaaattga

SEQ ID NO: 58723 - DNA, 230 bp, Heterodera glycines
atggaaagggaggcgatgaagccgaaggagacgaacacggcggaaaaggtacttctgtcgcagagactgcgcgagacgggcgtcgagtcgggagtggcggcgagaagggccaaatttggggacaaagcggcggagcccgcgggggaaaaacgcggcgaaaaggcagtgaaaacggcaccggacagagaggagaagaaagctcaacatactactgacgaaacagcggaaaa

SEQ ID NO: 58724 - DNA, 615 bp, Heterodera glycines
tatgaggcgttgtgtccttattgtcagcgttttattgccaataatttgggcgctttgctcaatcgtttcggaagtcgcatcaaattggacttggtcccttggggcaacagcattttgctgcggaatggccaaatttcgtaattattttttgctcctttctctgtacattttgcacatttcagttgtaaccacgggcctaaggaatgcgatgccaatcggctgatgtcctgcgtacttgacgaagtgtccgctgatcaggccgtccatttcgtcatttgcttcgagcgttcactgtccgttggttccggtgttgaacagtcactgcttcagtgttccagctttgtccgcaacagctacaaacgcataaagtgggagacgtgcaatttgtgatttattccaatttttgatggtttcaggctttgctatatgggagagcgtggatttctattgcaacgacaagcggcacaaagaacaatgaccgccaaggaaaatccgatcgttgaagtgccgtatatccttgtcaacggatattcacccaacacggacgcgaattctgttaacattgtcgctctttcgcatcttatccaaaagtggttgaacttacgtgaaaggaga

SEQ ID NO: 58725 - DNA, 310 bp, Heterodera glycines
atgttaccttcaatgtcaaaaaagcaaagaaagccagaacagaataaccggcaactacgcataattgaagtccaattgttcactccaactgcccgacggtacccacactttgattacgaagaaatgtgcaaggaattgggagtgaattggaagaaatgattccctcataaacatttttcaattttagctcgaaatttcgaagcaaaaggaaactgcggagagcaattcttttcacgaccaagacgcagaagaaattgtgcgaagattggaggcgaaatatgtgtgtttgagaaattgtaaaatcagataa

SEQ ID NO: 58726 - DNA, 689 bp, Heterodera glycines
atgcccaatttggcacttttacgaaacgcccaaagtggcactttttacgaaacgaccccaaaagcccgatatttctccacaaatgcacgttagtcaatataaaaatgaaaaattcttgcgacttgcgagaataaaaattgcgaaaagatatcttattaaaaagtacatatcaataagaaaagcaaataatcttaaaatgaggattgctacaggtgtaaaaaataaaatttttaattcgtatttaattataaagataaaaaagtctaatgtaattttttttttaaatttgtaaatctaatgctaaaatgctggggtaactttttaaattaaatttttcatttctatttcgcataattattacaataaaaaaatctctgggattttccacgtgagaatcgtttgacaagattacaatttataatcacttattaataatttcagaaacttaaatttattatttttatttatttagaaaaaagctttaataagattaaaaattatgttctttaaaatcattgacatttgaatatacattgaattaatttttatatattattaaaatctctaaaatttattttattcttttgttggatatttttgaggaacaatttgtgagtttttttctttataatcttgcaatttttctgatcaatggtggtcttgaaaaagataccttgtttgaaaataaa

SEQ ID NO: 58727 - DNA, 302 bp, Heterodera glycines
ttttcttcgacaaaaaccgactcattgatcattatgtcagcgttttgttgaacgccaacattgtgcctgattccgttgatcggatgcgccgcgatataaaatcagatgatctgatcgtttgggcccaatggctccaatcactcattgagcagcagcacaagggaccatctcggcattccttacaccgggactacgtttggatgtatttacgcattgcgtatgacatgtacgaactcggaacggagaaaagcgaatttgaacacacttttaccaagatggaaacactgatgaaaagtaattag

SEQ ID NO: 58728 - DNA, 1163 bp, Heterodera glycines
atggcaacttccgatgagaacaacagcggtgcttatgcgaaatttgcggacaaagtgaccattttggcaaagctgacaatgcatttgagggagtgtttacaggtgcgcgtaattaaatcatatagaaaaaagatggaatatttttgaacaggtgaacaatcaacacaatgcaaagcagggcatgtttattgtcaaaagcattcacaagaagaacttggcaaatgtttttgtcagaagcatttggaaaattccggtgcgttttaattaatggtttgttgatctgaagtctcaaaacaacttttagttgcatgagaagccgggtatcgacactgtgaacacattgctgaagctgctcgaaggaatggtgacgaaaaacggcgcagaattcggagcaatgggcgcgcgttcttatttgttgccatccttctcttatgacccgcgctcatttcaatattacgacgacgatgacctgactctcagccgtgctacctttgaggagatgggtcgaccggcaaccaacattgacccacccattgcttcgactccccgagaagaccaaaacgcacaccaagaaaatcatgcggcaattcctaacgaacatggagacgtggaacaattggacgaatcgatgggcgaacccgggcacttgcgaggagatattatcgacagtatgttggacaccactcaagaagagaacgaggatggaggggatagtgaagaggagtcgcctcatgactcggaagaggaagacatggacaccggtgaagaattgacgcagcaaagacccgcggtgcacgagggcgcaatggaggacgaccacatttccgaggcagccgacgccaatgagcaggttctgcaatcgcacttggtcgctgatgatgacttcgaggagatggatgatgacgacgatggcgaggaggacgaagaagacgaaaccgaagtcgagggagggggggagttggccgattttgacgtatgtcatattcgttctgttcacttaagtgtaacattttgtttaggacactctgcttgactacgtgacagactttaatgccctcgcccaacagatgcacgacattcgacggcggatcaatctgaatattgatacgaacgctttaaccatacgaccacaacaggtgcagaaaaggaacgatgaatattaa

SEQ ID NO: 58729 - DNA, 1559 bp, Heterodera glycines
atggcttctccggagtgttcgacatatgatcgaatgtttaatctcttcgaagcgcgtatcaatggcaattgttgcgaaaaattgacgagcaaattgctgacgccgatgttgctgttcttcaacatgtacgagcaggagcggagtgcagacatacgacaggatctcttacaggaagcattggacggaactcaatttcaggtcgcgtcttttgtttgtggaaagtgcagcacataaaccaagttttagtggttctactggacagcggatgaccattacacgggcgcgggcgagtggcgcgaattcactccgctgtcggttgcgcagctgaacaaagctgtcagggagaagaagacttctgttcgtctgacggttgcccagcgcgtttacttcattgacctgaacgagatgaccaagcgtttgttgcctgaccagcaacagcagggcttccatccgcttcactcatcagtgccaatctacgcaaaagccaacctgcgcggagacttcaatatggagaagcttgtcaagctggaaagtgaactcaggaagggcactgaacgacaccgactgcttgtcaaaggcatcctgaaactggtaaagtcgagcagcactcaaccgttggacaacgaattggcacacaacgcgctgacattgttgcttcgcctcgtttcattggatgggatggcgcaggagtttctgaatgtaagtctgtctaaatgcattttcattttgaacattcctttttaaggaggatggagtgaaggcactgctggagatgaagcgcaatccgatttcggcacaaatggtgccaaatggcacgtcaacgcctccaacactgaacacgttggcaacgctcattcttcgccagtgcatcgactcggacgccgctcttctgcagtcagtcttcgaacaaatgatcaccgcaacttgcaatggccagccaatttcgatgcaggagatcacttcgcgcagacatgcaatgcgaacgaagcgttatcagaaggatgttaaggtttgttcattttcattcaaagtctctgtatagtagtaattcatccacttttagagagttctgcgcatgttggtacctttggcggcgcggtcgcccccactttacatggacgcggcgaagaaatgcatggccatcaaacaaaacgaaattctggtcaaagaacagcggggtgacgtcacaggcaatggaagtgcagcggcggcttcagaccaatttattcaagcggttgttttcattcttattgtcaaatgtaattgttgctattcatatttagcttctgagtcaaatcgtgacggacttggcgcaatttgacacattggcggacgcagacaaaaacacccgtcttatgcagcctccaaacctgctcaaattgattgccgaagtgcttcgcagttatccaaaggtggctgttcgtcaagtcagcgcatcaccgatcatgtcgtgggcaacatcaaatcacttctcgtcgaaagtggcgacttggacaatgcgatggcaacttccgatgagagcaacagcggtgcacatgcgaaatttgcggacaaagtga

SEQ ID NO: 58730 - DNA, 439 bp, Heterodera glycines
atgtgcaaaactgtaagaggcactacaaaaagacgacacacttgggacagcgaattgaagaagggagatgagggggacgacaaggaaaacataccgccatcagattatcacaatttaacgacatttaacggacatgggaacgaagaggaggaagaggaaggtgaacataacacatttgaatatactaacatgccatttatttgacttggttgtttagcgttgtcgcccgaaatgcgttcatttctcagtgagtcgaccgcccatttaagcgattctgaagtgacttatgcgcggcggtgcattcgacgaattttggcccaatgggcggaagcggagcgacgtggttcaatcaaaaagctgttttcaaagagcccatcagaaaggtgaaaaccccctcttggtttgaaaatgagctagaaagcagctatccaaaaataaa

SEQ ID NO: 58731 - DNA, 72 bp, Heterodera glycines
gaatctgttcacccaatttacaatgtgcatatcgacgcatattccaaagcgcaacgatatttcaaagcatga

SEQ ID NO: 58732 - DNA, 432 bp, Heterodera glycines
atggaactcattaaccaattctggcgcgatgatagcgaaaagcagtttgaagactaccaaattcccgaatctccgccctattggtccagcggtttcctgtcgattcagtacgcaatcgaaaaggcgttcatcgaattggtccgtatcaatatatatatttttgaaaatggacttattgttagtttgtcgtttttcacagtgtgcccaattaaaaaaatatatagagatttcacttttttacgtgcttttaaggccaaaggtgacgatgctttggcaaatgtttcgctccgtctccaccgtttgcccattccgtcgtacatgaacaagcaaatggccaccataacggtgcccctttttctgaccatgcttttgtttgtgttcgccttttccatgctgaaggacattgcggtggaaagggagtccggcatcatg

SEQ ID NO: 58733 - DNA, 883 bp, Heterodera glycines
aaatttgcaaaaccttctacttccgtcagtttcattgttgtcatttggtttccggcgttttttgcttactcctttgagccctttaatgagaacaacgaattgactcgggaacaattgacatttaaaaagactaacaatagcagatgttttctgcttgtccgttgtccaattgcgcgagaagaaagcaaatggatcgaatgggaggaggaagcgattggctgggaatttcttcatcagccgaacagaatcaatattcaaattgatgatgaggagaacattggggacgggtcagtgagtattttttattcaaaaaattcaaatttattcgtttccatttttaggcttctcgacgcaactcccggcccaagtgatcagcagcagaagtgaatgaatgaattgttgcgaagtgatcgaccaatttgaattgcggaatcgaagaatgaatttgagcccatttgacgtgctcataaaaatatattctaattttttggagttttcacaaaaaaaaatttagtgttaaatgttgtggattcaaatttgataaacgaattttaaaattcggaacaaatttaattttgtttgcaacgaaatgaaaaaatggtttcggcagtgaaactcgctgttgacccactcgcgcatcaattcagatttggatttaattttaggcattttcaatattttatcctaagagatatatattcaaatcggaacatatttgacgaaaaatggcaaaatatgcaaaaaaaaatctaaaaaaatatgtacaaaaaatggctaaatatgcaaaaaatctgaaaatatgtacaaaaatggcaaaatatgcattaaatttcaaaaaaacccaaaatattcaaaaaaacccaaaatatgcaaaaatatgcaa

SEQ ID NO: 58734 - DNA, 436 bp, Heterodera glycines
  unsure (1)..(436): unsure at all n locations
atgcctcaaaaagaggtcattcaagttgaaagtgattacgaaattcggcgcaaaccaaacatttcggaggcgctgaagttgttcaaaaggcatccgaccaaaatagacacaggcaagcgcaagaggaaaagccaattgaaccgacctttgcttatagtgggcgcttttgctctcattccgccgacaactgcattcaacagaatttgcgaagcggttaaagctttgtttgagtctctgaacaatcaattggcctcagtttgttgattttagcaaatttgctcctcaatcccattatatttcagaccaatttgattgtctctttcacaaatttggtgattagacgaacaaagaatcgccttgacgaattgaagcggcaacgcatttcgatcaccgaaaatgtggaatgctncatttgtagaaaaaggatcatgaacag

SEQ ID NO: 58735 - DNA, 1417 bp, Heterodera glycines
cctaacccaacaaagggaaggctcattcggccatcgccgccgctcattcgcctaacccatcaaagggtaggcacattcggccaccagtcgccgacttcttcgtcttgcccaacaagaggcaagacacattcggccatcaccgccgacccaagtctcacccaacaaagggagacacaaccggccaccagcagccgaatcttcgagtcttcaatcgggccttgtgccgcccgtaccaaggcctacattgaggcggccactgtcaacctcggaaaggacacgacagacgtgagcattcaagcagacctcacagcggagcgccgtggactccgccgagcgattcggcttttggaggattgcaatgacaaatggcaatccctcctgctcaaattcaatggagccgaccgccaacaagaggagcaacgctacgatgactttaagccatcgggaaagcacttcatggaatgggcggacaaagcccgaggtgaagtggacacgatcgatggagtgatcggtccagaggatgacgacgaaataactgggagcattatctctcagcccgccaatcctccacaaattcaacatgttcagcctcccccacctcgccatgaggtgtacctacctcccatctctctcccaaaattcacgggagagccaagggagtggccaatgttttggaggctcttccgttcctcagtggacaaccttccaatcgacgacttcaagaagcacatctatttgttggggtgccttccccacaactcgccagctaggcgggcagtcgacttgtacccaccctcggacgaaaattatccgagggttgtcgacatcttgaagaagcgatttggtgatagtaaaactatcactgagtctttgcaggcagagctactgcacctctccaagccgggagagtcagtgctctcgctccgcaacttcgcggagtccgtggaacgaatctgtttccaactaatggacttcgtcgaatctgaggaaaacatgttcatggcttcgacgatcaagtcgaagcttccgttctccatcctcacccacgtggtggagaaagagctttcctcaggaaggacattttcgtgccttgacatccgaaaggcacttcaagcaatagtggaagtaaaagaggaagtgcagagatgtgcacatgtcctccgaggcgatgaacgaccacgttcatccaccttcaattccccacctcaacagaggggtgcctgggatcaaaggggtgacaaccgtcactccaacaaccgacagagccaaccaccaaggccatttaatcgtggagtaacgcaccaaccagaatatagggcgttctccgcgattaacaaaaatccggaaagggccaaaaccacagcaagaaaatggggtcgtccctgctcgctctgctcgggaactgatcatcttccca

SEQ ID NO: 58736 - DNA, 279 bp, Heterodera glycines
atgtttgcattttttttggcttaccaaaacttcatcgaacctggttctttctattctctttcaaatcgccccaaattttttttacagccacgaggccgcgaagcggccgagtgagtaccttgggcgcaggaaaattattaaggaggagggttcattatttatttatttttgcaaaattaattcataaatttttttcagaaactgctctgaaacgcaccaaaatttatttacaagttgaataaggcactctgactcttatattatcaaaaagggagatga

SEQ ID NO: 58737 - DNA, 961 bp, Heterodera glycines
ggtgaatgggtcaaggaggagcgcaagagcaatccatataaaaagggggacgacatcgatctccgagtgagttgccccggggtggcaccgaatgaatgactcatccacccattggactcccttcagattcgtgcccacgacagcaaattcactgtttatgcggaccaaaaagaattgaaggagtttgagcatcgcgttccgttaaggtgggcaattcggatgattcatttcctcaacagcctccatttgttcagtcatgtcacacacttttccatcgacggcgatgttctcatcacgcaaatccattggggagggaaatattacgtaattatcggaaaatgaaatgcgattattttcgtcagcgtttttcagcccgttccttatgagagcggaatcaccggcgatggttttgcacccggaaaaactctgttgattttcggaacgcccgagaaaaagggcaaacgtttccacataaatttggtctgcggaaaatttaaaactgaatttacttttaaattttagctgaagaaaaacggggacattgccctgcatttgaacccccgttttgacgaaaaggcaaagccaaaaacaattaaaataaaacataattttatttttaggcaattatacggaattctttgataggtcagtttatcagagaaatgtttatctttaaatttaccaaaaagtgattatttatagccaatgagtggggaaacgaagaacgcgagggcaaaattccactggagaaaggcattggctttgacctgaaagtgatcaacgaggagtacgccttccaagtgaccgaccagcgcaatggcaatgctttctcatactgaccgagtttcagattttcatcaacgatgaacgctactgcacttacgcacaccgagtggagccgcacgacctccacggactccaaattggcggggacgtcgaaatcaccggcattcaaatcttc

SEQ ID NO: 58738 - DNA, 284 bp, Heterodera glycines
caagtctatccaaattcccttcgtctccgtccctgtcaaatgcatcgacagagtccgtttgctctccgccgttcgtgcggtttgtcttgagagaatgccccgcctaaaagtgaccgaacactttgtcataagttattcatgactttcttaagccatggcatacaccgccaaattgcgacggatcagtcgaaaggcttttgctgtttgaccccgacaaattcggagaagaagcgacgaacgacttgatcggcaactttcccaaacgatggattcgtcgccagaat

SEQ ID NO: 58739 - DNA, 4093 bp, Heterodera glycines
atgtcttcaaattttatcggttcgccaaattgctttttccgtccaacagctgatcagggtaagagaaataattaaaaaaagaattacgaaaaaaggaaaattattttatcttttttaaataaaataaaataaaaatttatcaccattagcagcagcagcagaagaagtggacaagtatgaagtgttcagttggcacggagatttgagcgaccaattggcagcacaatttttggtcagtgatcagcagctgttgaaggtgggacatttcagaacggacaaatgagcacagaggggggagcacaaatgatcacagtggggggggggaggacaaatgagcacagatgggggggggggagagaggccggacggatcagtcacggacaaagggccgaccaattccgagagcaatcaagagacattttgccaaaaatcatgcaattaatgagtgaaggaaattggaaattatttagtggactgaaaaaactttttttatttaaggaatgccgagaaaaacttgccagtgccgaattgagagaaacgaaattgctgtgcaaaaacggggaattgaatgcagagaatgtaagaaaaattaattattaaaaaaaatttaaaaaatgacgaaataactgagagcgaacgcgcataaaacagaaactttcgaattttgtaagaaaattcagaaggcgcttaaagcagagttggagaaacaaaagctgatgtcggaaaacagtgaattgaaggcgaaagttgagaagatggagcaggaaaagcagcagcaattggacaaaaaatacggtagagacaatttaaaaaaataaataatttttattaccgtactcggacagtactgtatgcttcaaaattatttcagtttctgtcgatgtgttcaattcattggtggagcgaatcaaacaattggaaaatcggcagaacaaagaggagggcagaaagggtaaataataaatttaaaataaataattaacggaccgaaattttgcatactttaaaaaggcgaaaaaattttaacggaccataagcttttacaattttgatcagttacaaattttaaatgaacatatttaattagctgaccaatgccaattattttgaattttcattttctattattcaattggatacatttgtttagcagaggaaaagcagcagaaggaaagtgttggtcaacagaacaaaaacaccgaacagaaattggatggaaaatatgccgtggtggacaaaaacaatgttttgggtgggcacaattggcaaattatttaaaattaaaaattggcgttataaaaaaaatgcattttttgagaggggacaaaaccctcgtattatatcgggattttatacatatttggtacatatttcggacatttttcttacatattttcattttttttacatatttgaggattttttacggaaatttttggaaattctcaaaaaaaatccaaaaatttcggcaaatttttcatttttttacatagctattctgagaatttttgaaaatttttagaaatttcttgtgaaaaaattaaaaaatcttttttttaaatgtacccctccaaaaataatttttcaaatgttaaaaggtgattttaaacattttggtcatttttatggcattttgtgcctatttaacactttatgaaaaaaaaattttccaaaaaataacaattaaaaaaaattttatttacatattttcgtacatattttgggtttttatacatatttcttacatatttcgggatttttttttacatatttatgtacatatatgaccactttttgtacatattttttacagccctaattataaatatttaggtgttaaaaaattaatttttctttttaaaatgtatttattgctaatttagttgctttagtgacgtcatcgggcgaccattcgccgccggcggttgtctcagcgaaagttgcaaaggtgggaaggaaaccttaattatttcacaaatgccatttaatttcaggaagtgcctaattcgcagcaacaaaatggctgggatgccaaagtttgccacaaagacatcgaaatcattggggaaaagcaattgacgatcaattgcaagggcaacagatttggtatttaatataaaaattaaaaaatgtaattaattaattactttcttaattaggatggcgctctgtttttgcgaaatttccaattacgaacttttgtcgtcccggaattttctacttcgaaatgaaagtgttcaaattggaaaggtgttcattttgatgatttcttagcgttttatttataattttgaatttattttaacagttttgctgcgattggaagtgccattggacgggtcaattggtcaaattttgaacagttacgggtaccgaagcgatggctcatttggctgtaatggcatcaatcggccgtgcaaaatgccaatgtcattatttggttcgtcattttcccccgtggcaatgcaatcggcggacgtggaaatggcatacaaatcatcggagttttccactggtgacgtggtcggatgtggcattttcttggatactcgactgatcttcttgacgaagaatggccaacgaatgggtgggccaattaaaatgaaaaaacaaattaattaaaattttatttttaagattattcctcttttttcattcaaactcccgccaattctctcaattctctgtttccgtgcgtttctttgtgggtgggcgacaaaatcgaggcgaactttgggccaaatttcaaattcaatttggcgactctctgaagaaagcaaaaagaatggaagaaggagaaattcatctaattgctgtcatttttactttatttatgtttattttttaaattctttttttttcaattttgattttggctttataatactaattactattttatttgctattaatttcgtttattaaaacgtcgattttgtgactcagtttcaagtttcttcgaaaaaattcctatgaatattaaaaattaatacgagaaacttcacaaaataatttaatttctcttaaataaggatggcatttcttgactcttggttttaaactagggtttctccccgactccgagccccccccccaggcccataccaaaggaatttttacaaatatttgttctattctcagatattaattaaatccaatttttcaattgcatttttaaataaaattctgaattggggcattcttttttaggtcatcaattaaaatttacatcttttattgtgaactttcattttaggaacttaataaaaagtttgtcaaaatggaattcgtattgaaaatcaccaaactggagcttaaaaatgtgagtgttatttaaagtgtcatttttttgaaaattaaatgggaattgctaattaattttgaaaaaaaaataaattttctaatattaaatgattttagaagggactccaataaaagttgaggcagaaggaaacgaatgtactgctggcgaaatcgaagcggaaaatgggaaaatgaaaacaaacaaaaaaactaattttgcggatcaatttttgagaaaaatttcaattcttagagttgtatttttctttttattgcatttttgttaaggatttttccgaagatcccgatgcaattagtgccactaaaagcaaaaagaacacattgttacaattgtcttggcctcggaagccgcggtcgagaatcgcggatcgcacaaaaaaatttgctgggaatcgcgcatttaaaaccccaaaaatttccaagttttcaaacataaattttttaaactttttaaaattttcctgattagaaaaaataattaatcaagtgccggtgcacgggcgaaaagaaaaaaaggtcgtcgctagcgcggcacaaaatgggaatatttctaactagagttgagcgggaccgggaattttgggcaaaaccgggaccgggacctaagaagccgggaccgggacctcgattttttttcgagaccgggaaccgggaccaacagggaatttttaaaaattcaaaaaatttttaaaaaattcaaattttaattttttttttcaactgaaaataatacaaaattaaatttttactttgttttttattgaataaa

SEQ ID NO: 58740 - DNA, 908 bp, Heterodera glycines
atgaggtggaaagaatttaaattttataaatgcaattacctatttttattttattttccattggaacagaaactaaatgcgaatgccgaatttgccaattccatccaaacaaaatgcaccaaatttgaagaacagcaaaacaaattgaaaaattgtgttgacattttgaactaccgattcggaaatggtaaaattgcataatttaatatgtgaaaaataaagcatttatttaatgtcattttaaaatttaattatgtatatatatgtgattaaaaattaagttaattcaaaaagattaatagggaatgctgtaaaattactttttttaaaaagaataaaaacaattctaataaatatttgtagtaatatttttaagcactgattgaacaaatcttggaattacaaaatgaacagaaggaaattttgggacgaatgagtgaaatggagaagaaacagcaaaatgacgaggaaaaggaaacggaaaagtacggtaagtgaatgaatgcctaccgtaatgaagcatttttaaatttaaaaataataaaaaattaggcaaactgaatgcaattttgggacggattatcattgtttatgagtcaaaattggatatttgttaatcattttaattgattaggaacaataatttttgcgctgtaatctgctgatcgtcttttgcaaatgcaaaaccagcagacgaagctttgtgccaaaattgatgcggtggaaacgaactcttctgcaaaatggagtagtatgattcttgagttgttgaatagaggggaggcggaaataatgttacatttagttgatttatcagtttttgtgttttcgctcgcaaatagttacaaaggatatttttaaaggatgaattatcttcagtgtcgagaatggttagttctgcttgttga

SEQ ID NO: 58741 - DNA, 149 bp, Heterodera glycines
atggcaaggaataaagtgatacggacatcaatattctttattcttcattgctcatttaaacttacatatgtcagcggattaataatttgcttctatatcacttcagctcatcgctcgatgtcgaagaaggattaacgcggcacaattga

SEQ ID NO: 58742 - DNA, 927 bp, Heterodera glycines
aaaaattttattcatctcccttttcgatagaaaaagcatcagagtgcctaaactaacatgtaaataaaatttggtccgtttcagagcattttctgaaaaaatatttatgaaataaaaaaatcgattttttcaagtgtccgtttggggtactcaaacaattatggggagcaaaaatccaacgcagaattaaagtacaggctatagggaagctattccggaaggattcggtctccccataaatctgggcgcatcggttcggggggactgccccgaaaacaaaaaaatcgattttttcaagtgtccgtttggggtactcaaacaattatggggagcaaaaatccaacgcagaattaaagtacaggctatagggaagctattccggaaggattcggtctccccataaatctgggcgcatcggttcggggggactgccccgaaaacaaaaaaatcgattttttcaagtgtccgtttggggtactcaaacaattatggggagcaaaaatccaacgcagaattaaagtacagactatcgggaagctattcccgaaggattcggtctccccataaatctgggcgcatcggttcagggggactgccccgaaatccaaaaaaaaaattttttggataaaaataatttaaatgaactgactagataatatttaaaataggttatttctcttcctttcagtatccctgcaaagtttggtgcgcttctgatcagtttctgaaaaaaaagtaagcctaaactttttggcctgtttaaaaagaaataaaaatttttaaaaattttattcatctccctttttgatagaaaaagcatcagagtgcctaaactaacatgtaaataaaatttggtgcgtttcagaaccctttctgaaaaaatatttaagaattaattttgcaaaaaataaataaaaacgaaagact

SEQ ID NO: 58743 - DNA, 99 bp, Heterodera glycines
taaaaagtttacaacaccttcgattcccaggacgtctccgttccaagtactaagaaggcccaacgttgcttaacttgccagatcggacgggatggcgtg

SEQ ID NO: 58744 - DNA, 200 bp, Heterodera glycines
ttttttttctttttgattattttaattgtatttcatcctgaaattttttaataaacattttcaaactttcaccttattaatttaaggcgaattttgccttttttaataaattctcttgtgaaaaggcaaaaaaataggctcttttaaatatgcctatttaaatgactttaattgctgtcctttcgcttacgaccatacca

SEQ ID NO: 58745 - DNA, 1439 bp, Heterodera glycines
atgcctaaacacaatggaaatgaaaaacaaatgacggtaatactaccgatggtacccccccccattttttttggtagaaaaatttatttcttataaaaaaccgggaaaacatgattctgaggcgtattgtcgacgtgcgcatcacaaaagaataaagtttcctgtactagataagatatttctctctaactttttgtgctaaattaggaataccgagaacggcagattttgttcgcaaacaaaaaagaagttagtatttattcaagccttacgaaaggaacctcgtaatattggacagagaaaggcatgtagactaaatgaaaacaatattaattaagtcaaattaagggatacacaaggcaaagtgccaccaaatgtcttaaaataatttacaatttgcttcgtcgaaaagtacataaaaacaatttgtttttcgggtctttttattgtaaaatataatttccggacattttaactgattggcacattacgtcaaagtgtttcatggtgaaatttttgtactttaaattgttttcaacacaattagtaatttaaaaaataaatttaattttcttttctttttcattataaatgaagtcttacattttcacactcagaagacaaatattttttaaatactctgaataaactttttcaatttttttaattgtaaaattgccaagaaaatatttattctgctttgttatttcgtaattttttttaatgttttcaaattaattaagctaaatgttgtccgtcctttcttttgtgtgttattccatttatgaactcgtctccattttggtaataatttcaatttatgggtcagataatttatttttttataaatttaattgtttttttaaataaatgtaaggaaattgcccattttgtggtcaatgttgtgttctatcggttgcccatttttgctcccacttgcccatggttcggcacgtcgccctcggcactttacaccattggcacatttttggtgtattttttcgaatatctaatttatgtgcttcatattgccatcacccttaatcgttgctcgtgcgtttgggccccaatccggcacaaagaagtaaaacaaacacataaacaatttacaccattacattttctcagttttggtgccgtgcttgtgagccgacaattgcgtttgcttttgctctttctttggcattttctgcccaccgtttggtcactattgcccagttggtccaactcgacaaaacggacccgtccaagggctcaattccgctcattgtcacctaccaactttattttgtatgttcaaatttttgcgaattcatttgaaatttttgtggcacttcgtatcgctctttgattttcttgggattttcagaaattgaacctaacttttttttaatcaaaaacaggaaaatcgcgttttctaatattttattgtgaaaaaa

SEQ ID NO: 58746 - DNA, 476 bp, Heterodera glycines
atgaataataatttagtggtctggttaaacgtggatttgttcccacggcttttcttcatcggattactgttgccaaatttgaggactttggcattggcaaaaacaatgtaattaatatttattagcaaatctaattatatatttttcttaagtttgatgtgcgtcaatgcgctgcttatgttgaacaaatatttaatttttggagcaaaagcaaagataagatgacagctgatagaattgataatcataatataattactaacgatgatgtcgaaattatttatcccatacaaaatcaacatgtaaaaagtcatttccatctaattaattgaaaattattttagttaaaacaacaattgttgggattaaaccatcaaaatctgtgtaattttgttgcgaaaaaaattatgatggacaatccaagtgaagaaggactgaatgaaaagaatattgctgatatggagatggatgactga

SEQ ID NO: 58747 - DNA, 373 bp, Heterodera glycines
atgtcaaatttttgttattttgcaatttttgcatgcatttctcaaatttttggcactgcaaatggaatgaacacagaaatgggatttcagcctcattttcaacaaaacacatcaacatttttaaggaaattaggtaataataccttaaaatttattttgttgtttttaatataattaattattttttagaatttgctaatgagccaaaattactgataccaattgaaaatgttattgcttttttgaaaatgttttcccaacttagttcatcgctcaattccaatgattttagcacagtttgcttttaatatttttcaaaaatattcagaaaaatattttagcaatgcgtcgattttcaaattttgcaaataaa

SEQ ID NO: 58748 - DNA, 664 bp, Heterodera glycines
atgctcgaccaaatttataatttgtcgctcagccatcgacagttatttaattattttggaatttgcattgacattccttcgacaattgtttatattttggaaatgattactatcataaagcataaacaattttcaaagtcaccattttacaaattattcttcatccgtggcgtttttgtaagctatttaaaaaaatatatttcaaaatttatttaaattggaattttattttaggatattcttagtttagtgcccaattccttgggcaatttgcttccagcattctttggccaacaattgttgtcaatttacagcaccgtaccaaattgggcaatcgtcttgttaacctttttcacaaaaactttggtattccaagtctcaaacattgtgacagttttcattttgttgaatcgtttcactgcaattgcatttccattgcgtcacaaaatggtaattaatatttaaattaaattaattaatttccgttttttaaaaatttttagctatggaaaaaacactttaggcatctgatggtgtttttgttgattgtaccaatgctaattacttttccaataatgcgaatgcgcacaacaattattttttatgacagcaacagttttctcttagacgacaaagacccggtaaaaacttaaataatattaaa

SEQ ID NO: 58749 - DNA, 702 bp, Heterodera glycines
atggcagcagcagcagcaacattcgctgttgccattcgctgggcgccgtcacaggcgcgaagactgatcaaaagcagcagcagaagcagtgtacagcagtgcggctggccaatggcgacatttgttcagcctgtggcagtgttcagcggaccgcagcaatggaaaggaggggtgagtaaagttcataaaacgggggggggcattcgtggaaggatggggtaaaaggactgccaacatttaaaaagggaaaatggcatttttgtgaatgacgcggaggtgtgagatcgggtaacagagaaccgtgtactgctacaccccaggctcgaatcagcacaacgtgtgactcacatcgacacgtaagtcagtactagtaattacaatactataatcagatcattgtaagacataaactaattaatatgaaattttcctaattacctgataaagatattgcaaaaatggaaatcaattatgaggatgagtgtccctacaatttgggctttgcccgtgccatgttcgacttggccgctgctgctgatggccatgcgggcaacgacacagaatggcaaaacatgaaaagcaaatttgtacaggaaagccaagcaatcaaagcaattggccaagaaaagaacattgaagttacggatgtgcacattggaaacccaagcaaaggcaaaaaaaaactaattatttgataataaa

SEQ ID NO: 58750 - DNA, 816 bp, Heterodera glycines
aaacaaaaaaatcgattttttcaagtgtcgtttggggtactcaaacaattatgggagcaaaaatccaacgcagaataaagtacaggctatagggaagctattccgagggattcggtctccccataaatctgggcgcatcggttcggggggactgccccgaaaacaaaaaaatcgattttttcaagtgtccgtttggggtactcaaacatttatggggagcaaaaatccaacgcagaattaaagtacaggctatagggaagctattcccgaaggattcggtctccccataaatctgggcgcatcggttcggggggactgccccgaaaacaaaaaaatcgattttttcaagtgtccgtttggggtactcaaacatttatggggagcaaaaatccaacgcagaattaaagtacagactatagggaagctattcccgaaggattcggtctccccataaatctgggcgcatcggttcagggggactgccccgaaaacccaaaaaaaaattttttggataaaaattatttaaatgaactgactagataatatttaaaataggttatttctcttcctttcagtatccctgcaaagtttggtgcgcttctgatcagtttctgaaaaaaaagttaagcctaaactttttggcctgtttaaaaaggaattaaaaatttttaaaaattttattcatctccctttttgatagaaaaagcatcagagtgcctaaactaacatgtaaataaaatttggtgcgtttcagaaccctttctgaaaaaatatttaagaattaattttgcaaaaaataaataaaaacgaaagact

SEQ ID NO: 58751 - DNA, 1281 bp, Heterodera glycines
atgaattcagacaattcattgacttatgaggagatgaacaacaccaacagaagagcgcattcttcttcaaacattaaggtgaatgagaatcttaaaaaggaaaaattattttatgagaaataataaaatttttcgcaatttttatttattttataaaaattctttgcgtatcgcttttctttagactccgcggttaatgccatcgacagagaattggtcgcgcaatcgaacatcagccgaaacgaaacgaattctgctaactcggcactacaaacatgaaaacatttttaaaggtattcaaaaatcaatcaattaattaattggtctaattaatttgtgatttcagatttgggcattcgaattgttggaggaaaaaaggtaagcaaaaacaatgcaattttaaatttatattttttgtgttctaatttagctatcaaacggcgatttgggtaagtgaaatcggagaaggcaaaacgtcgccagacgaatttttggacaataacttttttaacaacaccaagaaagaatgcttaatttggttgaaaatgaacaaaattattgtccaaaaaatcttccggcgacgttttggcaattcttcgaaataatttaaggtttttgaatgattttacgctgtttaggtgcttttataacaaagattgacaggtaaatcaaataaacattaagtaaattataaataatttatttaatcaattatttaattacttttgctttgttaatttaaataatattttaatttccaatttttagcagcaaagctcaagaaatgttgggtgaattaagagaaggagatcaagtaaaaattaaaattaaataattagataaagtatattttaatacttattttttattggttcaaaattttttgccaaaattattttgaaaatgtttaccttgaaaagattctcgaatggaacggcgttttgttgagcggaaaaacgtttgaagaagtggaacgggtgattcaggcgagcaatttgggcgaaatagagctgattgtgcgctctcggtatatttttattgaattttgaaaaaccaattaattaattaggttggtaaatggtcactgagtttagtgatttgtatgaatctgggctgtcctgatccgggcaaaattgactcggaagtttcaaacaaaacaattcataatataatttagataattatttcaaaactaaaataaaattaaatttttgtttaatttcagtcgaaatttacacgacaacggcgaattggaagacgatgatgatgagcatgatggaa

SEQ ID NO: 58752 - DNA, 1137 bp, Heterodera glycines
atgccgccatatggtccggctcacaaccaacagcaacaaatgatgccaccgtcggcgatgggctctgttcaaccgggcgcagccgcaatgaacaattggatggactggaactcggcagcggcgatgccaccacgcggcaattacccggtggcgccgacgaacgccatgaaggccggcacaccgacgggcgcgtacattccgccgcagagtggcggaatgatgccaccgcctgctgggcaggtgccgtactacgccgttgggatgcccacgtcgacagctgctgcgcacggtcaaccgatggagccggcggcataccatcagcaacaacagcaacattaccaagccgttcagcagcagtacacaaattaccaccagcaacagccgaacatgacgtacaacacacagcagcagcaacaaatgctctttcatcagcagcaacaacaacagctccagcaacaaatgatgatgcagcagaggcagcaacagcagcatcgccaaatggtcgcggcggcaacggcaccaccggcggcaggcacaacacagcacaaagcagaacttggcggagtccaggcaggacaaccggcggtgcaactgggaagctacgcgtcgtcagcagctggtggtggtggcatggcgccggcggcgggcggtccgtcggcagtgaattctgctgcacagcagcaacaccaatggcctggcagtgtgacgcctgttgaggatctttacgtacgttttatcggcgggttgttttttggaagaaaaaatgcttgggaatttgtttttccatttttatgtccacatttctcctgtatttaaccatcgccgtgtatgacaattgacttaaaacatttcaacaaaacgaaattttttgtatttttaagagctcgatggacgatttgctgcccgtgccgagtgaacagagggaaactgctggccattttggtggtgccgtcacctcatccgctaacacggcggtgatgagcagtggaggcggtattggcaaagtgacagtgaacattttgcacctgccggagatggtccgcggcgaactgaacagcgtggagcagcgcttccaattcgacccgaccgttgagctgaacacggacgccaacgcattcatcgtcaaatgcattctga

SEQ ID NO: 58753 - DNA, 2576 bp, Heterodera glycines
atgcccgacaggtcggcggtggtgccattttaaaaatatttttttactttttactttccaggtggaggattacgtcttccaaaagtgcagcagcaaagacgagtacatgagaacgattgcgaaagtgagtcaattgtatttttcaaagcaatttctattgaattaatccaattttatgccggttcaaatttcgtaaatcctgctttttggctttggcacattaatgccgtaattttttgtgtataggtaatcaatgctatcaattgcaactcgaagagcagcgccgtttctcccgtgttccaacagcaccaacttggcggcggcggtgtgccaaaaccgtccgcgacgccccaaagcgttgcccagtcgcagggctcaccggcaacgggcacagtcactgccacgggcggcacggttgtcgctgcttcggcggtcacttcctccgcctacaaagtgtgtatttgtttggggtgggggacggagagcagcgcaatcttaattgatgctgcgaatccgagccgtgccatttcctatactgtttttaaaaaaatggggttttcgtttggatatatcgtctccgaaattatatattttttattttattttttgccaaaaaagcgctcacacaccccccattttctatttggcgcagttggccacaaatcgcgcagaatattccaatggatttaccccacatttgcgccttgggtatttccaccgaaacactaaaaatcgggttcaaattcatgtttttttcaatcaaagaaagcattgattgctttcaagttaagaaaacaacaacatcttgtgatacaataagtataaaaaattcaaaaattaaatgtttgaatattcattttttccaagaattcattaaaaatgaagtttcggttataaaatctttagctattttcctgacaccaatcaattaatgctgcttatgctatgtgcgattgaaaaagcatgcattttacacttgattttgaggttccgctgctctggtttctcaaatgagcgagagtcggttctgttgttcaaccaatttcctcaaaattttcaggtgcctcccgacccacagccaacgcatcagcaacaacagcagcagcaaaggatggccgccgccgtccaacatcagcagcaacaaattggcgccgccgatgcctttcatcaaccgatgggacagccgccgccggcgatgtcttccgcgccgtccatggccatggcggcgtccggcacgaccgccgccgccgtaatggtaggcgcaacgtcacatgccggcaccgtcgtcgacacgagagatgttgcgggtgtaattagcagcagcaacttccaaccagcgcaccagcagcaacagtacccatgtgtgtattggtagttggcactgtacttttctggggccttttgccatcgactgccaaatttattaagccactttttctcgagagtctcgtgcattttgccctaatttgcaattggcatgggaaataatttgtggcagaatccatttcttcatttttccctgtcaacttttaaaacttttttttttcagacagcacagcgccgtccgttggtcagccgatcacaatggcgacaagcagtgcgagtgcagccgcttacccggtcgccacgcctcaactgatgatgggcacggcgggtgccggcggtggtggcaaaatgccgaacgccgtcctcaccgcgcaacaaatgcagcagcaacggcactggcaaagacagcagcagcaagagcagatgcaggtgaggagggagtcaacacgattcacttttgccactagttcatcgagtctttaagaaataacaatttctcaacaaaaaatttttttttttagaattttcttataaaaaactgagattttttctcgaaaaatttctgttagtaaattttttataaaaaaatttctcgggggggggggaccatgcgggtggagtgcaaacttattctcgactttcaatgtcgtcgtctttagagtaaatgtcatcgcattctaaaattctgtttaaaagacaaacaacttttttgaaagttgtcctagttagaaaaaatgttacttataagcaaatttttttttattattattatttaacaaaaaataaatctttaggggagcggcaaacgaactgctcccaattgaaactttgtgtgtgtacataacattttccatttccagcaccaccatcctccggccaacatgccgacaacgacgcttcatcagcaacagttcagtgccggaggcccattcatgggaccaccacaccaacagcaacaacatgccattgtgccgggtgccgccgctgcaatggcccagcagtacggcggctccgccgcggggttcgactacccgccaacgttggcacccgaaattgtgcaacaactgaaggcacttggggaggaggaacgaccctactacgagaaggtgtgccaactgcagcagtttgtcgccttcctgcacaattcgctaaacaaatacgcggccgacccggcgatggttggtcattgtgatcagaattttaaatggtcttgctaaatgggttcaccgccaaaatcaagggcaaataaa

SEQ ID NO: 58754 - DNA, 624 bp, Heterodera glycines
atgggacctattgaggagaaggaagcgattgagttgaattttaaggacccttggaacacaattcaaattgctattaatgaggaagaaatcggagacgggtcagtaaattgagaatacaatttaattgcaaatttccattttcaatttttagtcttatcgatggcacttccgacccaagtgaatgaattctgacaatgatgagtgagggacaaaagaacaacaaaaactgtgatcagcggaagaaatgaatcaattaaatgaggaataatgataattatctgtgataagaatgtattttatgaagaaaaaccgcaaatataaaagtacatgttaataaattggaggtattaaaatgggaaagataattttaaaaatctctaaacttcaaatcgtataaattttaggttttatttagagcccggcgcaggaccggatcctgcacaggattttgcaggatcccagtccgcaatcctgcattttttggaaaaaacaggatttgcaggatttgcaggattaatccggccagatccggtcctgcaaacatttttgaattccaatcctgcaacaggatccgcaaatttgaatgtttgtgcaggattatgcgggattttattgattttttaa

SEQ ID NO: 58755 - DNA, 674 bp, Heterodera glycines
atgtgtgctcaaaaggcattgcactcagcaacagttggacgtgccactttttcagacagtgaggagatgccatttggagatttggaccaacaattttattttaataatttttgtttttttttagcgaaaacttggccttgaccaccggttttccggcactgtttgtgtgaacggccaaaagttttgctcatcagtgacacaaccgaacgtcaaaatggcggaacaagtacacttcatacgaaatttctctgaatgaatatttgtgatccgagaatttttgaaggtggccgctttggtggcgctgcacgggctcagaatcaggcacaaattggaaggcgattgggaagagtaatccattttcttggtgacaattcgagaccggcggatggactgggatttatttcattggcattttggatttttctaggacccggaagccgttttttcaaaaagaaatgccttgaaatagacactgaaaccgagattttgtccaatttccattgttactacggaataatccaaggtctaaaagtcatccaaaaagcgaatttaatttttcatcaagtcccggttcatatcgctttttattattgttctcctgtttttgttttattattattgtttgttattacaaggtattgttttgccactctttaattagtttattaattaaa

SEQ ID NO: 58756 - DNA, 549 bp, Heterodera glycines
atgatcatttttcataattttgagaaacggaatcaaaaaatcagagtccgatcttcactttctttggccattttagggcgtttgtttgatgcaaagaatgttggcattgaccaagtaagaaaaaagtacaaagttatggccaagaaactgaagattgtaattataaaagtcggttggacttataaaaagcaatagaaccaaattatctttcatacattcaatatcgaaatttatagagttcattttaaaattcaaatcttccaaccaattcctcatcaaaatgctttctcgcttctcctacgatccgttctatcgccgttcgttgttgcctatgaccactgttggcaacggacgacaccagggatgttgatcgtttcgtgtttttagggtgtttcgtgttcgtatttcgtattttggcacgaaacatgaaatttttaagcactggtaaggatgggtgaggggtgagagaaaatattttttgaaaattggagaaggaaaatttatttgaaaaaaaataatttgttcagttcttttacaccataaaaagaa

SEQ ID NO: 58757 - DNA, 59 bp, Heterodera glycines; identical to SEQ ID NO: 52421

SEQ ID NO: 58758 - DNA, 59 bp, Heterodera glycines; identical to SEQ ID NO: 52422

SEQ ID NO: 58759 - DNA, 59 bp, Heterodera glycines; identical to SEQ ID NO: 52422

SEQ ID NO: 58760 - DNA, 59 bp, Heterodera glycines; identical to SEQ ID NO: 52421

SEQ ID NO: 58761 - DNA, 469 bp, Heterodera glycines
  unsure (1)..(469): unsure at all n locations
atgcagtacaatgcttttaagccccgccgtgaggcgggacagttacaaaattttgtaccacattttactgtggaaagtccaagtaccttattggacaactacgtgtcaatgagcacagtcgcctttggccagttgtggaacggaaaaatgggaatatcagatggggtgcgctcttttctaaaaattcctcttttcgtctaaccatccctcccttttgtgcactatttcgtttcaaaattgaataattttttttggctttttgaaataaattgtgaaaaatatacgaaaattattttagcttttaattatgcagtacaatgcttttaagccccgccgtgaggcgggacagttccaaaattttgtaccacattttactgtgnaaagtccaagtaccctaattggacaactacgtgtcaatgagcacagtcgcctttggccagttgtggaaacgaaaaaatgggaatattaa

SEQ ID NO: 58762 - DNA, 392 bp, Heterodera glycines
  unsure (1)..(392): unsure at all n locations
gcttaaaagcattgtactgcataattaaaagctaaaataattttcgtatatttttcacaatttatttcaaaaagccaaaaaaaattattcaattttgaaacgaaatagtgcacaaaagggagggatggttagacgaaaagaggaatttttagaaaagagcgcaccccatctgatattcccatttttccgttccacaactggccaaaggcgactgtgctcattgacacgtagttgtccaataaggtacttggactttccacagtaaaatgtggtacaaaattttgtaactgtcccgcctcacggcggggcttaaaagcattgtactgcataattaaaagctaaaataattttcgtatatttttcacanatttatttcaaaaagccaaaaaaaa

SEQ ID NO: 58763 - DNA, 2864 bp, Heterodera glycines
atgagttcctcttccgctaaattggacgagttccaaaatgctcttccgttcggtgtttttttgaatgatttcgacggcgcagcgcttggaattgtcgcatttgaaattcattgtgccattggaacaaatgacgtgaacacttgcaaaacgatggtaaagtgaaacttaaaaaaataaatttgaatattttgaatgaaaaaaatggttggctacggggggaatagaacccatggctacaaaacaactgagatttgaatgtattaagaattttttttaataaaaattataattttgtaggctaccgaagaaaaaagtagaaaattgaccactcggggaattcgaacttccacaaccactcgggcaactccgccaaaaacaaagctgaaaattgtaactccattcaaaactgaaacaccacgcgttgtaatcgttttcattttttaaaaatttaaaaataatgcctttttctagtctgaaattgaaaaatcaccgaaactgaccaccctggaaacccatacaaaaacaaacccaaatgtcggaacttcatctgccgtaatcatttccctcaaattaaattaaattaaaaattttttagccgaatctgttcactccacgtgattctactgtgaagcatttcggcacaaattgcgtccaaattgattttccagcagaaattgcccagttttcgctgaacatttccgcctcattattcggcattgcctgtaaacaatacctaagaaagtacaaaattggacaattgccaaaaaattacgacgaaaaaatggaaatgaaagacaaaatggaagcgtgtggaaaagtgccgacagagacaaattgcaaaaagttaaaaaaatggaaattaaaattaaattaacacctaattaaggtcatatgagctaattggatgttctgaaagcaaaagtcagcagaaaattgccaacgaggaaattgccgaagtttgccgaaaacacctcgcaaatgccaagttttcggatgggtttcgaattcggaactgtgccagtcgtaaaccagggacgaaagtgatcgttgtcgaatcaactttggaattttcattcaccgagaaaaagtgaattaaataagaattgaaaattttttaatttttttatcaaagttataccatcacccgaaatgcttcaattgatgatgtgaaggaatttgaagctgcaacaaaatcaactcaattatttttcatcgaatttggccaccaaattgggcaaagtgcgctccgtgggaaaagcggcggcacggatttgtcattggacgatttggtcaaaaaggcaaaaattatataaaaataatttaatattgttgtttctttaaatttagaatgaaacaattggccactttttgggctcaatcgctgagcagtcaattgatgagggttgggcgaaatcaattcattttattccgccgtctgacagatttctggatgtttttttccaaatttcgaacccgccattttcaagactgatcagtaacgagacaaatttgatgccatatgaaaatgacccgaacaaagtaagagttgggaaagaaaatagaaaaaggttaaatattactagacgattccgacgagatgcgatttgctgggaaatgattgtgaggcgacacgcgaaattctgcggaaaactcggaaagttttggagtgctgctccccctctaatgctgctggtccatgtatttgtaaacttccgaagcccgacctggtaaattaataatttaagctaattgtactgtcattttctgttagagtgaatttgcggtgcctaagggtacaaatccgtctcagccacaaaagtcacgcttcagcagtaacagccaatcggacgacccattggattggtgggacgatattttatatacgaaagagcaggcgcaacaaagatacgactatttggttctaatttaagtgtgcgcaccgtgtttcccaccaaaaaagaaggggaaacggagaaggaaaagacaggcagagccaaaattaaaaaaatggaccaaatttccaattgcgatccatttcagtgacgaatgtatgcattaagttttataactatttcttaatggtattcagtgggcgacccgactccgcaacaatatgttgaagctgttgaacaagggataaaattaatcatgtgggatcattttatcaatcattaaaccgataaatagtgagataaatagatactttagataaacttttgtccaatattccttgctttctgttaaaaagccgaaaaataaaacacttctcaaaattaatattgtttaaaaattgtggattgataggattatttagtgaccattttcctcgggtcttcccgcattttatagttttgatcatttaaacaaaaatatactagggacaaaacttgcgtaacattcaccacggatctgagccatgggccggacgaaggcattgaaatttacgataagaaggacggatactgcggtctatcttgggttggacatattaaggaatggcaacgtgtttcaattaactgtaccaatgtttgtttttattatcgttatcaatttaattaagttcatttctaaattatcagtccgacactgttgcccacgagtttttacatgcgcttgccctcaagcatgagcaagaccgggacgatgccaacaaatacatcaaatggaatccaacgccacgaaatgttagccaggattacaagaatttttttttgcaattttacattaaaaaacactggcataatttaatattttagcaaaaagaaccgtcgaaaacagaaaattacggctttccctatgattttcattcaattttgcattatgctgctgtgaaaacaagcgggtcagttattttaaaggtataa

SEQ ID NO: 58764 - DNA, 496 bp, Heterodera glycines
atgattaagctaaacggccaataccgcgagatcagaggcgtaaacgaaagcaaagtcttcttttttgagtgttttgtaagtgacattaaataatttaattaattaattgtaattaaaatacattgtcaattaattaaaaattaattgattaattggttaaatttatttttaaagaggcgagaaggagagacgaaaagcttttggggttattggaaggacaaaagcaaagacccaattcgcattgacgaaatgcaatgcttgagctacgaacaagccggcattgtaaaaccgccaaacaaaacggtgattgattacccattgcgcttcaaaagtgccaacacaaacgaataatgatgccaaaaagatgaaccaactgcggagaatggatgtgatgcatagggcgggtgtttttatttaaaagtttttctttttataatattttattttttagtgtatttaactttggttttgtattttaaatttatttgtattgtaa

SEQ ID NO: 58765 - DNA, 553 bp, Heterodera glycines
atggaaatttcgaaaagcgtgaacaatactaatcagacatttgccaatgcttcttcatctcctgcccaattcatcattgtcctttactttcggatttcacattttgacctttttgtccctcctttgccctttaatttgatcaataatttgacccgggaacggctgacattggcactcattgaccaaggcacttttttactcgtccgatgtccgctggtgcgtgacgagcccaaatgggccaattgggagagggaggcgaaagagtggccaattgatggacaaatgaacagaattgtcattggtgaacatgaacaggaacaggaggaagaaagcgaagatgatggtctctatttggtcaatttgttgaacaccggctgaacaaaagggtccgactgaaatggcatttttgaaagtgccaatgccaatgccgcccatctcattaaggggtggggaaaatggtttttttcgagaaattggtaacaatttaaaaaggtcaaaactttaagctcagcaacaccaatatgatttgtctttgattctttcaatgtttgaa

SEQ ID NO: 58766 - DNA, 497 bp, Heterodera glycines
aggatcagaccgcaaagtggcaaagaaaaagaagagcccatttgcctgagcgtaattcctggcgaaccacaacttactattgggcgcgataaatcttttacatacggttctaagcttaaaagttttatttgtaaaagttggctgattttttagatttcgtcttcgaccaactgactccgcaaaagaccgtttacgacaaatgtgtgagggaactcgttgatggtgccttcgaaggatacaatgccacagtttttgcatatggacaggtttttgtttaatttgaacaaagttcaaaaaagtttgtcggccgttcacagactggcagcggtaaaacatttacatgggcactagcttggagggcgacccggctaaaagaggcatcataccaaatgcggcacaacaaatctacgatgaaattgaggaaaggcgtgaacaggcccgcagatctggcaaagtgatcccctcttttgaggtttccgctcagtttattgaggttc

SEQ ID NO: 58767 - DNA, 112 bp, Heterodera glycines
atgcactccgccgccgccttcaaccagctgatgtgttgcccggccgctgcggcgatgagttttttgcccgcggcgctccaatcgtcggccaccattgcctcgggcaatgcct

SEQ ID NO: 58768 - DNA, 319 bp, Heterodera glycines
atggtctgtgacaatgtgttcaacgagcggcaacggctcaagaatcgggtgaccgcccacgccaaaatgctcgccactcttttgagtccgttagactgcaacgatgtaagcggtggatgagaaagctccgagtttttgtaacaccgagacaaaaatttcgatgaaaatgggtatttttggattctttgggatttgaaaacttggaaaaactacaatttttcgttaatccattatgagatttcagctggaattggttgcgttggccgaccgattcaccgcctgccggtacatccctcgcgaggagtacggaaaagtgtga

SEQ ID NO: 58769 - DNA, 609 bp, Heterodera glycines
  unsure (1)..(609): unsure at all n locations
atgcaattttctgtcgtaataatcattctttttacattggcaatgtttttccattcgtttccgttatctgaagctgatggaatacgttagtccctataaaaaaatctttataaaaacaataaaaatgactacctattattataanggatgcctccccgaaccccgagcccccgaccctcgacattttttggcctattctccgacccgaccctgacatttagccccccccccccactaggggtcgggtagcaaccctatttattattaaagaataaaatttgagcaattcatttaaattttctccataatttacaaaaaaaaaaagttttttcaatcagtgtttttgttgcatcaaaagagaaaaaaaataaggaaaattcatttcctatgaaaccactgaaaagctaacaaaaaggaaatttatttaagagaatgccattgatgtatatggtagtgccaattctttcgctgactccgatggcccacaaattttggctattccaaggaaaataaaatcggcatttcacgaaatggtaatctaattggcacaggaaaaacttaactcagtaatttgctttaaaaattttttataaaagtaaatataataaa

SEQ ID NO: 58770 - DNA, 743 bp, Heterodera glycines
atgagttcaacaacaacagcagcagcagcggcgacagcaaaccaaaatgtgttggaattgcgtcgattggtgagtttgaattgagcggaattatactcacaatcattcggcaacaacggctcatttcagctccaaaattgttttacatatccatccaatttgtggacatcgttctgagagcgcttaagttcctctgttgtcatgcaaaattacaaaacagggacctgaatttcctaaaaaaaaaatttttgactgaaaatttgacagaatttttcaaatttgtactggctaataaagaactcaaggcaatcgaatgatacacaaattggtgtccattagtacaactgtgaaaatggggtatttcccgaaaaaaccgagctggcgcccagttgttcctctcttttcaaactgtgcaaaccgttcatcaccatcattatttgttctttcagatcaagaaatttttcgctgcccgttccctttatttgagtgagcaggcgctcacttatctcgtggatcagttgaacagttttggtcgggcacaatgccaaacagtgatggcacgcgttgtgcagctggttgagcggaaaggaggtcggagcccttttttgttgcttaattaatttattgcaaaaaatttagttgtgtccgatttgttggatttggattgtctgaagacgattctgcatgaagtcaatcggcaaaaacgaaatgagaggtgagtgggttgggtgggtataaataaa

SEQ ID NO: 58771 - DNA, 2420 bp, Heterodera glycines
atggccgacgcgggccaactcgtggcactgacgggcgacggcggagtggacaaaacagcgcttttgaacacgttgctggaccacaacctgaagactttgagcgtggagggtcaagtgctgatcaacgcgcactccttgggccggttcatcacttacgtcatcggggtgagtcggaaaactgctaatcttctgttaaatgtcaaattttgaattctaaaacaaataaatggtaaacagaattacaataatgtacaatttttcctttgaaaacttgggttttcaagcgtactttaccaattaagtttttcaattcttcgcgccgttagttttaaattcaaaacttgaccgcataatataaagtgccggaatggcaaatccaaacatcgacgatatgtcggttgagaccgttaattgaaacgggattagtggttattaaactatagtgtgttttcccgttctcaatttcagtacgtgcaacaggacgacttgttcatgggcacgccaacggtgaaggagcatctgatggcgccggcacagctttggatggtcggacacacccaacggacgatgcgtagacgcgtcaatgaggtgggattttggatcagtacaaaatggaaatcactaatttgctaatggattagtttggttgctaaagtttcgtcgtgcggctattggaattggcgaacgagttttttaagaatgaatttctcattttcagttggaagaagccatttcggatggtgaggcgcgtcgtttgccgttcgccttcgaaccgcggcacaacccgcaaatcatttttgccctccaaccgactaaggttccaatttttttttgaattttccaaaattcctgattaggacctcgcctcgtcagtggtggacagcgtggtctcgcacattctgcgtaccctgaatttgttcggccggcgaatcgtcgtcacaattcaccgtccgtcagaaggaatgtgccagaaatttgagcgggtaaaatttgaccgattttccataaattgagttgggatgagtgccacccccaccctaaatcgccaaaatttacgcatttgtttttatttgtctgttgataaattatatttactattaaacgttactttttgaagttgccatctgaatgtacctttataataaaattgaacatgtcaaaatttatgccttttctcatcccattggcagccacaaagcacaaaatggaggtagggaaaagaatttttttttttgaaaacattctgttagcaatttttgtaatactaccgaggtatcacaaaaaatggtgtgataccatcggtagtattgccgaagttttttaaaatttctcatgggggaaacaagcttctcccagtgctgacttcttacaaagaagcagcaattgtttttagatttagcgcaaaaaataaattctctttggcgttttgaccaatttgtctaacactgaaaggaattcaaaaattttcttaggcatagtttttccaatcattttattttttgaatattatttagaaaaagtaatcctttataaaaaatgcacattccaaaaatagaattccccaaagaaattgttccaagtttggccaatttgtcgctaaatcgtcaaccaattgatgtggttttttcttcttttgactttctttttaatatattttttgagtcctcggaaagggtaaaatgatttgattttattgttagtctgattttgtgcccttagccctgggttcaaattaagtaatactttgaaataaaaaagaatttgattttaggaccgtcttttgaagttactcgaacggacgcaaaaggatgtccagcgcctgacgaccgccaaccaacagctcaccaccgccaaccaacagctcaccaccgccaaccaacagctcaccaccgccaaccaacaacttactacaacaaaccaacaacagcagaacacaatcaaccaccagcagcaaaacatccaacaactccaaaacttattgggtttgtgcaaaatttattggagatttaaatttcttttctcgagcaattgattgtaatgcctaatttttcaagccggtcagcaaccgcttgttccagcgtttgcccccggggtttttggtgaacaacagcagcatcatcatgcgccagcggactttctcggcgaccagcatgcgctcggcggccagaatccacacgcggcaccttttggccccgactttttcggtggtcagcccgaaaattttggtcagtgccttggttaagtcaggcactttctccattttctttcgtttaggtgttcagcagcagcacatgcaggagcagcagggtccccctcctccgccgccaccgcagtaagacgttgcaagtggaagtcgaatgatgagttgacgtttgaccttttaacctcttatgttttaacgttattttgtctgatgaaga

SEQ ID NO: 58772 - DNA, 1132 bp, Heterodera glycines
atggttaccgtaccgcttcagggcgaggacaaatacacttttgtggaggagtgcaaaagtcccaagtcggtcactttgctgctcaaagggcccaacaagcacagcatcacgcagctgaaggacgccatttatgacggacagcgggcggttgccaatgcgttgaaagacggtgggttttgcgacgaggggatgggacaatttggatgaaaatgactaattacctaggcaattaatgccttggcactttgggttatttgattttgcacctcttttcccagttttgggctttacttatgactgtcatttggtcgtcacatatttaattttcatggtttctttaggtgccgttttgcccggcgccggtgcatttgaaattgcgggatattgtgcactgaaaaaggtagcaagtagagtcctcccactagacttcacaaccaatctctgttttagcttgccgacaatgtgaaagggcgtgccaaactcggtgttttggtgccgtaattctttctttctttcttaatccctttcaattattgtcatcattctcattcccaggcttttgctgaggctttgctggttattccgaaaactttggcggtcaatgccggattcgacgcccaggaggtgagggaaaaggcttttaaaaaaattatttatttactcctttcaattgccaggccattgtcaagctggtggagacgttcagtgctgctggtgagctggtcggattggacctggagagcggagagccgtgtgttcctcaggtgtgtcatcagaaatgggcggggacaaatgtgtcgtgccacaaaaaatgaacactttcattcattctcttcccccgtttagagcgtttgggacaatgtgtgcgtgaagcaggcgagtctgaacgcctgtcagaacatcgcctccaatctgctggaggtggacgaggtgatgcgtgccggcatgcgcgacttgaaggggggacagtgaaaatgaacggaacggaaatgaaggagcaacaccaataaatcacaaaatgttaatggctttttctttgttgaactctgcgctttattgtttgaatcagaccactgctgtttttgctttttcaatctcgcttttctgaacgaatgaaaattttgacaataaa

SEQ ID NO: 58773 - DNA, 231 bp, Heterodera glycines
atgaccctcaagtgctcgtcagcagagcatctttcaacaataacaccatgccttgctcagattggccagaagggtgccaacatgtccaaggaagagttcgattttcgcgagttggaaaaattgatcaattgaagggtaaaaaaaaatgaaattaaataaaatttgcaaaatttcagatttaacgataaaatgagtgtcctacggatgtttcggccttgtctaaccgtttga

SEQ ID NO: 58774 - DNA, 1408 bp, Heterodera glycines
cattgacgtgcaaggcgggctatgccaatcatttatcgggtgaaaatgccacaaatgaaatatgcgagagcaaagcccatcactgcttttccgtgatgtgcatggagcgtaagtgcaaaataaaagattaacaaaattaaataattaaaatcactgtaatttatttattgtccccaattttatgacgcgcagaaggcctgcttgagcctcggcttaggcttaagcttcggatcctgtttttctaagagaaaattgaaatttttttaaaaagaaacattttggtctggcgattgctagtcaaatatgatcatgccatttttggcgcctggttaggccccggctgaaatggcaaatttttgtttttcaaaaatttcagaaaactacacctccacagcactgatcacctgggggtgcagcggggacgcggacaaaaaaggctgcgaacaattctttgtgaacgcggccaactccgcgctgcactcgacgaagcagcgctgcgagtgccaatttggtgacgagggcaaagacatggccaatgagcaagcgaaactgcccgaaaaggagaagcccggcccgattccgaccctttcgccagaggcacttgagaaaagtgggggcaaaatgccaaaaaaaaaaaatttgcatgaaaatgacagtgaactgtgtggcacaaataatgagggaaaacaatgccaaagggaaaaatggatggtaatgagtcgagaattgtgccataaaaatgaggaaaatagtgccaaagaattttatgtatgaatggggggataaatcagagaaatagtgccaagattgcataaaatgccacgaatattatgccataattggaaatgcatgaaaattaatttatatacccgattagaccgtaattgctagaaacggagaattgaactttaaatagatcgtcgaaaatttaaaaaaaaaaacatttaaattataaggcatccggtgcagggcgggctattttcgtggaaacggatacggtactacagcggccagagaatgccgaggcggagagtactgttacacggtcagctgcgaaataggtccatttttatgtgtgatttatcaatctccatttcacaaatattttgatcaatcaatcgatcaataatcgatttttatattaaatataaaaaactgattgctcaattgattgattagttgaccgatcgataaatcgatgcggcgatctgattgattggcaatcaccctttttttacagtctctgaaatgttcaccttttggggttgttccttggacaacgattgtgaggaggtcagcaaattcctggcatttggccaaaagtgccaatgccaatttggcgccaagggagaaaatatgggcaatttgaattttgacagcccattttatttgccgatgaagggaaaaa

SEQ ID NO: 58775 - DNA, 503 bp, Heterodera glycines
atggacacaaaaaggacgacgacggggacggctccaacgccgacgcatttgagggaaatgccaatgccatcgagtgagcaacagatgacaccatcagcatcaggaacaagttcagtcactgacgaaattgttagccaacaagcgcaaatgccatggcatcaccaaatgtcagaggcagaatttggacaaatgccaacggacgattatccattttatcaaaactgggaacaatcatttgtattaccaaatgttgagcaggaatttgagggattagatcacttttatcaaaatgattttcaaatgccagtggaaaatgaatggcatcaatccgagagagaacaaccgattgacaataatgagccatcatgggatgggtggcaaagacaagacagagaagagaacgaagaagtcaaccaaagtgatcagaaagcgcaaccattgcaaatgacaaaaaacgtgggcaaattcgacgccgctaagctggacaaccaactgagtccgac

SEQ ID NO: 58776 - DNA, 3488 bp, Heterodera glycines
atggtcataaattgtactgaactgccccaaaatctctcttcccatttcagcgccggaaaagtgttggcgcgcaaaaaggcagcaaaatttgagcccggacaatcctcaacacaatcagccggacaacagcaacaaaaaactgttgttgttggtgttggccacggggaacacatgcaacaaaaaggacaaggacaccaaggaattcaagggcaagaacaccaagtaattcaaagacaaggaatttacaacaagggcgcaattgcaggctttttatgtgagttagggcaaagtttaaaggtaaaaatttagcaaaactcagaaatatgacacaaaatcttccaaaatgacaatttaaaaaaaattaatttacttgcaataattcatagccaaataaaactattggttcttcattacccatttttgagcaaatgcatggttaatacgagagaatcttttttaatgccaaaataagggccagcaggcgatgcgatgccaggaatatgcttaaaattatcatggccaaaacagtcaaagattaaacaaatattcgatcaaaatatttgtcggaaaataaattgaaaaaaatgcaaaacccaaatattggaaaaggtaaaattatcggaaaaatttagtgtattgcgtccgtcatattgttctgatgagtctccgctcgttgcaaattgcttcgcccgactcttttctcgatggcacaattcaacaaattcgaaatggccacccgctggaaatggcattgggtcccccaaaaatggcattggcacaaaaattgagccaaatgaatgccatggaagtggcaaaagggatcaaaatgcatttgttgaacgatggagagatcaaaaactacaaaatattcgccgaaatcatggaccaaaccatggaaaattgtgtcgcggtgctcggccaaacggcgttgacgttggcattattttaaaaacaaatattatataattttaataccactttggttgggacaacttcttataaaaattcagaagaaatatgtatataaaaatattattttataaaatcttttagaaagttaaaaatattttaagtttgacaattttttttggggggggggaaagacgaattcggcattttcagcatttgcttcgtgacttttttttaaccaaaatatatgaataattaaggaatggtgacaatgtaaatgttaatgccaacagcaatgacggtgatgatattagcccttccgttgtgctgtttttcttttctcgtttattccggaaattggccggctttttgaatgcgccatttatggaagaaatggcatttagtgtaagccaaaaaacgaatttagggataattaagcatttaagtgttaaactcaaatataagtttaaaggaagcagaaaaatgtatagatttgggatttaaatatttacctattagcaatttaaagagccatttttaagaattgaaaaatatttaaagaaacagagataacattcgagttttatttacttctttttaaaacaaagtatcaagaaaaatgaatattttttaaaaaatgttagattttttgaaaacttcaagaaatatttttcatagaaaaattttcaataaatttctcaagaccttttaaaattctatttgcaaaattttctcgaattttttaaatgagtttctattgttgactgttgagatttttatgtcatttttctaatttttatatataatcgaattaattagcattattgaatgatgatattaagaattttaattttgtttttgagcatacgattttatagtttcattattactcgtttttcagagctcgtatcatttttccaaaactcattgacccaaaattaagttattattttttaatgtgtaattatgctaaatatatcggaactaatgcgcaaaaaaggcatatgcctcaaaatacattctctattaataaggcaaagtcacttaagggaagggtacggatcgaaaatttttcaaaagcagaacatcgagcccaaaaaccaatggggtcgaaaatcagaacattttgtgaaattgcttcataaattagcaaatcgtaaattttaatgcattcgggaccaaaaaatcagattttatttttgcagtacaaatttttaataattttctcaattttaggccgaactgaaaggaacaagtcgcgttgcgatgttcattttgattagagagattagaacactttttgtatcacaatttgacgcatcgttcaaattcattgttcacaagggacagaaaattgtgagttgattagactttcttagggaaaagcaaagaaaaaaattatgaaatttgaaaaaacttgagaataaacataaaacctccattaaaacatggcgattagggattttttatggcgtttgcaaaattcaattaatgtggtaaaattggcactttgagttttttcgtactcgacaccaaaaaataattttaatagcatatacgaaaaacattgaaaacaagtacttaagtagttgaggacctaaactaagtgatttcatgccaaatgaggattttttagggctctatgagcattttcaaatagctgatctgaaaagaacgatcattttaaattgccctaagttttccgaattcttttttcaatttaaatttaaaaaacaattttgaacactgattaactcaatccaattcagcaacaggcaatggaattgaataaattggacgcttttgaaacggccatagaacacttttcgttggcccatttggccatctgttcgacaatttcggcgttcactgacaaaaaaatttgccaaatggatttaaaaatttttttcattttgttggcaaaatttttgcatagaaattttgcgtgtttattactgagcaaagagaacatatccaatttcgtgcaaatgttcactcattatatgacaattgagtttggcaggtgggcaaaagaatttaatcaaaataatttggtgggatgggcggggggagtgacctctgatgactaattagtaattcgttaattacataattctttacataagtattggcgagcttgaattataaaaatttccccatttgttttgcacagattcggcatatcccaaaatctgcttataattttacaaaattggaaaaatgaaattaaaagcgaaagtaacagtgcgatgccaattaacttaagccgatacgtggccaatttaattgtcaatttatttactattgtaagccaatttctgccaaaaaatgccaaggattcgttggccgacaaccaattcatggcccacggatgggatgagatgggccattttttgagcactgctggaaaacagttgacagagttggtccaacatttagacaattggagagcagcagaaagtgccaaactgggcgaaaatgattacaaaaatgaggctgaacagagtgccaaaaaagatttttggcacaaaaattgtactaattttgcatcgagcagcggaacaaagcaacaaaactga

SEQ ID NO: 58777 - DNA, 548 bp, Heterodera glycines
atgacacaaacagtgcaaaggattctgctcatttctgatagcaacaaaaagaactcgggtgcgaatgtcgcgcagagaattgtgccgttggacccccaggaggacattgcagaaaaagcgttctgtcgccactcacacttcgtgcatgtcctgctgaactttcatccgttcggacaatttggtaattgctggataattaactaatggttgctaattaattgcccatttgtattagcttctgacgggcagcggcgattcaatttgtgcaatggtcggcttttgttgcggtccaaatcaaataaaattatttcggcattcagtaggacgtggagagcggtcaaatgatccaaaatttccatggccatcttggcgacgtttttgccattgacatccccaagttggacaccggcaacattttcatttcaggcgtaagaatgtggcttttgttttttgccagtgccttacaaaactcaaaggatgctgatcggcatgccctcgtctgggacattcgaaccggacagtgcagtgcagaacttcgaggggcatga

SEQ ID NO: 58778 - DNA, 141 bp, Heterodera glycines
atggccaccaaatgccttccgctcgaacttctgtacgaaattgtgcctctcatccctgccgaaaatgccacaccgaatgcgctctcgtcctgtcggctgctgcacaaacttttgctgtcacgtgtcatcaaatggaaagag

SEQ ID NO: 58779 - DNA, 603 bp, Heterodera glycines
atgagcacagtcccttttgtccagttgtggaacggaaaaatggaaatatcagatggggtgcgctcttttctaaaaattcctcttttcgtctaaccatccctcccttttgtgcactatttcgtttcaaaattgaatcattttttttggctttttgaaataaattgtgaaaaatatacgaaaattattttcggttttaattatgctgtacaatgcttttaagccccgccgtgcggcggctccccttttgtgcactattttagtttttaaaattggttccggactttttggctttttgaaataaattgtgaaaaatatacgaaaattattttagcttttaattatgcagtacaatgcttttaagccccgccgtgaggcgggacagttccaaaattttgtaccacattttactgtggaaagtccaagtaccttattggacaactacgtgtcaatgagcacagtcgcctttggccagttgtggaacggaaaaatgggaatatcagatgggggcgctcttttctaaaaattcctcttttcgtctaaccatccctcccttttgtgcactatttcgtttcaaaattgaatcattttttttggctttttgaa

SEQ ID NO: 58780 - DNA, 386 bp, Heterodera glycines
cttaaaagcattgtacagcataattaaaaccgaaaataattttcgtatatttttcacaatttatttcaaaaagccaaaaaaaatgattcaattttgaaacgaaatagtgcacaaaagggagggatggttagacgaaaagaggaatttttagaaaagagcgcccccatctgatattcccatttttccgttccacaactggccaaaggcgactgtgctcattgacacgtagttgtccaataaggtacttggactttccacagtaaaatgtggtacaaaattttggaactgtcccgcctcacggcggggcttaaaagcattgtactgcataattaaaagctaaaataattttcgtatatttttcacaatttatttcaaaaagccaaaaa

SEQ ID NO: 58781 - DNA, 133 bp, Heterodera glycines
taggctaatagagcctgtgaagagctttcgaatgatatcaagattgtttgattcggtcaataacttcaagagttatattgactcaaagttggctcagacggagttggccagacggaattggcccgttccgtag

SEQ ID NO: 58782 - DNA, 661 bp, Heterodera glycines
atgctctattctttttttataatttattttcttctaattattcatcgttttctaatccacatttcaaatgcaattcaatttgtgagttaattaatcagggtaattaatttgtttaataatttttaattagggagacgacaaaatgctaatagcgtttgtgagcaatggtcagaaaacgcaaatcagtgagtattcaaagcaaaaatatgagacacaccttggcattgtgtattatatgagaaagaattggcactgtgacaaaactaggagagatttgatgaatatgaacgaaaagaatgtcaaaaatatcgtaaattgttggactttatttacgaatatttgttcagagaatacgtcggaattccaacagtgaagccaaaatttgtatttaaaaacaaaattgaaattgaaggaccaataatttatgcgataaattgcttggcgaaaattttgaaattttattttaactcttatttgtataattataattataaattaaacaaactttatcattttgaaccaaaaatgttgaacgtggagaaagttaattatgaatcaaaattgtcaattaatgaaatgattttgcaattggcaattgacacagcaaatgaatagcaaacaaatgaaagtttatacgaaattattctacaaaattgtggaa

SEQ ID NO: 58783 - DNA, 382 bp, Heterodera glycines
atgtctgacaatccgaaggaagcggagagagaaatggaaaaagcgatgtgatattctaaatttgaatgtccatggctaatcattttgcttttccgttttaagtttcatcgctgccgactgttggcttgaggtgttcggtttgcttccacgctcacagcttggccttggcattgcgctgattagtcaccgatttgactattacgtcgacgaacacttcaaaatctgcaaatggacatttgacaaattgaaaattcgaagcaaaatcggagagaatggcgcaaaggaaatggaaattgtcaattccgatggaaaagaattgtcaatcccacaaaattcgttgccgaacaaattcatcagattcggatgcattttgattaagtga

SEQ ID NO: 58784 - DNA, 961 bp, Heterodera glycines
ggagaaaacgcgaccctcgaagaaattgacaatttcattgagcaaagaagagatgcagcatccaccggacaacgttctcagcgacgtccttgtgtgctggagacgccggaggcaccaccaaagcctctggtgggtcaacttagttagaaccaacaaattaagggattttggtatcaatagatagcccttttttctaatttcaatatataatttcaaaaatttatttaaaaaaaaattattttagcaaagttatgggtagtttttatcgattaaatgtttgataaaaagttgtcaaaaacaagcacaatcatatttatttccgaactgtaaaagaactgaaattttttggctagaacttttgaaaaacttaataaattttttggctagaacttttgaaaaactcaataaaattttttaaatttggcaggctaatagagaactcttagggctatcgtatgatagcaagattgtacaatttggttgagtctgagaaaagttatgagtggatttagtcaaaaaattagcaaattttgcactttttgtcctttgacctaacaccgacgtcaatccttttgcccattcaaccctaaaaagtccaataatttattttatttggttttccgcggttgtattaatatgagatatagtacttttaaaaaatagatacagtataacaatgaattctgatatttttttactgtattactgacaactttagatggtcgtaggtatttttttactccacttaaaaaatgttcaaagaaatactgagctgtagacctgaaaatataaatttacacaattttacaatttttagaactttccttgcacgaacacgaactgtgatcgatctttcccctcaaaaaaagcactttcaaatcataagagggcgtgcagtgcccctgctcgtgtgacgcctccccctgctgctcagatgacgccccgtcgacgcgtgctcaat

SEQ ID NO: 58785 - DNA, 2082 bp, Heterodera glycines
tttgacgaatcggatgccgaggatccagctgaagaggtgccgccatgcactgttgaaattggccttcgctcacttggtaaaaaatgtttcatattgtacggtaaatgcctaagaatagtgattggaaatactttcctcatcagatcattgtttttaattatttttgcacattttcaaggattttctaattcgtgggaaaccatccggaagcactaaaataattttttaccgttaaaattaggaattcacaattcaaagctgaattttgttttgactcacagcttggaatgtaattttgtcggatttttttgactgaaaaagattgaaaactcgaaaaaatgcggaaaagtgttttaaatgcttttttaactaattaaaatatatgatcaaaaatgtttttttcaatttaattctatgaaagaaatttaattgattttgtaaatgagcagtttaagagcttttccactgaaacttttggttttcaatcaatttagtgtctaacaaagaagccccggacaatcagtccatcactggtcaatcaatcagtggagaaaatccattagcaaaattaaaatttaaaaaaaattgcaaggcttttacaatatttccacatattaaattttaaaatcttttatttaatttttttaaaataataaattcttcactaaacaacataaattattattttaagttttatcaaatttattatattttcataaaattttaaataaaaaaattgtttgtttattttttggatgatttcagacacgccaaaggcgcaacggacgcgcagcgccactgtccaacggaagtctcgtcggctcgcggctgtcaacaatgccgcttccgctggtcaaagtgccgacaaagcgcacgctcaaagtagggatgggattttccgaggcaatattataggggaagtgtggacgaaaatggcaattattaaatatttttttatccaacagaaacgaccaattttgtttatttttgtgtccttattaaaaacaataaaaattttgagcagtgtgccgatagtcacatcagcaggagggaaattttggcaaatttaacgaaatttgtttaaaaaaattttaaattatttctctaatcgtgcattccaaattttacaataatttcgtctgactcatttgatttatatttttacaatattaaactctcaaaaaaatgtatttatttgattgttgtcccaaactaaaaagagcttttgctttaattaggctcaattactcgccgtgtgtcaaatgggacaacattggccgatgtgatcccacccgatcacttgcaaacattgacggacaatggcactgatgcattgctgccttcaacatcggatgcgccaaggaggtctcgtcggatcgcggcaaatgtaagttttgggcgggttgtaaaaaatgaaatttgattttcaaaaactgatttattttttaattaattttatattttttaatttaccgattgctttttgattagtttaaaaaaattaaaaaacgcccattaaaaattttaaatttattaattaattgcatccaaaggcattttttttatttcaaaatttattaaataacatttaattcatacataaaaaaggtgtggggggggtgtcaaaattttttggaaagggaggtcggccgtcgacgatccttttttttgcttttcaaaaacagttttttcggcgcggtttttcctaaaaattttcttttttatttttgggctttatttttttattacaaaaaacccataaattgaaatttttgctctttgttgaaataatgagttaattattttccaattttttaggtgcgctgcgcggacgaaccgctgctggccaaggcgccattcaatgtgccagggcggccctacccaccggagccactgtacaccaccgacaaatcaatcatgctcaaatgggaacgaccgtcgctggacagaggcacgccgatcactgactacgagctggaaatacgcgagcgtggcaccaagctctgggagaaggctaccaccaccaacgcttcgctatgggagaaggaagcatttggcaatgtgccggacacacgaatcaag

SEQ ID NO: 58786 - DNA, 4658 bp, Heterodera glycines
atgggaccgttggcatgcgacatgactgtgctggtgggtgaacaggccaagctgctggtgccctacgcagcgaattcttcacggccgaaattcgtttggagcaagaatggcaaaccgatggatccgcgtgacgacccacgcgttaaggaggaaaaaagcggtaagtgagcgcgcaatcctggcacttaacagggtggaggcgcagagccatacaataaaaaaagggaggggggttaaccaaattttttgctaaaatggtctggaaagagggggtcgacagggggggggggtcagcggccaattttgcgaaatggtccagccttgaatttgacgacctttcaaacagatttttttgcagtggcttttttaaaaaaaaatagttaacatattttcactaaaaactgccaaattgcgattctttagcaaggcgatggctttttttgtttttaaaaaacgtttttttcgctgtacacttttttaaacaacttttttttgcaatttgttagaagattttgtctaaaaaatgggcaaattttaaaattttggctaaatgctcttttaaaatttttttaaattaaattttatttttttatattcacgttttttttctcccatttttagacattctcatccagctgtgctatccgaaatgcgaacaatcggacaccggcacctattccattcgcattgtgaacgacttgggctcggattcggtggacttgcgcctgaaggtggtcgatcgccctgcaccgcccgaggggtcattgaaggtgcaaaacattgggaatatttttgtaaacagaaaatgatgagaggggcatatttgtaaaacaattaggaatggatttttgaatttttttagaaattaattttaacggagtatttttcgtttttactgtattttttttttacaaaatattcttttaaatatttaatgtataaaaatatgaacaggagcggaccgcgtccagtagcggaaggcgacgcgttggcagcacagcggcggatcggtcggcacaggcggcagcagcggcttgcgctgcggacgaagaggcaaaggacgaggtgtacaacaacgaggaggagcgacaggacatggcggtggtgacaaaaaggatggcaattttggtaaaaaaaaaatttcaaaattattgtgtatgcttttcgggatttttgtgcttaatacctaggcgccttttttgtgcctatttcgccatttttggcgcctattttttggattttttatttattaatatttttccttgagaaaagcagcacaaaaacaaaaatctttcactttttaattgtttttttcaatttttgggcaccccttttttatttctattttttaaaggacctggaaacatccggcacaccggcacggattgtcgaaatcccagaaaatgtgacggtggttgagggcgaattggccatcatcaaatgcgtcgtggagggcaacccggcaccgacaattgtgtggaaaaagggcggccgaaaaatgccattgaccgacgaccgagtgcggtgccaaacggacggtgacacgggacatgtaagtggcaacttttaaatgaaatttttaaacacagaaattaaaaaaaattgctgttttttggaaaaaactttttttgtgaaaaagtcatttatcataaaactgagaaatcataaaaaattttttgttttaatttcaataaaattacatttttcataccgtagccctcaaatggaggacaagaaaactttttactgtagttctaatcttggaagggatttttacggcactcaattaattaattaatgtagctcatttatttctaaactaaattcaaaacttagcagcaaatttaataaaaaaaaatttatcaaatcctaaaataatgttaaaaatattttatcaaattaaaataatgttaaaaatattgtcaggtttctctgatcatttccaaatgtcggccacaagatgggggcgagtacacattggtggtgaagaacgcgcatggcaagcacaaagttggcgccaagctgcttgtcacgccagcggccgaagtgaaaaaaaattgccagccaaatttaaataataatatttacaaaaaataaatttacagtcaaatttggacttccgggccaagcagaaaaaacgtggcacgggcattagcaattcggaacaggaaaaacagcgccaacggagtgatgccgagcccaaaagcaaggctgaacgacggtgagccaaaaacagctaccaccaaaaaattttgcaccgaattttggaatggtgccaaaaaatcgatgccaaattctgcacttcgcttattttctttttaatttgactgaaatttcaaaaaaaaaatttcagtgcctcttcttttttttttgatggtgacaaaaatttaaagacatggcaaaagaaattattgaaattcaatttttcgattaaataaaaatctcgaacggaaaatgggtcagtggaaaatgcgtcagtgaatcaggatttctttaaattgagatacagtagtaatattaccgaaatcacaacttgttttttagggatttgggaaagtttcaattattttgacttttaaaaacttaattgataaaattcagaacaaaattattagacaattttgtccttttgtaataatacaatacttaatgctacagtaactttattttaaaaatacagtattattgacaccttttccactgacgcatttgccaggagccaaaattattattatttttaaaaattaattttcatttaaattatggcacaaaaatttccagcaaacgccaagtgtatgtggtggaggagccccgtgacacatttgttgtgccgttgaactcgcagcatgccaacgaaaaggaaaatgccacttttgaatgcgaagtgaacgacaaggagatcgatgtgaaatggttccatgacggtgccgagatcgggatggacgggcggcactttaaggtgggaaggagggggcaaatctcttgctaatcaaagaatacattcatattttgtgttatgaaagatcaatttaaaaaattgagtaggagtttaaattacctattttgggattcctttaatcccaaaaatccctaagtatggatatttccaaaattcaaaccaaaactagctcaaattcttcaattcaaatgcctatcagaaatttaaaaaatatattagaaaagtcagaaacaaaaccatttttttaacaatattttttttaattttatatttttttacattatctaaaatttgtttttatgccaaatttcattttgttttcctattgtgtattttattgatgcttcttgttttacaggaacgggctggatgccgtcgtcgcctgctgatcatcaatgtactcattgaagaccacggggagtacaaatgcacagccaaagacgacgaaacaatggcccaactcattgtgcaccccaaattcgtcaaaaaaagcggagcgcaagccggtgaccttctggttggacgatgagttgtattaaatttttttgtttttcactgttcctgttttatttgtgcccatctcttttttaaactctgtgaattgaagataaaattttattttcctttaattgtcctattttatggtatatcccaaccagggctggccgtgattgaatttccaatcacggaaatccgtgagccgtgatcacggggctttaaaaaaaatccgagatcacggcaccccaaaaactccgtgagccgtgatccttgattaaaaaaattttttctaatgatttttttaatttaaatttatttagaaaaacggaatttaatcgctggaaaaatgggaagtggcggaacatttttgaggagagatttggtgaaaaatgaaaaagaactgtcaaggcaaagagactgtggaaatgccaatgtgaaaatgccaatgatttaatttaaaaaatgatggcaccacattcccaacgaacgaaggacagacaaaactcttacaaaattaggcaccaaaaataagaaagtctttgtgaaagggaagtgatcagacgggcggaacataaggcaatgtaaaaaacggcacggaatttagtcaccgacggaagacacataaaacgccaaaaacgcccgccacaacactcatttgtcaatttgctcgcggtcaaccgcccttcgtcgcctgttgaaattaaaaaagattaataatttatgtaaaattgtgagaatttgaaggccaattaaatgctatacaaattattaaaattctgcctcaccttcaaaatctcaacatttaacaatgcgaggaccgcaaaaagttgtatcttgacctcttcgtccgaaaaatgtgcaggaaaaaataagcgcattctgtcttcgggctaatttaatgaatttaaatgagtgtcaatgcacaaatcaattataatttggcgttctttatccataccaggcccgtgtcgagaaaaaattttgggatgagaacccgaagagccattttaattggatgccgtggaaaaactatgaaattttttaaccattttagccaaatttggccattggggtaaattttgcaaaaaacatggaatgccggggatacggctgtgcccttacgcgccaccgggaaaatttaaagaaaattttatttaaaaaatagtaagatttaaaaggattgcccatttttcctgtaaaa

SEQ ID NO: 58787 - DNA, 667 bp, Heterodera glycines
atgtgcccattatgtcgtgcagaaataacagacgatttcaagaatttattaagcggaaaagatcaggcaaaagttgaaaaaataaatttttaatatttttattattattatttattttaaaggcaggcccatcaaattcaaaaagagaacagacggacatgggtatatttagggttctattttttaagcacaatattaattaatttatctaattactaataaacttttgaacaaaaaagtcagaataatcaaaaaaaaaatcgaaaaattgccataaatagtaaaataaacattaaaaattaatttaaaaaataactactcacaaataaaagttgaatttttttgaccaaatttaagattgtaaaaacggaatttcttgctatttactaatcatttgatttttaatttacaattaagatgaacaatttgcacgagctctaatgtatgttgattatgatgatgatgatgatacaattacacatggtaataatccaacggcaaatgacgcagcaatggcacaacggatgcaaaaacagctgcaggagcaacaggaagaagcggatgccgaattagctaggcgtttggctgatcaactttagggtaataatttgggctggcaatttttaattactaacaataacaagttattcaaattaataattaatta

SEQ ID NO: 58788 - DNA, 788 bp, Heterodera glycines
atggccttaaataacctgtttgcttttgcgtcgacacatggcgaaaaggcacccgcggaccaaatgggcggccgattggacacgtgcaaatacaacggttatgaatgaatacattatctaaaaaattttatatttttaggacagttttcatttctgttcagcgatttaattgcgccgggggtccgtcgtccgtcttttgctcaggtgtataccctggcacccgaagacgcattgaatgtccgcgaagaggcgcttgacaccgccgtttcaccacacgtcagacgcacaatcctcgaaagacttgaggcactgatgcgacaaaacccatttgggcagaccttccagactgtgggtacgaagattgccgctgctcgtgcagcaactggcgaaatgccgcatttccgagtatatcatactaataatcatatttaaatttaaaaaaatttaaaagattgccctgttaacggatcgcgagttgaggagcgttccgcttcaaggccgcactgatgtcactgttattgagcgggcggatgcaccgactgccaagcaagttgcagtgatttgggtccaagaggatggacttcctcctcaaatcagcggtagaaattgcacagttaaaagacctttactatacgattcagctttctgggtgtccgacaaggccgggaagatgcgcgagctcaagagtggaatgccgcaaattgatccgtgctgcttcccactgctccatccccgcggtacgcttggatggcgatggtatatgaagaagcgtgggtccgaggtatata

SEQ ID NO: 58789 - DNA, 1116 bp, Heterodera glycines
atgattggaaaagcagagcgtgcatttgacgccgcgatgaaacatcggccgaaaaatttcaacaaaatttgccgcggaatggaaggaattttgagcgagtgggactgcaccgaaatgcgagctttcaatgaattgtgggaaggagtgaagcgaagaccggaagaaacgttggacgaattcgcggaacgaatttacggcattgttgaccgcgctcacccaggtttgccgccaaactttgtcagcgattttgcgataaagcacttaattcgtgctttggaaaacccggaaatttcgatcggtttggaattagctcgccgcccaggcatgagcttcgacagctttgtcgctcttgctgtgcgagcagaggcagtgcaaaaacccaccaaatcggccgaatctggaaaagagcaccgtctgaaatttcaacctaaaacgactgttgcgccacaaaaaattttcgcgccaaggacaacccgaatcgtctgctataactgcaacaaaatcggacacatttccagcaactgtaggctaattgaacggaagcatttcaactgtgtaccaaaagcgccgcagcatgaaaattttgcgacgaaaagtgccgattttcgaaaaaattaagaagctgagaagaaattgaatgatttgcggttgtcgaaccaaccaccggcacaacaaacaaacgtggaagctggaccaaaacggaaagcgtccaaccgacagcgcaattcgtcgtcttcaagttgcagcgtaaaagcagcaaaaattaaggaaaattcgccggaaattccaaaatggtttttgaatgctatgattgctgccttggctttgctcgccagcacattctcgaatgaaaagtcaaagattggacgaatttggaaaggcaaaagcccaacgaatggcagcgacgacgagaaacgacggaaagcagatggaaaattgaggacaattttttcgccgaaggccggggaggaaatggccaatgatattgcagacaacttagaaaatttgtcgatagcaaacaccgaactgaatacgcccctttcaacaccgaatgccctaccgatgagcccaaagcgcagaggacatcgcttcgtagagggcgaggatgtgatataa

SEQ ID NO: 58790 - DNA, 263 bp, Heterodera glycines
atggcattgtcaacgaagttgttgcctggcctttttcttcgctcttctgcattttttgcaccaatttcttgcagtcggatggcaaagtcggacgtgccggcgctgagcacgacgaatcagccctacccgtacaaggaacagactccgaagggtattttcgagaagatgggcttgcagaaaacgccggacggcgcttcaatcggcgaattcgcagtgatgcgtatggacgacatgatgaacttgatcgggcgtggctctctttg

SEQ ID NO: 58791 - DNA, 494 bp, Heterodera glycines
atgggaaggaagtggcccggggcaacagcagcggcgggggtgagggttgtgctgctggtacttcttcctcatcgtccgcttcgtccaacggcggtggtgctgctttctcgtactccgtgtcctcgtcgtcgtcgtccgtcaacaccaacagcagtgccgcttcaacaacggtgagacaattgagggccaacaggaagaagacggtacgatgggggtgccaggcggatgatgatgatgccaggtcatcggatgaggaggatgattatggcaaaaaatacaagtatgacgatgatgaggatgatggagaggaagaggaggagcccgtcatgatgacatgtgatgacgatgaagaggatgaggaagatggcgataacagttgggtgccatgggcggtcaccacttcacggcaccaaaaccgccacccgaaggcggcacccaaagagcacaaagcgcgctccaataatcataaacggcacaaaaaatcatccagatga

SEQ ID NO: 58792 - DNA, 116 bp, Heterodera glycines
agtatcagaagatcgcctttgcaactgcgattggattcgccattatgggcttcatcggattcttcgtcaaactcatccacattcccatcaacaatattatcgtcggcggaggataa

SEQ ID NO: 58793 - DNA, 678 bp, Heterodera glycines
atggatttgcttcttttccaacgcgataaatacgctttggcgtacaattgtacgaatttcgatgccaatttggtgccaattgggcaacgcattcacactgttcacggcatcatcttaatcattatgtttttcgtgttcgaagtaagtttcagcagaagattatttcaatggaaatatttaaaatgtttgccaattaaaatcttagctttttcataaaaaatttttattttatggtgaaaaaatctgaaaatgatataaaatttatggtaaaatcgttccaactttttttttgaattggatcaaaatctgaaacttaaatttcttaaaacagtcaaatttaattgttttcttattggttaaaaaccaagcacccttgtttttacttttttttccttgtctatcaaatccaacaatcttggtattattaccaagttgttttaaaacgaaaattgaaaaattcggaattcttaagttttttttcttccttttatatgcttgagcgaatagagcttgtaaagaatctccgagtcatgctaagattgttggatttagacaataaagaaaaaagttagaaaattttagctgccgccaaaacttcggcacaaaaacgacccttttcatttgtcacatgggcatgagtattttttttccattagttgttgtacattccctgcatga

SEQ ID NO: 58794 - DNA, 819 bp, Heterodera glycines
gactcaatccaccgcattcaatcactgggactcaacccaccaacattccaatcactgggactcaacccaccaacattccaatcaacaggactcaaccctccagcatttcaatcactgggactcaacccaccaacattccaatcactgggactcaatccaccaacattccaatcagtgggactcaacccaccaacattccaatcaacaggactcaaccctccagcattcaatcactgggactcaacccaccaacattccaatcaacaggactcaaccctccagcattcaatcactgggactcaacccaccaacattccaatcaacaggactcaaccctccagcatttcaatcagtgggactcaatccaccaacattccaatcaacgggactcaatccaccaacattccaagcaacgggactcaacccaccaacatttcaatcagtgggactcaattcttctgcatttcaatcactgggactctattctcctgcgtttcaatcaaaaggactcaatccaccgcattcaatcactgggactcaacccaccaacattccaatcactgggactcaacccaccaacattccaatcaacaggactcaaccctccagcatttcaatcactgggactcaatccaccagaatttcaatcactgggactcaattctcccgaattcaaatcactggactcaatctcatcaatccttcagcaacacaattaccgggactcagttctccgacatttcaatcaccggaacttaacctcagcaacggaatacagaactatttaagaggaatccagaaattgaaatataacccata

SEQ ID NO: 58795 - DNA, 701 bp, Heterodera glycines
atggatgaaactcaaattggagacagcgctaaagagaatgaagcaattcgattgaaaattcagaaggaccaacaacagtcaaaagaatcgcaaagcacagtaagtgaaaaataattgatggtgttccatattgtttcaaagaacacgtttatttattgggagggttcggtgtggctgattaggaccagcatatatgagcaatttcgagcccataaactcgaataaacgaaaaaacggcgccagtgcgctttaggcgtccattttttttcttattttcctttttagtcttttcttttattcctgagactagttgataccaagaaattaaagattgacacagtaataagattggatggtacttgattggacgcctaaaagtcatgcctaaagaacatgagaaccaaaaaccgattattatttagcaacagaaactatcgcagagacgatcatctacttttggatcctctgctcgtcaacatcggatttactatcaaagcaaaaagcaatttgtataaatcttgtcattttcggcaatcctgaagaatgggtgtccctaatttaacttttttttattttgagctcaaaatcagtttccgggggttttcgagggtgctgattacgaatcaggactcagatttgcctaattccgaacctcggatccgaattcgaacaaaaagttgaaaaaaaattaccaaaataaa

SEQ ID NO: 58796 - DNA, 515 bp, Heterodera glycines
atgaccagctacatcgaacaagaagctgatctttctgaaggtcatgattcagactcggaagtttctgaacctgttgcaaagaaagcaaagaaaaataaagaaaagaaaagaaggcatcaaattaggtttaaaaatttcttcttaaaccttatacaaaaggaattttagtagtgatgaagaagaggaggaagatgaaggagatgaggaagaaatgagggattttattgttaatgaaggtgacgaagaaggtggagatgagggcgttgaagcggaagcagacggcgaagttatcacagatttaatccaaaaaggccttaaaattacctatttagagcgaaaaggggtctgatgtcagtgatgatttgctggatgacgatttggacctactcaatgaaaattaccaaaacactcgtggcagagttgaaattagcgatgatgaggaggatgtcagagaacgaatcaaagacagaatttttggaccgagtaattcaccattttttatatttctatgttga

SEQ ID NO: 58797 - DNA, 772 bp, Heterodera glycines
  unsure (1)..(772): unsure at all n locations
atgggattgtggtcaacaacgacctgcnccttatgggattgtggtcaacaacgacctgccccttatgggattgtggtcaacaacgacctgccccttatgggattgtggtcaacaacgacctgccccttatgggattgtggtcaacaaagacctgccccttatgggattgtggtcaacaacgacctgccccttatgggattgtggtcaacaacgacctgccccttatgggattgtggtcaacaacgacctgccccttatgggattgtggtcaacaacgacctgccccttatgggattgtggtcaacaacgacctgccccttatgggattgtggtcaacaacgacctgccccttatgggattgtggtcaacaacgacctgccccttatgggattgtggtcaacatagagctgtccctcacgggatacatttaaatcgtctttttattatatatcaatgactgcattagggcacttccggtttccattatatttacaatgtaatgtgtcagcttctcaatgaagtgaaaccaagtgcatgtcgggcgacgcaaagaccctaaagaaaataaggacctgcccttcttgggattgtggttcgaggcctgccctttgaggattttgggccacaacggtttacaatgatgatttccttattgttaccggccaacatccggtgcgaagctggtcccgcactttgccaagaccagtggactggtgagaggtaacataggatattggagttaaccaaaatttatcgtcaaaatttgatgaca

SEQ ID NO: 58798 - DNA, 304 bp, Heterodera glycines
tttctctttgattgtgccgccctcatttagcaataatagcaacaataataatgattcgggcacaacaaaagcttctacaactaatgatgatgatgatgatgcgaataatttgttgattttgcaccaaaactgtgcgacaaatgtgggagaaaaagaatgctttttcgagcctaccgtatcaccactgtcattcctactgtacatggatttatctgaaatatacggtgaatgactccatgattattggcactattaaatatttattaaaatgaattttctacatcgtatttttttttgttttgaa

SEQ ID NO: 58799 - DNA, 492 bp, Heterodera glycines
  unsure (1)..(492): unsure at all n locations
atgccaaaatatgtgcttcacccaatccaactgttcacatcactgaacaacaccgaaaatgtcgaaaatgcacagaactcgccgcgctttgcacgcgcccgctttcacgttcagtttaacgctaccgcgcgcgcgttcgcaccaccgcttgtactgctcgcgcatgtcgtgtacgcgtcgccaccaacggcacagcgcgacaacgacagcgacgttgagtttggattggcacaggacgctgcgggagctgccgaacttgtggaaatggcaccagccacgggcataattgtgccaagggtgaaggaaaaaaacaattttgaaacttaaaatttttttaatgctttaaagtaaaacttaaaaaatactttcaacattaaattaatttttaaatattaattttcatataaatgttaaaatttgtttatttttaattttttgcataattatcggtaagaattatttgtttcgattanatcttttcaattttttata

SEQ ID NO: 58800 - DNA, 2165 bp, Heterodera glycines
atgactgacagggaaaagcatttgcattttgttcgtcttgcggaggaagcggcgcgttacgacgaaatggtccaggggatgaagcaggtgaaggaaggaaggaggagaccaattcagaagaaccattaattaaactttgcatgcttaaggtgattgaattggatgccaaactgaacgaaaatgaacgcaaattgttgggcgtcgcgtacagaaagtcagtcactgggcaacgcttcgcttggcgtgtcattgcgtccgtcttggcacgagggaaaggcacgaagagacagctggagatggtcaagcagttgctgaacaagctggagcgcgaggtggaagagaggtgccgtgaaatattggtcagtggtgggtgggcgcattcttgtgccgcgaaattccgcactaatttgcgttacttttcaggatttgttggaccgggttctgatcaaggaggctgcagatgatgaagcgaaagtgttctacttgaaactgaaggctgaccacttccgctatttggctgagacacgggcggtgaaaaacggtaaaaggacagacggacggaccatacatgcacaaggcgtgtctcgacaccccccccccccccccatcgttcgtcgtaaggggggcggctgtaaaagaggggggtcgtcgtggagggaggcgttaacgaagggagaaaataaaaaaattttggaccttcgtatgaaaatcggtcccgagacacccccctgtcccaatcatccgtcgtatggcccttgggctgagacaccccttgtgaatgtatgggacggaccgaagcattgaacaaacggtggatcaacaattggtcaattttcaggtgttgcggagaaggcaaagcaagcgtaccaagaagcgttcgacctcgccaagaacaaactccggccaatgcatccgattcgtctcaccgtggcgctgaactttgccattctccaattcgaagtgcagaaatcaccagccgatgcttgccaaactgcccaacgggtgatgaacagaaaatttgtttttcaagtttaaccgctccaattttttttacaggcttatgacgacgcgacttccgatgcgcagacaacgggcgagagtatttgcgcggagtccgtcacgatcatgggactgttgcaggacaacatctcgtactggagtggcaacacctctaagacggagtgaaaaacgatcgctgtatattatacgacataatttgtccttgtccattgtgttgttctaatgagccttttaaattatatgtatgtacaatttgtatataaaacagaataaatgttaaacgctgatataaaagtaataggggtcgaaagatgaaagcaaaggtttgggggccttagggcagacttatagtttagagtccctcaaaaatggtcagacaataaaaaaggactgtgagctgtttgggtcacagatcttttcatgaatttgatattcattttaagcacccgaaatcaccatggacggtaaaaaacgaaaaaaattgccaaaaaataatttacttgtcagttttactaaatttatttccgcgattcggtgataattaatcttccatcatatactattagctttggcaccaaaagtgccatatttgtttgtattttcttttctccttttggccatcccttcccttttattcgtttttcatatcagctgaccgaagaatgagtcaaaaaagctcgagaaatttctcattcgggattttcagcagtatttgtttcgggatcattaatggacaaatcgcacattttgacaatggcattaatgccgtcgtccacctgctgctgaatatctctggtgagtggcgctgttcctcccccccccggcgccatcaaataaatatttgcaatgcaattaagtttgccccattaatttctgtcctttttataacacttttccccggctttgctgaattcaattttccgttatcagtgtatatagaagttcaagcagtacagcaaattttgatgggaaaggagatgaagatggacaacagcaaaaatggagaaacaaggcaagaggaggaaaatagcattaggttaggaggagagacggaagagaaagagagaaaaaggaaaaattcggcggaaggaagaggagagaatgaagctgaaaagagaaaagaacagcagcaaatcggcacttaa

SEQ ID NO: 58801 - DNA, 1948 bp, Heterodera glycines
ttggatttgcaacgacgtttggatggacattttcccatcctttgaccgtgctcaactcggcctcaaattggcacttctttcgccacgtttcgatgcgttggtggacaaacatttcgatggcaaaagcgaattgacaatttggagaactatcgaaattcgtcgcaaggacaaaggaccagaaccgaagctgtctgtacaaatgggtgacaaatttgtgccatttccattgccggaccgtccgttgcccagcaaaatccgttttaagcgccttcggatttagtaattaaaaatcagagagctatgacaataaaagcattccttccattttcagttacatcgatcattccgtgatcgcttttcttcgttcaaatcaccaaattttcgacaaaagaggcaccaatttacatttgtggattccattatcatacaccatggatgtttttgttcgtgaaatttggccaattttttcggcaaacattcgccacttgggctttccccatggtgatcatttggacaatttgcttcgtcgcatttcgccgacaattctcaccgatctcaaccaattgacttcaatccattccggtgctttgttgcccgctgcgtttggtgatgattttgatgggccaaattcaacaatttcttctggccaagcattgtccaaatggttgcactctccgagaaaagatggccaacccaaacgattgcattgcgcaaattacaacaaacaaacgaacttcgattgggtcaacagtttcaaggaggtgtggtgcggagggaggggggagcaggaacaaatactgctgaaaatccccgaatgagaaatttctcgagcttttttgaactcatgagttgggttcaaggggtaaaccaaaaatacgtttaatggtcttaaatggcgttaattaaaaggtatatcattttttggcgtaaaaccaacgatttcagagtgaaatacaattttttgtttaccgaaaaaatggacaaaattggacaatttagccttttaaaaaggtcaaattcagacaaatttagggtaatactaccgatggtaccacttcagaatgtttccatgtgattacccatttttagacgaaaaatgcaaaatttgaacttacgaaattttgttcgagttcgggtccggggttcgaaattagtcgaaatggatgtcatattgatgatcagcaaccccaaaaaccccagggaacatgttttcacggcttttgaaaacaaaattttttttttcaaaaaagttgtggtaccatcgggtagtattaccaaatttagtatcattcgaaagctcttggtgagttaagtctaaaaatcaaagaaaaatgtcaaaacgggagccacctaagcacagggacaactgagtcccattgaatatagacagttctgtaccaaaaaataatgaaagaaattaacaattaaaagtagggttgtacggaccggggcgggaattcccggtcctccgaggtctcagcccgttttacgccaaaaaatgatcataccttttaattatacgccatttaagaaccattaaacgtatttttggtttaccccttgaacccaactctagccttcgaaaaaaatattctataaaattcgaaaaaatgaggcccaaaatttcggaaattggaattccgaccccactcaaattgtttagcattttctccgtgccaatgccatttcttccgtcagttacgaaattcatttttatgttcgtgcgacgtcaatgcaaattgtgccatttgaattggtgaacgaatgcacaaaggaaaagctgacattggccaaagaagacgaaaatgaatttgaggacaacagttggataatgaaacgctgcaaaattggggaaaccgcggcggtttattggaaagacggaaattgggacaacaattataacactgtgctcatttggctttatgatggcactaattgcattgggtga

SEQ ID NO: 58802 - DNA, 391 bp, Heterodera glycines
atgaaccgacggtaagcaatttgaaaagtcacacaaattcatcatttatttaactaaactgttttccataatttcagttggatttgcaacgacgtttggatggacattttgcccagttttgaccatcctcaactcggcctcaaattggcaattctttcgccacgtttcaatgcgttggtggacaaacatttcgatgccaaaagcgaattgacaatttggagaatgatcgtaattcgtcgcaaggacaaaggacctgaaccgaagctgtttgtacagatggatgacaaatttgtgccatttccattgcccgacgatcgtccgttgcccatcaaaatccgttttaagcatcttcagattgagtaattcggaatcagagatttatggcaataaa

SEQ ID NO: 58803 - DNA, 149 bp, Heterodera glycines
gcacgtaattgccgaaaaaattcgagaccaatttccgaatgttgaccgactaattgcaaaacgaaagccgtctttgtcaaagcgccttaccgagtcaaaaaatttggaaatgtatctcatatgcaatttcaaccaataaatttgaagaa

SEQ ID NO: 58804 - DNA, 347 bp, Heterodera glycines
atgagtccagcagtgattagaagaggtgcaacagtgatgagaagaggtacaactgtgattagaagaggtacaacagtgattagaagaggtgcaacagtgattagaagaggtccaacagtgattagatgagtccagcagtgattagaagaggtacaactgtgattagaagaggtacaactgtgattagaagaggtacaatcagttaaaaaaatccttttacttattaaaaataaagttagaaatttataatatattgtagaatatttattgaaattgaaaggaattaatttctcgaaaattcaaattaaataaaacatttattcatcagaaataatttaaaataatta

SEQ ID NO: 58805 - DNA, 986 bp, Heterodera glycines
taattaaatccattccttcgggggaccgtgccgggtgccgcggggtaagcagtgctggttcgtttcatcacggcaccgaaccttttggctagtcagcaatcgttgcttaacttgccagatcggacgggtgcgcatgattccactgttccaagcaccccaccaaaagcaaaacgatataaccaaaatataaggaaaaattttttaaaacattttttctccatcttcctttttgatactaaagcatcagagtgctaaaattaagttgtaaataaaatttggtgcgctttagagcactttctgaaaaaaatatttatgaaacaaaaaaatcgattttttcaagtgtccgtttggggtactcaaacaattatggggagcaaaaatccaacgcagaattaaagtacaggctatagggaagctattcccgaaggattcggtctccccataaatctgggcgcatcggttcggggggactgccccgaaaacaaaaaaatcgattttttcaagtgtccgtttggggtactcaaacaattatggggagcaaaaatccaacgcagaattaaagtacaggctatagggaagctattccggaaggattcggtctccccataaatctgggcgcatcggttcggggggactgccccgaaaacaaaaaaatcgattttttcaagtgtccgtttggggtactcaaacaattatggggagcaaaaatccaacgcagaattaaagtacaggctatagggaagctattcccgaaggattcggtctccccataaatctgggcgcatcggttcggggggactgccccgaaaacaaaaataaatcgattttttcaagtgtccgtttggggtactcaaacaattatggggagcaaaaatccaacgcagaattaaagtacaggctatagtgaagctattccggaaggattcggtctccccataaatctgggcgcatcggttcagggggactgccccgaaaacccaaaaaaa

SEQ ID NO: 58806 - DNA, 388 bp, Heterodera glycines
atgaaccgacggtaaaaggattttaaaagtcacacaaattcgtcatttatttagctaacaataaactgttttccataatttcagttggatttgcaacgacgtttggatggacattttcccatcctttgaccgtcctcaactcggcctcaaattggcacttctttcgccacgtttcaatgcgttggtggacaaacatttcaatggcaaaagcgaattgactatttggagaacgatcaaaattcatcgcaaggacaaaggaccagaaacgaaactatctgtgcggatggatgacaaatttgtggaatttccgttgccggaccgtccgttgcccagcaaaatccgttttaagcaccttcggattatgtaattgaaaatcatagctatggca

SEQ ID NO: 58807 - DNA, 491 bp, Heterodera glycines
  unsure (1)..(491): unsure at all n locations
atgagaaataatggagnaatgatgtaagtataatctttaaaaatgtttatttttttaaaaaacaaaataagtgtaaggcgtaaatagtttcagccaaaagcgggaagggaccgccccaaacataccgagagaagtcatcttcaggaaaatgattaatattcttttcgccagttttacaaaaataaaattgcaaaacaaattaaatgaatgtaagctttttaattattgataaagattcgaataaaaatagacactttaaaattaataaacattttttattcagttaacaccagaagaaaaaattaaaaattatttctcaaaaaattgttttttttagaattacgaaagttgtcattcgacaagaatgtatcagtttccttaaccagatcaaagcatgatttgctattgcaggcgcaaaaagatttaaatcattatattttcaggaaatttgacaaatacttgttaaaaattagattaaaaccaaaaataaa

SEQ ID NO: 58808 - DNA, 499 bp, Heterodera glycines
cgaacaaacttccaacgtcctaatttctgaaacgaccaccattccccaaatggctgctgctccgtccattcgtatcatcgcgacgtccaaggcgcctgctgcgacgggctacaggtggagcaaacaatggatgacaattgagaaagcacaactttatttgcttttctgcagtcaggcagtgctcgtcaacaaccagacgctgtacgtgagcggccagaccgggatgatgccaggaaagacggatgtggtgtcgggaggagcgcgagccgaggcgaagcaggcgatgaccaacatcggagagcttctgacatacgccggctcatccttcaaacacggtgtgtgagcaaaattcggcataaccatcatcgttgatttccgcccctttccagttatcaactgcaacatcatggtggccaacatgagcgacttccaggacgtcaacgaaacgttcaagaacttcttcaccgcggacacgtaccctgcacgcagcttcttccag

SEQ ID NO: 58809 - DNA, 364 bp, Heterodera glycines
atgacggatcaaatctgccaatatttgaacatctcattgttcacaaaatatgagaccgctaatttggcatcaaaatctgccgcattatacttggacaaaaatatgacaacagttggtgaatggattttcagcccaattattcatcaatttgttgtggcaaagtgcacattccaacatcaatacaaactaattgaggtaatctcaattaaaatttcataaatttaaaagtaatgtctaaataggaaaaaaattattattatatgttttatgtaattttaaaaattttataaagcttttaatttttttctatagaaataattgaaaccgatgcagaaaacattaatacataaattatttaaataaa

SEQ ID NO: 58810 - DNA, 248 bp, Heterodera glycines
atgaagcgaaccaacgcaacaaacatcactccgcctcgcgccaaacgctcaatggcaccggcattggacccaatcactgccgcactcgcagagcaagaacgccaacgtacactggtgttcattggcctcccagaaagcaatgccgttcgcccatcggagcgtgttcaggaagacagggaagccaccaccaaaatcttggaccatcttgaagttgaggccgaaccaaccgccgtctttcgactcggccg

SEQ ID NO: 58811 - DNA, 1577 bp, Heterodera glycines
atggacgaattcgacgaggacgcggcggcgatggcacagcgaccgatgcccaaatgggaaaaggccggacttcgaattgagcgcaactgtgccgaaaaccaaattttcctgaacattgtccaagaggtatttctcaaatcagacgggcattaattaatttttaattgtccgccggtaacaaattaattgtccctcaaattgacagattgtcgacaaatttggctgggacaattccgcccacgactacgacatgtggaagaaggcatttgggcccaacttcagcatgttctttgtcctcgaccaaaaccgagtgccgatgggctgcattagcatggcactgtacccgcaagtggcacattggagcatgttctacgtgagggacccctatcatggccaccaactcggccgtgcgctcgctcgcagagcgctggaatttgcaggggacagacccgtatttggttatgcaggtcagaaaacatatggcagttttgcaaatgcttttttgccgattgattgctccgtagaatgattaatcgattgatggcccatcgatcgctttgccgactgatcgattgattgatggccaatcgattgattttgtcagtatccctgttcttttcaagttcctgaaatgtggcacaaatacgaggaagagtacgcattccatcactatttggactggcgactgtggtcattcggtgcgaaatgtgctgacgtgcgacccgaacggttggatcacgactcgagcgtggagctgaaggactggcgtgaagcttcgttcgacaaactgttgctttttgaccgtcagcagacggtgggcattgacagatcgtcgtatttgcgggaggcacttcgccttccccaaagtgccgcaaaggtcagcagcgactagtttttggcattcgctgctattttaatgacttaaggtagccgtgtgcagggagacgggcgacgtggtcggcttatgtcaagcgcggcatttgctcggcgatcggctcggcatcagtctgttctatgcaaacagtgaggtcagtcggtctttgcccccgctttacgctcctccgttttgcttaagtccgtcgcctcggctcttctccgtgccgttctgctccaatttgcgggccccgatccctccgccaagttcgactcgttcatctacaaaactccgtccaccaacacggagtccatccgtctcttccgccaactcgtccaaaatgggccggtcgaacgtcggcttttctacccgcaattctcgcgttattcgctgccttttcccggcaatcgcattttttcgatcggcgatgagcacgtgtcactgatctgaacaaagagcgacggcggaagtgaaagggacaaaacggaggcaaaaaagaaaacattgccgaaatgggcacacatttaaaagtcaaaagatggcagcaaattcacaaaattttgtgtataaattaaccaatttacatttacagagattttgtctaaaattattaaaaaaaaaattttgcgcagaggaaattcccttttggtacagattcaattggcaacttttgatttgaataacaaaattctctttaaataaa

SEQ ID NO: 58812 - DNA, 875 bp, Heterodera glycines
atggtggaaaagaaaaatgttagaaaaatcactggacgaaatagcacagcaaacaaagagagtggtagtggaggaaaaggagagggaaatagtgtgggaaatgcacaacagaagggaaaaagacaaaatgaatttgaaggaggatcaggagcaaatgggaataacagcagtaatattggcaatggcaacaatgaaattaacactaatagtaataatagcggtggtggcggctggggaattgttggagaagacgaaggcgaaccgccaccaccacaaacgccgcagcaattagagataattagcaataacagcagcggtgtgaggtgtgccgaaaagagaaaaaattttaaaaaacttttaaaaaatcaaaaattatttaaatattgtatccgaaatctcgtcacaaaaaaattcattataaaataaataaaaatttaaaggaattttctagaaaaataaatttggaaaatttaaaaacgcaaatcactaagatttttccatttttaccaaattatttaattacaacagatccgaaatctcgtctcaaaaaattcagtaaaataaatttaatttaatttaaattaaattaaagaaattttcaagaaaaataaatttacaaaaaaaacaacattaaactttttacatttttcccatgttcagaataaatcgttgagtcctaaaatatagtataatattgtttttagcaattttttaataattaattcagggcacaaaatgatgcgctcgcaattgcttctcaattggaaaagtcggcctccgctggtgccaccggcggcgcaacggcccaacaattgctgcaacaattcggatttggcggagccggagcacaaaatgcgttgcaaatgaatcaattg

SEQ ID NO: 58813 - DNA, 928 bp, Heterodera glycines
atggccaaggcgacacacgcccgatgggccaagaattttcaggcaatggtcagcgcgttattgacgccatttgttcggaagcggatgctcgtggaaagggggacgttgttcggaaacgactgtctgatgtcggagtgcgacggcaccctcggacaaaacaattcacgggtagaatgatggggatgaggtgggggttattgaggcggccaacttttgacaggtggcgacatctacaaaatccttgaccacgaaaacttcgcttcattcacggcaccaattccacccgggccattgaaattttggctgatggacgccatgaatgacctccgccacatttaccgcctatcgcgtgccaaaattcttcacccagaggatctcgattcgcttgaacattggaccaaaatgttctactgccactggcagcaactccgatcacttgacgcctcgcgtaccccgtccgtccgaagcttcaccttctcagtgcccatgtcgtcccttttgcgcgctctcatctttggtgggggctgatcagtgaacaaggaatggaacacatgcacagaatgtgcaacaatttggtgtttcaatttttctttatcattgaatttttaattttaggtaggccgctactctcatctcggcacacaagagaagatcgttgagaaactggtgaagcacacgacgatgttgaatgcactgcacgaccgaggcgttgagaacaacaaagaaaacgacaaatacccagatttttgaccacattttcacctcaatttttttcacattaatatttcgaaaaatttgatgttttgaaacgagttaaattgcttagcattcgcttagaaaaagactctccttttcaaaaacaatttttagatacaaattttattcaatttagttggaaatgaagaaagttacggctgatcaaaataaa

SEQ ID NO: 58814 - DNA, 87 bp, Heterodera glycines
atgcccccctccctttcgcttcttttggccctttcgatggccttttgcctaatcactttggtactgaaatgccccgatgaagaatgc

SEQ ID NO: 58815 - DNA, 49 bp, Heterodera glycines; identical to SEQ ID NO: 51181

SEQ ID NO: 58816 - DNA, 289 bp, Heterodera glycines
atgccattgaatcagcaaatgaaaaattacaacagtaatcatttgacgaaatatttggagaaaaatgggaagaaaaagaagaagaaaaacaaaatgaagagaaaatcaagcaaaaaggaagaaaatattcaagaaaagaatgggagaaaaattatgccgaaatttgtaagaaaatttgagttggctattatgacacaattaagaaatggaagaaacaatttggcattaacatagaaaaaagaactaagaaagaaaaaattgaaaaaatgaaaatttattggcaaataaa

SEQ ID NO: 58817 - DNA, 703 bp, Heterodera glycines
  unsure (1)..(703): unsure at all n locations
tttggtgcgctttagagcactttctaaaaaaatatttatgaaataaaaaaatcgattttttcaagtgtccgtttggggtactcaaacaattatggggagcaaaaatccaacgcagaattaaagtacaggctatagggaagctattcccgaaggattcggtctccccataaatctgggcgcatcggttcggggggactgccccgaaaacaaaaaaatcgattttttcaagtgtccgtttggggtactcaaacaattatggggagcaaaaatccaacgcagaattaaagtacaggctatagggaagctattcccgaaggattcggtctccccataaatctgggcgcatcggttcggggggactgccccgaaaacaaaaaaatcgattttttcaagtgtccgtttggggtactcaaacaattatggggagcaaaaatccaacgcagaattaaagtacaggctatagggaagctattcccgaaggattcggtctccccataaatctgggcgtcatcggttcggggggactgccccgaaaacaaaaaaatcgattttttcaagtgtccgtttggggtactcaaacaattatggggagcaaaaatccaacgcagaattaaagtacaggctatagggaagctattcccgaaggattcggtctccccataaatctgggcgcatcnggttcggggggactgcccccgaaaac

SEQ ID NO: 58818 - DNA, 575 bp, Heterodera glycines
atgcgaaggaagcgccaattggagcggggcggcgccaaaggcgaaaagacgcggaaaagcccgcaggggaaaaaatttgtgcggaaggaataccgaatgatgaacgacagcgaacgagcgcatctgcacaacgcactgaacatgctgaaggagaagcgcgtggacaacatttccatttgggatttgcatattctgtgagtacagtaacaacttacagtaggatgaagcctaccgtccattttcagcctccactacccaaacagtgcccccgcggcccattggggtccgtttttctttcgtttggccctctgtccgctgtgttattgtcaccactcagacaggtcccgcatttctgccctggcatcgcgagtttctgcggcaatttgaagcagcgatgcacagcgaagtgccgggtcggtcggtcggtgcttcgatggcacttccgtcccatccctcattttaatgaactaattaagtaattcatcttaagagttaggcgtcattccctactgggactccactctcgaccccgggggggtgctcatgtcaactgttttttgatatgacttttttta

SEQ ID NO: 58819 - DNA, 430 bp, Heterodera glycines
ctaaacatttcaatgatttttaaatatgtacataggtaagtaaaatcatattacctatgccaatgaaataccaaatttttgtatgcttaaaagctaaaactgactttggcaaaattaaaaaaaaatctttttaaaagttttatttaattttattttttgctgtttaattcaaaacaaaaacaatttctttttgattaaagatgctaatgcctcaacggcagctgcgtttggttagcaaaagtttgctgttggtccatggggcgggtgccaaacaatttttgcaaggattgacaaccaaagacatggagcaagtgtaaaagccgtctttcttttcttcaacagtaatttcagctccctcaacaatgttccgttggtttattcctttctaatacaatgttaggggacgcattttggcggattttttcattta

SEQ ID NO: 58820 - DNA, 419 bp, Heterodera glycines
atgacacgcaattttgaggccgccgagcgatttttgtactttttcctcaaaattatttctgtaaatgccacaatgcgcgacgcatttcgcgaactgctcattttggagacatttctgcacattatgcaacagcacagctcgggtaaaagccacttggaagagcacaaaatcctttttctgatcaatttacggacttttatcacggcattgataattattaataaatatcgcacattaaccccaccccattcgttgttctcacgccaatttgattttccgattcaaaatgtgccaatgttttacgtcgttcagaagcaactgttcagccgcatgtccgtcgtgtggttcaactctctttggatttgctgatcaatgcgactaagggaaatgtgttgaacgcccaattcatcaccggttga

SEQ ID NO: 58821 - DNA, 2897 bp, Heterodera glycines
gggaataaatgattgatcagacagaaattagggacggaggggagggaatgatagcactgatcaaagaggcacagagatgcaaagtcaaagtgtatgatcgatcaatggtcaaactcttcacgcgtttaattttttgccccttcaaattcattctcaaaaatccaactgtttgataaggttcgtcccgccattatcaactcggttctgctcaatttcggctgtttcggcaaatgcacaaaagtggactcggaagcacccgtctgggccacagtcactttggccaattgcgggcccaaattggctgccatccaccaatgctttcggatgggcacggatttgtacagagcggacaacaaatggttaaaaatcggacgaattcaaatgaattttgagggaaaccgaaacttaagcaatggcgggcaaaacggcgcattagccgaagtgccaaagggaactttcaacgcacttttcctaatgcgacttctgttcgatttggcgtttgacaactttgacaagtatttatttaatagtctttcgcagtttaaattgttcattaccaaaaaatgaaggctttcaaatgaattgtgctgggcaaatgccgaagaatggcttcagaatgccgagaattttgaaacagtgccggttctgacctggtccaactcgaccgtgttgacccatccgagtgcccttctttccattgtcgatttgctcccggccatttgctttccgtccaatttgcaaccagcaggggacaatgagaaacacagggattataccgtagagggggagctgtcattagcggtgcgtacggtggcacaattagacgaatggtgcgcactggcccaactttacatcgcattggtcctaaaagtatttattttgcttttttgaccaaattcatctgggattcgctttatgctgttcttcgctctgaacgcaatcagcagacgatgtgccaattcgacttgcccgccaaacttttggcggtaggcgaaaatctgttcaaaacggaacggcacccgctgctttcgtcgttccattatttgttcgaaagactcgcttatcagtcacttcgaccatcggaactcaggcaagaaaaaaaccaaagagtgatcaaaaaggcaaaaacaaacagcaaacagttaagacgatttcttcggctggacatgccactttgctgcacaaatttagacgacgaaaacgaaaagggacggagcgacgcggcgatgaagccgggaggaccaattccgacccatcggttagcttaaccggcgaatcattgaaatttgattgactttttaattatttattgcacttaattgtcgatcgtttttgggtactgtactgtaaccttccaagggttattggtttcgcattggtcaccccttccctcccccatcccctcccctaaaggatcaaagcgttcgtgtcgatgctcaccccgcgtaaccattcgcttctgctggcgccgtccttcgtggaattcgatttggccatcgaagggttcgccgctttggtcattccctcaattgtgcgcagtgttcaacaactctcgcagctgccgccttcgctcggcagcgccggaggagcggcgactctgccggcgacgggcgccggcgattcgtcggacggcggcggcgcgaattttccatcgtccgccggattcactttggcaatgtccgcaatttttggggacaaagtatggaaaattggccgttcaggtggataaacattgtcgatttcgtggacaaaaaagagccgaccgtcgccccttcacaattcgccggcactttgccctccccgtcggcccaacccaccacaatttgcttgttcagcatcgttagggtgtttgacggcagcccatcaacaacaatgcttccggacgagaacacttcgaactcatctcgagactctcggccggtcaatcccgcgtattatggccatcaactggcggcaaacattgagaaccaccagaactgtctgcaagtgctgcttcagcgagtggacagctgcggttggtcgctggtggtcagtggggcggagcattccgtggcggacgaactgcgcaaggacttcagccgaggggcggagcagtgtctgcaagtgccgttgtccgagcagtacttcccacccaaacagtgggctcatttggccatcggttggtccgttcattcgccattcattcattaatttatcaatttctgcagtggtcagtcggccctctctgctgctcaagtccagcaatgtgtacaactgcgaagtgttcgtcaacggacactctttggccagtcaaaagttgcaactttggtggcattctgccgacagcggtggtcagcagcccgggctcaacgcgtacatcggcacattgccattctttcgccggggaagcatccaattgcgctggcgattagcctcgctgtgtttggtggaggaggcactcggggcagatgttttgcgcaaaatggtcgcacttggagtcgcctacacgggcaattaccaggtgccgtgccttttcggcactttccgccacctttgctctttttcagactgatgcttttccctcccccgcggcatcgtcccgttctgcgctaatctctgaagagagggtgctgctctcgctaaatgcttctgcgagtgcggagaccaccgctctttcgctgcgttcgatgtttccgtgccggacggacgccgaaatgattgctgcgctggtcggcatttcgccaaatgatcaaagcactccgttgtgtatcctctggaacatcacttcctgcccaaccccgtgccgtgcgcttccgctcggtgccgttctgatcggttacctcggtatccgtaccttctgcccgtgtccggtcagttcgctgctcgattctgtcggcggaatagctccgctgctcggc

SEQ ID NO: 58822 - DNA, 652 bp, Heterodera glycines
atgccaaaacaaaacgaaatcgttttaaaatattcctttctggacttgacttggtttcttgatatcgaagctgttttctacgctatttctaaaacggttataccaaaccccagatttttgaatccggttttcagaaaaaatgccttgtggtgaaaacaatatttcacatttcactccataactttgtgagttcggcacggatcgagaccgggataagaccattggaaagagcagctcgagctctacaagaaggtatggaaagaaaaaatagttatttctgggactttttcagaaatcagaattaattctccaatgtggcccaaattttaggcccccagccacagccccttgcttctcccagttttaagtcttggatttgtcaaataaattcaagacttcaaaataataatcaaaaattctcttaaaatttttttgaacccaattcaaaaaaggaaaaaaatttgcagtcaaaaaattattcgaatttctccaattttgtttccataatttccgaaagttattcggtatcataatgccaaaacaaaacgaaatcgttttaaaatattcctttctggacttgacttggtttcttgatatcgaagctgttttctacgctatttctaaaacggttataccaaaccccagattttga

SEQ ID NO: 58823 - DNA, 1341 bp, Heterodera glycines
atgccgaacggaaagacgctaggacaattaagagagagggaagtgaggaaacacgatatactgagccgttacgtcgacttggaggtggtatgggagcatgaaataaatgagcaactaaagaatgacactgcaatgagggagtttttcgacaactggaaggaccgctcaccaataaaaatcagagacgcttttcatggaggacggactgggcaaatgaagctactgcacacagcgaaaccaggccaaaaaatcagctacaaggacttcaccagcctctacccgtttaccaactttacgacagactatcccctcggccaccctaagatcatcagttttccagtgaatgagcagacggtcaactggcgttctccatccgacaacccctacaaaggccttctcaaagtgctacttctacctccaaacaacaacatcaaagtcactgttatgcccataaaatttgatcaacgccttctcttccctctctgtgagaagtgcgccaaacacatcaccgcaaaatatcccaatggcctcaaagtcaacgactattcctgtccccactttaaccccatttaccgcgcctttgtatcaacctgtacccatcttgaattaaatgcatcactagaagccggttacactgctcgcaaactttttcatgtcctccaatacgaccaatggagtaacaatgtcttcaagtcctacgtaagtgaaatgatggccctgaagatccacgccacaggattcccatcatggtgcgagagcgaagagcagaagagtgaatacattgaggagtgctggaaaaaatttgcaattaaactcgacaaagaaaagatgaattcggagcctgggaagcgctacatcgccaaactttgcctcaattcactctggggccgcttctccatgcggaaccttctctccaaatcaataattgacaacgacgaaagcctaattcatcagtatgcagaagataaaaagattgatctaatcgacttggaaatgatggatgaggacaacgacgtattcatgctcacctacaaaccaaaggaggagtttgtcgatgaaaataaatactcaaatgtcgtcatttccctcttcactacatcaatggcgcgactctacctctacgaagctcttaaaaaagtggccgacacccccggatgtgaaattctctacttttacacggacagcatcatctacgttcatcccgtggacaatgacccactcccgacaggaaaggggcacctcggagagctgacagatgaaaagccggaccactatattttgggattcatcagcgctggctgcaaaactacgggcttaaactttcacggaagacaatggtga

SEQ ID NO: 58824 - DNA, 369 bp, Heterodera glycines
atgccctacggggtggcatcggcaccagcgatattccagcaggtgatggaagaaattctctgtggaattgacggagtggcagtgtatttggacgacattgtcgtcactgctgcaaacgatgctgaacatttgaagagattggatgccgttctccaaagacttcaaaaggcaggactacgagtaaaaaaggaaaaatgctcgttcatgcaagaaagcattgtttatttgggacacattatcgaccggcaaggaattcggacttcgccagagaaggtggaagcgattcaaaaaatgccggcgccggaaaatttgaaggaacttcaagtttttagctctgaactgagcactcagtcacaaacgaattcataa

SEQ ID NO: 58825 - DNA, 129 bp, Heterodera glycines
atggcgaatgtttggcgcaaaaatgggccaagtctgcctgacaaagacatcccaaatcgctgtttcagtggacacttgcaatgtcaatttggtgccccttcggtcaaagagcaattccatggattaatt

SEQ ID NO: 58826 - DNA, 1666 bp, Heterodera glycines
  unsure (1)..(1666): unsure at all n locations
atggaccaatttgaattggtgaacgaaacgacccaagaaaagttgacattgcaaaaagaagtcggttgtggaaagaacaaatgtaaagaatgtgagaaaatgaatggttggctgttgaagaagcgatgtttatcgtcgaatgttgttgtttttggggaggcggttcagcaccagcagcagcggaaccacaacattttgaacaattcacaaaatgtccgaattgaattgcgtggtccaatttgcattgggtgggtgagcagcagacgacctttttttggtgtcatagcaactcgtacaaaatgcaacagctcatacaatttcttaggctatgcctaggcttaggcctaagctataggctagtccttaactttggcctgctctggcctaggttaggctttattttcctaatacatatttgttgattttcgtacgagttgccattgactccttttttattaattaaatttattggtaattgtttagcggtggggtgaatcaaaatcttcacccaaaaatgcgagattcgaaaattttaattttgagtttttgctcaaatccgggttcgggattcgacgtggctcaaaattaatatcagattcgggttctccgctctttaatttttattcaaaaatttatttaactaattattcttcgaattcaaattttaggccattgtctccgcccgccgaccaaaacaacgaaaaaggcgccaatttgtgaacgtatggccattgagaaaagaagaaaggaccgaccatttgattacctctgctggacttgatttgatgatattttctctttgaatgtgcttactttttcttttgtttaatggattttcattcaaaatcaaaattagatttttcgcggctaaatgttgatatttaataaaatcaacaaacattatgccatcaaaacaaataccaacgcaaatttttaaaatttatttaagtggcttataattttatgtagagcgataacgcaaaaatgagttctgctatctctatccccattttatttttgcgccaaaagtcatttgaaaaaaattgctttaaaatttcaaaaattatcgaaattttaaaaatgatgttgagcctttctctaccctcgagcccattggcaacaatttaaggcgaacagatttgaaaattgttttgatagaaaatgcgattctcgtgtttttctcatcaagtattatccgtaaaaaataggaaaatcctaaaaatccaggctttatccaacgcattaattcttctgctatatattgtgtgacatcattcgaatttggccaaattgtgcttatttctgccaaaaaatgaacaggcggtaaggcattttttaaaagccacaaattcctcacttatttagcctaattgtttcccatttcagttggatttgcaacgacgtttggatggacattttcccatcctttgaccatgctcaactcggcctcaaattggcacttctttcgccacgtttcgatgcgttggtggacaaacatttcaatggcaaaagcgaattgacaatttggagaccaatcgaaattcgtcgcaaggacaaaggaccagaaccgaagctgtctgtacaaatggatgacgaatttgtgccatttccattgcccgaccgtccgttgcccagcaaaatccgttttaagaatcttcgganttag

SEQ ID NO: 58827 - DNA, 1006 bp, Heterodera glycines
atgacaaaaggaaaagctgacattgccaaaacaaagggatgggacaaccgatggataatgaaacgatgcaaaattattggggagaccgcgacggttcagcagcaaaagaaaaatgaaaatttggacaacagttgtaacaatgtgtccatttggctttataatagcgccaataattgcattgggtgagcaattaaaaaaaagtgtttagataattcaaattgcgcttaattaaggccattgtctccgccaccggcagaagaagcggcacaaaacatcacaaaggggccgtcttctgacaatgaatgagtggtgggcccagcaaaaacagtggtcaacagaagaagaaatgattaattaagaatgatcgatcgatcataattcaaatcagtgatcaaatgaaattttatgaagaaaaacctctcaattttgtaaataaatcggacgtataaaaatggcaaaaaagttgactctattgcggttcacacgaccataagcttttttttgcaactttgatgcaccatagctttttcttattaaaaaattcttacacggaaatgaactaaaagtcatcactgcttcagtaaaatggtaatttgaaccatttttagactaacaagtgattccaaaaaattgaattttcgactttttgttcgaattcgggtccggggttcggaatagggcgaaatggatactggattcctgaacagcgacctcgaaaaccacaggaaacctgttttcatgtcttttgaaaacaaaaaatatttttttcaaaaaagggggggcaccagctttactattaccgaaaaacattttccttcgctaattttagagacaggcactatacatttttgattcagtctttttcgattaactgatcaaaaatagaaaaatttttgtatttcgaatttttaatataaatttcagaaattctttaacaaaagcaacaattttttttattgacgcgtgacatttttgggacaccttcaaaatttcaaagtttcgttaa

SEQ ID NO: 58828 - DNA, 329 bp, Heterodera glycines
atggttcgattagtctttcgcccctatacccaagtcagacgatcgatttgcacgtcagaatcgcttcggacttccaccagagtttcctctggcttcatcctgctcaggaatagttcaccatctttcgggtctcagcgcatacgctctgtctccgccccatcgcatgcgatcgagacgggactatgttgcgccccaacaccgcagtgccagggatcacacatcagctccgtaagaagccttcactttcattgcgcctttgggttttgaacaccccaatgacttgcgcatacgctaaactccttggtccgtgtttcaagacgggtcgaaca

SEQ ID NO: 58829 - DNA, 333 bp, Heterodera glycines
tatacatcccattatgaacgctaaaattatcagagtgccgaaaatcgcatgtgatctaagcctagcaaaaaatggtgtaagtaaaaatcgtaattacgctcaaaaagcttctcaaacaattttaacgcttccaattccttctacaatcgcctttatacatcccattatgagcgctaaaattatcagagtgccgaaaatcgcatgtgatctaagcctagcaaaaaatggtgtaagtaaaaatcgtaattacgctcaaaaagctcctcaaaaattttagcgcttccaattccttctacaatcgcctttatacctcccattatgaacgctaaaatt

SEQ ID NO: 58830 - DNA, 155 bp, Heterodera glycines
taagcctaaactttttggcctgtttaaaaaggaattaaaaatttttaaaaatttattcatctcccttttgatagaaaaagcatcagagagccttatttaacttttaattaaaatttggtgcgtttcagagcactttctgaaaaaatacttaagaa

SEQ ID NO: 58831 - DNA, 578 bp, Heterodera glycines
atgggtccgacaataaaaaaatccattaaagactcacgccgtattattgatttttcacgtaatcgatttgaacctttttggtctctttttcgagacgatttcttgtaagattattttttataaaatgaatttttttctatttttatttaaagaaaatatatacatttgtttaaattcttatttctttagcaatttaaaaatgtccatctgcattggagacacaacaaaaagccgaagttgaagtgaatgaatatttacgggaccaaaaaatcaaatccagggccgatccatcattatactgggaagttaattcacaaaaatggccaatgattggtgccgttgtacggaaatttctttccccgcctgcaacaagttcagaaagtgagaggcttttctcaacggccggcctgatttcagatgacttgagaaagagtttacaggcggaaaatctggcaaagcttttgtttcttcaccataacttgcttctaaccggattttcaattgaatgattttgcttttataaatttgctttttaatatgctttaaaatgctttaaaagatttataggattttttaaa

SEQ ID NO: 58832 - DNA, 1056 bp, Heterodera glycines
accattcctgtgaccaaggccaaacctccgacggtgtccgagtcgagcagttcgggagacgacgacgaagtgccggccaaaaaaccggcccagaaggcacagccggccaaagtgcctccgaaggcaccgaattttcttttaaattttttttatttgtgtttttctttagaccattcctgtgaccaaggccaaacctccgacggtgtccgagtcgagcagttcgggagacgacgacgaagtgccggccaaaaaaccggcccagaaggcacagccggccaaagtgcctccgaaggcaccgatttttcttttttttttttaattttttaatttgtgtttttatttagaccattcctgtgaccaaggccaaaccaccggtggagtccgagtcgagcagttcgggagacgacgacgaagtgccggccaaaaaaccggcccagaaggcacagccggccaaagtgcctccgaaggcaccgatttttcttttttttaatttgtgtttttctttagaccattcctgtgaccaagggcaaacctccgacggtgtccgagtcgagcagttcgggagacgacgacgaagtgccggccaaaaaaccggcccagaaggcacagccggccaaagtgactccgaaggcaccgatttttcttttttttaatttgtgtttttctttagaccattcctgtgaccaagggcaaacctccgacggtgtccgagtcgagcagttcgggagacgacgacgaagtgccggccaaaaaaccggcccagaaggcacagccggccaaagtgcctccgaaggcaccgaattttcttttaaatttttttaatttgtgtttttctttagaccattcctgtgaccaaggccaaaccaccggtggagtccgagtcgagcagttcgggagacgacgacgaagtgccggccaaaaaaccggcgcccaaagcacagccggccaaagtgcctccgaaggcaccgaattttcttttaaatttttttatttgtgtttttctttagaccattcctgtgaccaaggccaaacctccgacggagtccgagtcgagca

SEQ ID NO: 58833 - DNA, 141 bp, Heterodera glycines
gcactttggccggctgtgccttctgggccggttttttggccggcacttcgtcgtcgtctcccgaactgctcgactcggacaccgtcggaggtttggccttggtcacaggaatggtctaaagaaaaacacaaataaaaaaaa

SEQ ID NO: 58834 - DNA, 148 bp, Heterodera glycines
tcggaggcactttggccggctgtgccttctgggccggttttttggccggcacttcgtcgtcgtctcccgaactgctcgactcggacaccgtcggaggtttgcccttggtcacaggaatggtctaaagaaaaacacaaattaaaaaaaa

SEQ ID NO: 58835 - DNA, 86 bp, Heterodera glycines
cgtctcccgaactgctcgactcggactccgtcggaggtttggccttggtcacaggaatggtctaaagaaaaacacaaataaaaaaa

SEQ ID NO: 58836 - DNA, 1145 bp, Heterodera glycines
accattcctgtgaccaaggccaaaccaccggtggagtccgagtcgagcagttcgggagacgacgacgaagtgccggccaaaaaaccggcccagaaggcacagccggccaaagtgcctccgaaggcaccgatttttcttttttttaatttgtgtttttctttagaccattcctgtgaccaaggccaaaccaccggcggagtccgagtcgagcagttcgggagacgacgacgaagtgccggccaaaaaaccggcccagaaggcacagccggccaaagtgcctccgaaggcaccgaattttcttttaaatttttttaatttgtgtttttctttagaccattcctgtgaccaaggccaaaccaccggtggagtccgagtcgagcagttcgggagacgacgacgaagtgccggccaaaaaaccggcccagaaggcacagccggccaaagtgcctccgaaggcaccgatttttctttttttttaatttttaatttgtgtttttatttagaccattcctgtgaccaaggccaaaccaccggtggagtccgagtcgagcagttcgggagacgacgacgaagtgccggccaaaaaaccggcccagaaggcacagccggccaaagtgcctccgaaggcaccgatttttcttttttttaatttgtgtttttctttagaccattcctgtgaccaaggccatacctccgacggagtccgagtcgagctgttcgggagacgacgatgaagtgccggccaaaaaaccggcccagaaggcacagccggccaaagcgtccgctaatgtacggacatgctatcgttaattattacctatttgctgtttaaatttaagcccgtttcgattcaaaatggcaaggcaaatcccgtgaatggaaatgaaacggagtcaaacagttcggatggagcgcctccggctaaggcgcctcgaatggtccttcataattattattattattattattcgtaaaataggattatgtttttcaaggatctcgattcatggggtaaaaaggccgctgccgattttaatggggtcaagggaaagcgttttcgccacgagaaaacgaagaagaaacgtggcagttacaatggtgggaaaatcaacacttcggctaattcgatgaaatttgatcactga

SEQ ID NO: 58837 - DNA, 141 bp, Heterodera glycines
gcactttggccggctgtgccttctgggccggttttttggccggcacttcgtcgtcgtctcccgaactgctcgactcggactccaccggtggtttggccttggtcacaggaatggtctaaagaaaaacacaaattaaaaaaa

SEQ ID NO: 58838 - DNA, 260 bp, Heterodera glycines
gtttgactccgtttcatttccattcacgggatttgccttgccattttgaatcgaaacgggcttaaatttaaacagcaaataggtaataattaacgatagcatgtccgtacattagcggacgctttggccggctgtgccttctgggccggttttttggccggcacttcatcgtcgtctcccgaacagctcgactcggactccgtcggaggtatggccttggtcacaggaatggtctaaagaaaaacacaaattaaaaaaaa

SEQ ID NO: 58839 - DNA, 1262 bp, Heterodera glycines
atgcgatcggaggtgggcaaaatcgcactggacacggtgttcaaggagcgcgagcagctgaacgtggcaattgtgggtcagagtttcggtttagttgttgtggaatttttgtagctttacgggaattacacaagagtttttattttcggaaaataccatcccgtaaaccttcaaaaaggtcaatggactgttgggttgtccaatatttcctctgtatttttacgttccgtcaaaaaatataatatttttaacttttttatttgatttttttaaatcttattgcagagggtgcggcccgcccccctccaccgccctttttccccgtatcgttcccccaaaaattaaaaaatttcaatgcttatacttttttctgaaaaggggtgagtaaaatgcatcccatttccgtaaagcctatattcatacagcttatccgtagaatgctgattagcttttggttatttcgtgattcttttttctttctcagaatccattaacaaagcggctgagccctggggcatggtttgcttgcgctacgaaattcgcaatatgaatatgccggcgaaggtgcaggaggccatgcaggtaatcatgttgactatttttgcaattatctaattaaattaagtaaataaacaattttagccaaactagcgaacttctttcagatgcaagttgaggcggaacgcaaaaaacgggccgcaattttggagtcggagggcaaaagagacgcggcgattaatgtggcggagggcgagaaaagggcgaaaattctcggttttaattcatgcaaaaatagtagattaaatctgttccgctcgtccgtttagcctccgaagcggaacaacaggagcgcatcaatttggccaagggacaggcggaggcgatttttcgggaggccgaggcacgtcaaaaggcactacacgcggtggccgaggcgttgaacaaggtccgaaccaaacactcaatcagttagcatggcgcattacgtaatccgacattttgcaccttggcgattgatggacttgtcgaaatactagtactcgtaaaacgggacgaaatgctcgttttgagctctattcagtcacttgggaatgactatgaagcttttttaccttttctccccagtttaggctggtggatcggatgccgcttctttgctggtggctgaaaagtatgtgaaagcgtttggcgagctggccaaggagaacaacactgtgctgctcccgactgacatgggctcagtgggctctttcgtctctcag

SEQ ID NO: 58840 - DNA, 583 bp, Heterodera glycines
atggccgacctcgcctttctgttcggcttgtacggttttgcttaccaaacgtatcaatcgctgaagaaggaattcgctaacgaccaggcttgggtatgttatcgaaatgttcgaccagtgcttctcctttcgggttgcagctgcaccatgccggtgctttggaaatggccgcgttgtccagctttatgagcgattggaaactgttttcggatcagcctgacagttccacctcaaaatcaattgtctggctgaggaagcagtacccgcaacggtacgcagacaacgcaattcattactacgcaaatgtctgcaggtacaaattaaaaagtgaattccaattttgacggataaactttcaaatgttaatttgctgcattagggaactgattttaatacttgtggcccttttgttgcttaaaaactgggattatgaacagttcgtatccagaaaaaaaaattcggggaaggcacccaaagagccttttttttgttgttcttcgcaacgaaaaaaaataaatttaaattttaagcagaaaggcgaaagcgcaggatttatagcgattattcgttaaattgaaataaa

SEQ ID NO: 58841 - DNA, 478 bp, Heterodera glycines
atgggactggaggtatgtaaatttgaatttttaaatgcttaacgcaataattttaattaataaaatttcattttgtaatttttaagaatggacggacaattttgaaacgcaaggcgaaatgaatgaattgagaagaaagattaagcaaatggagaaccaaattgagcagctgaaggaaaactcctcaaaatgcgaaaatgtgttttattcgttttttaattttttatttaattttcatttttaaaattggggacttttccaattctaagaaccattggaaccccgaagattgtcaccacgaacttttccttttgatgcccaaattggtgaagattgtttgccgtggaaaggacgaatgtaaattacatgaatattatttttaattattttatttattttttgattttttcagtttatcgctctgtccgtgccaaatttgctcagtccgaaaaactcggaatcatttattttgaagtga

SEQ ID NO: 58842 - DNA, 415 bp, Heterodera glycines
atgaattattttggcttatttcccgctggcatttttgctgttcaaacaatgctgatgctgagcattctgttgtcattcactaatggcatggaaattaaagtgattagtgatatgcatcgtcatgcaaaattattgaccatagaggtgcaaaaaacggacactgtggcaacactgaaggcaaatattacggaaaaattgaaggaaattttcaaaaataaggacggcattcctcaggaagaattatctctgcgttactcggaagaattgaaggaaattctcaaaaatcagaccgatcccaaaaagcagaccgaccacaaacagcaaaaaacccccaaaaagcagaccgacatttcttcgcccgaagaacaatctctggcttactacaaaaaaggaaatgggcatattcttgaggaca

SEQ ID NO: 58843 - DNA, 1631 bp, Heterodera glycines
  unsure (1)..(1631): unsure at all n locations
ttttttgcggaatntagaattaatacacacacaacacgctgaatttgcatggcttcacgagatggaattgggtccgatggttgcgcattgattggcaatacgccaatggtttatttgaacaaagtgtcaaaagggtgcgccgctaaaattggtgaacaaatttatgaaaaattttaccaattgtaaatttttgtttttaaaccgaaatttaaattcggcatcacttattactaaaaattataaaaaaaacatttttcatattgaagtggccaaagcgcattaaatcagaaaaagtgaaatttgtccaaaaaatggatatccaattcaatccgaatgtttagcagtaaaattggaatggctaaacccctcgggctcagtgaaggacagaattggcgtcgctatgatcgacgcagcggaaaaagaaggccgaattaagccggggatcagcacaataattgaacaaacggcaggaaacacgggcattggtcaatcaataataattaattaattaataatcgagcaattgttataatgactaattaattaattatcaaaatcattaattgatcagccatcaatttgtgctaatgattaattaatcatcaacgtaattattctataatcttcccaatcattaattgatcattaaccaatttatgctaacaattaattaatccgattaattgaagcactcgcctcagtggcggccattcgcggctatcgtttcattgctgtgatatcctcgtcacaaacaattgaacgtgtgagaagataaaatatttaaatttttaatacatttttatttaattaaaactattttcgataaaaatgggttaattattatgaaaacagagaacagtgttacgtgcgcttggtgccgaattggtactgctagacccaaaattgggcttcaacggcgccgtagagcgaacgaaacaattggcacgagcaattcccaattctttcaatcccatgcaggcacaagttttaaaaattcaaataattaaataaattcattactcaattaaatttattcaagttttgcaatgaggcgaaccccgaaattcactatcggacaacggggcctgaaatttggcatcaaacgcagggaaaagtggacatttgcgtatttggaattggcaccggaggaacggtaataaatgaaaatattttaataaattatttgttgttttttcattattaagatgacaggcgttgggcgttatttgcgtgaaaagaatccaaacataacggttcttaaataaattataaatgaatttattaaatttaaatattaaaaaatttaaagtgctatcttcgttcaaaactcaaatatttttactcagcaaaaatttgcaagttttaaaatttagtgactgtgaccgcctaatttgaaaatagtttttttgcaaaaaaatataaatctatgaaaattcagaaaattttgaataaagaagctcctattcttttttttatctctttggattttctaagcctaaagactatttattanttttagtgtgtttgataaattccagagactttaagcttccgagtgacacaatataagctntttctcgccatttggacacataaaaatcaagaaacaaataataaacttactatcgaaa

SEQ ID NO: 58844 - DNA, 1249 bp, Heterodera glycines
atggttggcgtttctgtcggcttggcaagaagcggaagcgctggcggcatgatgtacttcgaggtggccgaagccgaccctttgaacagccactcagagaggggaacttgcttcttcacgggcggtggcggctctctcgacacttatgcattgtgttcgcagcagaatgcatacggcgccggtcagagtcgcgggggcggggtgagaaatttctcgcccccgggaacgggggcgggggtttgtttttaattagctccaaaaaatctcacaaaaaattattttttttttgaatgatgtgtttggctccacattcctttattcgatgtatcgcctcgattcaattcttttttggtataattgcacagatattgtctaaaaatgaccaaatttaaggattataaattatgccagaatagtcaatttttatgggtgtttttgtctaaatccagggtttctatttcaaaattttcaaaataagaataaaggctaaaaaaataagattttagggtcaaaaataagaacattttgcaaaattgcttcaaatatttttacattttattcgatcaaaaatgtattctattattattagggcttcgatttttaggtgctaaaaactgccaaaataagtaggttttaggttctaaaaaacccccaaaataggtgctaaaaatgggaaaatagaagccaaaaagttccgaatttggggtgtaaaatcgaaaattttctcaaaaagcaaaaatattatgccaaatcattaatgagatagcatttttgttaacaaattttgggcaaaacgccaaaataggtgaaaataagtttttaaaatttttaccacggggagctcaggaaaataggtaaaaacctaaaaatcgtatcactaattataattaattaaaattaacaaaacgccacacaaattcaaacacggacacatacatacacacactcagctttattatataggaaaattgattgtatcagcttcattaaatggtgttttttttctcatttttgtatttttgaattaaaatatatttttataatttattaaatagtgcgttttgcattttctgatttagcttcttattcttttaaatattgttataaatatatgaatgtttaaaaatttgaaaatcgtcattcgagattttgttacattaattaaatgtaattttcttcgtgtcataaaccaaattattatgaattttttttattaaatttttatcattaatgcatttttgttaataaa

SEQ ID NO: 58845 - DNA, 991 bp, Heterodera glycines
atgtcgcacaacccgaaagaagctgagagtgaaatggaaaaagcgatgtaatattctaagttggatgcccatggcttatcattttgcttttccgttttcagcttcatctctgccgattgttggctcggtgttttcgatttgcttgagcctttacaacttggcctcggaattgcactgatcagccaccgttttgactattacgtgaacgtaaattcaccgatttcaattttttcgtcgacgaagcgctggggaaaaaatgcatgaaaatgtaagttgaataaccaatttaaatgaaatataagatacgtaatactggagaatctggattccacccaaaattttttttgttatgaagactaacccggggtttttggggcttctgatcacaaaatgatatcagatttgcaaaaacaatgatttacaaaaagggtacaacattcgatcatattaataatttttttttaaatctgattttcaaaatcaaataaaatgatttttgtttaattttgtcggcgagtttatgccccggcaaagtttccgcaggcaaagtttgaggtgaaaaggcggagtactccccccccccccccccccccccccccctccaagacgagactaaaatacccctaatttaaaagactcttgttgaaaattttgtctttttgtgttgcttagagcactaaaatattagaaactttttcgggaattagagcccggaaattttgaaatgtcatggcctgaaagtcaacttgggcgcgactcccaaaatgagagatgtattttctctgcactctctttttatttcgggacctgaaaatcgaccaaggcgggactcccggttgctcgggattttgtcaaaataaaagcccggcaccagactaatcggcaacaatcccgtcggcagaaaatttaaattttatttcagggtggaagggaatacaacctcctcccccttctcccgaccctcgcttgtctttacgtatcattctcctag

SEQ ID NO: 58846 - DNA, 888 bp, Heterodera glycines
atgcttccaatggttttcggggtcgctgatcacgaatcttgcatccagttcgaccaattccgacagctctacgtatcctctattatttatgtaatttctaaaaaattagtaaaaatttactaaaagttgtaactaaaaaagcgggaaaaatttagactcaacaattttgaccctaacttttttgaaattcaatataattttttgaaatttaactgaataatagagaaatctttgggctatcttttcatatcaattgcgggtgtaaattaattgatgtttgaacaattttcatacatttaaatttgaggatttccttgaattagaaattaatttaggcccgatactgtcccatgctttttatggtcaattaattaatgaattagtcccttgctcaattaattaacggtgggggtcgattgggcgccgaccagttgggcgccaccctgctttttgaggcacaactcctttcatagttgaccgaactgaatgtatttaatatcattcaataggtctaaatgttctctattagcatgctaaattccgaaaattttggtcaagtttcaaaaaagttatgcacaaaaatattcggaaaaccgcttttttgaagttttttgtccataatatttttgaaacttgacgaaaattttcgaatagagaacatttaggcctattgaatgatattaattaaaggctcgcggtcttttggacagtggacatttggacagtggacattacgacagtggacatttggacagtggacatttggacagtgaagtcatttggacagaagtggacatttggacagtggacattacgacagtgaatgcaaattttttactgataacaaacttttgcaaacatatgctaattccaataactgaccattaa

SEQ ID NO: 58847 - DNA, 302 bp, Heterodera glycines
atgtgcaaaattagcactagtgctgactttcagttcgtttccgtgtattcaaatcgtggtgagccgaagtgacaaatgaatttaattaagttattttaattttaataacttatttaattttttataaaattagtaaaaatttacaaaagttgtaactaaaaaagctcaaaaaatttagactaaacaattttgatcctaacttttttgaaattcaataaaaatttttttgaaatttagctaataatagagaaatctttgggctatctagttatataaacaagattaaatttggttctttctga

SEQ ID NO: 58848 - DNA, 788 bp, Heterodera glycines
atggcagcaaccgatgctcaaaaagctggaggatgttacgggaatggaccgtgtgaaggcacgaagaaaacatttaatgcattcttttttgtaattcgccatgcttttcagcttttctacgttttctgcgctttcgtgatctgctggttggtcatgggtcctggcaaccaattcctctgcaatttgatcggtcagtcactaactgcttgagcaacgatcatcagcagatgctaattcgcttgtccttttttaggtatcgtttacccagcctatcagagtgtgttggctgttcgtacgcagacaaaagttgagacattccctcgccaatacgcaattttcattttgcgatgcaatttcagatgatgacacccaatggctgatctactggtgctctttcgctctgttcatcttgttcgacttcgttgtgaacaccttattgatatccaacatgataccactttatctgcttctgaagactgctgctctgctgtatttggcacttccgcagacgtacggggcacacaatgtgtacgtcagctatgtggacccgctcgtggattggattgacgaaaatggtacgaaactctatcgtgcggagacaaccgctcaatgaatgaggaaaatgttcccatgtgtttatggacaaagtcaagcccagtgttgtattgtatatttgtttaggcatttgtcccaatggtctatgtatccccattattattctttgacgtcgttatatgatattcatatacatgcagtcaaatatcgttataattctgttgagaattaaa

SEQ ID NO: 58849 - DNA, 602 bp, Heterodera glycines
atggctctcattattacgccattatttttagttttagtcgagtacgatttaattttagaaaacacaataacattaaataagatgcgttctcatcagtttaatttacgccaactccgtaagcctttccgaaatgtcgcctcaactaacagtgaaggccttcgtcatcggaacagcatcgtcgggccaccggtagttccatggacatcgttggccttgttggcaacagcacctccaattgttgcgcctgaagatgacatcctgaacagtctttttgctcaggttggaggaatgccaactttgaaatccaccggcaccactgttgaacttgtgcggcgccgttccttttcttgtggttcaaattgtgcaaaatgcggttggtcctcttttatgagtgcatttgaacaaggcatttgtaattcatccaacttcaggcaaaccattgcgaaggactccgaccaccaacggttggtttcattttttgtaaattttaattattattttgtttgcagacaactcaaagttgctctactgcaaagactgcaacattatcttcagcagttcttcttcgaatgacgcgtcgtccaagaaattcaacattttga

SEQ ID NO: 58850 - DNA, 381 bp, Heterodera glycines
gtccaggcctggatccaggtcccgaggagcctggatttttcctggacctggatttttgtccaggaaatcaaggtccaggtccaacatggaatctaggtccaggtccaggcttttttcaaaatgtcgatctctaataattttcatgcaaacaaaaatggttttttggtacttttccattttgctggcataaatgccacagtctgaatctaaatttcagcaaaggtttatgaccaaaatgaaaagggtaatatgtaaattgccgatggtccccactttttggaagaatttattattattatttttatgggatgttttcagagttctgacatttattttgccaatttcgagtctctgaccctaattccaacaaacaatctaaaa

SEQ ID NO: 58851 - DNA, 474 bp, Heterodera glycines
atgacgaggagaaggggaacagacggcccgacgggagaagacgcaaagtgccaaaagtggtgagaaaccagcaaaacaattttcttccaaaaaatttatcaaaaaatatatttttcccattcgttcgtcgtgagggggggggtcgaagcgggaaagaaaaaattttaaaatttgagcaaaaccccttagcaaaattcatttaaaatttcaaaaaaaatttccccagcggtgcgtaaaaatcctaatttttcttttaaaaaaatacgcccaaaaatcgcaaaaattggtcagttattggacaaaaactattaataaatcgcaataaaattacgtcccgagaaaattttcattgtttttcagccccaccgttgtgacaaatgcccgatggaatttccgaaattgtggaatttcaaacggcattaccgtacacattctgacttcaaagcattcgaggtaaaagtagctaacaataaa

SEQ ID NO: 58852 - DNA, 5220 bp, Heterodera glycines
cagatgagacgaaacaacagcaaaaagttgagacggatgcagaagaagggagggaaattcaatcgccttctcctgcaaaaccaaaatattaccgaccattggatgcaactgatttagaccaattgcaaaatgtctatccaaaaattgtcagcgaaatatgtggttagtttttcattaaataatagtgtaaatctgcaataaatggcattattttttaagaacttatttcacaattgaagcattcaaaaattgaatggagcaaatttaaaagtgaggaaaagcggattatggttatgttgtgctcagtaaagcaattgattaaagtcaaaaactcgattttcttggtgagtcagtgatgttttttagggaagaaaatatgtaaaaaaaaatattaaattaaaaccaaaaaaagaaaaaaaacttaaaaaaaagaaaaagtaaaaaaacaataaacttaagctacatggtcttcaaccaagccttttttcgctgtttttcggtcttcttccctttgccgaccgatgggttctgacatttttgccgaattttcattatctgttgcttcaaatggccaaggaatttgcattgacgtaagctttttcacactaacattttttactgtttttagtcattttggtttttaggcatgaccattttttccacaattgtgaaatttttcaatccggcttttccgataaacaaaagtcaaatgtcggtacgacagctccgctgtctttctcaagcagcgtcagtggcaaatactttgccaaaatcctcgattcactcgccgaattattccgtttctttaatatattacaaaaccacgcgcaagcgacactaatcgattggctttccaaaatttcgaatttggttgttgagcaattcaaagtagtctctgaggtttcctttaattttttgtgtttagttaatttaaattttctttttgttcagcttcgtgaaatgtttgctttgcgttcttcgcttttgctcgttccattcttttcgctttattccataaaatcgttcgaaatgcgaaagagtctcgtcaagtgtttgtacaggtcggtcttcgttgactgatttttctttaatttgtttatttattttagaattcatgtgttcaatgtcctcctttctgatgagccatcgtgtaaaatactttcccaccaatttattgccaaattgcgtgagtgtgctgaacatctcgaagttgaacagttccgtactctgtggaatcgcattccgatcacatatttaatacggtttgtatatctacatacttttttcattttttttgtttagaatttctgaaatatcaacgattaaatgtctctctttcttggaaattgcgaagagaactcaaaagttgcttggaaaaatgtgcatggaaccgaatgaatttcgatttgtgactgatttcctcttcggacgcaagcgcatttccatgttacaagacaagtaaattggtcaattttcatgaaaaaaacaaattattgttttgttattgcagttgttcgcctcaaaattggcttttcatttctggacaatacctttttgaaagtttgtcgtgcactgctaatgacaagtcacagaaagcctcgacaactttcaacgaaaatgccaagcaaaataaccgaatcggtgacagcgcatctctcctacaaaaatggttgtttattgttggccaatttgcacattattgtgccgttaatcgaatgaagacgccaattgggaagacaccacttgaaacatttactaaattcgaaggtccgtttgacaaattcccctaactcctcgaaattatgcattttccagctcaattgcgagcattggcttcctcttctacttcacaactgattgcttcgcgttcaaaaaatttggcttcaaatgaaaagggaatcatttcatattccaattctaatgatgatgaccacttatcaatgaatcaatcgagtaagtaacggaataaattacagtaatgaagcttttgaaggcggtaactgcggaaaggaacaacggaatttgtacccggaggaggaatggttccgcgttcggatgctcctccattgcattgacatggtcgagaaaatgatgtgttatgcggtgcgcgggtcgatgcttaaaatttacgacgaacttccattggtaatgctgaaacatcaatgattattgttcgataattgcctcttatttcagaatgcacgtcaattcttttccgtcaacttcaaaacttgcatggattggctgttccgaactgcacttccactaatgagcactgcctatgccaacggtcattatgctcaaattgtccgatttggtggttttcttttcgccgaactcgagcggaaacacccttcaaatgcttcgaacggtctttctttttttgtgggttttaaaatactatcatttgcagatacgaaaatccggcttgatccttccattcaatttgccattacttgggtcattcgtgctttggtcaggttaggcgcaccacaagcaatccgcggggttcaaaggttttccgagacaatgtttggacctgcggttgatttttcgtggtgccattatgccgaattacttgcatcggcacggtatattaacaataaaaggtgtatatggaaaaatgtttttttttagagttgaggaagcactcgatggatgtttaaactttttgaattgtgcaaagcaatccaaagagaatgttccgaaggttcgtgaccacgtgttaaatgccattgacgaattggcactgatggccgctgggattttacgtctcccacaagctgaaacaaagttaattgttttgcgaattctattgtattgtttaattaaagaattcgcgaagcaatcatcgacagagaagaagttaaagacgacgaaagcggagagagcggtgccaaaatgactgcgcttttttcacttcaaagctgggagaggtgggaataaaaccttttttataccgatgtagtaataagtccatgccttttttctcccctttttgccagtgttttgaaactctcttcctgggaccaattggccaattcggctccgtacacttcgcccactcagttgaccacggagaccaaaaatgaaagttgggctctgaacaaccatttattagagacagaggcgaaaataatgcgcattttcgaaatacggcagaaaaattcaatcggtcgccaaaataccggggaaatacttttttcacaacaggtaaataccatcttgttataatgcggtgactttggtaatcgtttaggatgagctgagtgatttggcacaatttctgctgtgtggtggccacgaaaacagcgacggacttgcacattcgaagttggccattcttcacgcaatttgcactgggattcagcatttgaatgtaccgaaccaacagtaccacgtacaaccagctcaaattcagcagcactttccaccaaagggccaacaaagcgccaagcaaatgatgagaagcccaccaaaatactccgtttcaacgccggtatttttgcagcattaatcatggactctgattaatatggttttagaattactaaattttatggtactatttagattttgctagaagttgactttgctgatctgttgcacaattgcaactccaatgctttgcatagtttggaaattggtcaaatgtattgcggatggatgcacagattgtacggagcgcagaaggagcacagttttgtgctgaagagaatgcatggacaaattgctcaattagttaatttggaaaagttttatataaaaaaattttttgaattgatattcaggcccaaaaacttggaaatccaaacttggccaacacgcattttcgactctcagttcaaaacggagggacccaaaattcgtggccaattgatgatttgtatggaaatcaaatgcaccggcagctagacattttgccagaatatcaattgccaatgggaatttcaaatttgtacatccaacaacaaacccagccgcagtttcaggtggaacacatgagaaatgcaacgaaaattatcttttagtcaattccgcctggcttcgagtcattactcggcaatcaaccttttcaaactgaagatgctcacaatcatttcaccgtcaacaatatttccttcacggctcctgcgacccctcaagcgacgaagagtctcctttctgaggactttgacggtgattctcttcgtttgttgcccaacgaattagccatcatgcaacaggtacagtttatttattcactttgtttatggctttcctttctgtgaccaaccaacttttccttttagtttggcattgacatttcctctccgcaaggacgtcactttgaggagttaattggaagttgctcaacttttgaagagttccgttctcaaatagtcgaacattttcctcttacggatgtttccatgaattcgacggcaattttaatgtatttatttgttttattaattttcattagggcttaaaagggaaatttcgaatattaactttttaagcaatttatacattcttttaagggtacttgaccagtcaaacttcactcaattttggctgtccatcaaacaccgtcaataccgtctctatgaattggcattgaactctcacctgcgtttccttgaaaatttggtaattatttttataaattttcattttcaattagtattgtttattgtttgtattaatttgtttagtcctcagaaaaaagttacgtacaaactgcggaagtgattctgcgattcctgaaaatgctttctcgtcaacctgaatggtttcaacgaattgtgacttttccggatgataaaaccgccacttctgccggcaataattctgggaaaaaattggcatggatggaccgaattcctgtcaacgtttggactggttattctaatttcgcctcattatttaagtgaattcttttctcttcaaattaaatgtctaggaatgatcccacaactttttgcctgtctcaaccattcaaattccattgtggtcgatgccattcacatgcttttggagcaaattggtcaaaatttgcctcacgtcgtttgctacccggccattgtcattgctggggcagcggatgaaaaaggtggaaaataaacacataaaaattcggtaaatttattttgctgtttagccaacacaatgccattgctatcggagttctcaaaagaaaacagcgaaagattaattgtaatttcaatacatccatag

SEQ ID NO: 58853 - DNA, 434 bp, Heterodera glycines
gtctctcatgattcgtccattgctgtgattgacaagtccaattctcaacctcaggaaaggccaattcagcacaaaactgcctttttgccgttcacttctgtccgatgggtcaatgagacgcatattgtgacggctgtcagatattccgcttttcctccaacacattgtctctgtctgttgtttagggtcacgactgttccccaatgcttttcactttcgacgggacggcgttgaatttgaaatgcaaattggtcaaaaacttatatttgatgcttaaacaaaatgccattttaggatgtgccgccagaaagtaaaaacggttccaacgtgagctccgctttcgccatgtttcgcagcatcgacaaaaaggcgttgtccgccgactctccgttgggttccaccgcactgaaaacgttgcatcaaaattcgattat

SEQ ID NO: 58854 - DNA, 695 bp, Heterodera glycines
atggacaaaaatgtcgcttggtggtgctgcaattgttgggacagtggaaaaagtgttgacgaagatgttgttggtgtacagcaacaacatctacaactaccacagcagcagatgttgctaagcggggcaaaacttggacaaaagcgctcattacaaatacaaattgagtttaaaaaattaattttaataagagtaaataattcataaattttaattaatgatacttcaaattataaaaataattttaaaatttaaaaaaatattttgacaatgttaaattaattattattatttttaaatttgataactcattacgaatagaaattgagtttttaaaaattaaactttaaaaatataatgaattcaaaaattttaattggtgatccgccaaacgaaaaaaaaatattttaaaatgcataaaaaatatagtgttaaaattattattatcatttaatcgaataaaattatgcctagattagcgaaaaataaatttcaaaattaaatttcagagccaaatttattccaaagggacaacagaatttacgcgcttcaagacaatgccatatttgatgaccaagaccaacaacagttgtataacagcagaatgtaagaatttttagtaaaaaatgtggcgaaaaataattttaaaaaactttcacttattctaatatttataacctaaatataattaatta

SEQ ID NO: 58855 - DNA, 111 bp, Heterodera glycines
gatcactcccaacgaaatgtgcctggcacggacagtgtgatttctatgcccggattgaccggctcacacaaacaatgaaaatgagtcaatgagatcatttggagttcattt

SEQ ID NO: 58856 - DNA, 45 bp, Heterodera glycines
atgaccgtttacgagtataaactttgcccggataaggagattaat

SEQ ID NO: 58857 - DNA, 112 bp, Heterodera glycines
cctgcatattttggaaaatacaggatttacaggatttgcaggattaatcctgccggatcctgtcctgtaaaaaattttgaattccaatcctgcaacaggacccgcaaatttg

SEQ ID NO: 58858 - DNA, 207 bp, Heterodera glycines
atgaataaagcgtttgtcaaagcagcactctgctccaaatcgacgaatgtttgcctcttcaaacgcctcgtcagacccgtcgtccaaattggctcccgtccaatcaccggcgccggttttggccatccgatgaccaggcaaaagatgcaaatgtacagcccggaaatgagggcagtcaattaccaacagaagcgcacccacatgcat

SEQ ID NO: 58859 - DNA, 512 bp, Heterodera glycines
gtggcctttggtttttctgccaatttaaaattgttcactgtgacggccaaaggagaaaagttttgaggcgaaggcggcaaaggggcgaatgctttcagctgctggtcgactttggaattgggcagaagaaaggaagcgattggcttaagaaggcattcttttgttggtcagatgtgagtgattgtcttaatggtcgtttgtttgcctttgcctctcctccgactgaattcaattcggacggacaaggacagaatttggcgtcggcgccgtcctcgcccggggggcccttctctccgcgctgccccggctttccctccaatccgtctaatccttgcttgccgacccttccgtccggtccgggcattccgatgacaaagtttcgttttcctctctcgccttgtttacccgtctgaccgggcggtcccttcaccccgggtaatcctgcaaattcagccctttattttatttaggcgtttttttcagagggttatctttgcactggtggacctgca

SEQ ID NO: 58860 - DNA, 984 bp, Heterodera glycines
tgcaggtccaccagtgcaaagataaccctctgaaaaaaacgcctaaataaaataaagggctgaatttgcaggattacccggggtgaagggaccgcccggtcagacgggtaaacaaggcgagagaggaaaacgaaactttgtcatcggaatgcccggaccggacggaagggtcggcaagcaaggattagacggattggagggaaagccggggcagcgcggagagaagggccccccgggcgaggacggcgccgacgccaaattctgtccttgtccgtccgaattgaattcagtcggaggagaggcaaaggcaaacaaacgaccattaagacaatcactcacatctgaccaacaaaagaatgccttcttaagccaatcgcttcctttcttctgcccaattccaaagtcgaccagcagctgaaagcattcgcccctttgccgccttcgcctcaaaacttttctcctttggccgtcacagtgaacaattttaaattggcagaaaaaccaaaggccacagagaaagaaaacgcaccgacgacgcaaaagggggcaaagacaacgacagtttatgagacaacagcgaaaaggacgacaaattacgcactcggagaagggacgacgaacggcacaacttcagaagacatagtgacaacgaaaacgacgacgacgccaaagacaattcaaaacacaaagccaaacgaaggaaatggacagcaaaattcaaatttgaaaattggccatttaaaggcgggggaaaggccaaacggacgagaaaataggagagagaaaggacaaagtgagcaaatcacagcaaaaaagggaaagacaaagcacaccaattaagacgaggaggacatttacccaaattacgaaagtccgaacgaagaaagggcaaagaacggagggaaagaggcgggagaatacgacgaggaaacgacgaatggggaggaggaggaacgggagagggaaggtgagagagagagagag

SEQ ID NO: 58861 - DNA, 1017 bp, Heterodera glycines
atggcaattccccagtacaaggaccttcccttcggaggaaagacggtcattttcagcggtgacttcaaacagtcactgccggtcgtgcctcatgaaggcataaccgcacaagttacggcctgctttcaaacttctccgttgtttcgtcaattcaccacaatgaaactgaccatcaaccagagattaggccaaggccagcaagcgtacttgcaaatgtgccgccaaattgggctcggagagaccggagaacacttctggattcctccgcagttcatcgtaaagagcagggaagagctgataaactttgtttatccaaactttcaacaactccttggcaatgaaaaggagctgctcaaccgtttgatactcgccccgcacattgatacgtgcgacgaagtcaacgaaatgatgatggcgaatgtgccaggtcaagtgcgggaatatttgtccacggacaaacctcttgacgatcgcccattggacatcgatgagatcgagtccgaagtggcagcattgaacggacgcacagactctgggatgcctccacactgtctgcgactaaaggtcggaagcgttgttgtcctccttatcaacaaaagtgatagggaagggctgatcaatggcacacgcattgtcctcgaagaacttggcgatgatcgccttgtcggtcgtgtaatcaatagcaatgctattggtggccaagtgaggtttttccttgaaagatctcgcaatgtcttcgaggacaaaacgcctggtgggctgaaatacgagcgtttgcagttcccaattaagcctgcattcgctatgaccattcaaaaaggtcagggccaaacaatccgcactgtcggcattgacctggaaagggaagtatttacccatggtcaattatatactgccttttcaagggcaacggacggcaacaatgtccgtgtgcatgctccaaaaagggagatcgatgcccaaggtcaagcgaaagtgctgaacattgtggccaaaaacatgctcaaattgcaataa

SEQ ID NO: 58862 - DNA, 621 bp, Heterodera glycines
  unsure (1)..(621): unsure at all n locations
atggagcctacggacgacgagcaggaccacggcaacgacggaaatgagcgaatcggtggctcacccacaacacaaatcggagcaggtcagaagagtgcaaaaaggggaaaggacaaacagaaaggagtggaagcatcgacaactcaaagctgttcgggcactcagcccggagggacgcgaaaccttcggagcaatggcattgccatacgcgccattcgggaccagttggaaagggcatcgggccctctcgccgatcggatcgcggaagcacgggatttgctcgatccggatctcaacggagacaggccacagacagcagtctgtctctcggccatggagaggggactgcgggaattggtcgacattttcaagggccatttcgatcggggcctagcgacgatcggggacgaagcgccagagctgcacgactacctgtacgacgcgttcacccggccactcccggccgcaacgagatgtttggggctccgatcgcacccgcccccagctgaactgcttcaaatcgcgatggagcaccttggtgatctgcggacggtccgacgaacgctcgaggacgggaaaagttatcccagctntcatccgggacccgatcgggaaccgtag

SEQ ID NO: 58863 - DNA, 2427 bp, Heterodera glycines
atgcgaagcgtcgccaaggtcgcccagtacccggtcttaaacgcaggaggaaacggagccaacacttgggtcaatcaggccagcgataggagggaacggactccctccccgcacatccgacaagcgggcaatcaaccgcgcccgctgattccagaacttccaattgcggggaatccaaatccctgcggtcattttcggatacccgaacaggtcaggggcagagacccctcagttctgcgaaccactcgacgtgacgaagagacgacagtattcgaaaccgtgcgcctccagccaccgacattctcgggacaaccggaggattggacgacattttggtcgtatttcaagcgggcagttgacgacaagcccatcccgggcttcgaaaagcagcttcttctccttcgctgcttaaaggagggatccccagccaggagggctgtcgaggtctaccctccttcggacggtaactatcccgtggtcattcaattgctgaaagaacgattcggagacacggatgatctgcagcgggcaatccgggcccagcttctccaccttccaccggccacagacaatgctcaaagcctgaccaccgtcgtggacgagttcgaacgcggagtgtgccaattggagcaactcggggcgaatgtggaggacgcttccttcatgccactgctcgagtccaagctgccggttcggatcctgacggaattgaggatccgggaaagcacgagtggaacgaaatggtcagttcgggaatttcggagggcggtgggcgcccaagtcaggtgcatgcgcgcggcagagtcagctttggcggcaatgcgcgagccggagcgccgaaccgaatcaagaccggaacaaagccgacacgccgaagggacacagaatcgggatcagttcccgagggtgttcatggtcagaagcaacccctcatcccaacgacccataacacctggggcatccgcccttcggaccggaactcacgcgccacaccggaaagtggctgatcggaaccggaatcgacttgcccaatctcgtgggccggccccaactgacaacggctgttctctatgccaaaattggggccaccgtccaagcaattgcccgacttatcccacgttccaagaacgacgacaacgtttcttcgagcaacggcggtgtatccgatgcctttcttctgatcatattgccagttgctgtccccgcccaaaagcatgccggtggtgcctgcgcaacgaccatcactctttggtctgttgggtcggaccagggaaaccaatcgcaattcgtgagccagcgggaccggaaacccgcgaacacattgggtcgaaaccagtggaaagtgtggtcgagccgagaacccattccggcctgctcaagccgacggacgcgacggttcagcctcaaatcgtgatcggaattcgcaagttttgggacttggtgatcggattcaaaatatcggccgagggggcctttcttgtcgacacagtgttcgggaccgtactttgcggagagcatttcggggcgcccttggggcaatcagtgccccgcgacaccatcctcatggcaataagcggagaagaaaacagatggaaccgcatgccagcctcatcgggagtggaagcagcggacaaatcgaaaccgtccatttacgagaacgatcgtctggggattggtcccctcaacccaacgccaaagaacccgcgcgatcggaaggaccctccgcatgtccagcccgagaagcgatgtagggtggagcagcaacggaccaaatgtgagttaccggaatcggaccaagacggaacaacagaaccgtgcgaaagaggcctcagccagtgcttgctcggggcgtctctgctgtggaaggtgatgacatgggtgactcggcacccaattcgagtttttaatcgtttgacgggtggggacattcccgagccgaccgccgatcaggtcaaaagtcaagaacgagtgcaattggccagacgagcccgcgcagccgctagagcttggagaaatgcagaacgaggacgggcatccaggcccggggccgccatggcactgcttccgctgctttgttttgtcgcccttttttcttcatcggagcccatgtcggtgatgctccgctcggaggactgcgcaagcacgccatcgggattcaaatgttccggatccgcggccatgatcatcggcccggaagtcggtgaactcagggactcagtgaacggcatcactccaaaggggattggtcccctgtgcctcttccttcaatgggatggtggcatttcgactgtggctcgtccttggcccgcctcgccgccgcccccaatgtcgcgaaagcgacgagagaaaaaggatgggctttggatggccgggattgttcccggcggactgaaggaagcagggggcccgatgccaaacagtgattaa

SEQ ID NO: 58864 - DNA, 1247 bp, Heterodera glycines
atgattcgtaataaacttgaatgtctacaaaaaagtcggaagaagctttatttgttagacatttcaaacccaactgaggatgccgtgaattttggagtgtagattgacgaaccgcatgccgtgataacttccgacaatgttgaacaacagagtttgaacgaggctgaactttcagcaatgacctttgagcacggaaaaaccaatttcgggggagattgtctatggttgaacggtaagtttgaagtaatgcaaaaaatttaatttccaatctattcaggacttgtttcacacatctctcagaaaatcgctggagtcaaggcgacagaaaatcaaagaaagtgttggtctcgagcatttatatggcgagaagacagaatatgttgaggcagttcgcaacatattcaggtaaaaaataagatttagatgtaaatcataattatttttccagagcggttctctctttgccgcttttgccgtccgcaatatcagaagagctttctcaattatcttggccgtcttctcctcttggaatgccagtgttcttcctttacttctctcgaacatacatcggcttgacacagcgcccgttgttggatggtgttaacgcatttggagatggtaacccactcgatttttcacccatcggcaatcattgtttgtttaaatttatgcatttggtttccaaatatttaatttttagctgcactctggacaacaatttcgaccacaattcggaacacagctatgcggctaccctaatacagttcggcatcggctcaccggcaccatcaactcttacatggccaaccactgtgagtccacaggagcagcttgttcaatattcgttgagcccgctatcgacttcgacagcgccaggcagaattctttcatcaatcatccgtttaaatttaataaaaaattcagttccagcgtgggaggacaaaatcattcgggcgccacatggcctctgtcaccaccccgacctctcagatttcattggtggggttaatgaaagtatcgacagacaggcggacgctgcctgatctgctcgccatttcattcacaagcgacacaaatgatacatcctgcaggacgcggttattatgcgaattttggcggacgcgtcgtacaacagcaacggtgaaattagtgatctgatgtcggcgctcggtctccaagttgaaggatatgcaggaaaattgagagattttgaaatttacgaccattcaattgtccatgttccgtaa

SEQ ID NO: 58865 - DNA, 5715 bp, Heterodera glycines
  unsure (1)..(5715): unsure at all n locations
ccctttgttgaccatgcagactgggaattggtgcaaacttttgggacccgttcggctgcggtgcaattttgcgttgacgaaggcgcgccgcgccaccatccaaatggaatcagattcatttacgcattctgcacatatcctgctgggtgcggcgggcagtttcggatgtgagttaatgtggactcaaagtatataatgtacaagggttaggctgggggtggggggaggtcatgccgccacccgcatggggtcagcgggcgtcgataagcaataagagaagtgtttggaattttgacccaaaaaggcgaaaatatcgcgtccctttgctcaattacctttggtgattttggatccacatgttggttatttattatttgtctagttttgatttagtaaaaatcattgcaacatcaaaaatccctggaaacgtgttttcacgactttttagaacagaaaaaaattttaaccaaaaaaggggcgaggggaggcaaactttactattatcattggattctgcgaccattaaaaccccaggatggtataaatcgaataaaaaacaaaattttccttgaaaaaatggggagcaccgtctatgaataaatgttggtttttgtggagccaagacaagtcagcacttattaagggcacccatcaattgggaccttgttgaacatgttggccaccgcgtgaccggattgccatttgtcgccgctggcgactgaacgcgtggaaattgggggacagcccggaggatcgctcggaggaccgtttggaggaccgcccggaggaaagaaatgaggaagtcctgtggaggacggaagaagattctcgaatgttcccttgtgatctttgtgattaatattcccgaagtttccccatttttcatttcctttcaggtgtgttttagaattttccctccctgtccaaatctcatatataaacccgaatatttccctttagaatccctctcgaaaaatcattattccatcctttgattgtgcgctattccgacaaataaactacttcttgtctaagaagttttttgttccgaaggtgttcctttttctctacggtttcgacattcccggaactcagagttccgtgtttgcatttgtctaagctcgattgtcccgaagtccaccaggacagtccaactaagtctaaaggggctgtccatcccacaagtccattccaagagcggaaaccccgtcccattcgctaagttcaataacattgtcgcggagcgtgtgcaaaccgacagccgaagcgcaaccgaccagtccagcaaacctgcacctcacccgcctcctcgacaagtggcgctcctgggaacgcgataactggcgctcctgtaaaacgaccacacaacaagtggacctcccgaaaagaccatcatgagcaacctaatccggatggtactgggcccacaagtggcaattcttcgtcaacgagtaaacacggcacggacacatgtcgaccgtgaggaagatgaagaagttaacaacgctgcgctgatggaagcaaaagtattgctgttaaaagtattgcagcgtgtggaagctgaactagcgaaatgggaaaacgtgatttctggacttcaaggacaagaaaaacagacagagcaagaacgactcgagacattcatcaacgaaagagaagtagcgaatttgctagccgacgcacatgctacgatggatgaaatacaagtggcacttgcaggagagtcagaatacgatggttcccaaaacggggacaatgccgtgcgagaaaatgcccaaaggcaacggcaatcacctgctcgagaggaaaggcaactcccttttcgagtacaaaggcaatcacccgtcagagaagtcctgcatcaaccaaggatcagacttccagaattacggatgccgatattctccggcgatccgttagagtggccgacattttggcaatccttcgagaatgcggtccacaatcaggctcacctgcagccaatcgacaaaatgaattatttgatgggatgccttaaagggaaagcctctcgtgcagtgataggctacagaggtggccaaaattacgaaaatatggtggaaacactccgccgattgtttggcaatccgcaagttatcgtcgaagccttgcaagccgaacttttcaatcttccaaatgtagaacatagcccggactccctccagatgttctccgagaacttggaacgaatatgtcgccaattaaatgctttgggacatcccgagaattcgctcatgtgcatggcagtcaaggcaaaactgcccaagcaaattctcaccgaattgattaaaatggagcgagaagaggggttccattggcagatgtcagatctgagacgtggactagcagaagtcgtatcacttcgagaggaggtccagcgttgctctcgatcactaagaagagatgtgaatcgaggtccgacacaaaacagacaggtgttccagcgcgagcaacgaaggcaatcagcggagagagccagagcctttgtagccacacaagataaacgaggaatggagtcagcgcctcgtgggaagccaaaacttccatgtttcttctgcgacggaccgcattgggtcaacgattgcagaaaagtggtcagcgttcagcaacgaacgaaaatgctcgccgaacaaaataggtgttctctgtgcctacgcagagggcacagagctccggattgtcgggcaaataggagttgtgcgagatgcaaaggagcgcataacaaagttatttgtccgaatacaaagaaatccggccgtgaatggcagacaaagccgaaagcacaattcaagagaacccatgcagaagtcaatatgacgacaattggttcaacagaaaatggaacagtagccacgatggtttctgatccaaaaagagtgcttctgatggcgaaatacgtcacaattttctccagaagaaatcctacaaagagaattaggattttagtcttctttgacacaggttcgcaagtaaccatgatcaaaagtgctgtagtgcgagccttaagcttatataaattgaaagatggccagctagaagttagcggtttccacagcgattcaccggtcaggctggatgccccgcagtatgagctacatgtcgcattggaaaacggcaaatccgaaaaaatagtagcttatcgggcagattggatagtcaaatctatccgtcgagccgaatggaagaccggaaacgtggaaataaccgatgaagaacccgatttactcattggtatggccgaattctggcgattcttccagcggcgcgaacagataaatcggaacttattccgcatttacacttcagtgggacctatcgtatgtggaaaagatatcccacaggagatcggagaaacgagacaaatttgcgcagtcatgtcagcaaaagctgattgtgaatttgcagaaacaggcatcgacactgcaaaaaacttttgggacctacaactgataggaataaaagataacccaaaagaaaatgatgacgacacagcgatggaaatcttcgaaaagaaagccaagagactcgctgatggacgttatagttcgggatggccatggaaagagttcccgtccgatttgccatcgaattacaatatggcatataggagattggtcaacctccttgaaaaactgcgcaagactcccgagttattggacaaataccacgagtcaatctcgagagagttcaatctcggattctttgaacttggcgaaagaagggagggttttcctgaacacttcctgccacatcatggagtagtaactcataaacttcgaattgtttttgatgcttcagcacacccacggggagagaaatctttgaacgagtgtatgttcagaggacccgtgatgattcccgatctcgtgggaatccttctaagattccgtctcccaataattgcattatgggcggacttagaaaaggccttcaatgccatatctttggacaatgaagacagggaatttgtgaaattcctttgggtgaaagaccctaagaagaaattgtcgacagacaatttacagatcttccgttgggctcggattcccttcggagtaatttcttcgccatttattttggctgcagttgtccagaagcatctgaaggagaaagcttcccccttggcgttggaattcgctgggaatgcctttgtagacaatctaatgacttcatgcaaagacgctggagaagtcttaaagaagtatcgagaagggaaagcattgtttgctgaagcacaaatgaacctgagggaatttatttgcaactcaatgaaagcgatggagcaaattcccgaagaggaccggcttaataaaccagggactaaagtacctggcatcccttgggacattcaaaaggacgaattgagcattggattcccaccgacgaatgaagccgggaagatttcaaaacgcattgttttgaaaacattagcaagcatatttgacccattgggaatggtcgcaccttgccttctccaagcaaaattgttcctacaacgattgtgggacagaacccttggatgggacgaaatcttaccagctgatgaaacagcagaatggtttgctgtcatcagattatgcagcggcacttttcataaggtctcagaaaggagaagaaaccaatgtacagttactctatgcaaagagtagactcaagccccggaaagctgaagtaacaattccaagaatggaactcttggcaatgctaattggggcgaggatgctgaaatttgcggaaaatcagctgagaatcccaataaatgaaaaatttatttggggagattcaaaacccgtcttgagctggattgagtcaaaagattcccagcccagatttgtggagaatcggttgagagaaatccggaggatatcagaaaatgccagatttctgcatatcagaacgcacgaaaatccagcggatgtagcatcaagaggatgcactccagaagagctgagatcccatcatctttggtggaatggaccaacatggctccgagaaccaatgaaaagttggccgatcgacttcgaggtcaccccaacaggagccatgaatgatggacaagaaagttcagaattggacaatgtagttgcagtgccagcaacaacgagtgaagacaatccatggattgacccttgtcgatttagcagttggactaaactacgccgcactgtggtttggtttctccgtgcaataaacaagatgaggaagactcgaatattcgagatttcagagggtgttcctatgagcagtgaagattaccagtacgccgagatcttactcgtaaaaatggcacaaaaatgttggccaatgtgtaaaaagcaaccacaagaacttgtaaagacatcgaggaaagatggtcttgtccgactgtcaacacggctcgcaatgagcaatgcatcagaagatatggttaatcccattatccttcctgagaattgtccaataacccgactaattgcacagtcggtacatgagtcccttgcccattctggagttgaatccactctgacagaatttatgggaaaatattggacacccagagcgagactgacaataaagaaggtcattcgagcatgcggtcgttgtcgccggatccaatgccccgncatataaattgccgacgatgcctcctcttttctgagaccgcgtgaggcggacggcaccatttgaaagcattgggatcgattatcttggaccaac

SEQ ID NO: 58866 - DNA, 97 bp, Heterodera glycines
gtcagatgcgttcattggtccgtacgcgcaataattttgaggttgaacgcatcaaactcacttgtgagcaaccacttgcccaatcagtcgccgatgc

SEQ ID NO: 58867 - DNA, 806 bp, Heterodera glycines
atggcagaactcatcaccaaattgtgtacgacaaaactggccattttgaaatggcttcaaatggtgcgtttttcgcactccctaagttcggaaacccttccctttttgtttggtcttttgaattttcgcccattccatgccaaaatttgtccgtccctttgggggtgcttttgtcagatgaatgaatgaatgacttttcgtcccccgcagctttgtgccgtcatcaccgtcctttttctgattgacggtcagcgccagtcgtggttctacactttggtaggcaaaacaaacgcatttttggaattctttaccatgccctccctaattacctaattagcaattaattaatccctttctctccctttttctctcgtggttcaaaattctcaattgctctttcatttggtcaggtttttgtcgtttccattgtgttcggcctcatctcgttgctcactctgatcgccaactttttcctccactcgcgcaatcagtcggtccctctgcccgcctttgtccgttttccgtcctatcgcttccaaatttccaaaatcatttatttctccaggaaattggcttcaatgcgttggctgcctttgtctgtttggcatttgccgttttgctcaccatcgattcagtccgaatgttcggcgacgacttcagccaccaccgctttttggtgggcaatttggaaaaatggcaacaaaatgatttgcccaaaattaaaggatttaacaaaaaaagaaatgctttagccaccagcgaacattggcaaggacgggtggcgcaatcggactttggtggtggcg

SEQ ID NO: 58868 - DNA, 559 bp, Heterodera glycines
atgtctgctgacaacggatggtacgacgaggcggacgacacggtgacggtggaagtcgaagtgattgtggacgagccgtacctcagagagtcgcggtggcgcgccgtccccgtagatgatgccattgacgcggaaggctttgggaacggcggttttgcccagcccgttggatttggcgatggttgggcggcataagctgatcaatgcttcaaaatgccttttcttacctttgatcattcctttgtttaatcctgttattttaattaacatcaacatttcggctcttatatggcttcgcctgctactctttgctgtcctcattttgaactgcttcgactgttgccatgggtaagctttcggatttggaagcattttgcctcacttttttgcttatttctcggtcaattattttcccatttttcagcagatttcatcctaagtccagcacagttccaacgactacgacgaagtcgcctccacctccaaaaaaagaaaaagaaactggtgtcttcaaactcctcccaatgtgggccaccattgtcatcgccgttttaattgg

SEQ ID NO: 58869 - DNA, 1122 bp, Heterodera glycines
aaaacaaaaaaatcgattttttcaagtgtccgtttggggtactcaaacaattatggggagcaaaaatccaacgcagaattaaagtacaggctatagggaagctattccggaaggattcggtctccccataaatctgggcgcatcggttcggggggactgccccgaaaacaaaaaaatcgattttttcaagtgtccgtttggggtactcaaacaattatggggagcaaaaatccaacgcagaattaaagtacaggctatagggaagctattccggaaggattcggtctccccataaatctgggcgcatcggttcggggggactgccccgaaaacaaaaaaatcgattttttcaagtgtccgtttggggtactcaaacaattatggggagcaaaaatccaacgcagaattaaagtacaggctatagggaagctattcccgaaggattcggtctccccataaatctgggcgcatcggttcggggggactgccccgaaaacaaaaaaaaatcgattttttcaagtgttcgtttggggtactcaaacaattatggggagcaaaaatccaacgcagaattaaagtacaggctatagggaagctactcccgaaggattcggtctccccataaatctgggcgcatcggttcggggggactgccccgaaaacaaaaaaatcgattttttcaagtgtccgtttggggtactcaaacatttatggggagcaaaaatccaacgcagaattaaagtacaggctatagggaagctattcccgaaggattcggtctccccataaatctgggcgcatcggttcagggtactgccccgaaatccaaaaaaaaattttttttggataaaaattatttaaatgaactgactagataatatttaaaataggttatttctcttcctttcagtatccctgctaagtttggtgcgcttctgatcagtttctgaaaaaaaagttaagcctaaactttttggcctgtttaaaaaggaattaaaaattttttaaaatttattcatctccctttttgatagaaaaagcatcagagtgcctaaactaacatgtaaataaaatttggtgcgtttcagagcattttctgaaaaaaaatatttatgaattaat

SEQ ID NO: 58870 - DNA, 290 bp, Heterodera glycines
atttataagcatttgaagggttctcagcagtttccctgcaaaatttggtgagcttctgatcagtctagaacgttgggtgataaaatgaaaaaaataattaaaaaaaaataatgctggtgtggtaagtgtgaagaactgtgttcctccaggcaaaaaattctaagaaaatttataagcatttgtagggttctcagcagtttccctgcaaaatttggtgagcttctgatcagtctagaacgttgggtgataaatgaaaaaaataattttaaaaaaataatacttgtgtggta

SEQ ID NO: 58871 - DNA, 658 bp, Heterodera glycines
aaacaaaaaatcgattttttcaagtgtccgtttggggtactcaaacaattatggggagcaaaaatccaacgcagaattaaagtacaggctatagggaagctattcccgaaggattcggtctccccataaatctgggcgcatcggttcggggggactgccccgaaaacaaaaaaatcgattttttcaagtgtccgtttggggtactcaaacaattatggggagcaaaaatccaacgcagaattaaagtacaggctatagggaagctattcccgaaggattcggtctccccataaatctgggcgcatcggttcggggggactgccccgaaaacaaaaaatcgattttttcaagtgtccgtttggggtactcaaacaattatggggagcaaaaatccaacgcagaattaaagtacaggctatagggaagctattcccgaaggattcggtctccccataaatctgggcgcatcggttcggggggactgccccgaaaacaaaaaaatcgattttttcaagtgtccgtttggggtactcaaacaattatggggagcaaaaatccaaagcagaattaaagtacaggctatagggaagctattcccgaaggattcggcctccccataaatctgggcgcatcggttcggggggactgccccgaaaac

SEQ ID NO: 58872 - DNA, 717 bp, Heterodera glycines
atggcgaagaacccattgcctgagggatgcactgcacggccacttgatcaacggaacatgaccagctggacggtaaccatccgaggccgggccggcacaccgtacgcaaacggcaacttccaactgagcatggcatttccgagggactacccgttcaaagcgccgcaagtcacgttcaccacgcgcatcttccacccgaacatcgacacacggggcaaaggtgtctggacattctgcaaacgcactgggcaccgacgttgaccatcgaaaaaggtggcgtggatttggtggtggatttgatcatgttttaaatggattgatcactttaatgctcttaactttttcaggggaattaaaatccgctaagtgtgtttgattagcaaattcaaaagatttcattgcgtttcatcagagttagcgaaaaagcgagcgaatttttggaatttatggtcttaatcgggcatgaatttgatggcgttggttttgtgtggtatttgtgaagtttgagtgatcaattttttcacatacaatttttggctgcagaaatcgttaatttgtttctctgtctttacagttgtgctctccatcatcgttctgctgaatgacccgaacccggacaactcgcctgtcaatgcgcaagctgccagtttgtaccggactgaccgtgcggagttcaacagacgcgcccgtgagatgacgctcgcctatgcacgatga

SEQ ID NO: 58873 - DNA, 669 bp, Heterodera glycines
gcaaatattatttgcgacggagataagctcggatgtactaatgtccctccaagaagaattttttcaaagaaagagctttttgctcgattgttgggcctcagcggtaatctctaattttaaatggttttagcgtaaaacaaaaatttataggcgctggcgttttcgagcagtttttcctcagaaagccggcagtattaaatgtcacggacaaaatagtagcaagaaaagtggcatttaaactggtttgttgcttaggaaagaagggattgcccgcccattaatgaaagagttcaattaccaatttttttggggggggggtgaaaattttatccaactctaaatcaatttattaaggccgaaatggagtgcaccagggtggcatctgactattttaaccccatgcatgatattaaagaaaagcctgagttgaaacgaagggaagaactcattgaattagcaagaagggaagtttttcaaagaaacggctgagacaaaaggcgcggaagaaaggagccaagaggaagaaggtgaactgaacggaatggaaggggcaaaaaggaaacgaaaattaagggaggaggtgactcatcgtccaattcatcggaaggagaggaggaggaggcgaacgaagaagaagagaagggacaaagtcgggagggagacgaatga

SEQ ID NO: 58874 - DNA, 756 bp, Heterodera glycines
atgccaaatttgctccaagttctgttcggaccggttgtttaccgcccatatcaacccaacctattggaatcgggcggtaacaagctgttcagcatcggtgctggtgcctacaacacttgtgttgtgctgtcgcccattctcgtgccgtacattgccttttcttggacccactcccatcacttttcttttgtcggtttgcatgtttccaattcagtcctctcacttttgtccctttttcagttgcgcttcgttttggtgttttatgccattgccttttccttccgaacgattggtcggctgacaaagtgagccaaccaaaattctcactgattgctcattttcgttgactgttcctcacttttgtccgtatttcagtgttgactacgtccgttttatcaaattgctcggaaccgtgcgcaaatctccgcagaatgtcactttgctcgacacactcaaagactacgattttcaagtgaatgtcccaccgttgctcttttctcatccctttccttattttcggtgtacgctgcgcccgctgattttaaagcatcgccaggccgaacggccaaatggcaccctccgcgtgaacgccttccggacttgaatcctccgctgaattttctgcgtcaggctatcgcgtggacggccgctaacacttttggacgtcgaatgcttttccctggttcgatggcacttttcaattcaatgttgaacagccaactggtcgatggacggcgcaaattgttgacagaaatg

SEQ ID NO: 58875 - DNA, 1617 bp, Heterodera glycines
tcttctgtcttcaagcctcctatttctttacttttagggttggaaacggaaagtcattgagacggaggatgggggcaaggtcgattcggtgttcatcgacaaacgcgggaagggcaagcatggcaacattttgatgtgagtctttgtatgtttttgcattttcttagcgtcgcgtttttcagcatttgctgtgaagggaatgctgggtattacgagatgggcatcatggtaagcgggcagcacgtctttccccccccccccccacggtcgtttgttgcatcgtttagctcaaattaacttttctatttcgtcatagcatatgcttccgtttacatatttttgcagtgataacaaacagacaaaacttttccgtatttttgcacatgtttatcgtttggtgaataaccttttgatgtcctccctttagtaaaatttttgtggaatgacggattggggggggggggggagaaacgtgcccttggaaagaaattcctcgcttaaatcctagtaaaccttcacttttcattcagtcaacacctgtgaacttaggctattctgcgttgggttggaatttgcctggtacgttttcccgccattttgtccgattcttttacccgtccgttcgtaggctttgccgaaagtaccggcactccattgcctcatacaattctcaattccatggaggcggtcatgcagttcgctgtaaagaatcttggcttccaaccgcaacagattgtgttgttcggctggtccatcggcggtaataatttgaaggccttttacccgagactttaaaaagcattccctcgtccaccgcttaaggatttgctgccacgtgggcagctgccaattatccacagatcaaagcgctgattctcgacgccagttttgacgacgtggtacctttggccagtgcccgcatgccagcggtgttagaagggttggtccgcttcgctgtgcggacccacttggatctgccggtcgccaaacaggtggtccaatgcttctgtcggttgcttttcctgaattacaactcacaaccagttacaacgctacgaaggtccggtgctgctcattcgacgttggaacgatgaaatcatcgccacggataccctcgctaaagacgatgccaccagacgcgcttcaaatcgaatcaatcatttgttggtcagtcttttgcgcagccgccacccgggccttctgaagacgaaggcggacgaaaagtgtgtgttcgaatggtaaaagttatgctcatgaacgcttcaattccatattttcttattgggtttaaaggctttcccacgaaccgcaagaacgtctttttgtctatccgccggaggattcgctggaaccgcaaactttgaacgacagtgaaatgaaaagtgaacaaagccgacacaggtgagttaaaatgggccattgggtatgaaatggggggacgattccgccgattggaacattgggcaactcatcaacacaaatttcattttgtttctttattaattaaaactttaaaggtttatccgacaactttgcaccaaatatttcttcgactttatgggcgccactcacaatgttgcgcttgacccgcagcactttaaaattccgacggctctc

SEQ ID NO: 58876 - DNA, 85 bp, Heterodera glycines
aacccatgggtgctctatgcacccaccaaatttcattccgaaactccacggacacctccagaccttcctttgttagtatcatcga

SEQ ID NO: 58877 - DNA, 892 bp, Heterodera glycines
atggccaaccgcggaccggtggctgccgcctttacgcccgcccaaatgatgcaggtgggagaagaagctgccttccagcattttcgttcttatcaatcaatgccatggcatttttgatagcactagctgatcatttgctcgtagaacatttatcccactgatcactgaccagggctcatttccttgacatttataaaatgcttaatattatattaacaaaactacaattcttaaattgatcaatcaattaattgggttgatcagtagctctgaacattgcttttcaaaatgttgatcagtgatttgtatcagggatgttacgaaatttttttcctgttcttagtactgagtcgacaatttatctgtaagtcaacaaattcccaaggaaaaaatctgaaaaaatactaaaaatttcctttcttacaataatgaactgagataaaaacaaaatgccgattttcgattgctgacatggccctcaaatggaataattagtaaaaaaacaaagtcgaaatgatgtatgtatgctattgctcgtcggtgttcaatcccaatttagttatttagccaaaaagcgctgaaaattaataaattttgatttttttataccgatcaattaattaattaatcgagttgatcactgctgatattgctttacaaaacatcgatcagttgtgatttatttattcattaaataaccaattggttccttgaataatcgtttcttgagtaatcagcagctgattagcttatgtgtaactctattatttctctttttcagggtgcccatttcggctcgcccttttaccattcgtccgccgctgctcagaattcgtccgccaataacactccgccccaatcgcaacgtgtgccaaccatcgcagtacagcag

SEQ ID NO: 58878 - DNA, 731 bp, Heterodera glycines
atgcaagagactcacattgtcctgggcattggcacggtgtgctctctgttggcgatcatcgccaccgtcgtcactttgccatcgctgtactcggagatgaacgaaatgagcaccaaagtgcacgctggagttgaggtaacaacaattaaaatttaaaaatatatgctttgccaggctttccgcgtcaacaccgactcggcctggactgatctgatggacgtgcaagtggccgtgtcaccgccgtcgaagccccgtgccaaccccttcagctccatcttccgtgccaagcgtcaactgcccggccattgccaatgcggtccgctgcaacagccaagctgccccccgggcccacctggtccggccggagcgccaggtcaacccggtcagcccggaggcgcaggacagcccggacagccgggagcacctggacaacctggtaggattgaatgattgattggtaattgcttcacactcctacattgattgcagctgctccatgcgcgccccagcacatcccatgcccgcgctgcccggctggcccgcctggccgtcccggaggacagggaccgcccggacaacaaggagcccccggccaacctggttcacccgctccaggcggaggacagggaccgcctggcgcgcccggaccccaaggaccttctggacagcccggacgttctggagcaccaggccaacccggacagcctggagcaaatggagttgtctcgtaa

SEQ ID NO: 58879 - DNA, 451 bp, Heterodera glycines
atgaaggattggtacatgaatcccgtgggatttaagtttttggatcagggacgatccgctgatatgaaggggaggtataatcatacggtcacgcttggtcaaatcactccgtggtatggaactcggactcaacaccgcgaaatatatccaaatctaaacttcagtcgtttggacgcgaaacattaaatttataattattaaactaatttttaaactttcaaattttggcaaattttatcagtctcatatttcgaaaatcagtaaccaatttaattcaaattaaatttaatcagaatttcagaaacatggtcaaaaaaaaagaaggttaaaaaagaggtggatttgttttggtagctcaatggtagagctgccgtgggttggttggaggaatgagttcgttccaatcaggggcacggcattttccatttctaattttaaataattaaataaa

SEQ ID NO: 58880 - DNA, 930 bp, Heterodera glycines
atgaaaacagaaaaccggaagcacaaggttaacgaaaatacaacggaaccgggaccgttttacaaaccagaatcatgtgaactttccgtaaatacaaaccgctacatataaacttcggaaaatataacccgccaaggaatgtaaaccaaaaagcatatgactttccggaaaacaaaaacctctacgaatttataataaactagaaataaataatttaccgaaaaacccattaatggaatataaaatttttttgagaaaattttcttcatatattcaactatttttaattattattcccattttgtagccatatttagtgtttatatatatatccgatcaaattcagaatttatattcatcgaatttctgaagataattttttttaaaaaatttcaagccatagataataatgaaaaaagaaaaaatttttttgaaattatgcaacaatttttagaaaaaaataaaaattcatccaattaaaatttcaagttcagccaagcagtccatcatccaactgctcaatttttgttttgacaaatttgttcaacacttcccatgccacaatcactgatttgttatcatcatcattatcattttcatcggtcgcgtggttcacgcccaatttaaaaaattccgccaaatttttgaagaacaatttgtacattttggcatccgaaagcaatttgagttcatctggttggcgttgtgccacaacaaaattaatcaacgcattaattcgtgggacaattggtaatctgtgattttaaaaaatggaattaaaaaggtaggaaaaatggaaaaaacggtacaaaaagtaagaaaaagtcttaaataattgataaaacaggttaggctaattaaaacttttagagaaaaaaattaattgttaaaactttgataaaaaacagtaaaagtaagaaaatgggaaaa

SEQ ID NO: 58881 - DNA, 704 bp, Heterodera glycines
atggcgtttactgtaattttagcatgtttgttccctcttcccgttaaggggggaacagaaacaaatgcttatccaaccaatcaatgcaatgagtgcaaacttctttgctttaacaaaggcgttaaagcaaagattccaaaagaaatcaataaagttgagctctgctgtgcagagaactgttacattcatgagaatgtaaagcagctcacttacgagctaccaaaggaaatcctcctaaatgacttccaatgtgaaggtcatttttggatggattcgaaacacatgttcaaaaaggacattttatgtccagcagttgatgagtgcgaactcatcgaatgctatttttgcattgaacagttagcgaatccaacctgttacccattgatttcatcaatgttagcagggggactttgcttatcactcactcataagcattagctttatggctttttccatattaaaagtcctgttttcaggattttatatggtcatttggctgataattcaatttatcaggccaataatttacttagctggcccaaatcggcttccgaaagagaggaggccaagggcaacagcttctcaaaattggacatcacgccgtgtttacagaacaatggcgtttgttgtccttatggctaactctctccagaatttgactggagcagagaccatagcagtcatggccaaatcggaaaaatgca

SEQ ID NO: 58882 - DNA, 1096 bp, Heterodera glycines
gtataaaagggtggcggatttgccacccaaccacactcttcaaatcatccttccacggaatgcctattcccatacgagaagggccttatttctcggctcgccgggtggtcatacccgaaaattccgaggtcttcaatgatcgcctttacggacttggcgatccacgatctgaagaggaggagagagttcctcgctggcaggaacctcctattcctcgccaaattgagtcattgagctcatggattgagcggtcttatggaccgcattggtatgaaacagcacgggagcgccgtgctgtcgaagcccgccttcgcggagaacttcgcgaaggggccaatctcttaggagaacattttggcagaattgccgagatccattttgatggattcacctgttatggtccggagggtctcttcatctctccgggcataacacttttcgatcattttgtacggttgggtcttcaagtagacccagtaaaaccgtgcatacaagaatatatagggtttagccctcgcgagcaagggatgctgcttgtcgacatttatccgatcgaactggtcaacatccgaaccagaatcggagttgcttggagagcgccagcagttttggaggaacctcgccctcctccacgtgaccaagcacagctaccagatggacgtttggagaatcgtcctcctagggtggctcgtcgacttccaaaccgacgatgaaaagaattttggcaacgggacggcaacagttgccgccatcctcgaggcccggagaatgtcgccaaaagcgacacaaatttcttggaaattttcatttattttttgatacttttcgtcgatcaattttcccattcgctcgctccttttttatgactcagctctttttctcttcatttttcactatgagtcaccatttttaatggatttttgtccatctgtttgtgcacatttttcacgtgcctggccccgcccccatcgattgtgagggtataaaagcccggcccattctccattttcttcactgatcactttttgattaagtcagtcgggacagttttctgtccaagcatttgcattaaattgtaattgtgcaattgaattga

SEQ ID NO: 58883 - DNA, 566 bp, Heterodera glycines
gtaacacccagatatgttcaacggcaaaattgtgcaaaggctttggtgaagttccaaagccatttggagaccttcgatttgaaggtttaattggacaggactaaatcctgtcaaggcaattacctttctcccagtatttctgagttggtaatttttgatgtttaatggaagtctcctctctggactttccattaacttttcaaggttatgtgaacggcaattgcagttcactaaacctgatgaatggtcaggtatgcaatcagtgcatgcctgaactccaagactgcaattgaaatcaattgcttcttgccgacttttacagttaaagtcaattgttaatggctctctggttagagccatgttgctcccgtcataaacaaaatctgagtttaagacgggggcgggcggaaaggttactccgatcggagtaaggctgatgttgttccatctcagggttcttcctggataaagaaacacctgagttgacttgggtttttcgccctaaagtttcctaggcgtaattattgtatagacaataaattccctaggaattacagccccatgat

SEQ ID NO: 58884 - DNA, 1059 bp, Heterodera glycines
ctcttgggtcgtcccattgcctattttgtgtgcgaatcgaatggaaacgcggagaattttcaaatttcactgcttaaacatttcctacttcaaattgagccgccccttccgaaggaggaggagaatgtttactttgttgaggtgcaatgccacggcttcaaaccgcacacattcaaaacaatcaccagggccaagacggacgtggtgctgcaccaactcagctgcaaaacctacgacatttcggtgcgcaaagtgccgttggaatggatccggcgactgaaataccatggggtaagcagaaggccgttagggaagcgacgtggggcgatcagagaacggaatttctaaaaattcctggaccaggatcctgggaaaaccctgccaagacccggcactgttcagattaatgggtaaataaggcaaatttttcagtttttgctccatttgttatgaaatttaaatgaaattttttggggaaagattttggttatgaaaatgtttcttcagcgaattacctattttaatatacatttaaaaaagagcaatttttcgtgtattaattgtagttattgtatttcctcaattatatgccccccctcgattatatttttattggttgtgctccaaacactgggtcattaatttcattgaaaatcctttaaatcttttggaattttccttggaaagcattttagttataaaagtatttcttgaacgaattacgtattttaatttttatttaatatttcatgtattaattgtacatgcgaatattaatatgctttacaaattaagtataacggaatgatccattcaacaaaaccgtttcatcaattggatattaatattacgatgggcgcgacttatgtgttggaatttccggcaagatttcagcggccgaaacaagtcaattatagggtaaaaaaaaattttactttttggcactttctcattagtgacgaggcgagggaccggcacggagttacccccccccccccgcttttccccgggaattttttttaaattaggagaaaggtgaaaaaatgcaataattaaaaa

SEQ ID NO: 58885 - DNA, 527 bp, Heterodera glycines
atgcatttgcgaccaaaacgggtcgcacttcaaattggatttgcttccacttttaagcaatggtcggattcgcttactgtacacaaacaaattgcccgtgacgagtttgtcgtcctccgttgtgatttcacatcggtatttgccaatgacggaaatgggcacgaggccaaagtcgagaaaagcgcgattcccttcgggactgagtctgaaagggagaggcgaggatgggtgatcaccactgatcggttggggatgagaagacggacctggcctggtggtgtcggagcggcggagggtgcaattggacttaatggaagcattacaaactttgaaaagcaaccgattaattgttaaagagttcagttttgatgcttactgaatcgggcacttttgatcggaagctgatcacttccgtcggaagtggcctgactccaaagagcgctcaaatttgctatctgtgcgctgttttccgagctccttccggatttggcatcgaataccaatgccaaattgccctgagcaaaagg

SEQ ID NO: 58886 - DNA, 987 bp, Heterodera glycines
atgagtttcgatgtgatcgcccgtgtggcgttggggcagcgcgagtcgcgacagtttgagactgaaatggcacacctggcgattgagtcgatgcaaaaatacaataacactccgttcgattacgtcggcttcgctttcccgtggttcggcattcattttttggaaccgttcatcagttggagcggaatattgcgcaaagacccgctaattatactgaggaagcagctaatggacgaattaaaggcacgcaaaaagctgagggaaagcggagaacaacagcagcagcagagagcgaaagtcgacttcattgacctgtttttggagacggaacagaacgaacagcagcagctgacggagcaatgccaaaacgagggcgaagcaatgctaagcaaaacggcacttcaggtggggagagagaggaagggggaaggggttggcgctagtagtcaagttcgagagtcttggtctcgaaccttctcgactcgagcaaaatacttttcgggatgagcgtttcaattctaaattcgatacagaaaagttcggctctattgcactttatgagtccaatcgaccaaacaacaattaattaattaatcaaatctttttggcaattgcctaaacgctgagattttatatatttttgcttctttcctttgtgctttcgaatgataccaaaaacatagggtttgttcgaacatcaacaaagttattgtataaaaagaaggtattaatgccaaaacgagggtgaagcaatgccaagtaaaacggcacttcagcaggtgggaaaagagaggaagggggaaggggttggtggcggtagtgaagtcgagagtcttggtctcgaaccttctcgactcgagcaaaatactggggcttccaaggatccgggtttcaactctctaatttgatacagaaaaatataaatgaatgatttagtctttaatatgtataatgttctagatggaaattcacgagaaaaagacttga

SEQ ID NO: 58887 - DNA, 1010 bp, Heterodera glycines
atgcttgagttgcgtgtcgtcatatcggtaataagcaatgtgcaaattctggtttttgtggttcatcttgcgcatggagtgacgctgccaatgcttgttgttgcgtggggcgaactgtaaacaaccaaccaaccattaaacaaaaatattttgaaaattatattattaattaaacattattatttattaatagggttgtaaattatatggactaaaaacgctaaatttggacataaaatatggactataaaaaagcccaaaatatggactaaaaatctcaaaaatggccaaatatggaccaaaatatgggctaaaaacttctaaaatttacattttaaaacctcatccaaaaatgtgtatatttcaatatttgctttaaaaaataccctataaactaccaaaactcagaaaatgcccaattttggaatgcattttttaaaaatttcgaaaaaagtctatccttagggctttatttttcacttttttgcatttttcttgtaaaaattttccagaatggccgaaatatggacgaaaaacgcaaaaatggcgaaatatggatttttcccaaaacccccaaaatatggatttattatgtactaaaaacctgcattaaatcaaaaattttaacgtagaaagaaaatttttgaggccctttctttatagcatatgcgcagaaaaatatgttaatccatacaatttactaccatatttatttatataaattatttaatttcaataattttgttaaagagcgattatcaatcctactaattacatctaattaattagatcttttaaaaaatttttagccaactgcatgagaagcaggacacgtacaaacgggacgaatgaagcgatttcaatcgtactaagacaaaccgaaaaaaactcattgtggccgacccggaataacccaatgtaaattccgcttgttaggccttaagcaagccgtataaccatgatttattcaattctctaatttttctggttcacgcataacattgaagtaa

SEQ ID NO: 58888 - DNA, 739 bp, Heterodera glycines
atgtacctattccctattggaccgacagtattctgttcaatgtacaataattattttaattatttcttcccattctttttagaatttttatccgttttggaaaatgaggaagatatgcccgagctcacaacaacctttattgaaaatgagctgaaaaatgcaattaccaaattcttgaaacaaatgatcggaattgaacaattggaaacgatggaaaaagaaattccaaaagcatttcgtgtaattttccaaaaaaataattttttttactgtacaaaatattttgggggtttggcacataaaaattattttagaaaattttttttaataaataaacaatatttaaaattaagcattctgaaaaaaatgggctgttttaaacaacttttttcttccaattttttagcacatattaggcacttttaaggtttaaaccatattttgggatcttttaataaataaatcaaatcggggccctgctgtttgatattcacaattttcagattcgccgcgaagatacatcattaatcaagaagcctgaaaatatggcatcatcagctgagaatgtttgaaaacaatagatgtttatatgtgctgaagaatttttgggatttcaaatatattctcatttctttgtctttttaaagtctttccattttgatttggtggattttaatatctcatatttatccggagagactaaacgagaagtagcctaggcgacaaccaaaaaaataaa

SEQ ID NO: 58889 - DNA, 280 bp, Heterodera glycines
atgaccaaggacaattattgcgcttttgcggatctgctgctgttgcaccaatctgagtcaactttccgtcgatggattggacaaagttcgcccgcttcacaccgaaatttgtcgctgagaattgagcttaagtgggaaaattgggggaggataaaacggagacttgaaaaagcagcggagggaatgagacacataagaaggagaaaagaaaggggcgaaggacatggaaaagtcagcaaaaacgggacgaaatatttgaggcaaaaatgggttgggggga

SEQ ID NO: 58890 - DNA, 66 bp, Heterodera glycines
cataaacatttatttgatttattttaccatattcacaatttgatcaaaatataggtgatcaaaagt

SEQ ID NO: 58891 - DNA, 4403 bp, Heterodera glycines; identical to SEQ ID NO: 5680
  unsure (1)..(4403): unsure at all n locations

SEQ ID NO: 58892 - DNA, 1142 bp, Heterodera glycines
atgagcagcgactcagaaatgctggaattcttcaaaaaattttgggccaaatgcgaaaatgaggaagagagtaaagctgagacttcaacaatcgggaaaattgtcgccattattgttgaaatttttggccaaacaaccccttcgatgttggacagcggggcccaagtttcgcttattaaggccgaatttctaagggaaattttaaagcgcctaggcctaaagggtaaaagtattaacatttgccccaaatcacggaatgtggtggacgtaaatggaaaactcgtcgaatgttatggaactgtctcacttcctgtcctcagaaaaggttgcgaagaaatggaaatcgatttccatatcacgtatgcccctattggcctacccattttattcggaaccaatgctttagggcctcttggtttcaaacttttcggtgccccaaatggtgaattgattgaatttgaatgttcaaacaataaatcggattcggttcgtgtcgtttacaacacagtggttgaaccgttttcaaccaagtttgttgaactttctgttccacccatttttaatgatacaaatgtgctcatcattgcaaatgacgaagacaacagcgtaagagtcgaacctgcactgagtacgggcagaaacgcaaaaattatggcagcaatcacaaatttttcggaaaaagcggtaattttgaaggaaaactaagaaattgcagtggcagaagagccaagtaaaattgccgacgcggagaactgtttggaagagtcctggtcaacacgagataaattgagaatttccaaatttaaagcagcacgagctttttacaaaaaaaattcaatttggcgaagcacaacacgagtgcttttggcgagaagaaagttgtaagctcggacaaaaatccgaatggagtcaacccaacacgagggttgtcaaaaattttttgtttggatttttcacaacaaattttacgaccgatgtttcccttcaattgaaaatgccataaagccagacctttgtcgtccaggagcgccatgttggaaagtcaaaccaattcttcttcttttggtattaattttaacacaatgcgagaagaccaaattggaaaatgtctgagaatcggagaatacctgctttagaataaa

SEQ ID NO: 58893 - DNA, 1168 bp, Heterodera glycines
atgactaagatttttgcaaggaacattttgcaaataaaaattaaagatcagaatttaaaaaattattcaaggcttattaaggcacatttcaagtcatatgaactgactaaattatgtcgacatttgaacaagcaatgcttatggcacaagaaatgtgttcaaataaacaagatgagaaataaattaaagaatatggaacaaagattacgaatatttatgtataaaagcaaagataaaataaaatttaaacacattaaaaacaaaataattttaaaattaattttaaattcaatatttttaattaagcctttcaaaatgatcgaaccacgaaccagtctgatcaaatttgccgccgagttgttaacatcaagaccgaatttgtgcagtgcattgtactgacccgtgccgaaaaacgcgagaaattgatcatggaactgaggaaggctgacttcaatggtgtaaagatttggagcaaaatggacacaaaaccaaaagtaaatttgaaccaaaattggtgggaatttgttttagacatgccctttgacaccgaatttggaggcaccaattcggtggtcgaattaaacaaacaaataaatgatgactttcgaccaaatttgtcaaaattcggaccaggtttagtcgtaaaccgaaaattttacccgatttcgggaataatgctcgaaggagtactcgatatttacgataaatatcgagaattttggtggaacattgaaaaggaaaacaccaaattcaaaattctaaaaattgccaaaaggatgaaacaaaaataataaaagcaaatgaagaaaaagaaaaaaccatcgaatttttcatggaaactgatggtgattcaattgaatttgaaaccgaatcagaattttttcaggaagagcaagagaaaaattcggccaagagggctgacgggcgtctaaaactgacggtaaaagcaaatgccaatcaaaaccgtgttttggcaattaagggcgttgtcaaattttcggcattcattgccatttttttgttatgccaaaatttggtttgtggaatggaagaacaaaagaaaatgttaaatgaaagcattttggatgagagtgatgacgacgtttgtgtaaagtcaacgaaaaggcgaaaaagtgagcaacgccaaaaggcgaaaaatcgtttatga

SEQ ID NO: 58894 - DNA, 941 bp, Heterodera glycines
atgcaagatcctatgttaagagaatgcaaaaaatttaaagaatatttgcttgttttatatgaatttttgttcaggaaataccttgaaggtaagtaagaaatttttcttaaatgccaaaaaatccaaaatttcgctatttttttcatacataatttgtgtattttttataaattataattttgatatttttgagatttatagaaatttcttatgagatttaaaaaaaatttttcaaaaaatataattttttatttacatattttggtacatattgggagatttacgtatatattcctatttttttacatttttacttaatattttatggtttttcttaattataaaatttacatccctaattattagttaattgtccatcgttccaattcgccaccacagtacaaccaatttttgtacttggaaacagcaaaacaaatgcgacaataattgacgttttggacagtcttggcattatttgggcattcttttttgattatgcgtatggccaaaaatatgagaattacttggaaaagttattcaaagaaaaggcagcagcagaaccaaaatggttgaacgaagaaacaattgggcataaaattgtgaacaatttacaacaaattaccaaatatggcgcagattttaagcaaatctttgggagagaaaaaccagataaaattgacgatgagcttaagcaaagtttattaattgatgatgctacaaatcagcattcttcaaaggcaaattcagacaaagcaattcagtcattccgtgaagcatttgatggcataatcaaatcgatggcggaaacggcaaaaaccatggaggaatcggaggaaggatttggcaaaactaaaaaaatttgcgttatctattcctttgagatcatttcgagaattatttctttctctatgctttccaatcgtgagtggaaaacctgctga

SEQ ID NO: 58895 - DNA, 1698 bp, Heterodera glycines
gttataaaacgtgttcgccatgacgaagatgtaccacctgctgcaccactcagtttggaagcattggaattgccgcccgcgtacagaatgtacaatcgaacagagattgacgaggagaatttcttattggcggacaccggcgtttttcaaattcagggacaggctggaccgcaaaggtaaaaataataaacccattaatttttaaaaaattccatgttaagaattttgatatttgctcgcgcttcgacttcggaatgggccggtattatgaaaaatgtatacgcagatggcactttcagtttggcgccgcctttgttcagtcaaatttatgttctccttgcaaagtaaaaccttaattttttaccacttttttttggtctttttaggcgtgataaatggggttttccgattgcgtactgccttctcacttcaaaatgtgaagtgatatacacacggatgcttcaactgattgtccaaagatggccaaattttgcacctgacaccatatcgttggacttcgagcaagcgatggtcgctactgtccgcacagtctttccactttgtcgtgtgcaattctgcttttttcacttggtgagaagtatgaagaagcgaattgcttcagagggtttaacacaggtattgcattgttacaattttccccaataaaatttttcatattaagacgtacaacaacgacgccgtatttgctgaaaagagcaaaatgatcacatctatggcttttcttcctgtccaccatcttcctgctgtcctcaatgctttggaggcacaactccctcaacagcttattggcgtcttcgattggtgaatttttaggaatggaaaatcaacaatattttttaaaggttcacggacaattacaccggaaggccgcggttcaatggtggtttgacagcgcctcggttcgcaccggatgaatggagtgtgcatcaacggacgttggatggaggagacagaaccaacaattacgcagaagcataccatagaaaacttcaacgggcatttgattgtacacatccaactgtcttccgcttcatcaacacaattcgatgtgagcaaaaatcaattgatgcagacatcgcccgatgcatcgctggtgaactccctcctcaaaaggcgcccaaatatcgtgccgccgatgcgagaattcttcgactcttgcagagctacaatgccatcaacaataaccaggctcaccaaaatgatcacaattaccatgcccttatcaatgttaacccctataacatcatcaattttctccttggtatttctcggaattatgagatgcgcccgtaatattttcaatgttttgttatttttttgttgttaacacattgataaatctgttatggtgttaattttaaagaattttcgagaaacaaatcagaattggatcaatgtaggacaaaaacagcttgccagactaaaacgaccctctgactaaaccggccagactaaaccgaccctctgactaaaccggccagactaaaacggccagactaaaccgacccccaccgtcgtttaaataattttaaatataaaacaatcgcttcaatatatttttctttttaaaaattttatccaaaattgccacggattcaaaaattccgcggatcgcgcatcgcggattcaataagggagagtcaatgacaatggggaaagaaacgagagtaaaataaa

SEQ ID NO: 58896 - DNA, 796 bp, Heterodera glycines
atggcacgtcacatttggcccctgctgaagaacggactcatcattctggtcaacatgaagcggacgcacctcgccaggatgcacaaatacgtgtcgccgatcgtcctgttcgattgcccagaacttgtccaaatcagcagcactgttttgcccgagagtccgaccacttacagcacgtcgcctgacttctcaacccgttgcctgtacaattggctgtacacgccgcgcccagatggtcgtccgctggtgttcaaattgaccaaatgggaagcgggatgggagaacttcgtcaacgatttgttcgcggtgggtgtggggtgggtgatgatcgacggatggattttttcgttctgatcaaattttccgcttttagtccttcagtcgtgcgatcgtcccggtcaagtacatggtgctcgcttcgttcgacgtcaactacacccggagtgaacaaatggttaacactctgacggaggaaaagctgacgctgtcgagcgatgtgcatccaacgccggatggtggttttgtgtcatctgtgaagattctacgttgtccagcggagttcacggaagcgaacgtgatgtcctggttgcgtctgccgcgtgtggccggcgaatggcacccgaatttggtgaccattggcttctcagatgacgaaattgggtatggacgagttgaacaaatttaagattcagtgttcttatttccttcattttcagaccgatgccttcgaacagaggaaccgatcgggctgagaactgagaaggataactgcggatcaacaacagatgagccctaa

SEQ ID NO: 58897 - DNA, 1238 bp, Heterodera glycines
atgctggtccagggttcgaaaaatggccaggtgcaaatgccatcctgggaaaacaacatctcaaaatcgcaaattataaaatggtggttattcgtaaaaaaatcacttaaaattaatatcagaaatttaattttaaaaacaattgaatttttctttataaatgttgagcgtttcaaccgcacaagacctttccaaacaatttcattgtttattgctttaaaataaaaaaagaaatttctattttagcaaaaatgggtacgttccaaaattaaaaattttaagattgcttaattgctgatacatttttcaaatgtcaacgaataacgaggtaaaaggtgaaatatttaattttaaggacaattcaggggaaagggtcatttcggcgccaacccaaaaataaaaacacacaataaagggttttaaaggacggtgaatcagattatgacacccatttcgaaccccgaacccggactcgtacgaaaactcgaaaattcaattttcaaaaaatccacatttatgcaacaaaaacggttagacctagttcgacccaaaaactcaaaaatttaactattcgaccttttgttcgaatccaggttcgggattagaaattggtcgaaatgaatgctatatccgtgatcagtgacctcgaaaacccctgcatacttgttttcaggacttttaaaccaaaaaaaaaagtttgaaaaaaatttgacaaaaaatatggacccaaataggcatagtacccaattttcgttaaaaaaaatttctagctggtttgattttttaaaattttggcttagcgccgaaacgtgggcgccgaatcgtgggcgccagaacgaccccgaccaaattcggcagaggaaaaaaattattggaaaaattaattaaaatataatatttttttatttaaattttccagctcattatactttgggattaagaattattttcaattaaattcagctgtacgatctttacaaagatgctggattggtgccaatcgaaattgtcaccaatggcattattgctgtcatctgtttttccggcatcactctcaacatgttgcttgtctatgtcaccgtcaaatcaaagtgaaatgccctcagatttttgatgccataacttaacaaaattaattgaaaaatgcaaatatagaaattaaaaaatatatatatatgatcttaaggacgaaaaaatttgaaaaacacaatttttggggaattttctttataatatta

SEQ ID NO: 58898 - DNA, 527 bp, Heterodera glycines
atgccaatggaagttgacgacgtggaagaggaaaactttgtcagattgagagaaacgaatcaaatcaaaatggacactttaaacaaagaaattgccgaaacagtttcacaggaaaatataaccaaattaggtaaaatcacaaattacacagattaaaaaacaaataaaataaattaattccagaaaaagtcatttggcaaatttttgctctcacttttcaaattgtcggcattgaactcaatcccactgatcaaataacgcgaattcttcaacaaacattgaatttcgatcagttggcattggcactttgcaattccaattccgaattggttctcaatagcattaagactcatttggtcaacaatgagcatttgaaaaagaaagcaatatttgctaacatttttagccgaataaatagtcaggcaaaagacatttttggacaaccactcgggtagtgcttaatattttaattaatttacacaccaattctgtcgtatggggagcattttaggaattaaaataagaaa

SEQ ID NO: 58899 - DNA, 1457 bp, Heterodera glycines
atgtcgaaaaaaatgaaaattgcaccttataaaaatattcgttgcgaacaaactggcaatggagcgaacgaagaactcgaaaattttatggacacaatttcggatatcgttgttggtgagaacatcacaatcgattcggtaagtcaactaccagtttttgtgaaagtgcaattcgattttttggcaaaatcaacaagggaaaattctacagtaatattaaaatattatttaaaaattggccttcaaaaaaggcgaattcttcaattttagcaaaattttatagaaaattagattttgggatggaaaaaatataatttgttaatagattgtcactaaaaatagttaaaaatttttgtgatttttaagtcaggcggtgatttttaattatttaaaaaatcatcttttgcgaaacattttttcacaaatctttatgaacagtgttgtgccgcagcgagaaaaactttaattctttacattaaactccatttttaggcaaataccaacggagaacaccaggaaagtgaaatggaccatgcctggaggccaaaccaaaacatcgttctgcacgacgaattccaaaatgctttggcattaaacatggacgtggaaaacaataaccttgaggaagaaaattcggaaaggtaacctcagttaaattaaaatatctggcgaatgattttttatttgggtctggattcaaaaatttttcaaatccaaaaattagattttgtggtcaaaaatttaacattttttgcgattttttctttgatcaaaaaacgatcaattgttattttttcacatgcaaaagtaatagtaattcttatttacacgccgccattttttacttaaaaatgatattaatcaccaattttagcatgggtgatcatcactcattcgccaattctgtccaaaatggtcagcaaggtgcatttcgattgccaccaattgaaatatttgttgacggatcacttccggaaaaaacggtaaagatgcgcgaaaacatttcaagtcttgtggcttaagtttttgcttttcggatgaaaataagggttattttaatcaaagtgccgtttttaagccgcgcattggcagcattcaaggcatcaataatccggccattcgcagtttggatcattgtgggggcgtcaagcgcatttccggcctgatctacgaagagaattgcacagtgccaattgtcagggagaatgagccgacatttaatgaagaaatagggccacaagatggcaatgtgtccgagttatccgtatgtgcgacggacaaaagcagccacgggagggcacctcggttagaactgattggttctgacgtttaaaattatccttgtgttaaagggcacgttcaaacagtaatgtcagtgtgccgttaaacaaaagtcagcgaaaaagggccaatcgatctgaccggaagaaatccggaggccgggtgaatcaaataaa

SEQ ID NO: 58900 - DNA, 1068 bp, Heterodera glycines
ttattcatctccctttttgatagaaaaagcatcagagtgctaaaattaagttgtaaataaaatttggtgcgctttagagcactttctgaaaaaaatatttatgaaacaaaaaaatcgattttttcaagtgtccgtttggggtactcaaacaattatggggagcaaaaatccaacgcagaattaaagtacaggctatagggaagctattcccgaaggattcggtctccccataaatctgggcgcatcggttcggggggactgccccgaaaacaaaaataaatcgattttttcaagtgtccgtttggggtactcaaacaattatggggagcaaaaatccaacgcagaattaaagtacaggctatagggaagctattcccgaaggattcggtctccccataaatctgggcgcatcggttcggggggactgccccgaaaacaaaaataaatcgattttttcaagtgtccgtttggggtactcaaacaattatggggagcaaaaatccaacgcagaattaaagtacaggctatagggaagctattccggaaggattcggtctccccataaatctgggcgcatcggttcggggggactgccccgaaaacaaaaaaatcgattttttcaagtgtccgtttggggtactcaaacaattatggggagcaaaaatccaacgcagaattaaagtacaggctatagtgaagctattccggaaggattcggtctccccataaatctgggcgcatcggttcagggggactgccccgaaaacccaaaaaaaaattttttggataaaaattatttaaatgaactgactagataatatttaaaataggttatttctcttcctttcagtatccctgcaaagtttggtgcgcttctgatcagtttctgaaaaaaaagttaagcctaaactttttggcctgtttaaaaaggaattaaaaatttttaaaatttattcatctccctttttgatagaaaaagcatcagagtgcctaaactagcatgtaaataaaatttggtgcgtttcagagcattttctgaaaaaaatatttatgaataattttgcaaaa

SEQ ID NO: 58901 - DNA, 288 bp, Heterodera glycines
atgaaggaaaatacacgacaaatgaaggaaaacgccaaaaaattgaaattggaggaaaagggtgaaagattggaggaaaatgccaagaaattggaggaagacggtgaaagattagtggaaaatgccaacaaaatagaggaaaacggtgaaagattggtggaaaatgccaacaaaatagaggaagacggcaaaagattgattgaaataaaaataacagaaaaattcaaagaaaccgctgaaagattgatagaaaacaataagaaattgttggaaattcgtgaaaaatag

SEQ ID NO: 58902 - DNA, 62 bp, Heterodera glycines
aaagtcatagcgcacccgctccgtatctaggcaacgttagagcaacagatgtagctgactag

SEQ ID NO: 58903 - DNA, 1264 bp, Heterodera glycines
atgcgcgaacggacggaaagaaatgagaaaaacacagaggaaatgcaacagaaacaaagcggaagaaatgagaaaaagcggaagtggaaaaagcagcgaatgaattggtaaggaagaaaagaaaggagcacgtgtaattcccagacatttttcattcaaaaatcaattttgcctatcaattaataaaggattgaatgtgataaatagaattgattaagaaatgattcaaaatggacccgccggtcgtaaatgatgaataaatgaagaatgagtgatcaatggaatttttgggtccatttttcaccggatatgtccgtttttttgttaatggtcaattgatttgacgacgtattaatgggtttgttctgtgtgtgtgtttttggggatcgccgccgccgctcaatcgcatcgcattgttttgctttttgctccttccgccgccgccgtttgcttttgattggctgtcggcggcgcagctgcccacataaaaactgccgggggcgaatgaatgcgagcgaaataagcgagtggtggtcgccggccgcacacgccaccaccaacaacaaaatcacatcacatcacacgcagcacaagcacacgccttcccctttcatcatcaacagcattcaattcattctcaatcattagagagcggcgaggactgaaaacgacggcggcaagggaatcccagcacatcattagcatcataattatcatcataattatcaacaaaacaatcatggaaaatatgtctaatagacagcaggaaaagaccgaaaagatcggcgaggatgagagagggaggaaatgatggaatgatattgagaagggatttatatttggacaagtgggaaaaagagagaatggcattcactcggagggatacgggggaaaataaagggacagtcagaggaaaaacaattcacactgatgagacaaatgatgggaaggaaaaaatgaagagaaggtggggaagagataggcaaaagcaaaaagggagggaagagaagagaagtgttggatggatgagtaaaagcagagggcgagagggaagagaaaaacgaacgaaagtgaagagaatgggtgcctaaaaggagagaggacatagaaaaaggggagaaagtgaatgtggtaaggggagagaggatcagggtgaaggaaataaggacaaagagagagagagaaaatggaggataggaaatgctgatcaacgaagggatagagggagagaaagagagaaaatgaagttaatagcaaaaataaa

SEQ ID NO: 58904 - DNA, 77 bp, Heterodera glycines
atggtcacagccggtcagcttcaagacttgtgttcccggattcccaggctcgccgacaagcatcaaaatcacaaaat

SEQ ID NO: 58905 - DNA, 318 bp, Heterodera glycines
atgccaaaagcaatgccaaaagcatgccaaggcaatgccaaaagcaatgccaaaggcactgccaaaagcaatgccaaaagcaatgccaaaggcaatgcatgccgactttgtatcttagcaggtgccgtccacttcgctttcgtcccttcctcccgcgtccgctccctctccctccgctcgtgccgtcgtcgacttggcacgttccgcgcttctcttcggcactgccggttacatggtctacagatttgttcgttcgtggctgctcccgcagcttctcaatgtgccggacccggccgaggagcgtatgcaacgacttga

SEQ ID NO: 58906 - DNA, 547 bp, Heterodera glycines
atggccctctattctgtcttttgctggtgttgctctgcttgggcctcatcgtatttgctgctctattggacaccttattggtcttgcatgaacttccgtgcggatgacacaaatgtgccgttggtcacttttgtgagttttgccgcccatttgattctgcattttccaatttctggatttttcaggtgttcgacatcgtcatggtgtgttcgttcgtcttcgagatgttcttcaacaattcgctggtgaaaaaacggcccgagaatgcttcagtcgctgccgctaatcgcaaattgcgcaacgatgtcgccacggaatgtgccaatgtcgccattcatcgccagcagcagcagaagaacggaagtgccatcatcatgcaaacttaagcagaggacggacgagtgggatgaagaatgatggtgctggtgccaacaaacattcaatgcgatgaaatgatataaagcataatatgtatttctcagctgtattccattgtattgtatattccattatatcgcctatatgcgtatgcatggtctcaaataaa

SEQ ID NO: 58907 - DNA, 1474 bp, Heterodera glycines
atggatttgtttggcgaaccaatttggaactatgcgcgaatgattggcattgactctaacaaatgcattggtgtgttattattttttaaatttaagtataaattattcaaattattaattttatttatttataactgtttgactttttaaacaatgttaagcagtgaaagaattcggagaagcattgagaaaaataattcatgcgaaattaaactcagttgaaatgaacaaacgccaacaaaaacgaattgaaagcccaatccaaatgaatgaattccaaattttgaaaaagattttagagaaaattaaggacaacgaaaattatgggaaaatggaaaattatggacaaaaattcaatagcattctcttagataaacagggaattgctgcgttaaaggaacttttggccattttgaaccaaatcattggccattactccggcactgatgagtcatgcccgatggaaaagagaagaagcatttatttagaaagttttagagagaaaataaaattcagcaaaattttatttgaaactctcagcaaatattcggaaaatgtgaattatgacgaaaagcgtcaattgcttacgtttcccctgtcaacgggcgaacacattatcgcgcgactcagtgcattaattgaactaattggccaacaacggttggttaacgtacaataaatatttaaaaataaatacaaattaagtgtttgaattttgtattatttttgattaatttgctatgaaaaaatttctaaatctgttgatcaaataaatttgaattgcaaattttagtcgcacagttcgaaatgatcatattagtagtcaaattgatgttgtgaaaacaattcaaaacattgcttcaatggagccaattcaattttatgagcgaaaattcactttgtattggcgtgaatgggtacatttcgacttgtttttctccatggcaattcgtttgagtgcacaaattgagcggaacgatcatttgaacgcattattattatccgccagcccaaattatcactcctattgtatgtaagtaaaatagattaattaattggtactttctgctggcttttagggtctaatccgtggcgcagatcccatttgaaaaattcttagctcaaattgtggcatttatctttgcgaaataatttgtaattggcgcgtagttagggctacctaccgccacaccggcgggatgcgctaacggaaaaacttacaaaaaatgttcatttcctgaaattactccagcgaattgttttcgcttatcaccagaattattttagctttttcgattataaaattcaaatcaaaaatggcaatttggtggagataaacaccccgacttggcatgcgccttattatgtgtattggggaaacgacaaagatcagatggtgacacaatctcagcataggaggagcaaagaagcattggtacaacgagaagctatgggtaaaaaaacaattaattaa

SEQ ID NO: 58908 - DNA, 1914 bp, Heterodera glycines
atgccatctcaaaatggggcaggtaatgttgccattgggtgtccattagctaataaaaaaaaatcctatttttagtaattaataatgctaaaattagggtcagattacattttagtgccaataacatttaagcagagccaattaatttaaaatttcttttgaataatttctgagaaacaaaatgctttcggtaattgtgattttaaaaaaatcattgaaaacgcaagcaaaaagcaaattatcgttttcaaatcaaatttttttgaaatttaacaaaatagtaaaattctcggatgataactagaatgtttcttttaactggggatatgagaaaaattatcatttaaataaaattaaataaaactccaatgcacaaaaattgccactcccaaagcgcaattggtcataaaaagcaattaattaagtaattagcaaaacaaaattgttccccattcccaccagcagaaaatagtgccgtcgttgatgcgccacagcttgaagaagagttgttgctcaccggctcatccccatccgttgaggaggagcagcaacagcaactgcagcaggaggaggaggagaaggaggtcgaaatgctgcacatccacggcatggaacagccaccacatcagcagcaaattgttgctggcactgcttcaacttttgctgctcatgctgctggtgccgcttctgtggatgatatggggccggccgccgcttcaaatcggcaaaaccgtcccgcgagtggcagcacgctgccgcgcagccgggcacagtcgcaggacgccgacgcgggcccgccctacgcgtcaacgccgacactgtgcccaacggacgaaaacccgacatttttgcgtcatttatggcttccagaagagcccgagggcacggagcggactgcgaattttgtgcgcaaaatggactcacttgaggtgcctacaacaagcaggattatcattagtaaacttagcaacaaaaaattagcaaagctcgagccctttttaacccaaaaaggaaatttgtctctcaagtcgagactcgtgactttcgagagcactaatgtcagggtattcgagggaattgggtgttactttcccattattatagttggtccctcttccctgtcttatttgttaggcatgtgctcggctatgtcgtgacaacgttgagccgtttgggggacggcattttgcgtgccacggcttcacttacattggccaacgaaacgcgcgcaatgcatgcgaattctttgacgaccatttggcggcggcacttgagaagaagccaccgctgggcgccttccaccaacagggccaactgctgagggccgacatggcaccgcaattcccaaaaaattgtaattagccgcaaaataatggaaaatttttcaggggatttaaaaaaaattgttgcaaagattttgagcgcatttgccttggccttccgtcccgttgcgcgcgtttgccgttcgcttttgacgtgcatccccgcaaggcattgcacgtcccaacggaggcgaagccgttgggtgttgagcaggtggacgaccggaagcaatgcctgcagcaatgtctgaacacaaagggatgccgatcgttggactttgacacggccaatttgtaagcaaaggcaacctaaatcatatcggcttaatcaaattggagtttttaaattggctattttttcttgtgcctttttaggatttaacgagttttaattatatatatataaagtaaatcaattgattccgctgattctgagctaaagccccgcttatgactagcaattaccgcatcccatttttaaaaatatggtttcactaattgccaaattttatgatgtcttttccgtcatgtccgtatgaacggagtttgccattctgtccaaaatgcaccaagaagtttggcattttggtca

SEQ ID NO: 58909 - DNA, 521 bp, Heterodera glycines
atggaattgcgcatggacgaggctgaagacggtccaattgttggtggtgttggtggcatggaacaacaacagcaaagcgaaccgggattacaatatggaacaggtaaaattcaatgaatatatttttagaattgagaattatcttcgacaattcaaaaacttgatttaataaaaatgacttggactgagtccaaaatgccgcttctttgcttaaaaaacttgaggctcggggtctagatcatggcaaatcccaatcgagatcatacgcaatttgagactggtaccattcccatttagacatgtcgggactgacattggagcgctgcttggatgcgtgcattcttggtcaactacattctgtccgtcactcggcacattttccctgttttcagatgagtcatgtgtgtcgctcatttttcgtccattttccggggatgacaacgaacaacggaacggcacaggcgcagtccccggcgccacttccatgtgccgactgttcccatttggcaaaatggacaatc

SEQ ID NO: 58910 - DNA, 1702 bp, Heterodera glycines
  unsure (1)..(1702): unsure at all n locations
atgacgacgacanaagccaaggaaaagcagcagcaacaggtggacactgctgctggagagaaaggcaaaaccgaacagggacaaatggacacggtggtggccaatgacagtaagtgatcaaaccattggtgatcggggtcaatggcaactcgtacaaaggcaactcgtacaataaaaattttcacaaaattaagcctaagcctgagcatatacctagcctaaagcttaggcctaatcctaagtctaaagcttagggctaagcctaagcaattgtgttgtcatcacagcacatcggtgatcgaatgttaagccaagcggaaggcattttggagatttaaaaaagtaataagcaacaaattgtcaagaattgtccccacaattttaattaattgttgaagcaaaagttggagaaccgaaaaacaaaagcagcacaatgagagaggcagaagagggagaagaagcacaaacaccaaatattgtcacttcgaattggccaactttggcatcgtttggccaaacaacagcttctttcgcttttggcagttcgacaaccgcactagcatctgttgttttatcggaacaattgtatcatgccacgggtggttccgctgatcatccaaactcaacactgtcaccattgtctaccgtatgcattttggaattgaaaagaaaattaaatttacgatttattattaaaatctatttcttggactggaaaaaagggttttcaaaaaagaagtaagtaccttgaaccgttttcacgtgtagtgatatcggtttttgtaaaactgataattcccttccgggaaagcgtttttaaagagagaagtaccgaaaccgttttcttgtgccggtggtatcggtaaaaataccgtatgcatttttggattggaaagcaaaattaaatttacttatttattttgtatttttttaaacaaaatttgagcttttgtggccaattatttttttgtagttttccattggacaatttctttgttaaattttattaaaagtcccaaatatttccttcgctgggcctttcgctatttgccggcccccaaacccttttaaattttatacacttgaactttccataaattatgacgcaaagatacataaatgcaggaatcagacagcaaatgttctgcaaaaatgttgcacagtttgctgttggagcggggccgcacgctgaagttggagcagcgtcagcaacaccaccgcaacgtgacggacgcgttgcactgcgagcggttgtgcgccgacgcggacgatgtgccgccatcgttggccaccagcgcgtcgtcgtcgtcgttcacatgtctagcattcgcgtacagcggccggtcgcacgaatgtctgctctcgtccacacgaatcaaaggcggagcagcgggagccgccgagttggagctgttcagccaggcggacccggactttgacctatactcattcgttgatagtcaaatggatgaaaattgcggggacaaatggtcgacgacgacggcgagcagtacagcgagcgtagcagaagtgaatggtcagtcttgttattcaaattgataaatttgaggtgaggggtggttcaattcccagccgcagcctttcaagtaatccagtcgaaatgacaaatgccgatcactcggcaatggatagtattgtcggtcatgtcagtggccgcatttcgagtgttaaatatgaggca

SEQ ID NO: 58911 - DNA, 1173 bp, Heterodera glycines
ttacattgaccattccgtcctcgcgtttctccgtgccaataaccaaatttgggacaaaggcaccaatttgtatttgtatgtgtgcacacatggcaatgccattcatatttggaatgtttttgtcggagaaatttggcccatttttgcaacaaatatttgccgtttggcctttatggatggtgatcaactggacaatttgattcgtttcatttcgccaacaattctctttgacctcaacattgattctgtccattccggtgaactgcttcccgatggaattgctgattttgatgggccaaatgcaactccaactgctggccaagcgttgtccaaatggttgcacactccgagaaaagatggccaacccaagcgattgagttgtgatcttatgtcaggaaccattgaatgggtcaacaatttcaaggaggtcagtccccaatttttcgtaaaatatttggattaattggcatttgcttttcgtttcccattgtttaggcatttctccgtgccaccacttcttctgccagctacaaaattcgacttgaactttttgagccaacagaaattgtgccatttgaattggtgaacgaacggaccagcgaaattctaaaattggagaaaggagaagttgatggatgggttttcccatggataatgaaacgatgccaaattggagggccggcggttcaatgggaggacgaaaatttggataatttgaacgatgtccattttatgcttcaagcagattgcattgggtgatttgcttttattggtgccgtcacattaaatttcatttcatttatgccattgtctgcgcaaaaggcgggtcaaatgaacgcaaaatattctctgaaaatgagtgccggaaaaagtgaatgaattattaggaaatgagaaattctgatcattgaatggaaattgatctgataattgctcctcatatttatttgttgcttctttcatttgatcagaaaactacaaaaaactggttttgctttttggatattgataatttatccaaaaaaaatttaaaaatggtttataaactggaaaagcttgacaaatgcgcgaccgcgatacgcgattggcggcattttttttgcgcgatccgcgaccgcaggatttttctgtgcgcgctccagccctgcttcgaccaatagctttcagttttca

SEQ ID NO: 58912 - DNA, 976 bp, Heterodera glycines
atgctttcgaagaaactaattgccttttgttccgatactttttccggaaaaggtttgtcgtctcgaagactgatcagttttgacctatctgaccagtgagtggttagcattttgtcacattgtttatcatatcacattcacaatttaagacataaagccatccgggatggagctcttaaattcgcgaaggaagtggttgcgcctaaagccgcggaatatgacaaaacaatggcatttccttgggacattatcaaacaggcgcatcaattgggattgatgaatccgacaattcccgaaaaatatggtgagtgtgtcgaggcggtttttaatttaaaaaaatgtcaatgtaaaaattaatattttctggaagtagtgttcctgaatgaaacagtactaagtaatttatggatttgccgtccttttcatgtgggcctggttgttccaatttggagactgctctgatcgttgaggcgttatcttatggctgttcggctattcaattggccattatgggcccatcgcttgcgttagctccgcttcttttggccggcaacgaaactcaaaaacagaagtacgccggcatgttggcagcggaaccactgattgccgcgtattgtgtgaccgagccgggggcaggctcggacgtgagcggagtgaagacaaccgccgttctgaaaggtaactcatttaaagagggagagggatttgaaaataaatatttcaggagataaatgggtgctcaatgggagcaaggcctggattaccggtggcggatacgcaaaatggttttttgtcttggcgagatcggactcggaccccaagacacccgctggcaaggtgattgctttccttaatcgtttctcatttgtttaaatcttaggcattcactgcctttgttgttgacggagacacgcctggaataacccgcgggaaaaaggtaatgggaagcaattggatcaattgggattcaccatga

SEQ ID NO: 58913 - DNA, 447 bp, Heterodera glycines
atggctatcaatgtggagttggcacgattaatgaccttcaaaagtgctcaggaagtcgactcgggtcgaccgggggcatattgggcatcaatcgccaaatgtttcgctgctgacactgcgaatcagacggcgtcaaatgctgtccaggtatatttttaatggttgaaaaaggcattaaaaacttatagatattcggaggcaatggcttcaacaccgaatttcctgctgaaaaattgatgcgcgatgccaaaatatttcaaatttatgaaggtggttttgctggacgaatatgctttacaaaataatgacaacttttataggcacttctcaaattcaaagacttgttatttctcgtcagttgctgcaacggtggatttatttatcaaaaaaataaattacctatacttttttagagttgctcaaactgggacatcttatgttacttaa

SEQ ID NO: 58914 - DNA, 376 bp, Heterodera glycines
atgctggattgggcaatggacaaaatggcatgcgggtacaaacaggcaatcttaatccctaaccagaatcgccccattttgaagtacggtttttttgctggctcgcaacagtcggatccgtcaagttttcttttgcaacagacaacagtcgaagaaggtgttagcaacggcgacatttgccataatgcgcagcgacatcagctgcaattttctacgatgaacggccaaaatggcggaatgtgttttccatcgaatttgccatcagcaatgtcgatgttagcaaatgctcctcaaagacgaacatttttattcaattcggacatggcaaacaccgctgctaaatctatgcagcagcatttaaccgaagacatggccg

SEQ ID NO: 58915 - DNA, 562 bp, Heterodera glycines
atgaatgcattgaccgctgcgatttttttccttcgttttatctgcgcattcggtaaagaataacaaaaataattattaaattattttaaagattaaaattttaggcttgaagtgctttcttgaatttgaagggaatggaaaattagccaaaaaccaattggatgatttcgagtgcccgcttgaggggcagctctgtttgttcgctcaatgcgtggacgtttacggaggtagtaaaagcgaacaaaaataaaataaaataattatttttttttaaattattattatttaaaaattaaaggtggcattatgccaacttttgtcggctgtcgtcaacgggcgaatgacaactgcacggaatttcttgcgaaatgcaaatcgctgcaagccgatggatgctgctacacttgcagcacagataggtgcaacagtggctggacttgtggcaacgtgtactgtacaaataccgtattggaaaggcggcatttttgtcactatattttttcaaattccaggagtacaatcacttccaccaccacgagtacttcgacgacaagtacgttga

SEQ ID NO: 58916 - DNA, 246 bp, Heterodera glycines
atgtcaacagatgccgaaaaaagtcgggaatttccgataacaataaattattggaagttggtataccgaactctaaaaatctgcttaaatgaaagggataggcagacattctgatacacaagagctttagaaaatatttttttttataaataattatttcaacaaaaataataataattttagagcttgccctatcagaatgatctcctttaacctaaattatatgctaacaataattcaaataaa

SEQ ID NO: 58917 - DNA, 642 bp, Heterodera glycines
atttaatattattttgcatttttttatacatttccattttttattttataatttttccaatgttacaaaatttgaaaatataaattttacttttactaaacataaaattatttttattttttcggccggagaaaagataagtattcaaggtaattaaaaaataataaatatatttttttaaatgttaaatggccaatttaggaaaacttcatattcaaaaatatcttttggatttggcatcagatgtctatttaaatttgaataaacattcatatgaaaaatttcaaacacaagctcttcaagctttctgtagtgaaaattttttgaatgaaaatgaaatacaaaatttgataaatcagaatttttataaaaatggcaaaaaatgatagacattttttgtatgcagatgagtcaaggaaaaaacatagaaaattttgaaggaacgattcagaaattgggcattgaataaagggcaatccaattataattaatcaaaacctaatgttttcaaaaacaataaaattataccaaaattggatgaatccgaaattacttcaccgaagaaaatgtcaattgaaaacaaaaataaacttttacaacatttttatttgggagtcaacgaattttttagagcatttagcg

SEQ ID NO: 58918 - DNA, 438 bp, Heterodera glycines
atgtccacgggaccgagtgacgtcaatgtttggtgttttttggccattagcattgaaaatttttccctttatgcgcctacccatttgtgcaaaaattcaggagaaacttgacatgccggtcttaatcctacaaagggtctgcatcaatgtttaaagcgtaatttttcagtattttaggacacagaagtacgatggaattcgatgtttcaaatgcttaatcgtttcttacaatgcaaagctgccgttcaagtatttatgacatcggatgaagcaaagagaaacaacaaaggaaaaggcattccaatcattagcaatatcgaatggaaccaaattgagcaaatagtggatgttttaaaaataattaacgatgcgtcaaatgaattacagtcaagaacagccacaattggaatgataatgccatattatttcggaatttaa

SEQ ID NO: 58919 - DNA, 727 bp, Heterodera glycines
atggtatttattttcaatttagacacatttgacattcgaatcgcaattattgggaagttggaccaaataatggacaaggaaaaaaccgaaaacaacaagttgcttaagaagtaaaaaatttcaaaaaaagttttttttagatctttgatcattgcaactgtccttgacccccgttttaaattgaagttgtttgaacaaatgaaggaacaaattcgggaatggatgagagcggatttacaaaaaatgttttccgggtttttaaacacgacgttggttcgccaatcaagtacatcgagtagttgttccacggaaaaacctgttttttctggtcttttagaagttttaattttaatattttccataaagattttaatgattttagtcatccagtgggtcatccaatctctcaattaccgatgatcaatcgaaatcacaaaatgaattttacgatgcgcttcaccaaatggacaaatatttgagagagccgcgagtaaaatacaatgttgatccttttcaatggtggaaaaagaatgaagcggaatttccaagcttgggacggcttatgagaaagtatcatagtgcgccgccgggaagtgttgagtcggaacgcctgttcagctgcgcaggatttattttgaatgacctccgaaaaagtctctcgcatgaaaatctcgaacggcttatttttcttcatcataatattatcctttacaattttgattattga

SEQ ID NO: 58920 - DNA, 383 bp, Heterodera glycines
atgccaactgtacgcgaaatacttgagagtctgcaaaagccaattaaaaggccccgaattccaacaaatgaagacagcgtactgaatgctgagaggacagacgcagaacaacaaatggaagacacttcaaccaggaatgatttggacgtcgctgcaagcgatgatgaagaaaactgtgagcctgttcatgcagcttattctcacgctgggaacgaagacatcgtactgtcctcgcacgtttcccagatctcggttttggaatgtctactccagggctcaaatggcaattgagtgaatgagcaacggcatggaagggggcgcatggacaatttgcagtaaaaaattgccgtcggaaagcattatttttggtattttcagcgtga

SEQ ID NO: 58921 - DNA, 540 bp, Heterodera glycines
atgcttcttcgcgacctcgtcgtacgacctccaatgcttcttcatctccaaatcatcgtacgacctccggtgctgctgctccgcgaacttatggttgtgggaccaccattaactccgatgctgctgctcgacgaaatggcgctggttgtgggactgccaaagccatgggtgctttgccaactgccggttgtgggactgccaaagccatgggtgctttgccaactgccggttgtgggactgccaaagccatgggtgctttgccaactgccggttgtgggactgccaaagctgcttctcgaactcgtcatgcgacctccagtgctgcttcaactgctgctgctgctgctggccgtagtcacagcggttcaagcaaatgcgtcttttgcaacaacaaataattttgctccatttttcaaggtgctgcaacgaacggagcggcgggcgcggaagtggcaccggcgaagaatgccaacaacaacaatacgacccgacatgggaatgcggccagcagctcctcaagcagcgacagtgactgaatga

SEQ ID NO: 58922 - DNA, 432 bp, Heterodera glycines
atgtacgttaaagtcaataagttattcaataaatcatggagtactccttttcatcaaaaaaaaggtaaatagacaaaaatcaatattctgcctttaatgtgaatagttagaaatgggtgcaggattagtgatcgccgaccccgaaaacccttttaaacatgttttcatgacttttgaatcataaaaaaattttcgaaaaagggggggggacaaagcacagtattacccccaaaaaataaggcatttgctgactttcaggaaaagcgagattttgtgaaaaatggctaccaattaaatccccggatatcaaccatattactagtaataggcggaatttggccatatccgaaaagaagcgaacaaaaccgagaaaccgttttattttgtagaacagtgtgtgggttggttaatggtacgagaatgcgacagaaa

SEQ ID NO: 58923 - DNA, 249 bp, Heterodera glycines
ggactgaccctgacgaatcggcgagcagcaaatcgccctgacttttgacgtgttgaatgtgtgacttttgctgacccttgcgcggatggatctctgtgtaatgatgataatttcaccacccccattttttgtttgtttgttttttcttttgatttcttccgtttattttgacaccctttttttgtctcccttcccccttttattttctgtcgcattctcgtaccattaaccaacccacacactgttcta

SEQ ID NO: 58924 - DNA, 1440 bp, Heterodera glycines
aattaatgatgaaaaagtgaagagactaatcattcaattgaatgtggacattgcaatggctgaccttttcgtggaagtgaatgatccggcaaaaaaacgtgccaatctttgcctaatggacagtttgttgactcatctggtggcaaatggcacattgtacacagaagtccaagaatggcaaacccacatgctttatgaacattttattaatcatgtaaaattacaaagataatttatttattttttaaattaaggttctttggttaatgtttaatcatgaaacttgttctcgaggggtttttgacgacctctgatcatgaaaatgacatctattttggccaacttctaactaacccgaactcggacaaaagtttaaaattccaattgtccatttatgattttttgttcaaatttaagccatttttaaagtagcgcaacaaattccattgatttaaagatgaatttaaaatctttaaataattccaaaaaaaaaacaaatgcaatttctttttttgctaagaatttcatacagtccatgattagaatcaatcaatatagccgcattgattgatcagcttcaatcaataatgattgttggttgaccaaaaccaatcaatcctcattattcagaacgaaattccgcgttcatcggatgccgatttgcgctgggccaaaccggagtgccataaggcggaggtggcccaagcggcagtgagcaaattattgagccaaatgcatttggtggtacaatcgcacagttttgtgctgtgccaagttgcacaggattgtgccgaattcgtatcatttgtcaaccaatatgcgattaggaatttcgaaaaattatattgctgtaatcaatgtgccataggtcgtcgtatcgtaatagtgccagtttgcaaaattttcaagcaaaactcttcccacttttgatgatatggatgggctattaaaattataccagttttctccaaaatctgtaaaatggtttttaccaaggatccacccgtccgggtcattaacccgggcaccctcgttttacaagggtttgaaaatttgaaacaaaacacctcaaaaaaacttaagttggcccttgttttgggggggccaaagaaatttcttttttttttgaaaatttttttttggcacgggggttttttcccccaaatttccccctttttttttcccccccgtataacaaaaaacccccccccaaaaaaaaaaaaatttttttttttttttttttttttttaaaaaaaaatttttttttgaagaaaaaatattataaaaaaaaaaatttggcccccccccccccgggagaaaaaaaaaaaagaaagaaaattttttgttttttttttttttttttttttttttttttttttaaaaaaaaaaaaaaaaaaaacttttttttttttttttttttttttttttttttataaaaaa

SEQ ID NO: 58925 - DNA, 304 bp, Heterodera glycines; identical to SEQ ID NO: 51570

SEQ ID NO: 58926 - DNA, 1729 bp, Heterodera glycines
atgatcattgcctttgatcgtatattcaaaagatcaaaatatatcccgtggaaggtgttaacagatcagggaaaggaattcactgcccgggcagtacagcagttcttccgcacaaaagacgttgaacacttttgtatgctcacttctccccaatttcatgccggaatggcagaacgtgcgaatcgtagcatcaaagagcgcctttaccgctacttcacggagcgcaacacgtacaaatggattgatgttgtgcaagacattgtttgcgcaattaaccactcgacaaattcgtgcattggaatgcgcccagtagacgtgaactttaaaaacgcagaagcattgcgacaaaaattacatgatgcagctgaaaatgttgtacgacgcaagccaaaataccgtgtgggagatcgcgtgcgcattgaaaagtacaagcacgtgttccaaaagggtcacctcccacgcttcaccaatgaacttttcacggtggcagaggtacactctgagcgttcgccagttgtttatcggttacgtgatgacaataatgaaattattagtggttggttttacgcaaatgatttatgcaaaacgctagaagacaaacaacaaaaaatgtttgacattgaaaatattttgaagaaaaagaggcagaacggtgtggaatatgtacttgtgaaatggaaagggtacagcgctcgctccaatagttggattcctgcaaattcaattagcgagaaaaatatataaaaagcattatttaataaaatttatttttaaaaaaatgccttcaaattctttttatgttgttcttccgtcaaacaccaatattgaaggaaataggacaaattctttccgagtgcgtttaccgcgcaaactacaattcaattcggaatgggaggtgggtcttgccgttattgtatatccccactcttggccctcgataggcaccgtggagcaacaatttgtacagattgagtggcagacagggaatacggtacgtatcgaagttccgccatcaaatgtcaccaacccccatgagcttagcaaaaatttatacaggctactgggtgagggaagtgatccgttggcaaaaaaggtacgatcaacacagaattctttcatgcttacgataaacaaggctcgccgctgggccagagaagaatacattaagcgaaagactaaagaaaaacggggcgtccgtgacgaagagctgctcctacaggccatgttggcagatactggaacattggttgacctcaacaacgtggcccaaggccttctgtcacgcgaaaagagtgctgcaacgagcaatctacagttgagaacgtcagctgacgataatgattcgtatcagaaaaaattggatgactacttttcaaaattaagtgacaaaaatttgaccgttcttgatgaattgggcatgacaaaattgaccgccgaaatcaaaaatttgacagaagaggaacgtacgatcctcgaagccacaaaggaaatgggaacggaagcatggattcaggcgtaccgtgagatacgtcttgtttgccaatttaactatgacgtccatagaaatcgctttgttctgaacaccgacccacggtacgttaaaaaggtcgaagtctcgcctcaacttgcctacattctcggtttcaacaacacggagtttatgcagcccgcaaaggaggcaaggttttcgccggacatcattccacgtttacacgccggatcttattga

SEQ ID NO: 58927 - DNA, 317 bp, Heterodera glycines
atgtctccaaatgaatgttctgaccgtccctttcaacaacccgacaatgtacaacagccgcatcaacaaccagatgaagacgccgagttgcgcgcacaaattgaagacgcggaagaggatttgctcttgaattggtggcgtgaagatccgacaattgtaagcttgtttttcaatttagcatttttaatttcttcacgtttcagattcgttttctttttggacatggacgagcccctgccatagaagccgcgcttcttcaacgcgccgaacgtgaggcagaaattttgcgcgaatatgccgagaatcaacaacaatga

SEQ ID NO: 58928 - DNA, 478 bp, Heterodera glycines
agcacgcagccacgggcaaaagccgcctgtttcacgcaacagcccggctgacccgacctttagagccaattcttttcccgaagttacgaatctaatttgccgacttcccttacctacattattctatcgactagaggctgttcaccttggagacctgctgcggatatcggtacgatcaggcaggagattcaaatagcttccctcgcattttcaagggccgtgtggagcgcacgagacaccacaggaaccgcggtgctttacgggcgcaacatccctatctcaggctgagccacttccaggcacgcacaccctaaaccagaaaagagaactctggctcggactccacacgacgtctgcgagttcatttgcgttaccgcgcaaaacagctcttgcgaaccgtcatttccctagcctggcgtgggaatgttaacccacttccctttcggcaaccggatggaccaactgcgcaagcacagaa

SEQ ID NO: 58929 - DNA, 831 bp, Heterodera glycines
ttttgtacaatttattgaataatgaaatattttctaatatttttcatttcttttttaatatttaatgactgtcgccctttccccggtgatgaaaatggtaaattatacaaatatgaaaatttaaatttttttaaattaagaaaacgaagaaaataatcgccaggaatctggcgagtgttctcgtacaaacacggggcgaggcaaaagtaataattgggcacttttgcatttgtcataacttttgttttccttattgaattatgcaaaatatttacgcgcattttatttgttaaaaaattctctataataatttcggaattgctaagttaagccaatgaaaaaaattatgcaaaattttcaacctcattaaaattcgaaaatttttagtgcaccaaattttattatagttttttatattttaatgcatttttcttaaaaaaaatatctgctaaaattccgaaatatgttttttatctgccaaattctttgtgtgtttttttaaattttttctacaaaaaaggtaaacataaaaatcccagccctattcataatgaataatttattaaaatcaggaaagctacccgaagaagaaaaagcaaaaatactcaaaaaatttgaagatgagcgaaattcgtttaatactaggcaacaaaatctcagagaacatgccaaaaatgaattgctgggaaaaattctaaaggcaaaaaatgaatttatggaaaagatcgaaaacgaaagggcccaaattgcggaaaaacttttttgcgaatttggaagacgaagcgatggcggagcaaagcgcagaatcgccgggggtcgaccaaaccgcgg

SEQ ID NO: 58930 - DNA, 776 bp, Heterodera glycines
atggagccaatgccaccgtacacggtcatttgtccgggggtatattgttagtgaaatcatttatttgtagattttgacaagagaagaatttttgaaagagatgcagaaacttacgcaatcgacagcagaaaatttggggatttcggaagcattgacaaaactcatgttgaacatttataattgggacgagaagacattgacagcagagtaatatttcatttttattcttattttatttccaaatttaggcataaccgagcagcagataaggaggcattttttgaagaaaaaaaaattgccactgggaacccaaaggcgccggcggagggtgaaaagtgccaaacgtgtgacagtgaaaaattttgcaaaatgtcgccatgtgggtgtttcttttgtgtcggatgctggagtcgctatttttggaaagaggcgagtattgaaaattcacgttattaaattattacaaagtttttagataaatcttaaacagacagtccttttgacttgcattggctgttcccattttgctgatgaacaattcatcagtcaaacgtttgaagaatttaacaaaatcaatgatgtggaatacattggagaattgctgaattgaatgcgaatcaaaaaaaacttgtgctgagatttttggagttggctctgaaaaccattgtcaaagtatagttgtttaggcattatcaatgtattaaattaatctttttagcgtaatccgtttgtggaatcatgcccccaaagtacgtgctcgaaaattatcaaagtca

SEQ ID NO: 58931 - DNA, 250 bp, Heterodera glycines
atgttcgtctacgtgcccatttcccacgtgttcggccccatgttggtgcgcattcggctgatgatcacccgcgacctggtcaacttcctgctgctgattctgctcgtattggtcggaaatgcccttgccatcaaagcggtgcttttccccgacctctccgccaaccgcgaaaccgtcgccacttccgtgcactggacattccaacagctgttcaccaccgacctcagcgttcttgcgcagtccgatgaat

SEQ ID NO: 58932 - DNA, 599 bp, Heterodera glycines
atgacaataatgccgcttccatcactttccctgcccttaaagtgttgtacaaatgcttcgacacatttgactcaaaacagtcagtgtttttgcctttgagtgttttttacgaaatttttttcccttttcagagaccccagggcaaatggctgtgattccagcgttggcattctcgagttaccgactgactcgtgtcttcgtcttaccgaaatgctgctgtccagctctttggcccttccgccgcctcttagagcccttgggcaattctacgtaattatataactaacaaatatttaattgtatacaacaacaatttattgtacatatgtccgtttgagtatttgttatcggttaaggtcgggttcattcgtatgaaagatagagttgattaatgggctgtgattattgatgttcgactgtttccgtttgcgatttgatttttttgccaatgatgtacattccgcatttgttgcaattgaacccaaaaaatgtttctggcctttatccccgcaggcaatcgcattttgtataatctgttccatttttaatcacataatttaacttcgttacgttatcggttttaaaaaacattttataga

SEQ ID NO: 58933 - DNA, 75 bp, Heterodera glycines
tagagaaaaaagataatgtttttctctggcactctctatttattggtacacatctcgttttttcggacggtgtgt

SEQ ID NO: 58934 - DNA, 87 bp, Heterodera glycines
atgcaattggcatcggtcatggcacgagcgcttctcgtgtcggcgtttttcgcaatggatacttcgcatcgatcaacaatgaccaag

SEQ ID NO: 58935 - DNA, 663 bp, Heterodera glycines
atgaaactgtgcctaatattcttttcaattgtattatttttaattgctcaaattgaaattggagcggaaaagaaaaaattgcaacaaaaaacatttaaagaaatatttggagaaaaatgggaagaaaaagaaaatgaacagaaaaagagagaaattgttgaaaaattcaacaaaattaaagcgaaaatcaaacaaaaaggaagaaaatattcaacaaaagaatggaataaaattaatgataaaatagcgaaaacattggggacaaatcgaaaatacatttacaaatggatcaaagaattgggaatatataaatggcacaacaaatcaaaaacggatgaacaaaaaattgaaattgtgcaaaaatttaatgcaatgaaaaatgagtataaacaaaaaggaagaaaatattcgacaaaagaatgggacaaaaattatgcagaaatttgtaagaaaattggagttggccaaggagtaattggacaatggaagaaacaatttggaatgggtgaaagaatgacggagaaagaaaaaatggaaaaaatgaaaatgtattggcaaatgaaaggagaaaatccaaaaatgagtgacgagaaaatttcaaaaatattgaaaattagtcaatggaccattttcaattggaagaaacaatttgagaagaattaa

SEQ ID NO: 58936 - DNA, 500 bp, Heterodera glycines
atggcggaacagggcgattcattgtctccgtttcggtgccgccctttcattgccagccgtttcattgcagttgtcgtttcattgccaagatgggtctcactgccaatatgtttaactactgcctacttttctctttttctcattattttcattaattttgttattgtaattttcctatttcaaagcagatcattcgttttttgtcaacgattatggctactgaaattctaacaagcgtggaagaaaaacattgttacacgatggttttctgtatatcttcgaaaaaataaacaaacggggtgacgtcaggttttgtaaatgtgaatttttcggaacccaggacatcatatgcaaatgtcgtttgcacacagatatgaatgacaatattttggaggttcaaatattcaattattaatgttagatatgaaaatttttaggcaagagccgaaaaacatcaaagttcaaacacttacgacatcgctgaagaagcgtgcgcatga

SEQ ID NO: 58937 - DNA, 1031 bp, Heterodera glycines
atgactgatgttttcgtagatggcacgttcatcattgctccaccgttgttttaccaagtttacgctgtgttggcaaggtggagttagtattattccaacagacttaataaattctcacacttatttaggcgtcgagatcgatgagtctttcctgttgcatatgcactacttacgaacaaaagtgaggggacatataccaggatgtgggccttactaaaagaagcctggcctgaattttcacaccggacgttttcagtggactttgagatggcagcaatcaattcaattcgtaacaattttccggaagccaaaactcgtggatgtttatttcatctagtgaaaaatatgaagaaaaaacacagaaaataaactttcgcaggtctatcgaggatgtgtatttaataatcaatgtgtttttagcgttatcaaattgatccaattttcgcatcccagtcaagctggatcacatcaatggcatttatgtcaattggagacttaacgcacgctctatctcattggaaatgcatctgttacctgagcttcgaccaattttttgttatagatttaagtaaacagatttacaggttcgccacaaactacactggacgtgttcggcgtgctgaagggactcgaaccgtaccaatgtttcccccccccccccccaattatggagtgtctactctaggacgattaatggagaagatcgcacgaacaatttcgcagaagctgcacacaggcgactgcaaagggattttaactgctctcatccatcaatatggcgtttcattgagacattgcagaaacaacaaaagttacgagattccgaaatgtccaaatgcgttgctggattcgacccaccacaaaaggcaaaaagatatcgcgaagcagaccgtcgaattctcacattgacacgcaattaccatccagtgaatattggtgatcctgctcatgtcaacgttgataattttaacccacaaactatcattgattttcttgctggtgtctcatacaattgttcgatggacccctga

SEQ ID NO: 58938 - DNA, 90 bp, Heterodera glycines
atggcggaacaggcgattcattgtcgccgtttcattgcccgcattttcattgccagccgtttaattgcaggggtcgtttcattgccaaag

SEQ ID NO: 58939 - DNA, 1287 bp, Heterodera glycines
atggtcaatgtccgattccaaatcggagctgatcggagggtggccgagccccctcgtcctccccgaataagagcgtatttggcattggaggaggctccaaatgaccaagaggggcccaacaggggaccgccgtctcggcgtctcttcgaggccattggcttccgaagagacaatccgaacattggcgatagggcggaaaacaatgcccgccaagcgcctattcaacgcggagagcgagccattgacaatggccgcccaaattcaccggacggaagctttgagaaccgcccacgaagggcggtccccaaccgtccaatgcgccgttggcagaacggcctattcattgtggccttggctttgtgcctcggcagtttggcggagggaaaggaattcccttcgacaaggacttgccatcagccgcttgaagcggcggacatggcacgtgaaaatcaatggggattttcacgaatacttttcccatggccattttcccacgatcagaaagcaaatctgatccgaggactccgccccttcaatggtagcggaacctatataagggcagggataaggcatatcccaccatcacttgcccttcccaaaatgccgaaacccatcaaaatgccctcctcgtcatcgtccgcctattcatcatcatcatcatcatcgccggatcgccagtcgccgccaccgccccgcaaaaaggcggtggaactgttcaacattgccgcagcaacgcctgagcgggacgcgaaaagcggacggaaattttccgtccgcgacttcatcgacgcggaggcaaaggaggagccttcctcaaaacgtctgccgacgtgttcggcgtgccaactctccgggcatcgccgcggggcaaaggcctgccccctctatgtagctccacaaagggagcggtcagcggcagccagccgccccgggacttcaaatgcacggcgcgactcccccgaggaaggggagatcaccgccgataaggcggaccgtaatcgcccaccggtaatttcttaaatgcatggggccaattgtcgcaatcaaaaaaattcccgcccaggacgacgcgggaattgtggccaaagcgcaaccgccaccaaggcagccgtggacctcgtggctgttcacggagaactcaccgctcgccgtcggtggatggaaagcacaaggcgaagaaagagcgccgacaccaccgcgaagaaattcgatgattgccgcgggggggagttctgtcgccaacagcgacagattttatcgatcgcccgctgttttttcccacgcctt

SEQ ID NO: 58940 - DNA, 582 bp, Heterodera glycines
atggcctcgttgcaaaacttggagaggtaagtaaccaaaccaaacttggatgattacggacagagcgagttgctagtgaagagggtgcactttatcctcaccccatcccctcccgaaaattcatcaaaacctaagaattaaaaaatttgaaaaattaagaaaattcttagaattgttataccaaaaaattcttgaaggccgaagtcttgaagaattaaaaaaattctcttggagacctactccgcaatgacggtggccaaaaaaatttctatcaaaaaattggacaattctatggcggagtggaatggagtgcgtgcactccgactaatttgaatttttattgttttattaaattgttctttttttaggtgcaaattgtgcaactttgccgttgagatggaagtggacaaaaccgtgaacaaagtgttcgactgtttgaactgcggtgccaaattttgtcgtctctgtgaacgccgttgggacgaagaccatttcgggataagctgtgatgagttgggcacgaagacgaagaaggacaaaaaggagcgagaattgtgggcatttgataagcaaacggagtag

SEQ ID NO: 58941 - DNA, 357 bp, Heterodera glycines
atgccgattacaaaaccttatatcaaaactctcgagtgagctgtttaaagaaaggacccaacaggtggaaatttatttttagtatgataattgtcaccgttattagatgcggacgcacattttggaaaaaagacgccagtcaaataatggagatgtaactttgagtgggggagatttgaaaaagtaatagttttacataaaaatgtaaataattattataatagcgttgtaaatatctatcattatatataaaattaaattctttttagtttccttgaagggatcgacattacgaaaggaaaggatgaggagaatgatatgtttcaagtaattaaatttaaactctaatatctaaaa

SEQ ID NO: 58942 - DNA, 624 bp, Heterodera glycines
atgaaaaccgaacccattgaaaattatgatgagaaaacatccggacgcggagcagctaaagccgagaattttgtgctaaaacaggagccatatgaagtgaaaattggagaaataatagaggagcggtgccaaattaatgggtcggcgtcgttttcgcgtggggaagtgttttctattagcctacaaaatttggaaaaatttcgttaaggttcaaaaaagttatggtcagaagagtcaacaaaccaaatttttcaagtttttttggctcgaactttttttatactgaacgaaattttttggaattttgcaggctaatagtgctactgaagggctttcgaatgatgccaagaatgttggatttggttagcaaagaaaaaaagttatagtccaaaaactccgcctcacgcgaaaacggcctggcccgcaaattaatggtgccgaatttgatggtcaacaaagtgccgagtggcctatcaaaaggggccaatcaaattttgggaaaatggaggacgaaagtcaattatcattttcatcattatcaggccagtaataatgtccccaatgcaaaagaaataatattatgtttttaattttttttaactttcaaataattgaaaaaataaa

SEQ ID NO: 58943 - DNA, 230 bp, Heterodera glycines
atgccaccatcaaatgccgaagtcgtcgtcgaaccaaatgccacaacttcaacaacaacagtcaaagtcgccgcccgacagaaggccaagacttcatcgacaacaacagcagcaagtcgtcgccagccgaaatgccgtctgctttacatcatccaccgcattgacaatggtcacgcgcagtgcacaacgacgtgcagcggaggaggaagcggttccggcacttgcaattc

SEQ ID NO: 58944 - DNA, 1219 bp, Heterodera glycines
atgccattcgcgatcaagcaggagcagtgttcgaagctcgtcaatggagtcgacctgaagacagcaaaattcatcttcaacgagctgttcatcaccaaacagcttacagaactatccgaggacaccggcagtgactttgtcacgccatcattcacacaattgcgtatgaggaagatcgtcaaaggtatttttaatggagagtcccttcaaatttcattcctaattagggcttgtggggtgttatgctaaatcaaaatgttttgtagtgctaaaacataactcatctttccgtttaggatgttttcctccgaaattgctcaaggcttgggatgccttcaagaaggcaaagcccgaattgtcggagaacgaacggccagacatttatgccgacgaagatctccatttcgttatcattggcctttcctatgggggaaaagatctggaggcgtttaaggttagccttcaaaaagaaaaaaattaaaattgtttttttcgcagataaaaaatggccccgaatgttactccatcttccatcaggtcgccttgtccctggcaattgccgaagccgttctcgaattcgagcaccgggatctgcatgccggaaacattctcgtggagcggtgcccggacaacgaaaaaattcggtaagcagcacaagaaaaaaactggaaactaatgttaatgttaaagatacatctaccaaggaaaacaaatcaatgtcgtctcaaatggggtgcgcgcctccataatcgacttttcaatttcgcgtatgaaaaaaagtaagctcaaatttttctcaagcgcttaaagtttactcattaatttctgtttcccaaaaccagaaggtgttccgttcttcgttgatctcagccaagatacgggccttttcgcgcaaaatggtgttagcgatggtggcgactaccaatacgacgtctacaggatgatgaagacggtggccaggtcgagagaaactaatttttgtcacattaaaaattctttttttagcgaaaattggtcctcattctggccccaaacaaatgtgtactggatgggctacgcggcaaagaagctctttaacaagaaccgcttcatcagggcgaagagaaaagaaaccatcgacaacctcttttcaaactttgaaaagaaatttggatcgattagcgatttcattgaccatcctgattttttgtcagtgtttgctgaatttacttccgggtaa

SEQ ID NO: 58945 - DNA, 1788 bp, Heterodera glycines
atgccaattcaagtccacgcgcaatccattggtagagacggaacgccaaaaataatatttttgattttttacaaaaactcaggtcctaattgtgtgacgctcacttggcaaccgccagctgaggacggtggctgcaaactggagggctaccttgtgcagaagcgagaatggggtcacgaacaatgggagatggcaacaccggatatggtacggtatttccatatacaatagtcacaaagaatattttaatgggtcccaataaaaagatttttttattttaattacaatttcgttaaaattttagtgtccattgaccgagtttttggtgcccgggttgcgcgagttccaggcctacggtaattgtttttaaatgtgtacttcactttctcccgcgtcgtccccccccccttcaaaaattttcatgcgatttttctaaaattttatgatgaatcattaaatttttttattatttaatttgttagtaggtaaaaaaaaaaatttttttcaaaaatttctttttgaagaattccgtgtcattgcgctcaactcgcacggacgcagtccaccgtcgttgcacacgttgcccatcaacatcgaggagacggctggcgcttgcccgaccattgtgataaagtcagcagagaaatttcaaaaaaaaaaattagtgcctcttctttttttgatggtgacacaaatttaaagacatggcaaaagaaaattattgacaattcaatttttttcgattaaataaaaatcgtgaaaggaaaatgcgtcagtgaatcagtgcaatttcgaccttttgtaatgcaatacttaatgctacagtagtaactttattataaaaatactgtattactggcaccttttccactgacgcattttccaggagccctcaaaatattactattttttaaaattaattttcatttaaatatggcataaaaatttccagcaaagaagtgtctgtgcagaagcccagtgttgtgccgttgaaatcgcagcgtgccaacgaaaaggaaaaggacgccacgcaaatccgaactcctaaaacggcacaaccttcgtctgtacatggcatcggaccatccttgggtaagatatgagtttggatggaaaatcttagataaaaaactttctttaccagttcggcatttagttcaaaaacgattatccgcttgtctctttttcaattttaatttaaaccgtttcattttttgtaatttttaattagttcaaaaaacagttaaacattttccacggacatttttaatttaatgataatttaattttaaaatttatttttaattcaaatatattattttaaaataatgcattgtttcagactcatcagaccaaccattgtcctccaccgcccgtcgtcgccagccgcgcagaagtgccagaaaggatgccactgacattcagtggttggtttaacaaaaaaaaaagtttaattcattttattttttagttgtagcaagaatttgacaccgccacgctccaaaaacacggtgagcaaattcggatgttttaaaattatttcttgggaattttgagaaattgaaactttttaatttttaacgtgaaccgaaaaataattttaaaaaatgatgcatatttttgaatattttataaaattttttacaaatatatatatttttgttttttctcaagtgcaccgccaaagacgacaaaacaatggcccaactctttgaattggtggtcaagggaaagccgaaaacgcccaagaggctgctggacacaatgaacgcaacgtcggacagttgc

SEQ ID NO: 58946 - DNA, 7655 bp, Heterodera glycines
atgggcacttcagttttgatgctgataatttctactataaaatgcgatatcttcagaagaaatacagtactttttgtagacactgaaatcgaagtgcccatacctcatcgggtataaatcgtatagactttcatctttagtatattattaaatttaaaatattatttatccatcccttatcccctgaccaggagacggaggagaaaaggcgggagtggcgacgaacaaaaagcctaaatcaggcaggcttccgtagctttgaggtgtttttttgattaaataattataattaaaaattcaccaaaaaaataaatataataattagacaataaattaaggatgaagaccacacgcttcttcagctgcttgagcagcgcgggcacaaaagaggcacatcggacagcagtgcacaacgttacctaagaaggcaacagctcaaggaggagaagcaggccgaattggacaagccggccgaattggtaagctgtggaacaaaaaaaaaatcattagatatttaaaaaaattaaaagattttactttttttattttcaaaaatagaaaataaaattaatttttgtcacaaaattttaagcaatgactttaaacaattgattattgatgcattttttcatttaactttttagattttagaatgaaaattattttttgtaatagaaatatccattatttttgaattttaggttcttgcacttttttgaattggtgtccaatttactggagtccaaattttccgattggtgtcctcccaaataactgcttcctttttttgcttcacccgcccgccccccccccgaaaaaaatatcatgatacgaacaaaggaaagctttttcaatggtagttttgggtgctgatcaggagtctaactcaaaattgcaaaatctatactgttatctatgattttcttcatatgattttgttgatgatttaaaaaaaaattattctcaccctcatcagtgctttttgtggattttgtaataacatcaacaaattcatagatttgtacggctttaacttcagattattgattaacacctaaaattaccatacaaatgtgttttctttctcgggattatgacatttttatggggggggggtatggcataacgaaaaagtacccttttctattatttatttaaagccatacaagtgcaaagaatgcccagatgcatttgctcgtcctttgtacctggcaagccattctcgcaatcatgggtacaatgggagatacaaatggtaaaaatattttgattctttttatctttttttatttgtataaatattcagccaacattgcaattatggctgtgacttgaaggacacatttgacaaacaccggtaataaattttccttgttttgctcagttaattctaaaatcactttttactgtgtatagcaatttgatttcagtggtaaattccatattcataaaaattccaaattaataaaggaaaaataaaaaataattcattagctgttgagatgatccaaaccaatgacaatgggcattaaaatattagttgaaaaatctcataaaattaacgtatttttgcaagattctcatttgatcgattatttctgatcagttaggaggtcaagattaaaaatagctgaaaatttaggaatagcaaatccaattgctcttcatgataaaaaagggtttaaagtgatctgaacagttaacatttttggctgtttcctttaaaaacaaattctttatttgtttagtgcctgtcatgtcaatgtgacgccgatcagaattgactttgacgacgaggtgtttgctggctcgccggacccagacgaggtgggtgaaaaacgaggcgcaaattttgttttgttttgtacttatttcaaaagggaaaaatatcaaacgaaaaaataaacaaaattttatcttttttgtaaatgtccttatttttgaatattttcacaaaataaaacgattttcagtaatgaaaacattgtcgttcgtctttttaagcaaaaccttatcggttgtttggaattatcaccggctcccatgaccatgactatacgtgcataaacgaataattttttaatggacaaaaaaacacaaaaatttaataaaattgaattcggaattaatttttataaaaaatatccgacactaaaattttcaaacggtaccgacaaaaaactggtaatttctgtgttctaatattttttaaagttttttaattaattgacaaacctaaataataatatttattgcgcctctgatatttgcgcctatgcttaaaagcagtctcaaaacttttttttaatagaaaaataaagcaattgttattattaaataaattgtttgaataaatggtatatttacctttttgaaaattttcttaagctttttttaatttccgtgtcaaagcggtaaaataattttttttaatgttaatttttaaataatatttttttaatttatacaatttttgcacttgttgcatttttggccaaaaattgctcatcgccaaatgcttgacactcctcctatttatgagaaatttcagaaaaagccatggagcagattatttgaaagaaaaatatttgctaaaatgtggcatgccatcgaaaacaaaaaattaatttggcgcattatttttttaattctaccgagttttggctttatttaaattcaaaattgtctagaaaccgaatgtcggctatgttttcctgaaaaagccttaaaatttcgaaatttttaattaatttattattttacagttccgcgtgtgtgccgaaaatgcgtttggccgttccgacccattgaacaccgacgtggaccggcccggccccccagagggcccgatcacttatccggccacaacaaagtgagaaattttcaaaaatataagatatttttgaaaattttgcactaaattttggaatggtgccaaaaaatcgttgccaaattttgcatttcactaattttctttttaatttgactgaaatttcaattcaatttttcgattaaataaaaatcatgaacggaaattggggcagtggaaaatgcgtcagtgaatcagtatttctttaaattgagatacggtagtaatattacttgaaatcattacttattttttagggattttggaaagtttcaattattttgacatttaaaaacttaattgaaaaaaacaacaaaattattagacaattttcaccttttgtaatacaatactttaatgttacagtaactttattttattactgacaccttttccactgacgcatttgccacgagccaaaaatagtacaaatttttaaaattaattttcatttaaattatggtacaaaattttccagcaaatgccaagtgtctgtggtggaggagccccgtgactttgttgagacgttgaaatcgcagagtgccaatgaaaacgaaaatgccacttctgaatgcgaagtggacgacaatgacatcgatgtggaagatgatgagcagctgcgtgacgagatagcggcaaatgtggtaggaataaatttgaagggggggggggggtcaaacgataattttggggggaggggttcgaccatgttaaattttctaaaaaaatttttaacaaaaaatgtcttatcaagattaaaaataatatgctacttatgaattaattcaaaattaaaaaaatttcgcagaatttaaatgcgaatatttatttatgttattttttactagtaaataaaagaattatgtttttaatgctttaattaacttcaaaattcaagagaaatcttttttaattattaaattaatattttttattaataaatatattgcagaattaaattgcaaatatttttatatttatattttttaaataatgattttttaatatatttgtcataaattaaataaaaacacattataatttaattgttttattgatttgtacaaaaaaatttaagtcaaaccgggcttgagtcagataaattacattttttctaattaaattagaaaaacaaactttttcgaaaaaaataaaatataaattttggtcaaaatatcactaatttaataaatccataaaattaaggcacttctgcgcgccaatgcggagcagttcgaactcgaagcatcggacgtggaggaagacgaatgggtggacagcagtgaggaggagcaggagaataagcagctgcgtgacgaaatagcggcgaatgtggtgggtataaatttgagggggagcggggggaggggtcaaacgaaaattttgcaatgggggggggtgggttcgaccatgtttattgacttttttaatttactttttaagtctatttttgtgtttttcttcaaaaacttttttggacgagggggacgggggcgaggtccgatggtgccaataggcaggcgtccttggggaaattttgaaaatttgagtgcaatttgctattcattttattggattaattcaaatttatttaatttttataattaaaatgtttggatttttttttgttttaaaatttattaaataacatttaattaataaactattaattcatttaatattaataaacattttctccagcatcagcaatgccgtccgtttgtcagcccgccgggcgcgccggagaagccgcgcgttggcaacgtcaccaagcacacggtggacctgagctggattcgtccgctgcatgacggcggtgcgcgaattgatggctatgtagttgaacaacgcaaaatgggcgacaatcactggtctcgtgccaacatcggcatcccgcgtgccaaaacagtgcgcgacacacactgcacggtcgaatgtctgccggagaaggaacagttcgagttccgcgtccgtgccgtcaacaaggcgggcgagggcgaaccgtccaagtcgtccgacctcgtgttcaccactgaccagccaggccgtcccgtgttcgacctgtccaacctgaaagacatcacaggtggcgcatgcattgcttataattaataattagtgttaaaagttgaactgaatttttaaagtggtaatttgtccaattcggtgtttgtaattgtgcttaatgcttatttcttacttgtttcttttgagtctccgattcttaaaaattaaaaattcgcttacttctaagatttttgcttaattttagatttagagaatttttttttgcaaatatcccatttcaaaatttttgaaaaagcgcaacgcattaaaacatggactaattagtaattaccatttcggttcctaatttacattcctttatttttgtcattttattttttatataaaattaaaaattgtcaatttaaaaaatctgccaaaattacagtgcgtgccgacgaaaccatcaccttcacgttgccgtacagctcgggagggctgaagccgaatgtggacgtgttgaacaacggcaagacaatttttgatgaacgcaccaccattgaagtggaggacgacaaaattgtgttcaccatgcgtgacacaaaacacagcgatgccggaccgtacaaagtggtggcacagaatcggcacggcaaagacagtgccaagctgaacgtgaacgtgctggacgtgcccggcaagccgggcgggcccatccggttctccgagcttgccgcggacgcgtgcacactgcactggagtcagcccaaggatgacggcggttcgccactgaccaattatgtggtggagcgcaagtcagcacgtggcggtgactgggagcgcgtcggtgcaccagctggcatgtcgctgcgagtgcgcaggctgaccagcggcgagcgctacaaattccgtgtgcgtgccgagaaccagtttggcgtgggcgagccgctcgacgtggacgaaccgctgctggccaaagcgcccaacgcgccgtgggagaagaccccatttggcaatgtgccggacacacgattcaaggtggggaaaaacagagccgttcgtccccctccccctcgtttcattccctcccccccccccgccgtaaattttttttaaatttttaaacttaaaattagaaagggacatatttgcaaaacaattaggaatgaactttgaatttttttcagaaagcaattttaacggagtatttttcgtctttactgtattttgttcttacaaaatatttttataaaaaattgattaaaataaggttaaaaatattgttctaaatattttatttaagaaagctccaaatttatattgaagttgttaaacgaaacatttgtcggctaaaaattatgtttttcgtgcttttcttaaggaaaaacataaataaataaataaaaaatccccgccctatttataaattttccaaaaatagacattttaaaaataaaaaattataatttactcgcttaaaacacaggtgttgcctgagccggttgtcaagtactcggtgccaagccagccggacaaacccgtggtgcgcaactttggccgaacatgggccgaattggagtgggagctgccggcatccaacggcggggcaaaaattcgtggctacgaactacagcacaaggaccaacattcgaacgaatgggtgagtttatggagtatttggtgtgtattgtaattattgttgagttttttttctcgaagtgagcagctcgcttcccacacccgaaattaaaaaaaaaaatttagaaaaaaacgaaaatttttataaaaaatacaaagaaaattttcatagccttttaatcaaaacatatgaaaattcgattagaaaattccagttattattggatattgattgtatcactgctgatcattaggattatgcgttgaatatcctaaaaaaattgccccgtttttgtgaaaattcaaaatttaatttttttttttttttctttaggttacatgcaaaaaatccgcgacctggtcaacaaatttcaaagtgcaaaatctgagcgaccggggcgagtacgtgttccgcgttgcggcaaagaatgcggcgggttggagcaaaccgtcaccccaatccgaccgaatcaaattgcgacaacgctatggtccgccgggaatgccaattcaagtccacgcgcaatccattggtagaggcggaacgccaaaaataatatttttgattttttacaaaaactcaggtcccaattgtgtgacgctcacttggcaaccgccagctgaggacggtggctgcaaactggagggctaccttgtgcagaagcgagaatggggtcacgaacaatgggagatggcaacaccggatatggtacggtatttccatatacaatagtcacaaagaatattttaatgggtcgcaataaaaagatttttctattttaattacagtttcgttatagttacagggtccgaattcagaatcattgatgccgaaatccccatagaaaagggtttttatgtacttttgaaaacataaaaaaaaaattttgaaaaaaagggggggggacaaactgcactatctgagttcagattatgcatgaaccttcatttagtctatgatttttcatcaatgtcataaaaaataatccgcagccaagcggattcgaacctcagatccccgcctcatacgatcaataattaaatttaaaaaaatcatatacgaaaaagtccaagcactcaatagctcattcaaaaaaaaaaattggttatgaatcataactcgtttttgcatggcaataaa

SEQ ID NO: 58947 - DNA, 292 bp, Heterodera glycines
atggcattcattttggaaaaatgcgcatcgattctttgctgtgcagttttgctcgctgttatcatttgtttttccaacaaaaatttgtacaacatttgtataaatgcgatgattttaccgtataaacacagtaatttttcgtgtgaagatattaaaattaaataaaaaattattatattatttatgaatgaatttttgtaacatgatgttcatttactattttaggactaaagcacagtttggagatgtgcccaataaaataggagtcgaaagatcgccatattaccgaatg

SEQ ID NO: 58948 - DNA, 894 bp, Heterodera glycines
atggacccggacgcagcaataccggacgtgggctcaagagtaccggacgtggccaatgacccggacgtggaacgagataatggacacgcagcgggtacgaaccatcaagaaccaaatgatcttgatagttcttttgattatttttctgattgattattttttaatttgttttactgatttttgctttttggcttttctattaataaatttttgtctgaaaaattttatgtgtaattcttagtttactttagttttaagtgcggcacctttttaacaattcgttccttgctcatccattaatttaacgtgatagaaaattgccaaataattagttgatagatatttatctaaaagttttgaagttaattgcattacctcggcgccgccggggggaattttgaaaattttagtgtaatttgctaacagattttcaaaaaaaaaggctggtttttgggattactaggctcaatttgtacggattttctttaaaaaaatgataaaatacaattaaaaaaattaagaatcatattctgtcgataggaaagccatgagtatacaaaaagaaaattcaaaataatttaattcctgcagaggattgaaccaggggaaagaagaagggaaagacaaggcgactagccgctaagccatccgcacaattgcctgaatttttaaagaatatattaatatatttttaaaattttttccttttaactccaattttcttcactaatttttcactcagacccccattcttaccagtgcttgtttttcccggttcccggttgccctaccgggaccgggacctgagcttttcaaattccgggaacctggaccgggacctcgaatgaccgggaattcccggcccggtcccggtcccggtcccgtggcactcta

SEQ ID NO: 58949 - DNA, 1467 bp, Heterodera glycines
  unsure (1)..(1467): unsure at all n locations
atgttcgccgtgcggaagtcncaaaagcacatcgagaccgccttcactgccgagatgattgcttatcacccaacagatggcaccgattcggaatatgtcgagaaaggccaaataatgttcggttgggttgggggcacggaataaagcgatcagagcacggcgagggcttaccaactgaagaagcatttgcaacaggcgataaccgaaaatggcatcaaaatgtgccttactttttcccttttgtattttctcctttttctctaccatgggatttaggaaaaaatggactgtatcttaccggggccagaaaagcctagatcgggaccttgattttcaaccgaaactaaaaacttaaaaaaatacagtttaaaaaatttgttaaataattaactttgggtaatgcgctgatcacgaatctgagctcaagttttgaaaatcattgatttttatctaagattttttgtcaactacttgattttttcgatttttaaagttatttttttaaaacgtttagcaatgaatttgggttaaaaaatactctgatcacgaatctaagctctgattatgcatgaaccttcattttgtctatgattttcatcaagtgtcataaaaaaataaaccgcagccaagcggactcgaaccccaggcccccgtctcatacgacccctagggattaataatatatttcaaaaaatcgtaaaaaattgaaaatattgaaaacttgacttctccatacatttaatagctcatttgaaagctctttttagtatcagttttatgtccgactaattttcttaaaattttggaaaaaatcatgtagttgatgaaaaatcatagataaaaatcaaagattttcaaaacttgagctcagattcgtgatcagcacattttttagcctagaaaaaatacccgacaaatttttaatattttttttggtcgggacaccaattcttaatgattgccaaaatattaatgtcgcagaggggaacagacctaaccatataataataacgatattttagtaaaaatctgtaaaaaaaggaacaaaaattccaaaatttgcaggcagccaaaagttttttgaagaaaactagccaaaaaatagtataaaaagaaagaaaagtctcaatttaaggctggtcccccttcgcaaattttctctaccgatattttcatctaaaaatcaataaataaatattgaccaataaatcgatcgttaatttttctctccaaattaattaatttatttacatcaattaaaacacctgaagagataaattggctgaaaaggaaggaaacagctccaaaagaagaaaaaggagaagaagccaagcgaagagagccgaaaaaagccacggaaagtgctgaaaatggtcatcgaaagcagcagcaaagccaagaagcataagggaaaaatggaaaaagagaagaaatgagagaaatgaaagagaaatcagcaaaaataaa

SEQ ID NO: 58950 - DNA, 1500 bp, Heterodera glycines
  unsure (1)..(1500): unsure at all n locations
ccttatgcttcttggctttgctgctgctttcgatgaccattttcagcactttccgtggcttttttcggctctcttcgcttggcttcttctcctttttcttcttttggagctgtttccttccttttcagccaatttatctcttcaggtgttttaattgatgtaaataaattaattaatttggagagaaaaattaacgatcgatttattggtcaatatttatttattgatttttagatgaaaatatcggtagagaaaatttgcgaagggggaccagccttaaattgagacttttctttctttttatactattttttggctagttttcttcaaaaaacttttggctgcctgcaaattttggaatttttgttcctttttttacagatttttactaaaatatcgttattattatatggttaggtctgttcccctctgcgacattaatattttggcaatcattaagaattggtgtcccgaccaaaaaaaatattaaaaatttgtcgggtattttttctaggctaaaaaatgtgctgatcacgaatctgagctcaagttttgaaaatctttgatttttatctatgatttttcatcaactacatgattttttccaaaattttaagaaaattagtcggacataaaactgatactaaaaagagctttcaaatgagctattaaatgtatggagaagtcaagttttcaatattttcaattttttacgattttttgaaatatattattaatccctaggggtcgtatgagacgggggcctggggttcgagtccgcttggctgcggtttatttttttatgacacttgatgaaaatcatagacaaaatgaaggttcatgcataatcagagcttagattcgtgatcagagtattttttaacccaaattcattgctaaacgttttaaaaaaataactttaaaaatcgaaaaaatcaagtagttgacaaaaaatcttagataaaaatcaatgattttcaaaacttgagctcagattcgtgatcagcgcattacccaaagttaattatttaacaaattttttaaactgtatttttttaagtttttagtttcggttgaaaatcaaggtcccgatctaggcttttctggccccggtaagatacagtccattttttcctaaatcccatggtagagaaaaaggagaaaatacaaaagggaaaaagtaaggcacattttgatgccattttcggttatcgcctgttgcaaatgcttcttcagttggtaagccctcgccgtgctctgatcgctttattccgtgcccccaacccaaccgaacattatttggcctttctcgacatattccgaatcggtgccatctgttgggtgataagcaatcatctcggcagtgaaggcggtctcgatgtgcttttgngacttccgcacggcgaacatttcaattaattgcaacaattaattaaatcactgacttattaattgtttagacagtccgtccattcccttcccatctttggccccattttt

SEQ ID NO: 58951 - DNA, 2214 bp, Heterodera glycines
gatatacaattctggacggatacgaagaacacgggggaaggaaagagaccaatggaggatttagaagatccatccgaaggcaatgaccaaggccaatttcctctcacaatcagccataaattcccaacttcgtcttccccaactgctgaagtcgttgtcaaagcggccaaagttttgaacaaattggacagaaacaaagaaaaagcgtcgtatttggtgttatggccggatgaagcgggagtgagaagcaatgaaagcccaaatagaagttgggaccagcgaatttcgttggtaggaaaagcggacgaagcagcggaagaaagaaagccattgcatttcagggaaacgtcgaagcaattttggagtttgaagaagccgtcagaaagcgaaaggcatgggccgaaaacgcggtaatgtacgaagtggaaaaagtgatgggacgaagaaagaattcggggaaggaagcgcctcaatatttgatcaaatggaagggatacgacgagataagttgggcgaccatggaaagtctgcaaattggcttcaaacatttgctggtggcttacgcattggaaaggccgagaacactggaaaaggtgggaaaagcggtttttttttttaaatcaacagcgggcgcgtagaattgtaataatcttcgtttccattgcataaattaacgaaagggcatttgctttcccaccatttttatgaataaatgtcctccccctcattcttcctccacgattgataatataattttataatcctcttcagaaaaaaaacaaatgaatttaccgcagtaaatttcctacaaaaaaatgattgtccagaggcgcgcattttgcatcaaactttggccgcaaaacggaaaagtaccataaaatttctccatatagaaataattaggcaattctaactgcatcaattttccgccttgaaaccccggtacttttccgttttgggcctacaactcaaaattttaaaaaagtcacattcaataatttatgagcaacgccgaagaggagaggtcctttatcgctactttaatttatgctatggaaattgtcaaaaaatgtacattaatcgcgcccattgctgatatttttttaaaattttgaggtgtaggcccaaaactgaaaagtaccgaaaccccttatacagttttactaataaattatatttattgtggcaattgcctttttataaggggaggcgagaagcgagtgaaatccgacgaaagaatgtcacagaaaagacgaaggccgaaattaagaagatcaacgaacgtttaaaagcaaaaatactttctgattttcacattttctgatgctttgaaattgaagttggttaaaaattaagagaattcgaaattctgcggcatggaaattttaaataatttatttaattattcgggaaataatttgtgaaattggccagtggataaaacaatagaaaattgtggcgaccgtaaaactcattaaaattgcggggggaagggcgatgattaagctaaaaggtgattctgtctcttggaaggcagtgatacgcgtgaagagaaaaacgatgggcatgtgagtgagagcgacggagaaagtcagacgggcgaacacagcgaaaattcgatggatgagacgaggccgaaaaaagctgaaaagaaagagaaaacggacatttggacagaagtggacaaatggacatcatgacagcggacattttactattaattattattaaaaatagctttagaatgaaataaaaaattttcgatgctacgtaaataaaaatgtaatattatatttataagaacataattcctccaaaataagcccaaaaagggaaaaaatgaacaaaagggaatttaattgctgtttgttgcatattttatcgtttcctcgtcccctcccttttgttttgctgtcatttgctcctcggtctgtacccaatgtcctaagtccacccaattaccctgaggggctgctagatctctgcgttgggtcagtctgcttttagattttgattgggtctgattgacctaatggctgggttaatgctaaacaatccgatgcctcttatagctcacagatttttataacaaaaataaaaaatggggcacgggaaactcgacgacatattaaagacctttttatggagaggagacagctgagcatcatcagtccgatgccacaagcgaacagtgttcggaaggatgccgtgtag

SEQ ID NO: 58952 - DNA, 165 bp, Heterodera glycines
atgaatgcgatttttggtccaaaaactccgcgtcatgcagtcaaaattctcaaaaaaattgactacgaagaccgtgcttcttgctatttggtgcaatggaattgcggaagtgcggaggaaaagggtccttcgacgacgtgggaatgggccaataagctgtcaccg

SEQ ID NO: 58953 - DNA, 739 bp, Heterodera glycines
atgatcaacagcattttcattgtaaattcttctcagtgagttcatcaatgttttattatttcagtcaaagggtgatccatcatttaatccgttttctttagtgatgttatattggaaaagcactacaaatcgtcatccatcgttcaatttgcgattatttttttgatgtccaaaaacaatcaccaaatgccgaaaacattcctccggtcattgcggcaccgcaccattacctttacattgtccaccacaacagcctgtatttcatagcaatttgcgtcacagaaagtatgaataagtctcattccaaaaaacaaaaacattcagctcctccattaatggttattgaggttctgcacaggataattgctattttcaccgaatattttgacgaatgttcggactctgcgattaaagaaaatattgtcattgtttttgaggtcagtgtggccatgcattatttgttgcttcatcttttacacttttgagttgctcgacgaaatcctcgattatggttacccattgtgcacagagttaaatgtgctgcaggatatgatcaaacctccgaattttttacgttccttaaaaaaccaagtcacaggacggacaaacatttcagaaatcctaccaacaggccaattatcagtgattctaacattgctataaaatttggatttggtatttttgcagaatgttccatggagaagagctgctgtaaaatatgcaaacaatgaaggcgagt

SEQ ID NO: 58954 - DNA, 771 bp, Heterodera glycines
atgtcttttgatgaatttgtagctttagcttctcgcgcagaagcaacacaaatggctgcaaaaaggcaaagttcggaacaccgaccaaaccaggaacgaaaatatatgcacccgaacaaccgtgaagttgaaacaagttccaaaaatcagttaagaccctatcaagttgtttgttacaattgtaacgaacctggtcatgtttcacggaattgcaataagacaatgtcccgccaaaaccgaaacgaattcccatcgtcttttcctcagcagaatcaacagcaaaccccaaatactgttgccactggggcaaaccgagttttcctaaactcgaaaaacggaataccctcagcaggtcgctcgcagaattttctaaagcaaaattgcattagaatggaggaagaagtgaaaaccgatgcaactgttgccggtgttaagctggaaagagaagtggttgaatttctaagaaacgaattggataaggcaaaaacgaagtcagacaaaacaggagaaagtccagtaatcggaaaaatggtcacggttgagctcaaagtttttgaaaccccggccaccgcaatgcttgacggtggagcacaaatctctttaatgggcggaaaatttttctacgaactgataacaaacggaaaattggaacttcataaaaacggatttaatcgcgtttcagctcgaatttctgatgtgaatgggaaagaattagaatgtttcggagtcatttcactccctgtcgaccgggatggttgtaaaacaactaat

SEQ ID NO: 58955 - DNA, 405 bp, Heterodera glycines
atgtcccagtcaccgtcttccatgtcatcgtcctcatcttctgcagagtcttcacactccgcagggaacaaagggggacaacccaatgtttgtgctttggttgcaaagacggggtttcaaaaaacgggggttaattcgcccagtttttcatttgtttgtgcattagtttaaattcccaagcttcagcatgtcgaaagccatggtgaccacgtgggcaaaatgcttggcaatgtgtccgacgattcggaggagggcgaggaggaagaagcagcacaacaacaacacgcggaagtagcggtggcggcgatggacgacgcctcttccgactcaccggcgacctcatcagacgaagaaatgccaatggaacagcgccagcaaaagcaaagggacgcggaggggacggaa

SEQ ID NO: 58956 - DNA, 161 bp, Heterodera glycines
  unsure (1)..(161): unsure at all n locations
gataaactttgttttatgaaaataagccggtagactttttttgtaggccgggaatacctaaaaaagttgatttccgaacctgagtccgtggaaaacaaacaagaaccctgtttccgatcccgtaccactaanncacatagatatgaattcagcagaaatgg

SEQ ID NO: 58957 - DNA, 627 bp, Heterodera glycines
gtactccgggcgtcttgtggccgcggtgttgcagcgactgttacacgcgcgcgccgcgcacatttacgggctcggctggttcgcgttgcgccatggcgagctgttgctggccaacggactgcacttggaggtgcgcgagttgcgcgtccattcgctgttcaattggtggtggacaacgacggcaccgacggtggacagcgcggccaacgacggcggtggtcaacgcatggcactgaacgtgcgtgtgtccgtcggcacaattcgtgttggcaaacaggtgtgtgaattgcgttttgtggcacggttttgaagacaaaacgggcgcattccatttactgtaaaatttaccacagatcatgagttgcttttccattaaaatttcatgtttttaatccatacccaaaaatcttgttattccttttttttgttttgttttttatttagaagaaaaaagatattgaactgacataattttcataaacaaaatgttggaaaaatgtcaattttttagttgggttacgagaaatagagagttgtttatttcgtaatttttttttaattttttagttggcggacgaagaaggcagcagaaatgctacgagtagcatttgtgatggtcagaaatga

SEQ ID NO: 58958 - DNA, 849 bp, Heterodera glycines
atggaagaagaagagattcgtcaaagaatagcgaattgttctgagttaatggcatattttgaattgaataagacaaatgttttggcaaagactttgttttatcatcagatacctgaaaagttttgttttaagaaaggaaaatggacagagagaaagacatattttaacacaattggtcgaatggtgaaggtatcaccggctgagccggaacgataccacctgaggctgttgctgttgaatgtgaagggagcatgctcctatgatgatttgaaaacagttattgatattaatggtaatgcaaaactttgtgaaactttttcagccgcatgtttagaaagaggtttgattagaaatgatgaagagtggaaaagagcattagaagaagcagagagttttgaaatgccatgtaaattgagagagttctttgcattgattttagtccattgcaatccggccaaaccggaagagctttggaatatgtttaaagactcattgtctgaagatttttgcaggagttttagaaaagaattggcttatgctaaagcatataaagagattgcacttagcattatgaaggctggaaagacgctgccgattttccaaccatggaacataaatgttgatgacgaagttgaacaactgtttgacctagccgaagaattggatttgggacaaagaaattatgctttgatgtatgatgaacagaggaatgtttgtgatgccattttgcatagaatatgtaatcctgtaaatgaacccgccttctactttcttagtggaccgggtggaacaggaaagacacatgtgaacaagacaattgtacatatgctgagaggtcaaaagaagaaa

SEQ ID NO: 58959 - DNA, 379 bp, Heterodera glycines
atgattttggaaattcgattgtacgaagaatggacgcaaaactttttctataaagaagaaaatcaaaataaaagcaaaaaaacaggtgagtatttattatttattaataaaaattaaaataaattaattttttaatgctttttaaggaaatgttagcgaagaaaaacattttgtaaaggataatttaagactaaaattttttcataatttgggagattattggatattttatgcaagcaatttttggaaaagagaaaaaattgtacgcaaagtaacgcatcaaatggccaaggatagtaaaaacaaagttgccaaaatgaaagaaatgataaccgaattaaaggaaggaaaagatttcttcttatttgtgagctaatta

SEQ ID NO: 58960 - DNA, 55 bp, Heterodera glycines
aaaatggacagggacttggtcccgagattcacgttttccgggactcccggtcccg

SEQ ID NO: 58961 - DNA, 484 bp, Heterodera glycines
  unsure (1)..(484): unsure at all n locations
attttttgcctatcaaatattcgcaataaatgcccatctatntaaaaaatattctattctattaaaatgttctgtattttgctatatattaagaatagccgtacatctaaaggcgtcagtaattgaacaaatttctcaaatttcaagaaaggttccggcagtcgccgtaaaaattgtctatataaaaacaatggcgatacgcatttctgcactaggtcctttttcaaaattgatgtgcttttattgaaaaaacatgtttaacgggccacaaattaatagacaaatttaggcacattcttaaaaaattctgcttttaattagttcatttaatagattatgcttttgctttgtttttttaaattctacgcccgcgattatctgataggacaatgatatcaataaattttcttctgaagaagcgaagagttagcccaaacgttttccttcctttctatttaatgatctatcatttcagatataacag

SEQ ID NO: 58962 - DNA, 484 bp, Heterodera glycines
attttttgcctatcaaatattcgcaataaatgcccatctatttaaaaaatattcaattctattaaaatgttctgtattttgctatatattaagaatagccctacatctaaaggcgtcagtaattgaacaaatttctcaaatttcaagaaaggttcaggcagtcgccgtaaaaattgtctatataaaaacaatggcgatacgcatttctgcactaggtcctttttcaaaattgatgtgcttttattgaaaaaacatgtttaacgggccacaaattaatagacaaattcaggcacattcttaaaaaattctgcttttaattagttcatttaatagattatgcttttgctttgtttttttaaattctacgcccgcgattatctgatatgacaatgatatcaataaattttcttctgaagaagcgaagagttagcccaaacgttttcgttcctttctatttaatgatctatcatttcagatataacag

SEQ ID NO: 58963 - DNA, 485 bp, Heterodera glycines
attttttacctatcaaatattcgcaataaatgcccatctatttaaaaaatattctattctattaaaatgttctgtattttgctatatattaagaatagccgtacatctaaaggcgtcagtaattgaacaaatttctcaaatttcaagaaaggttcaggcagtcgccgtaaaaattgtctatataaaaacaatggcgatacgcatttctgcactaggtcctttttcaaaattgatgtgcttttattgaaaaaacatgtttaacgggccacaaattaatagacaaattcatgcacattcttaaaaaattctgctttttaattagttcatttaatagattatgcttttgctttgtttttttaaattctacgcccgcgattatctgataggccaatgatatcaataaattttcttctgaagaagcgaagagttagcccaaacgttttccttcctttctatttaatgatctatcatttcagatataacag

SEQ ID NO: 58964 - DNA, 484 bp, Heterodera glycines
attttttgcctatcaaatattcgcaataaatgcccatctatttaaaaaatattctattctattaaaatgttctgtattttgctatatattaagaatagccgtacatctaaaggcgtcagtaattgaacaaatttctcaaatttcaagaaaggttcaggcagtcgccgtaaaaattgtctatataaaaacaatggcgatacgcatttctgcactaggtcctttttcaaaattgatgtgcttttattgaaaaaacatgtttaacgggccacaaattaatagacaaattcaggcacattcttaaaaaattctgcttttaattagttcatttaatagattatgcttttgctttgtttttttaaattctacgcccgcgattatctgataggacaatgatatcaataaattttcttctgaagaagcgaagagttagcccaaacgttttccttcctttctatttaatgatctatcatttcagatataacag

SEQ ID NO: 58965 - DNA, 483 bp, Heterodera glycines
ttttttgcctatcaaatattcgcaataaatgcccatctatttataaaaatattctattctattaaaatgttctgtattttgctatatattaagaatagccgtacatctaaaggcgtcagtaattgaacaaatttctcaaatttcaagaaaggttcaggcagtcgccgtaaaaattgtcatataaaaacaatggcgatacgcatttctgcactaggtcctttttcaaaattgatgtgcttttattgaaaaaacatgtttaacgggccacaaattaatagacaaattcaggcacattcttaaaaaattctgcttttaattagttcatttaatagattatgcctttgctttgtttttttaaattctacgcccgcgattatctgataggacaatgatatcaataaattttcttctgaagaagcgaagagttagcccaaacgttttccttgctttctatttaatgatctatcatttcagatataacag

SEQ ID NO: 58966 - DNA, 60 bp, Heterodera glycines; identical to SEQ ID NO: 52045

SEQ ID NO: 58967 - DNA, 1077 bp, Heterodera glycines
  unsure (1)..(1077): unsure at all n locations
gtagagaaaattttatcgaaaatttattataatttaaaatctccggcaagtttcgctgggattcaaaaaattttaattgaggcgaaaaagattgacccgaaaattacgaccgatgacgtaaataaattcctagaaaaacagagaacatacacgattcacaagcccataaggaaaagattcccgagactgaagacaataccgagtggcttccacaccgattggcagtgtgatttatgcatttttgatcagttgaaaaagcataacgacggttataaatatttattggtctgcatcgacgtgctgagtcgaatgatcttcagtgcaccggccaagtcaaagaagagtgaggacatgatcgaggcttttgatcgggtgttcgaaaagtctaaaattatcccgatgaaaatatatagtgacagtgggcttgaattccaagcaggaaaaatgaaaaaatattttgaggaaaaattcatcatcaaaaatgtaatgtatagtcctgatctgcacgccggagtcgttgaaagggcaaatcggacaataaaggagcgcttgtacagatattttacaaagaaagacactcttcgatgggtcgacgtaatagacaaaataataacaaacattaacaacagtgtgaatagaacattgggagccaaaccgtcttcaattaattttgaaaatgcccgtgcgctctgggaaaaattatataaggctagggaatttaaaattttaaaaaagaaaaaatttaaaatcggtgatatcgttcgtattaccaaggaaaagggaaaattttcaaagggatacctcccaaactttaccgaagaattgtttaaaatcgttgttgccaattcgacgacacccgattcatacaggatcgaagatttggaaggaaatttaataaaaggcatattttataaccaggaatnagtgaaaacacatggatgatttttacattgtactaccttcgaacacaccggggcaggagaacactacgtcaaaattcacagtacgactccccgagactttggaattgggcacaaattggtcagtagctctctcatcaattatttacccctactc

SEQ ID NO: 58968 - DNA, 1090 bp, Heterodera glycines
atggcccagttcaaggcaaacactctgccgatgctcaaacatttggacgaccagggcaaactacgcgtggtacgcttggaaagagcggcacacattggggcggtgtctgaaatggcaccgatgggaaaggtcggtggtctgcggcccagcaaattagccaattaaaaacagcaatttttaattgtttttctttttggaaatcaaattacataaagttgaatttaaacgaaaaaaggactcttaaaattaaactctttttgataatcgtcaaaaattgccatttttagaaatattttatgattaggcatacggcagtgccagaaagtgccgttggaagatttttgggtttttgacgaatttcccagaagaattacgcataaatatcgccgtattaaattaaacaaattattttacgattaccaataatggccgcagatcaaaaactgaacttcaaattgtgtggtttgtgaaatgttcgcactcaaaaagaatgcacgagaaaattttctgttcaattacgacccgaaaacctttggttttggtaattcttaaaaacaaattataatgggattaaaaaccggagattccgggagtcttccatttattgttagttcattttgatttgacttgcaaattagtagttcattctttgtccctctccataattttatgtttatttaattttaaaaaataatgcccttttggacattacgttcaacatacaattatggtcatatgtttagcataatttgcgccttattgggtttttgattgacaaaaaaattttgagattttgggctaatttttttaagaaaagataggttttggtgggggccggcggtgccgataggcgccgcagtgggaaaattttaagaatttttaatgaattttgttaaaaaatggccaactgatttttcataaaagtcggtcggtggggcaattgaactttagaagaaggaaaaaataatggaagggataaccactgggccaccgacgctcacattggattaacattctttgtaaaggatattatatatcaaaaaggaaaagcttcatatctcggccagaagcttcatttagcaaaaataaa

SEQ ID NO: 58969 - DNA, 290 bp, Heterodera glycines
atgcaaactgattgtgagaattaatgtcaacaataagacaatattaaaatatttaattaattttttcatttttttcagccaatgaaaagttttttattttggattgcgccgaagagaacaatgaatatgacggcaagcaaaaaattattgaacatatccatcagatccagtctgacgtacattggacatgcgatatcaaattcggcgatcgcgaccaacctgtgccattcccattgcctgaaggtgcgattttgccaaaaaaataaataaaaaacgcaacctggcaatta

SEQ ID NO: 58970 - DNA, 618 bp, Heterodera glycines
atggtcgttagaattacttgaattttgaaacttcattgttttgcgttaaattcaattttttgaaaaaatccgcattttcggcgttatcttaaaaatccgaaattagttttatattttttaaataaactttttggtaaaaaataaaaaataatccttaacaaattaattcattaattttcaaaggttcggagccgaaattctttgaaatgaaaaagtttcaaggctttaaatgcggctgtatatatgatgagacaaaggttaatctcaacttgccaattccaggtatagtattttggcaaaatatattataataataataattattattattaaattaattaattaattaagttactacgagcaccacgaccactactacgaccaagaccacaaccactaccaccacaaccaccacgacaaccactaccacgacattgccgccacatcagtgcaagcgagaaattgtttccacggacaaaaatgaaaaatttgctgacacctgtccttcgggggaaaatgcgtgctatttgtttaactgtacttcgggtaggttctatcattgaattaccgtagttaaattcactggtttccattaaaatttcaagttttgccaataaa

SEQ ID NO: 58971 - DNA, 81 bp, Heterodera glycines
atgcatagaattattgctgcggttaaaaagctcgtagttggatctgtgctagccgtccggtgcacactttgtgtgttactg

SEQ ID NO: 58972 - DNA, 1614 bp, Heterodera glycines
atgaaaatattattaatatttttattattatgcgcattaatattcaaaaaagcaattaaccaaattgaggctggcaaaataatccaagaaaaaagttttgctgaaatatttggccaaagatgggacgacggagcagaagaaaacatctgtcaaaatgatcaaataattcatggagaaattgctgatcagaataaccaatttggacaaaatgttcgacaatttgatcagatttttgatgaaaatgtggaagtgaaagaagaggagagtgaagaaatgtccacagattatgatgaattgggcgaccaattgccaatgccaacaaataatgaacaaatttatgatcaaattcgaattttaaatgacaaacagaagagaggaattgtggaaaaatttcataaaattaaggagaaaattaagcaaatgggaaagaaatatccaagaaaagaatgggtgaaaattgaaagaaaaattgcaaaaaaattgggcgtcagtcaagagaaaatttacaaatggaaaagagaatttggaatgatgaagaacaaaaattattcagttgaagaaaaaagaataatgttaaagcaatttgatcaaatatatggcaaattaaaaacgaaatttaatgaaaaattggaaggaaaaaggacaaaatgccaaaaaataatagcaaaacatttgggcacaaatatcagaagtatgaatagatggaagaaagaaataaaaaatgggaaaactatgaaaaatcaaagaatttttgagcaaaaaattgaaattgtggaaaaatattttaaattaaaaaaagaatttatgcaaaatggaaaacattcacgaaaagaatggaaagaatttagagcaaaaattaaacaaaagtttggtgtgatttttcagacaattgaaaaatgggacaagaaaattggcttaaatcaaattctttcaaagggtgaaatttttaaacaaattgttatttattaattaaatttaaaaatttttattatttaatatattacagggcagaagcattatacatttgcggaaaaaacggaaaaaataaaacaatattatcaattgaaaaaccaaaacccaaagctcaacgatcgccaaattgcggaaattttaaatattacaaaaagatctttagaaagatataaatctgaattcaagagaaaaagtgaaggtgtcacggattgactgggaatttaagctttcagggccattcattgttaggttttgataaatttaaatttcttaaaaatttatatattattcggcatttcattcattttccaatttgttgcttatgtaagagttaaaagtattatgcattaatgtttgaaggttgttttttttgttctattttttgttgtaattgccatggaacggatttatatgtgccaaaaaagctccaaaatatgcggaacgggccaactccgtctggccaactccgtctggccaactccgtctggccaactccgtctgagccaactttgagtcaatataactcttgaagttattgaccgaatcaaacaatcttgatatcattcgaaagttcttcacaggctctattagcctactaaaaattacagaaaatttcgaactataaaaaaagataaaaataaa

SEQ ID NO: 58973 - DNA, 189 bp, Heterodera glycines
aaaaagttgtcagtttaaaaccgcaaaaaaggcagaattttcaacgttttttatttttatctttttttatagttcgaaattttctgtaatttttagtaggctaatagagcctgtgaagaactttcgaatgatatcaagattgtttgattcggtcaataacttcaagagttatattgactcaaagttggc

SEQ ID NO: 58974 - DNA, 249 bp, Heterodera glycines
atggcgaatgttgatttggcattggatgaaattatctcgaagtctcgccctcctcctcctcctcccgcaccacaacagagaaactttggtggcaagcgaccatttcgaatgaatgctaccaatcgtcccgggttcggtcgacgcaattctttgggtggtggccaacgttttatgcgttccggaagtgacaatgctgtttggattaacatcgtcaaccttcacgacactgtgcttactcaagaccttcag

SEQ ID NO: 58975 - DNA, 1621 bp, Heterodera glycines
atgaaaatattattaatatttttattattatgcgcattaatattcaaaaaagcaattaaccaaattgaggctggcaaaataatccaagaaaaaagttttgctgaaatatttggccaaacatgggacgacggagcagaagaagaaaacatctgtcaaaatgatcaaataattcatggagaaattgctgatcagaataaccaatttggacaaaatgttcgacaatttgatcagatttttgatgaaaatgtggaagtgaaagaagaggagagtgaagaaatgtccacggattatgatgaattgggcgaccaattgccaatgccaacaaataatggacaaagttgtgatcgtttttcaaatgaaactaataaaaataaaagagaaactgtggaaaaatttcataaaattaaggagaaagttaagcaaatgggaaagaaatattcaacgaaagaatgggtgaaaattgaaacaaaaattgcaaaaaaattgggagtaaatcaaaggaaaatttacaaatggaaaagagaatttggaatgatgaagaacaaaaattattcagttgaagaaaaaagaataatgttaaagcaatttgatcaaatatatggcaaattaaaaatgaaattaaatggaaaattgcataaaaaaagtacaaaatgccaaaaaataatagcaaaacatttgggcataaatatcagaagtatgaatagatggaagaaagaaataaaaaatgggaaaactatgaaaaatcaaagaatttttgagcaaaaaattgaaattgtggaaaaatattttaaattaaaaaaagaatttatgcaaaatggaaaacattcacgaaaagaatggaaagaatttagagcaaaaattaaacaaaagtttggtgtgatttttcagacaattgaaaaatgggacaagaaaattggcttaaatcaaattctttcaaagggtgaaatttttaaacaaattgttatttattaattaaatttaaaaatttttattatttaatatattacagggcagaagcattatacatttgcggaaaaaacggaaaaaataaaacaatattatcaattgaaaaaccaaaacccaaagctcaacgatcgccaaattgcggaaattttaaatattacaaaaagatctttagaaagatataaatctgaattcaagagaaaaagtgaaggtgtcacggattgactgagaatatttttaagctttcagggccattcattgttaggttttgataaatttaaatttcttaaaaatttatatatcattcggcatttcattcattttccaatttgttgcttaagtaagagttaaaagtattatgcattaatgtttgaaggttgttttttttgttctattttttgttgtaattgccatggaacggatttatatgtgccaaaaaagctccaaaatatgcggaacgggccaactccgtctggccaactccgtctggccaactccgtctggccaactccgtctgagccaactttgagtcaatataactcttgaagttattgaccgaatcaaacaatcttgatatcattcgaaagttcttcacaggctctattagcctactaaaaattacagaaaatttcgaactataaaaaaagataaaaataaa

SEQ ID NO: 58976 - DNA, 371 bp, Heterodera glycines
atgaaatcttctttcctaatattatcattactattcctaataatatttgaaaacgtaattgagcaaattaactctgggaaaataaatcaagaacaaaattttgatgaaatatttggccaaggatgggacgaaagaacagaactccgaattgatcaattaattcatggacaaaatgctgatcagaatagccaatttggacaaaatgatcgaacttttgggtgaaaatgtggaagtgaaagaagaagagagtgaagaaaagtcattaaaaaaatatcaaaaagtgcaaaaagaaaaaaaagaaaatttttgatcatttttggatatcttgccaagaatttgagtgcaaaaaagctactttcgtaaaaaataaa

SEQ ID NO: 58977 - DNA, 1061 bp, Heterodera glycines
catttcaatcactgggactcaacccaccagcatttcaatcactgtggactcaacccaccagcatttcaatcactgggactcaacccaccagcatttcaatcactgggactcaacccaccagcatttcaatcactgggactcaacccaccagcatttcaatcactgggactcaacccaccagcatttcaatcactgggactcaacccaccagcatttcaatcactgggactcaacccaccagcatttcaatcactgggactcaacccaccagcatttcaatcactgggactcaacccaccagcatttcaatcactgggactcaaaccaccagcatttcaatcactgggactcaacccaccagcattccaatcactgggactcaacccaccagcatttcaatcactgggactcaacccaccagcatttcaatcactgggactcaacccaccagcatttcaatcactgggactcaacccaccagcatttcaatcactgggactcaacccaacagcatttcaatcactgggactcaacccaacagcatttcaatcactgggactcaacccaccagcatttcaatcactgggactcaacccaccagcatttcaatcactggcactcaacccaccaacatttcaatcactgggactcaacccaccagcatttcaatcactgggactcaacccaccagcatttcaatcactgggactcaacccaccagcatttcaatcactgggactcaacccatgggactcaacccacaagcatttcaatcactccagaattcaatctcaccaattcttcgaaacccaataaccggaaatgaatgataaaaccgaaagcggctcgaccgcttagcggcctcgcactcttcttttggcattttcttatggcataacagttcttccttgtttcttgacattttcttacgacacaacatttttcttctatacaaatttttcaaacaaaattctcattcattcatttaaaatttcattaccatttacataagcaaaacaaaacctttcatatcaaaatcaaatcaatttataacacaaaca

SEQ ID NO: 58978 - DNA, 92 bp, Heterodera glycines
atggcatataaaggtgctagcgcgtttgttaaaaactgccacccatacgcgtttgttaaaactgccagcgcgtttgttaaaactgccaatgg

SEQ ID NO: 58979 - DNA, 379 bp, Heterodera glycines
atgttttttcgtaaattggatcccggtaaagaatttttaaaaaattggaaaagtgagaattgcaccggagatgatgctgatatgcactgggtttaaatattgtctccaaaattattccgtccagcgctttgttgctaatcatctacgctttaaattttagtcattttgaataattcgagataaaaagattttttcagcaattaacggaattcattcaaataaaacaattatgatctatcattttgaggtactgtttttctatcttgatttaaatctaacttccattgctgatcgatccctaaaatctgttgttgttatggcagataaaatttggtggtcgcttcgatttcagtgcgacaatatgggcacaatttcgtaa

SEQ ID NO: 58980 - DNA, 464 bp, Heterodera glycines
atgaaacggcggttgtccccgcgcagcaattcaactcaaccggtgggccccatcagccgaacagcaattgtgagtaaattttgaatgaaatgtcaatttttaatttgtaatcttttcaagacaacactcacatgttgcaattgtttctgactcatggcggggccggcactgctcacagcggcgccggcggcgcccagcaacagcagcacccgcccgtaccgatcagtgccggcggttccgcgcccggcgtggcgccatcatccgccgcgttgagcgcggtcgcctccacgctgggccgaatgttcgaccaattgggtgccgcgactgcgggcagcggaacaaacaacaacaacggcaccagcaacaatgttttgcagcaacagcagcagcaatggggaggcgagaagcaacagcaggtggacagaaaagaagaagaagcagtactaattaataatagcacctaa

SEQ ID NO: 58981 - DNA, 1282 bp, Heterodera glycines
  unsure (1)..(1282): unsure at all n locations
aaagccaaattaactggaacattcggacccantcgagaagcccttccctagaaagtgaccaaattcaaatttagctgtttcgacttcgttgcagtaatggacgaagccaatgaacaagcagaggcactaaggcgagagaacaaaacgttgatgcaagagctaaaggaagtgacggagcagcttaacgacgggggaagagggacccacgaattgggcaaggcgaagcgaaagttggagcaggagaaggaggagttgcaattggcactggaagatgccgaatcggctttagaggcggaagagtccaaagtgctaagggcacaggtcggtaggcaaatgtggccgcggggcaaacacattttggcatacattgattttaaggttgaaatttcgcaaattcgttcggaaatagaaaaacgaatagcggagaaagaggaggagtttgagaacactcgcaaaatgcaccagcgagcgttggaatcgctgcaagtcactttagaatctgagagtcgggccaagactgagttggccaaaaccaggaagaagctcgagagtgacattggggtgggttggccaaagttcgggacttaacggaatcacaggaattggaactcgcgttggaccaagcgaacaaggccaatgttgaagcgcagaagcatttgaagcgatgccaggagcagattcgcgaattgcagcaccaagtggacgaggaacaacagcttcgggagcaggttcaggaacaatggcaagtgacggagaaaagagtccaagtgggacagcaagagaaggaagaagcattgatggaggcggagcaggtgaggcacttggcagggcaggcaaagccagggatgaagccgaaagagccaaattgaggcagaaagagcgcgccgtcacgcagagtcggaggcgcaggaaatgcgcgagacgatgggagggctggaaaatgccaatgcggcaatgaacactctcagacgccgactagagaacgaattgggccagaccaaaatggagttggcggaaacgacggcagaactgcgcgggatggaagagacggcacggagagcggcgacagacgcggcacggctggcggaagagttgcggcacgagcaggaacacgcgcaaggcgtggagagacagcgcaatgcgttggagcagcaagtgaaggtcagcagcagtggcaaattgaacagtcagcttanacggngacaaattgaaggagacgcaactgcgcatggacgagatggacactttgacactgaaaagcggaaagaaagcaatggcaaag

SEQ ID NO: 58982 - DNA, 615 bp, Heterodera glycines
atgattagaagaggtacaacagtgattaaaagaggtacaacagtgattaggagaggtacaacagtgattaggagaggtacaacagtgattaaaagaggtacaacagtgattagaagaggtacaacagtgattaaaagtggtacaacagtgattagaagaggtacaacagtgattaggagaggtacaaaagtgattagaagaggtacaacagtgattaggagaggtacaacagtgattaggagaggtacaacagtgattaggagaggtacaaaagtgattagaagaggtacaacagtgattaggagaggtacaacagtgattaggagaggtacaaaagtgattagaagaggtacaaaatgattagaagaggtacaaaatgattagaagaggtacaacagtgattaaaagaggtacaaaatgattagaagaggtacaacagtgattaaaagaggtacaacagtgattagaagaggtacaacagtgattaaaagaggtacaaaatgattagaagaggtacaacagtgattaaaagaggtacaacagtgattagaagaggtacaacagtgattaaaagtggtacaaaaattgaatgcaatttattataaatttaaaaaa

SEQ ID NO: 58983 - DNA, 453 bp, Heterodera glycines
atgattgtaccctttttaaccattgttgtacaattccaacaatttttgtacctctccaacaattattgtacattttcgacagtggttgtacctcttctaatcactgttgcacctcttctaatcactgttgtacctcttttgatcactgttgtacctcttttgatcactgttgtacctcttctgatcactgttgtacctcttctaatcactgttgcacctcttctaatcactgttgtacctcttttgatcactgttgtacctcttctgatcactgttgtacctcttcaaatcactgttgtgcctttcccttccgtggttgcacctcttctaatcactgttgtacctcttctaatcacttttgtatcacttttttactgttgtacctcttctaatcactggtgtacctcttctaatcacttttgtatcactttttcaatgtcgtacctcttctaa

SEQ ID NO: 58984 - DNA, 643 bp, Heterodera glycines
cgcccgcttcgcggcatagtacgggcgcttcgcgcccgtttttcaaatcttgttttgctctaacgggcgcttcgcgcccgttttttaaatttgttgagctcagacgggcgattcgcgcccgttttttaaacttgttgagatcggacgggcgcttcgcccccgttttttaaatttatttgggccttttcggccgcttcgcggcatagtacgggcgcttcgcgcccgtttttcaaatcttgttttgctctaacgggcgcttcgcgcccgttttttaaatttgttgagctcagacgggcgctttgcgcccgtttttaaatttatttgggccttttcggccgcttcgcggcctcagacgggcgctttgcgcccgtttttaaatttatttgggccttttcggccgcttcgcggcatagtacgggcgcttcgcgcccgtttttcaaatcttgttttgctctaacgggcgcttcgcgcccgttttttaaatttgttgagctcagacgggcgattcgcgcccgttttttaaacttgttgagatcggacgggcgcttcgcccccgttttttaaatttgttgagctcagacgggcgctttgcgcccgtttttaaatttatttgggccttttcggccgcttcgcggcctcagac

SEQ ID NO: 58985 - DNA, 1127 bp, Heterodera glycines
atgggcaaaggggtggcggcactgactttggacgaggactaccaacgacggcgaatgcaggcccggcagcagccgaccagcatcggtgaaggaatgtttcgcggggttcgcggcgttggcacaagcgttgtggaaggagtcaccggtcagccggcacttataattagcacatttggactcatttgctaattctatatcacactgacaattttgttttgttgtttctcaggtgtcgtgtccaaacctgtcgagggcgttaagcagggcggcctgctcggcgggatcaaaggcatcggtaggtcaaactcataggaacggggccttgtataaagcgttctggtcaactttatgtttaggaaagggaatggtcggtgcaattgctcgtcccgtgtcgggggtggtcgatttggtcacaacgacggcggacaatgtcagaaagtgagcgagggggagaagggacacgacgggtccattgttaatccacttgttttcagtgccattagcaatgttgaggacgtaaagccaattcgcccgccacgtgtcatttcccatgacaaaatcatccgaccatacgtttttgaggaggctgtcggatacaaaatattccgggttaaaattcagtctattaatttccttcagttaaacacatttttgtaggagacggaccgtggtcattttgctgacactgatcactacctgacttatgggggcatcacaaaacatttggtcatcattgtgacggacaagtgaataaatgatcatcaacccatccctacaaagtgtaccataataacccattcattcttaggcacgtaattgaggctcgacaacacgaactgacgggtaattggagtgcagattggaacccggaatatgccgaactcaaaaggccgactcgggtggactcaaatgggaaatttggttggcaattaaacttaagaatgcctaaatgaatttcaattttaggcattgagctcagactgaagaaggagaaaaagggattttcgtttttctcttcgaaagatgccaatgtcaaaggcaaaattgtgcaattcggtgctgaacacgtcgcgcaacgagtgttcgagcacattcttcgcgcctgggaatacggtgtcgcggattaa

SEQ ID NO: 58986 - DNA, 1189 bp, Heterodera glycines
agaaattacggcggtattagggtttccttaaaacatttttcggactcattaaaggttcgagaaaacttatcaagaccggaagtctgcgctcaaaaggattaatgaaagcctttttgaaatgttccttgaaaaaggcgaatcaaccttacaataaaggacatggatttacggagatgggctcataacaggaaattaaaatacccaattttaaagcaagccgtcgttggttgaaaaatttcaaatcagccaaaagaattgttgtcagaaggttttgatctacagtaatcctttttactcaattttttgagatcacaaaattcgtgaacaaaaaatatgccgtggaaaaggaaaaattgctggaaacatccaacaattttgttcaaggagtaataaacatggtcgaggagttgagcccggaccttgttctcaacagtgatcaatcaggatttgagcttgagcttcattcacaacatacattagaaatttcttggacaaaaagagtggaaagcagggcgcaaaatatttcagcaacaactcacagctatacaatctgtccaattgtttcagtacacggagtgttgtattcaccgctgcttataatcatagcagaaaaaaatggccaattccctcaaaaagggatttttaaggttactgtatattttctgtaatttgtctatttttcatcctctaggccccaaatataacggctattgctggccgttctcatatcatgacaaaagaaatggcaaaattctttgttgaaaattttttgcttaaagtcattggggacaaaaaagccattgtgttgcttgattcttggccacaatggaaaacggccattggtggaacctttggccaggaatgctcttcatcaaataaagagtgtggcagggacaatatttgcatccagacaatccaacctggttgtactggctttgttcagccatgcgatttgtatttatttcggttagttcaaaaaaagttattttaatttttaatggttgacagaacatggaaagaattagttcgaaaaatttctgatcgaattgtacttgatgaactccctgtaaacatttatcagcggatgaaatcatcaaacttcaaagtcttatccattatcaattatgcgcaccgaaatttaagcagtttttacgttatgcatggtataaagggggttatttgcgtaagc

SEQ ID NO: 58987 - DNA, 282 bp, Heterodera glycines
atgaacagacggtaagcaatttcttttaaaaaattgcaaattttcatttacccaattttcttatgtttcagttggatttgtggtgacgtttggatggacattctgccatcttttgaccatgctcaacttggactcaaaatggcattgctttccgaccgtttcgatgttttggtggacaaacatttcgatgcaaaaagcgaattgacaatttggagaagaaatcgaattcgcaaggacaaagggccaaaagcgaaactgtctgttctgatcgatgacaaatgg

SEQ ID NO: 58988 - DNA, 408 bp, Heterodera glycines
atgctttttaaattttcaattttattttgcacaatttttttgtgcttttgcgtcgacgacggcccaaaaaatgacggaaaaaagcaaattttgacaaattgggaagaaaataatcaactaactgagttcgaacttgatgacgaatattcgcattatctttacgatttaatgggaaatgaaaacgacgaagacaaatgggccaaaatagaaacgaaaatagacaaagcaattggagggggacaatggccaaaggaggggcacaaaagcggaaacggggaaaatggggacgaaaatgggcaaaatgagtgccgaaatgggcaaaatgggggcaaaaatgcgcaaaataagtgccgaaatgggcaaaatggagacaaaaatgggcaaaatggggataaaaaagtaaaataa

SEQ ID NO: 58989 - DNA, 208 bp, Heterodera glycines
tgtggagcaaaatggtgacaactgctacattgtgatgtcctgcatgaagacagacaattattcgactaattggaaggattttttgtctgccaatggcactctggacatgacaaaggcataattcggttaaaagtgaacggattgattgattgatttgaccatcgttttaatttaagcctatgtgtgatttcattgatggtttaaaata

SEQ ID NO: 58990 - DNA, 507 bp, Heterodera glycines
atgcttttgtctccgacaaatttattatttttctcaattcttagtcaaatgtgttccgttatatgggcaacaacatgttggcctatcggtcatgtgacgaattggcggagcttaacttgcgcatgtggatgtcctgttgtgatgaaacttgctcagcacgtgcgtcgactggcattgacagtgccaatgatgggaatgagcaaagcagaaggtggaataataaaaaaattgaaaaattgccatagaaaatattataattaaaaaacattggcattttataacaaatatgcatattcaaatgcatgaaatttgaataactttctattaatgaacttttttttttgcacttttttgattatgtaaatatttaaatcgaaaaattaattaaacaaattttactttttaggcgtaagcgcgctgttcatctatatgcaaatgggaataattaattggaaaatatgcacaactaaaaagatcaattctaccataaattgttgctttaaatga

SEQ ID NO: 58991 - DNA, 630 bp, Heterodera glycines
atggtccaattcattcgattgaagctgaacctgaccgaacttgtccgacgaatgaatctgatcggctatggacgggatgaaacaatgctcgtcactttgcattcggctgatcagcttaacgcgccgggcggatacacgcagacatgcttcaaccaaaaaaaggcagggcccacaaaatatttgacgaggttcgcattctcatttggatcactcacagtctctaaaaaatgccgaacataaccccattaccaagctttcagggagactttgtgggctccggatacttcctgtccctctggccattttcgtcatggcatttgcaattttggcgtcgaagatttggccagactcgccaaattcccgcactttttcttcaacaaattttggcccgccttcgattttggcgctttgttgtgtgtgtacgaacggttgttcaacatgacccatttgtacaccggcgcggaacaattggccaaaatgacaccggtggtgaacaaatcgtttgtccaacaactgcccaatgttcgttggtttggtgttggaaaaaaaataaaaagtgaaaaattggcaaaatattaaaggaaactcaaagagaataattcttttagtttttaaatccacaaaattaaa

SEQ ID NO: 58992 - DNA, 1250 bp, Heterodera glycines
atgattaaacgacgcattcgtcgcgaggaggacccggctgaaaatgacctggatatgtcctgcacggcaattcaaagccgaaacagattttggcacggtgccaaagatgacgaacagggggagaaggatgagaaggagcatgccaattacccaatggcacaaattcgaacagtgtacaaggcaagaaatggtgaaattgggattaatattggatgtgaatattcaaatagtctgaaacccattcggccattggttcgaaaagaattcaattttcaatgggtgtaaatggatcaaaggtcaatttggtcttacatttccatgcttattctttatgttacgatttccggctcacaactcaaatttcgaaccaatccctttcgttttgaaaaatgcccggctaattattcgcgctactgtcagcaggacttgtacttcttagttggatttgattctctcagggttaaaattctctttactctcgggcttttcttgtctcaatttttctggtccaattctcagtcttaatctcggcaactgtcattattggccatcactaattattacccttccctattccattctctccccaggactatgtggtggttgagttggaattcgccgccacattttccccgctcaattggtactgtttcgtcgtcgatgccgcgtcccccgcgctgtttaagcgccgcgtgcgcgcgttggccaaatgctttccgaatgtaattatgggagacgagcgcccgatgaaaagtgacggggagggcatgatggaagcggtgttggactgttttgagcgattggacacgccaaaacgcaaatgggaatatgtcactctgttgcaagtgaataaattggccataacttatataatatatgtactacggtatatgtgcatgtacagtatgacaagacacattagcacagggtttcaacagatcacaaaaataatttttgattttaattatgtgttaattctctcgtctgatttttatgaaatctatgacccaaaaacagaaggtattatcatattaccaacccagaactcaattaatcattattttttattattttcttaatagaatcacgacacagcaatcaaaacgcgtgttcaaatggcacaaattttcgcttggatggacggagcaaacgatgttcaagttttagtgccaccgcctggacgagttgacaaaattacaggaatggactggagttttgaggcactgaatttgttcaaaaatggtacataa

SEQ ID NO: 58993 - DNA, 570 bp, Heterodera glycines
atgcacttttccactattaatttaatctatttcataattgctttaaatgtttcacatggcaatttgtcgccctgcctgccgtaagtttgaaatttaatatttattaaattttttctaaattttaaagtattcgtctgacaaatggcactgacggcggtgtgcgagtgatcaaattatgcacatctgctgagaaatgccccgaaaacaatggaacggatggagccacgaaaaaggcctatggaattgaatttcgactttcacaaaacagcggaaattgtgacgatgggtgggaagagaaattacaataacaaataaataagcatttttaaatgcctctttagacttttgatttgttatccggcattgcttcaacgaggcaatcacttggacattgcagccaatttcaaagtgaaaagaacattcacaattggtgatcaaaaggcaaattattcaaaaaatatgaacgcttaattatttattaatcaatcaaggacaatccgattacgaacgaatgcgcggaagtgatggccaagaatggccataaaaatagttcaactcattggcgtggca

SEQ ID NO: 58994 - DNA, 1207 bp, Heterodera glycines
tctttggtcgcccgttcgagtcccttcaagcaatggcttttccgtttggcttatgcccagaaattggctctcctgcgcaaaggcattgtcacaaatcggtcaatttgggacagattggtattctccaagatacagcagcaattgggcggcaaagtcagactgatcggtgagcaaacgaagatcaaatgaacacacaaaaagtgatcaatcgattgattaatttgacttgtgcaaggaaatcacaaccgtcttgatttctctaaatgtccatttttttctttgctctctctttctctctgtttctctaactgatctgtctttttaatattccaaaatcacttctccctccctgcctccctcccctttctccgtttatttttccccaatgtctctctctctctcactctctctctttttcctgctattccccccccccccccattttcaagtcaccggctctgccccaattgcgccggaagtgctgcaggacttgcgcattgcattcggcaccacaatcatcgaaggctatggccaaacggaatgcactgcaatggtcaccgtcacttggccaggcgacgtcgacggcggccattgcggggcgccggccgcgtgttcactggtcaaattggccgatgtgccggaactgaattatttcacggtcagtcggagggaaagcgaatggcggaaaaagggcacaaaatagaccatgccaatcagggcttggcataattacggattacggaaactacgacatttttggatcccgtaattacggatataatttccgtaattaaatatctacccatccctgatgctaaatactcttttataaattggcatttttcagagtgatcggaagggcgaagtgctggtgaagggaccgtcggtgaccaaaggctattaccgcgacgcggaaaagaccgccgaattgttcgatgagaacggctttttgcacaccggagacattggccaattgttgccggatggacggttgaaaatcatcgaccggaagaagcacattttcaaattggctcaggtaaaagggggtcgaagaggacaaaggttaatttggagaccaattagcgaacaattaaccgtaattaagggcgaatatgtggcaccggagaaaatcgaaagtgtttatgtgcaatgcccacttgtccagcaagtttatgtggacggcgacagtttggaacgaaatttggtg

SEQ ID NO: 58995 - DNA, 839 bp, Heterodera glycines
atttaaaatgcgcaaaaggcaaaaaatgccgatggttcgcccaaactcaacgccagcttcttctctcgtcttttctattcgtggttcggtccaatccttcaaatcggtcgcaagcgtcccctaactgaacacgacctattcgagctggacactgacaacaaatgtcacttccttaccgcacaatgggaaaagctttggctgcctgccgccgaaagttgaataaataatgcaaaacgctttaaatttcgtcacatcaacagaataccaagagcggcgccgtcacaaatacttcatttggcggaccagcaaacgtggtttgatgccgaaacgcagcttcgacagcgaatgcgccgtgccaatgccttccattgtgttcactctgttcaaggtcagtcggtcatttgctgtcattcactgcccaaccaaccatccgtcgttcacagttgttcaaatacgatctgttggtggctgcctttgtcaaactgttctacgacattctcctttttgccaatcctttgcttctgaatttgctagtcaatttcatctccgacccgaacgcccatctttggcaagggatttgctactcgttggctatttttctctgctctgaaattcgatcgtaagaattggattaatataaaacaaatatttttgatttctttttcagtatttgcgtcaattaccactacaatgtgatgttccaaatgggcgccaaagttcaaagtttgctgacgatggccatctacaaaaaggcgtttaaactgtcaaatggcacgcggcgagacagaactgtcggtgaatagtcaatctgatggccattgatgttgaacgattccaaa

SEQ ID NO: 58996 - DNA, 231 bp, Heterodera glycines
tggattaaaacgttaaaagtaagtgaattgcgcggaaaaaagaaactgtattttccaaaaaatcgtcaatcatatgaaattactgtctttcacaatgaacaattcattgttcgaaaactagcaatttatgagcgatcgaaattgaagaattatttggagattgagccagagcaatgggaacaaaaacagtccggtgatgtgtttactttccaacgtagtgatgatggacag

SEQ ID NO: 58997 - DNA, 1080 bp, Heterodera glycines
atgcatcaaattttcttgaaaaattgctttacccttcgcattcatccttcattatcgtcaaataacaccactaatgatgatggacatatttattttgtggccgttaaatgcaatggcattgagggaggtcaattgtatcggacaatcactgaggaaattgcgcaaattgtgctccatgagcaaaacgaatgtgaagcttatgacataaaagtgtacaaaattagcaacgaaatatcaaaaaaagacatggtaaaaataattcttatttttcaatttttggggtgtctttttccaatattatgggttttttaaagtgagcatatcacctattttctataaaaaaaaattggtggattgcataacaaaaaaataaaaattttcattaaccaattaatcttactatttgggtttgcttcattacttcgcacaatttcaatcaatttcatctattaaatcctttaaatgctcagtttataattaaatcataatcattttagaaggctttcactggcggattattggtattatattttgttattaaaattttgatttttaataatttacattaagccattaaatggtgatcaattcaaggatggacgacaaattttaggagtgcaaattcctaatggccacacttaccaattcagttttgttacatttgaagcgcaacaaccatcaacaccatcatcatcatggaacacaaaagcggtaacaattgaaagagcattcggaatttaaaattttaaaattgaataggaaatgaagcgcttatcctctgaaattgatatattgggaactgaagtaaagcagctgaagaacgatgttgagcaaatgcgggaatcaattaagacggggctgacagagatcaaaaattttctaagcaacaaattgaaaaattgaacaatttttcaactctttttgagtgattcatttatgttctatgacatactgtaatgtaacggtatataaaatctgtatcattatcttttttttattattataaagagcataactgacataaattggtggtagatgatgcttaaatctgatcctttaattgaaattttgaggcaatta

SEQ ID NO: 58998 - DNA, 351 bp, Heterodera glycines
taatagattattaattaattaaattaatttgttctgtactgaaatgacccgccccttctgatcaccactcattcgcacttttgtcacttcgattcaccacgtttgaaaatgtacagtcaggggcaaaagtatgttttgcttcagttgcttttctgatggaccctcccgatctatccgagactcagccgaccattccgaaaaggggccaccaccaccggcgtcgcgtggaaatctctgcctcgcgtttgccccgcgctgtgctcgtccgcatctttgggcatttgagtgtggctgagttgggtgctgtttctctcgtttgttgcagttggaaattcatcgtcgactcaaatg

SEQ ID NO: 58999 - DNA, 133 bp, Heterodera glycines
atgtttcatgctcaccagttcgttctcgtggtcattttggcattgtccattaacgaggtgaactgtatgccaaaaagaaaggagaaaactactgtaatcgtaaacgaaggtgaatcaccaataaagcatgtcg

SEQ ID NO: 59000 - DNA, 508 bp, Heterodera glycines
atggaaccattttatcgaataggttggatcagtgacccaccggacttagccctaacatttggggaagatctgacatttattacttcttgtttaagaagattggtagttagccaacaaggattcgcaatcgaagaaagagaatttgtaaaattcaaccgacaattggacagaactcgccgaaatgttaattttgatgaaccgttggacggtgaagttcgcaccgaatggatttcacagaacattttggaaatttggccatgttcaccagtttatgagtatggattcgcacaaaccaaggataaatgttacaagaaaatcccagtaaaggtgacattagttaggaaagacaagccaattctggcttatttggacccaaaaaccctcataataagtgcagaagctagaaaagttgattgtcagacagatcgctacaaacatatcgttcttgaaggtcgactttatgagattgatcaagttttaggtattaagagtcctgttaaggaaataa

SEQ ID NO: 59001 - DNA, 527 bp, Heterodera glycines
  unsure (1)..(527): unsure at all n locations
atnctgtaagtaaaatattttccaaaaagtgctaatttttccgtttctgttgaatccattatcaaatgcttttttttatcagagcattaataaatttcgatttatcatttatataactaaaatatttttaatgattaaaataatattaatttatttatagatcctgcactcgaattaacaccatttttttcaataaaccaccttttcattatccattttctattaagatcacatgaacttcactatttccttaatttttatcgcgtaaatcttataaaagatttaaataatattaattttttaagattctacaccgcgtctgaaaccttcaaatctgtaagtaaaatattttccaaaaagtgctaatttttccgttttgttgaatccattatcaaatgcttttttttatcagagcattaataaatttcgatttatcatttatataactaaaatatttttaatgattaaaataatattaatttatttatagattctgcacgcgaattaacaccatttttttcaataaa

SEQ ID NO: 59002 - DNA, 573 bp, Heterodera glycines
gagtcgttggggataaaggaagaccctaacgaagtcgatgatcaaacagcaatgcagctgtttgacaagtcaatccgtcgtgagaacgacggacgttattcagtgaaatggccgtggaaagaagatataccaaatcttccttccaattacagaatggctttctcaaggttgatgtcgaccttgaataagctcagacattctcctgaacttctacagcaatataacagcacaatccacgatcagctatcaaaaggcatcattgaagaggccagggaagcacatggcactcttgagcactacattccgcatcaaggagtgctggctaagggcaaaaaacttcgcgtcgtttatgatgcgagtgctcacacaaggggtacaaacagtttgaatgactgtttgtacagaggtccggtacttttacctgatctcatcggaatgcttttgcgattccgatgccctgcatttcctcttctcgcggatatccaagctgctttcttgcagatttccttggaaccagaggatagggaagtcacaaagtttttgtggctaaagacaccgaaaaggaggcattaa

SEQ ID NO: 59003 - DNA, 170 bp, Heterodera glycines
atgttgcgtcccgcccatgccaacaatgagcagcaacaatcgctctgtgcccaactgcccaccaatgtttggtgcactccgtccgccatcggtcgcatggccaccattttgcgccaaatgcacgcggtggtcagcgaggaaatgggccgggaattgatgggacggcaacg

SEQ ID NO: 59004 - DNA, 1974 bp, Heterodera glycines
atggcgaatttcgaggaatacgaagccccaacatttggtgaggatgaagaaaagtgacgagaaaaatgcccaatcaaatcagcaccaattgaataactcgggattttttgcttaaaattttttgagcaaaaaataaggcgcaaaaaagtgggttttatataaccgtttaagaaaaaaacttttagaatttttttgttacattttgtatttcctgctgttgctggatttgaatttggctgcgataacgaggagtgtcgttcccttcgtcttttagtaaaatttcattccgaaaagacggaaatccaagaagaaaaaggtgccaccgttttttgatcaccccctttttcacaaatgaattcattccttttttagcccaaagccggagcagcggtgccaacgccacaaacatcggcagcggacggaccaccgggagcagcggaagcgccctcatcagtgaaatcgtcagagaaaagcggcggcacaaaaaaaaagtggacgaacgaacgactttttgaataaacaaatttgctggctttaaggaccagcaccgaaggactccaccatgtcgcgatcgctaacctacaaaacgcatgtggtatcgaaggacctcgccctccgtaagcaaacgaatccgaaatggcttagacaaatgattcattgctttttcccccatttcagaatccgagccgaactatggaacgcttgccggtttggacaaggaaattttcgcgaaggaacagcaggcgaaaggtgggggtcggaaacgaacggcacggcgcaatcgcaatccattgaaatttgtccacctcccatttcaggaggaatgccaccgccaccgatgggagctccacagccgcaacagcaggcgcccggaccggcaatgactccaagtgaaataaaaaaggcgcaaatctcaaatgtttgactttccatcccaatttcagcaactgatccgaactactggaccctcaacaacttggacgccgacatcttcacgaagaacgcgccagcaaaaccggcagcggcaccaaaggcgggaccagcgccacacggaggcggcggacaggcactgacaccaagtgaaaaaaatgccgaacattttcaaattttacgggcttttccttcccatttcagcgactgatccgaactacgggacgcttcagaacttggacgcggaaatttttgtgaagaaatagtgccatcgacagcgaacaccccggcaaggcgtaccgatgtgtgatattatgaggaaattggattgattgatgttaaatgtttgcctgtattgcttattgtaatctgttgttgccgtatattcgctgttgtacatatgtatgtatattgtgttgtacacactgtaatgttctcatcatactataaatgttttggtctgtaaaaatgttcaaaatttcgactttttgcaatttatgttatgacttttatgataattgtctaatcaccagacagtagcatagaattagcttctaaacatgttaagcctcagaatgataccaagatttaacatgttttttttcggaaaatgcccaaattggtcaaccgagttttcgaatatgtaagcactgtttttgataatcaaatgcagattatgacataattctcaattttctatttcccagccagcgaagccctataaaaggaggcattttccaccgaccgacccacacatttccctcatttgtcacaagtacatttattgtgcctaattttatttgtgacgtcggcatttgtacatattacgacagttcgtcgtcgactgctgcatattattatttgttgtcttcaccacacactcgtcaagctgctggttgagcgcaatgtccaagagacggcttcgacaggtgtcactcatttggggatgacgttgtttttcaatttgaaaaagtcattcttggcggcatctcatgaatccaatcaaaatttgcgaatccgatcaaatttttgggtcaacaatta

SEQ ID NO: 59005 - DNA, 1206 bp, Heterodera glycines
aatacaattgattccattcacaaggcggtgaaagatggtcaattggaattggtgaaggtgaaaaagcactaattcattaataaattttatgtcacttaactaattaccaataaaacaaactgattttattttttaatttaaaaaattatttaattaattttatttatttattgaaacatttttgtcaattaattataatatttaagttcaattaaatttaataatgttccaacaaaaatgaaaataattaatcaattagtaccttaataaataaaataaatggaaaaatttaataaaggccctaataatttgagggcatgatgaccggaaagcgtttggcatggcacgcgaccggcacgggtgcacgcccctgcacacggccatcattcacgaacggagcgatgtgagatcattattctgctgatcacaaggacaaaccgaactgatcagaactgctgaaaacagcagatagtggcggacaacaatttttgtttaattttgaaaaatcaaatatttaaattttcttaaataatgccaaaattataccgttcacaattttcaaaattctatattatgccgtacacaattttgaaaattttcacttgtgaaaaataaaaaataaatacgaaaataatcttgttgggcaaagatcgaaaaaacattttaaaaacaaaaatttaaattaaaaaaccgaaattttataaaatataaaaatctaaaaattttcaaaacaaaaatttatataatatttttgttcacagattatccgcttcattgctgcaacttatccgaatgttctcaatgcgcctgactatgtttgtatagaattttttttttaatttaaaatttttaagaataaacggaccgccatgcattacgcggccgctgcgcgtgacggcgggcattacctgaaaattttgggcaaagctggcgccgatccaatggcagtggacaatgtaaaaaatggggggaggggctaatttaattttaaatttataaataaaatatattttaaattaaaattttaattcaattaaaataattttgcaggaaggtcgagccccggactattatcgtagaaacaccgtttttgacttgaagctgttgaaggagcgcgacgtggaagagggtcagccagtgctaattatattttactctcttcgacactctcgaccagaacctggcccgggattttgcgagatccca

SEQ ID NO: 59006 - DNA, 56 bp, Heterodera glycines; identical to SEQ ID NO: 52733

SEQ ID NO: 59007 - DNA, 106 bp, Heterodera glycines
atggacggaggaaaagccaaatttaatggcggaggaaaagccaaatttaatggcggaggaaaagccaaatttaatggcggaggaaaagccaaatttaatggcggag

SEQ ID NO: 59008 - DNA, 822 bp, Heterodera glycines
aaacaaaaaaatcgattttttcaagtgtccgtttggggtactcaaacaattatggggagcaaaaatccaacgcagaattaaagtacaggctatagggaagctattccggaaggattcggtctccccataaatctgggcgcatcggttcggggggactgccccgaaaacaaaaaaatcgattttttcaagtgtccgtttggggtactcaaacaattatggggagcaaaaatccaacgcagaattaaagtacaggctatagggaagctattcccgaaggattcggtctccccataaatctgggcgcatcggttcggggggactgccccgaaaacaaaaataaatcgattttttcaagtgtccgtttggggtactcaaacaattatggggagcaaaaatccaacgcagaattaaagtacaggctatagtgaagctattccggaaggattcggtctccccataaatctgggcgcatcggttcagggggactgccccgaaaacccaaaaaaaaattttttggataaaaattatttaaatgaactgactagataatatttaaaataggttatttctcttcctttcagtatccctgcaaagtttggtgcgcttctgatcagtttctgaaaaaaaagttaagcctaaactttttggcctgtttaaaaaggaattaaaaatttttaaaaattttattcatctccctttttgatagaaaaagcatcagagtgcctaaactaacatgtaaataaaatttggtgcgtttcagaaccctttctgaaaaaatatttaagaattaattttgcaaaaaataaataaaaacgaaagact

SEQ ID NO: 59009 - DNA, 817 bp, Heterodera glycines
atgtgcgccagtgggaatccatcagtaaaacaatccgtcggttatggacaatctgtcagtggacaatccgtcaacaaattttttttttttaattctctgacgaaatgtcctttgacggaacgtcagtctactgacgaattgttcttcactgatgaattgtccgtcactaatagaattgtcttccgaaagattatccactgacggattgtccggaatccggataccgtcaatggtgggaccgcattccgggagtttttgcgacggaattacacattccggcatttatggcttgccgaacacctccatggcatacacatttaaaaatggcattttaaggcgaaatcaaaacattcaactggctccactgctggtggtggactatcagtgccggcgccaaacaatcggaagaaaacaccaaatcaacaacaacagcaaaaaggaaacaacgaattgggaggagaaggaagagaaaatggggggaaaagagaggaaaagggaggagaaaaaggagcagcagcggaagcagaggaaaaggaaaattgcagctgaacaccatcagaaacaacaacaacaaaagcaagaagttcaagcagtacagcagcaacaacaaaagcaaattttggtgggaatggagatgaagatggataacagcaaaaatggagaaacaagggaagaggtggaaacggaaggaaatagcactggggaaggaggagagacggaagagaaagagaggaaaaggaaaaaatcccgcgtcaaaatcccgaaaattaatgtcacaattttcaagcagagagaaattcatacactcgatagatag

SEQ ID NO: 59010 - DNA, 386 bp, Heterodera glycines
attctgtgtcttccctgtacaccattcgttgtctcccccgccagggctttcatttttcggtctcctttttggcgaactcctgaagagagaatgggcgttcgttcgttctttgctttttgctttggtttccccattttctcatttcatttttccttttcccccaattcattcgttatttttgttatttttatggtaattcttgagcatttaatcaattaattaattaattctcgttttgccctctctttgcaattctacaaaactttgaaaacaaattttgttgacgtttttaaccaaaaattgacgaaggaaagggcagaaaaaggtggcagcggagacgaaagagtcagaataaatcgctgacgaagtttgaaacattaattatt

SEQ ID NO: 59011 - DNA, 129 bp, Heterodera glycines
tatggcacggaaagacttccgatttccgacatttttggggtcggaattccgacttccgaaatttttgatgaaaagtcggaaatttttttaatttttttttcaaaaaactagtaagttttgtacaatttc

SEQ ID NO: 59012 - DNA, 991 bp, Heterodera glycines
  unsure (1)..(991): unsure at all n locations
atgcaaaaacaaagaattcctttaagaaatttgcaaaaaatgcgatttctacggctgtatggacgaggtggggagtcaacgaagtgtttgttgccgtgccggtcactcgtttcgttgctgttataatgagccggttcgtggtgttccaaattttgtgatttttaatcataaaaaaaaattagacacctccctctaagaatggaaaagttttctaaaattttcgacaaaaaaaatgaaaaatgtttactgtatttggctcccatttttgacgttttttttttaataatttttaattaactttttttctacatttttttgtttgtttgtctaaaagcccgagccaaactttataaatttttttcttacaaaagaaaaaaaatatttataaaaattcaaaataatttttaaatatttttaatagattttttgactagcatatttttgcgaaaattttgaatgaataacatttgttttcacttttcagccacgcattacaactactaccacggtaaagagctggaaatgttaattctttaattattgaaatgaatgactatggctaattgatagtaaattgttaaacaaaataatttcattttttcagacaacgttgttctcaaaattgttttcaactaaagaaataattgatactttaaattaaataaaaaattaatatttatctcaaattattaaaaaaaaaattattattattatttttattattttcaaattattaataaaattcttatttatttaaaattattaagttttaagattattcttttttaaattgaaatatccaattttcagacacttttgtccacagagacaacacaaacgaccaccacaatgtaaagagtttcgaaacatatccattagggatggcacggaatttcaattccgacttccgaagttattgataaaaagtcagaaatttttggaattttttttaatttttttttntaaattggcatttttgtacaatttctta

SEQ ID NO: 59013 - DNA, 652 bp, Heterodera glycines
atggtgttgatgatgctcggttttctgctcgtcctttggtcttccttcagctacagtcgccctttgtaagttcttaccgttcgctttctctgctcgaccattgccatcctttctttgtcaggcacattgtctacgcttgtctcggggctttgctctttatggtttacttggccatcgacattcaggcatttttgtattgaatttttgtggaacatttttgctttaaaagatgattatgggtggacgcaaatacgaaatttccccggaggaacacatttttgcggcgatcattcttttcatggacattgtccaaattttctggtttattttgtccatcttcggtgaccggtaacttttccacttttttcttatttaagagtttattaaggagctgagagaaaattgcgcaccgcgaatcgatgaaagaagggaaaatgagaagatattttgaacctgtgaaagtaaaactgtactgtaaatttcattattctcgatcttgatccatggattcttttttattaaaaaaccggtttattttagttttattttattctttaaattttataggctagcagaagagagactgtgcaaaagggtgtgaccagacaaatccctgggtggctgaatcccgttggccatgactttaattaaa

SEQ ID NO: 59014 - DNA, 744 bp, Heterodera glycines
ctttaccaattattttttgattttcccccatttttgcctctttttacatccgaatccctcaatttcccctttttgcaggacatttgaattggtggtgtcaacatgacagcaaccaacggctgtggcccctggtgacaaccggcgatggcaattgtctgctccatgccgcgtcgcttggttggtggaccggcaccaaaaatggggagggaaaatagagtattcgacccagacctggatggattttccccgatttttttggttttttgcccaaaaatttggacccagttcaaacatgaaacctccagacctaagtctaggcttttttttcttaaacttaggttataaaattcagtaagtttcaaagattttcatggctattcctaaaaaggataaattttttgtcaaaactgggaaatttcctgttcaattttgcattatcaaatcacatttattgacaaaactgccaagaaattttccaaatattttaattccttttttaatttggcattggcattatgttcaaccaaattaaggcatttggggtgtccacgaccggcagctgaactggcgcaacacgctgcacgatgtgctgaaattcgggagccgaaaacatgccatctaccggcgttggcgttggcacgagtccaagaacaatttggcgtcgggtttggtgctgtcggaggaggaatggcgccgggaatggaacgccgtgttggagttggcatcgccgacaccgcgcccaaa

SEQ ID NO: 59015 - DNA, 574 bp, Heterodera glycines
  unsure (1)..(574): unsure at all n locations
atggcttccactccgttgctcggctatttggtggtccacgagcagtatttgccgggttgcattctctttgtgctcatcgctttcaccgacattgtgcgttacattttttagggtttggtgggggtcggtcctaaggacggacgatcgtttttgagggaggcaggtctccgccgattgggcgacgccgtttgggcgccgccgattgggcgcgggtacgattgggcgccgccgtttgggcgccatgcggcagccaaatttttcgttttcatattatccaaaaactgaaattactacaaaaatttctagccattcacctgaattacgagaaacagcactcaaaaaacgtaatgtttatggggttaaaatctatttgagtcacaaaattccttcatgactctttttttaatggcatgggttctcgaaattatgccctgtaacttaaaatttgaagctgtccttgaatttaatgtccttgaaaaagaattcgagaaaaacaattattttatataatgtttttaatcatctacattcttttgaatagattttgngacaacaaaggttgatttgatgaaaa

SEQ ID NO: 59016 - DNA, 561 bp, Heterodera glycines
atgacaaaattgaccgccgaaatcaaaaatttgacagaagaggaacgtacgatcttcgaagccacaaaggaaatggaaagggaagcatggattcaggcgtaccgtgagatacgtcttgtttgccaatttaactatgacgtccatagaaatcgctttgttctgaacaccgacccacggtacgttaaaaaggtcgaagtctcgcctcaacttgcctacattctcggtttcaacaacacggagtttatgcagcccgcaaaggaggcaaggttttcgccggacatgagtggtggtgtgtcatcattccacgtttacacgccggatcttattgaaccaatgatgattggagatgtgacggccccagtgttgcgcatagtgaccatacgcggaaacccagaccaagtagttgaagaacaattttttgccatacagtatcacaagctcttatcaaaagaggtttctgaaattctgattgagatccgtaccaatagcggcatcttgatgccattccaatacggaacatgtacattaacattacactttagaaaaatgtcctatttttaa

SEQ ID NO: 59017 - DNA, 6033 bp, Heterodera glycines
  unsure (1)..(6033): unsure at all n locations
gcaaatggcatcatcagaatgattagttttgatttctttgtcgctctctgaatatntaattacctttgtccatttttgttttccttactaatttctgaaatttggtgaatttnnaattttttccccattaatttatttcagtaattaaatttttgccacaatttttttctgcatataaattgaaaagattgttttaaaagggttagttttggcataaaattttaatttagcttaaaattaggctaattaaataattattattcgcaaaaaattatttaaaaatattttttatgcaaaagactaaaatttaattttaaaattttagaaaaaaatgcctttcaaattattatttgtactcattttggcactattttcattgacaaatgctcaaaagaattgtgcaagtgcaccgaccagcgcgttcagaatactgtgtgaacagttgcatcggtgggacacaaatgcgcgggtaaaataaaaacgaaatgccaaattttgtgccaaatttaaaatggggtttccttgggttctttggattttaaatgtttttaaaaaacaaaaaatggtaaattaccaaatttgcgacaaaataaaaattgcccatttaaacggtaattactagggctgggaattttaagttatgagcttaaagtttcaatgtaaaggctatctgcctgcaaaatttcataaaatttcatacattagagtcttttttttacaaaaatctgcatgtttttaaaactggaaatttcacggcggtgtcacgaatttgatttttcaaattttacgaacatggagattttgtaaaaaatttacgtacgaaaaatctggaattttgcaggcagatagcttttacataaagtattaactgcaaaatttaaagtcattctgaccactacgaaatttgaataagaaaatcagcttttttaaatctcgtgaatttttttatgacttaaattcccagccctagtaattaccgtgctaatgttaccgtactccgctcattaaaagcacaaaaatttaggcagctccaccggttgacgacaaaattccgcttcctccagcaatccctgggcttccaggtaattttcaatttatttatttttaatttaaaaagctcaatttagccccaacattggctgccgaaatagcgccagtggccgcaacaccgtaccaatgcatggatttacagtgtctctcctcatatttgggcggtaaaaaaataaaattaaaatctcttaattggaatatataagtttatccaattagcgtatttcttgaattagaaccctccctgaattaaagcccccctttcgaggggggttgaaaaataaatcccgccccctgaattagaaccccccactaaaaaaattttttttcaaaaaagaagtcaaaaatttttgtgcctgcctagcttacatactaattacaaaaagtaattagagataatagatcaatgaccattaatttcgtaattaaattatttctaattgtcaacttattaaatttatttaatttctttcaaaaaaataatcgaaaaaacatttttaaatgccttatgtcaaaaataatgtgagaagctgttttacaggacgacagcttaacaaagcgatccgcaaagagtacagaatgttgtccgacatggaacgatcgagatttgtaaattcttatatttaattcaaaataattatttttaaataaattgtttaaaatatttaatattttcaaccaaatttagcatgctgcaatgaaaacgataaaacagaacggggaatacgacaaaattgccagaattcatgctgatccgaccattggcggtggggcacacggagggccggcatttttgccatggcatcgggaatatataaaacggtaaaaaatttaaaataaaatatttaatattttttcggtccaaaatgtgatgtttttactgaatcgaaccattttcacaacgatattttgattattcttttggacgggtttcatcattggagatccacaatactcacaacaaaaatcagttacattatatcttgttttctgatatcttgatcagtttatgctgcgctcgagatcgagtttttcccggagttcgagaccgagaatctcgagcagtacaactgatcagcgtcataagcttacaattagtggggggggggggggttagttactcaaaatacaatcaatcatccggtgccggtgctgatcaatttcatcaatcacccgtcaccgttcatttgtgccaggttggaaattgcgcttcgccaggtggacccgagcgtggcgctgccctattgggactcgacgattgaggaccgactgccgacgcccaaagattcgcacatgttcacaacagatgcaagcgaaaaatatttatttattttatcattttataacataattatttattttagtttatgggcgaaacggacgcggctggcaatttggtgaagggcgattttgcgggatggcgaacaacgacggtaaggaagcaccacaaatcttattatccagatccctaaaatcggattgatcccgccggataaattacggcgggagataaggaaaatgccatccagtatttctggaaaatgcccgcaaaaagtgtttccgggaaaatgcttgagaaagtgtctaatttttttaaattaattattttagggaaaagcaaatgtgctccgcaaattaggcgctgatgggcatggctttagggacacggagtaagcaagcaaaaatatttttaaatgaatttgtataaatatttcattttgaatttttgcattaaaaatttggatgattcaattaagaattaattggtttctgcaacagaccagtcctgaaatgatctttggctattccgcccctcaacaggtaatgtcgtcattttcgattacctaatttccatttgcaattcgttttttaattgattgcctaattggtttcaagggttgcacagtgacaacaaactacaacctgatcgaagtatatttttatgaaaaattacaaaatattaaatatgtattattagtaagagaaaatttggtaattttttttttgaaatttttctctaaaataaaaaaaaatttccccggcggtgccgccttttgtcatcgtctgatatcattaattaacagttttataaagaatttatttaattatggttgaatttatttttaattatttaaatcagtacacccatggcaacattcatctgtttatcggtggcgatatggctgaacaatcgacggcagcaaatgacccaatcttttttcttctccattctttcgtggactttgttagcaaattaattacatttaaaaattcaattataattattaaagtaccttattttatgtaaataaaaaatttgcttatttcgtacatttaaaaatttaaaaaatatttaaattttcactatttttgtaaaaattttatcacaaaaaagcaaaatatacttaacaaaaattgaaaatttattaaaataaattaacacccggaaaattgtattttcttaccgaaaaattgtttttacaaaataataaatccgaaaaatatttaatttttgaaataaatttacttaaattatacccatataatctaagatttcatttaaaatcagcaaaaataatttctcacagatttgggagatgaaacggcaacagcaagcgccatttgagcgcgaacaaatgtaccccatggacaatacggtaaaaaataatttatttaaaattaataaataatttattatttgacatttaagcaatgtgcaagtgcgtctcacttcggttctgccagtatgcgaccattccaggtacggtaattgcctactgtaaagcccatggaaattttggaatttattataaattttcatgtttcttataataaactgaatgcgaatcttagaaatccaaaaatgatttgtaagaaatttttgaaagaaaatttaaatgagacaaaacgcgaaagctttcccattggctttcaaaaaaatcaaatccggcatttccatgcaaaaaaatggcacttttttgacagccttggacaaatcgggacgggctgagcaaccggtacttggatttgtatgaatatgcgccacgaccgaactgcatgatggggcctaactgtggatcaaagttgcaaaattttgggataaattttaatatattttataaaatttcccaggtatttgttttgcgatcgttcccatggcgcgccccattgcgcggcacaggtgaaacctggcggaaattgcactggattccgtagcggtaagactatttgtaattaatttataattctaattttacaaaaaaatgaaatataaatatatatttaaaatattaaaaataaattagcatccactaattacataaaaaactaatccgttccatatactttaattattaaattatttatattttttaattgtataacgcaattaactcagaatagattattcacggttccttattaattaattcatcgaattaactattaattgatgaataattaaggagaggatgtgtgcctgaacggtgaatgtcgtgccggaaaatgtgttcaaacggagaaagtaaaaaaaaacgcaaatatttttcccaatttcaacaaattaggccacgcctacgccaaaaccaccaaaatcgacgactggctccccgataacgccagtccatgtaaaaataatttaattaactaaaaatatataatttaatttaaattaatttaattttgggtgtcatgctacaatgaacacgagtgttgtggcacatgggccacaaaaggtgaatgccgccgaaatccgacctacatgaacctgtggtgtaaagccagctgtgcacaggtgccaaaaacataattattggaaattaatttaattaccatggactggatttatatactttttttaaatgttattcgaaatctcaaaaaatggcatttttacttgtttttttttcaataagagagcgagtttttaagcaaataaaaaacatatttcggacttttggctgataaaaaaagaatgagagatttttttgagaaattcacttatttttttgcagattacatacatatttggcttttatttgttcccgttaattatttatttaattgtaatttagactttctctttttttcaaatcgatttttgcacctaattttatgaaaatatattaaaattccaaattgaaataaaaatttttctattttaaacaaatttatttttacagtgtcagcccaactataatttggccgcaggtgaattaagaaaatttcatccacagtatggcgaattggtgtgtaaattcaaattcactttttttgcagaatgccaagatcggcacaaaaactgtggccaatggtcacggcaaggcgaatgtaacaaaaaccaattttttatggtaaaaaatattattaatttaaaaaaaataattaatttaaagacagaaaattgtcgaaaatcttgttcaaaatgcggtgtgtcacgagcccaggtgtgtggcggaggagctggcagtaaagcaaatcacagtaagaaactttaaatgccatttttattttattgaaataaattaataatttcaaaaataattttatttacctaaaattaattatcaaaaaattgaagaattttttgtcttgtaataactttgttgaaatctgctgaagaaattttctgaaaatttgtaagataatcaagaatgcatagtacaaattaattttaattttaatcttttcaaatctgtatttcctttattttgatttttcaattagtaatttaattaaaaatttttttataaatttaattaatttattgtaatttttaagatcgtgtcacccaagcgccacccaaacaagccaaatgcacttcgccaatgtgcttcaacgaaaacctgtgttgccaggcaaattttttaaataaaaatatatggctgatcaaattagcaaatctctaacaaaatattagtacctatcaataaaacactgttccttcataaaatgtaaaaacccgccattttcagagactccaaa

SEQ ID NO: 59018 - DNA, 299 bp, Heterodera glycines
atggactggcgttatcggggagccagtcgtcgattttggtggttttggcgtaggcgtggcctaatttgttgaaattgggaaaaatatttgcgtttttttttactttctccgtttgaacacattttccggcacgacattcaccgttcaggcacacatcctctccttaattattcatcaattaatagttaattcgatgaattaattaataaggaaccgtgaataatctattctgagttaattgcgttatacaattaaaaaatataaataatttaataattaaagtatatggaacggattag

SEQ ID NO: 59019 - DNA, 1182 bp, Heterodera glycines
  unsure (1)..(1182): unsure at all n locations
atggagaacacggaacaggccaaggtggcggcactccgaatattggagatgggcccacgggtggcaattgtcacgttggggccacggggtgacaaaaatacatataaatattttaatttttaatataattaaaatatttttataaattttaaataggcgcaattgtggcacgacgcgaacacaacaatgggcatgtaaaaattggtgaagtttcggcgccgaaagtcactgctgtggacacaacggtagaaaaaattattatttttattattattattattaatattttaatgcgaattattttcatttacaaatttaaataatgttcaatttaataaattaaagaaaattagcatttttaaattgaataaaatttgcttataaatttactanataatttgttaaattttctaaattggtttaaatatacaacatacaaataaaataattagaaatttattattgaaaagaaataatttttatttaaaaattaattctaacttttgcatatttaaattagattaagaataaagaataaataatttacaaatatatttaaatagattttttaataaataaaaaataataataatttttaaataaatttaattctaaaataaatttaattttccaaagggtgccggcgactgtttctgtggtgcgttggcccactttttggtggcccaaccgtccgctgaactgcttgaagaccacgtgcgtcgggctgtccaaattgcggcactttctgtccagaaaaagggcacccaggccagctaccccacacgggacgagttgatcacaatgggaatactgcaggattagagaaagagagaaaagcaaaaaacaaaaacaatcgatcatgacaattctaccgtattaaatttgtgtgtttctaccgtattcattcattttcctgtgtttctaccttattcaatttgtgtaacctaaggcctcgtgtacatagcccgagggcatggcaacccgagggtggcactgaaatgttttgaaaatttttaaaaccaaatttatttgaattttcctgacggcaacgatggacacacccaattaaatcaacaatttttgctaaactcatttcaaaaatgcaccgatttgatccaattttgttatcatatttttggttgataaatcgaaatttcaaaaaatttatcccaacgattttca

SEQ ID NO: 59020 - DNA, 95 bp, Heterodera glycines
ggattatttttcaaaacacctcgtagactgtgggataattggagactgcgggattaatagagactgggctataattagagcatatacggtaattt

SEQ ID NO: 59021 - DNA, 56 bp, Heterodera glycines; identical to SEQ ID NO: 52733

SEQ ID NO: 59022 - DNA, 163 bp, Heterodera glycines
ccaacgcagaattaaagtacaggctatagggaagctattccggaaggattcggtctccccataaatctgggcgcatcggttcggggggactgccccgaaaacaaaaaaatcgattttttcaagtgtccgtttggggtactcaaacaattatgggtgcaaaaat

SEQ ID NO: 59023 - DNA, 1057 bp, Heterodera glycines
agaaagtgtaagaggaacagaaagtggaagaggaaaagaaagtggaagaggaacagaacgtggaagagaaacagaacgtggaagagaaagtgtaagaggaacagaaagtgtaagtggaacagaaagtggaagaggaacagaaagcggaagagaagaagaggaacagaaagtggaagaggaacagaaagtggaagagaaagtgaaaaggaacagaaagcggaagagaagaagaggaacagaaagtggaagagaaacagaaagtggaagagaaacagaaagtggaagagaaacagaaagtggaagaggaacagaaagcggaagagaaagtggaagaggaacagaaagtggaagagaaagtggaagaggaacagaacgtggaagagaaacagaacgtggaagagaaagtgtaagaggaacagaaagtgtgagaggaacagaaagtggaagagaaagtggaagaggaacagaaagcggaagagaaacagaacgtggaagagaaagtgtaagaggaacagaaagtgtgagaggaacagaaagtggaagagaaagtggaagaggaaccgaaagtgtgagaggaacagaaagtggaagagaaagtggaagaggaacagaacgtggaagagaaacagaacgtggaagagaaactgtaagaggaaccgaaagtgtgagaggaacagaaagtggaagagaaagtggaagagaaacagaacgtggaagaggaacagaaagcggaagagaaagtggaagaggaacagaaagtggaagagaaagtggaagaggaacagaacgtggaagagaaacagaacgtggaagagaaagtgtaagaggaaccgaaagtgtgagaggaacagaaagtggaagagaaagtggaagaggaacagaaagtgaagagaaagtggaagaggaacagaacgtggaagaggaacagaaagcggaagagaaagtggaagaggaacagaacgtggaagaggaacagaaagcggaagagaaagtggaagaggaacagaaagcggaagagaaagtggaagaggaacagaaagtggaagagaaagtgtaa

SEQ ID NO: 59024 - DNA, 617 bp, Heterodera glycines
atggccgatggcactccgtccgccaaacggccgtacatccgactgaccgttccgccgagcaatgccactcgccccatcggcggcgaagttcgcatgcgttgcgaagtcgccgcttcgccactgcccgtccaattcacgtcctgctgacttttcatggaaaatgcgaaattaacatttcactctttcagatggttaaagaattatgcgccggtggaaaagagtcggcggattcgaattcggcacagggaaatgtcatcgaaattggtaatggtcgagttggacgcgctcgaccaaggctattaccaatgcaccgctaccaacgcggctggcagtgtcaacggcactgcggtgcttaaggcaaggaaacgattgcttattcaaactccatttaatgactagggcttcgatttttaggtgctaaaaactgccaaaataagtaggttttaggttctaaaaaacccccaaaataggtgctaaaaatgggaaaataggtgccaaaaagttccgaatttaggggtgtaaaatcgaaaattttcatcaaaaagcaaaaatattttgccaagtcattaaggatatacataattttcaaaatcaaaaattatcgtcaagaaaataaa

SEQ ID NO: 59025 - DNA, 286 bp, Heterodera glycines
atggaatggcccgcattttggcagagtttcgagagtgccgtcgaccgtgccgcccttgagcccgtcgacaaactcaactatcttcacggttgcttacgcggaaagtctgctcgtgccgtaaccgcctaccgtggaggggagaattatgcccatgccgttgccgcactcaggcgactcttcggggatccacgaaaaattgccgaggcacttcagtccgaactgatcaatcttcggtcggtggacgataacgttggatcactgcaacacttcctcgagactttggagc

SEQ ID NO: 59026 - DNA, 310 bp, Heterodera glycines
atggaagaggaacagaaagaggagaagaaacaggaagagaaagaggaagaaacagagaaacagaaagagcaacaaaggcaaagaggaagagaaaggaaatgggaaatggaagagaaagataaagaggaacagaaagaggaagagaaggtgaaagtggaagaggaagagaaaaagcaacaaagggaaagaggaaggaacaaaaaaagaagagagcaagagaaagcgagagtgatgtagtgaaatgggaaggtagaaaggagggagaaaggggatgagaaagaggaaaagtaagagattttaagtgatcata

SEQ ID NO: 59027 - DNA, 1312 bp, Heterodera glycines
atgagcttcgacagtttcgtcgctctcgcagtacgcgcagaagaagtgcaaaaggccacgaaatcggctgagtctggaaacaagcaccgaccaaaatttcaacagaaatcgacatttcaaccacaaaaaattttcgcgccaaagacaaaccgaattgtgtgctacaactgcaacaaaacgggacacatttctcgccattgtaggttgccctttgcgcggaagcaatccaactgtgcacgaaaaccgccacaacaaaattttgcgacgaaaagtgccgattttcgaaaaaattcagaaactgagaagaaattgattgatttgcggttgtcgaaccaaccaccggcacaaccaacgaacgtggaagctggaccaaaacggaaagcgtccaaccgacagcgcaattcgtcgtcaagttgcagcgtaaaagcaacaaaaattaaggaaaattcgccggaaattccaaaatggtttttgaatgctatggttgctgccttggctttgctcgccagcacattctcgaatgaaaagtcaaagattggacgaatttggaaaggcaaaagctcaacgagtggcagtaacgacgagaaaaaacggaaagcagatggaaaattggggacaattttttcgccgaaggccgaggagaaattggcggatgtcgcagcaaccaattttgaaaatttgttgaaaattggcactgctctgaactttccaagtgatgatcggaagtgtgcgcaagaagctgctgctgatgaatttatcaggccatgtcaaaagtcggagacccgttttgtccgttgtttttacaggtctgaccttgcaacgcgactccatgccgaaccgatccactgctgacacccttgccgcccctttcaacgccgaatgcactaccgatgagcccaaagcgctgagtacatcgcttcttagagggcgaggatgtgatataattgtgatttaaaatatgtttgccgttttgttatttgattttgtgtcatttttgtttgtgattttgagttagttagtggttagtttttttatgctttcgtcagttctattgattgtcgtcgactatttaatttggaattaaacgataattgtatcttcggcattgggctgtattgttttgtgtttgctttgggctgttgtcttttgttgtgtgcaacaacaacaaccatatttgttttttacgactttaggaaaagcttctacttactcatcaagagctttcgaaagataccaagattatccaatttggttggcaaaaaccttcaaaaataattcccaaatatcgtcattttttaatattttggacaaa

SEQ ID NO: 59028 - DNA, 203 bp, Heterodera glycines
catagaacaaacactaatgttttatcaaagacatgacacacataattgtgtcacactaaactcaaacaacaaacactaatgttttttcaaaaacatgacacacataattgtgtcacactaaagtcatagaacaaacactaatgttttatcaaagacatgacacacataattgtgtcacactaaactcaaacaacaaacactaa

SEQ ID NO: 59029 - DNA, 527 bp, Heterodera glycines
atgaaagggaatccaagtaaaggttaattaaagttaaatatttttatttaataaataattaaaatattctttaatgacacgatagaattgtcgcagtccgttcagcaaatgttggaagtgccgtagacgaactgcttgcgaaggttggtgttgtgttgccacagtgccaccaccgccaccgccgttcactgaccctccgccagccgaggacaccccggagctcagactttcgctacgttccaccacatttttggccgattgattgtgttggtgcagtaacacaaggccaaccgtgtcattgcttgtccttaatgaaaatttaagaaaattaatttaaaaattaaaaaataatttcgctaaaaatttcagaaatttacacgaaaagcatttattttccttatcgttttggtggctgctcgagagtcaatattgttcaagtcgaggactaacagtaagaagaattaattagaaactcaaaaattaaagaaaaattttacccttcatttttgataaaaaatttcgcaaaa

SEQ ID NO: 59030 - DNA, 407 bp, Heterodera glycines
atgataccaacaatgttggatttggttggaaaaaaagttatagaaagttatagtggaaaaacatattggggccgaaccgtggggggccgaactgacgtagaccgaatcagcatagagttaagtaatttttaaaatcataaattcttgtcaagaaataaataaattaattttggaaatgaattcttgagaaaatctttcatttttcacagggatgtatttttttaagtcctagagactatgggagcttaaataatggccataatgatttgtaaattaaaatcaaatgatttctatttcagaacatgttggaagagagcaatctcaaggaaggccaacggacggccaatcaccaagcgggatatgccgccggatgcgcgatgaatccgcactgcacgcggataacattt

SEQ ID NO: 59031 - DNA, 3110 bp, Heterodera glycines
  unsure (1)..(3110): unsure at all n locations
gggaaatggttggccaccaaacattctgttggtgtgtaccgttgaccggcttggccctgtgtttcaacaattcacggttgtcgccccctctgcactcaatgttctcaatttgccgatcttttgggcccatatttcaccttcagaagtgccgtcattccgtgcacttctttgttccacagaaaacggcacacgcatttgttggcattgccttcttcgctaatgaatttgttggcattgtcttcttcgccattgtttttttcttcgatgattgaatcggtgatcaaagtcttttctccgattaaaattttattggcaccctttcgtttaatcattgagcaaagaatgaatgacaagaaaaagaaaccaaaagaaatgaagtgggaaagcagcaactatttgtttttaattaatccaaaatatttggtcaattatttattttcactgagtgcgccaaaaaatgcccaatttggaccgaccagtgaattaatgagggggggggggggaagaatgccaacggtgtcattttctctgacggaataacaacttcgtaaatggcattcatttcttggaatgaatgccaaaatgccaaatgacaattccaatttattacacaaaaaaatgtcaaaaaggggaaaaaatgatgtgcatggtttaaacaggttgttttggaaatgcaaaaaatgatattaattaattaatgggcgagatacggacggacggaagtctgtcagcggacattggccgtgccgttcggtggacagttgtgccgnggggcgggggtggcggctgtgttcggataccgcccaagggttttctttcccccccccccacctttccccccgtccgtcccctcgggcgctcttttgctttatcgatccccaaagtgtcatcatttgaccgcccttcccgttgcctccctcccatttccccctaatcatttattatttcctaatcaccccaaatgtttccccatttatttttgttgctccgtttctccttcttccttttatctgctgtcaccttcgtttcttccacttcacttcatcaccgggccattcgcgcagttaatgcactgaatgccgaaattggggacagccatttttggaagttggggaaaataattggggaaactgagacggaggaattggaaaatggggcacggaagaaaagcatggagataagcttaatgcggacggggtgtctgaagcaggtaggcttaatgaatgaagtggcaaatgaaagcaaacactttgcatgcgaaggaggaccacctgcgaatactgctcggactttgtgcggtggatgagaaagggccgagaaaggtactaatcaatacgtattgtgatcagagtgatcaggccggttgatcggactgatttggccgactatctcgtactcatctgtcaaattgatatgatcggacttgatttaatcggttatttgatcgaactcattttttttgttccttttaagaaatgtctggtggacgttgtcgaaaatgcggacggaggggaggaatttgtgcaaaggaaatgcgaaagagacaaagggcgagaagaatggcagaaggaagtcgaaaacaatgaagagggggaagaggagcagcagagaagaagcgaagaggggcaaaaggacgacgacggcactttgtggagaatgatggcacaactgaaccgaacgatcaaagccaacgacctattcgaatgggaccgatttggccaatttgtgcgcaggttggccacccaaatcaatcgattggaagacaaatcaacgaaaaacaaaaaacaaatcaaacagatacggacccaaatacagcacgaagagggaaattgcaaagcgattccgcattttcaagaagaatttggccattgccaggcgaattcaatcggcggagaagggaacggcggaatttggagaaacgaaatattctgatttgagtgtcacagagttccaaaaggtgtgaaatcaactcaatcgaattgataatttaaaaatgccaattttggcacccttcggacattgttcgcctaactcaaaatgacaacagcaaaaatggctgttcttttatttttgctttttcagatttatctcccttacaaatggcctttgaattcccatggcaaaatgatcgatggtggcaaaatcgccgaagggattcttcccgaaagttttgattggagacaaaaaggcgcagtgacaacggtcaaaaaccaagggacgtgtggaagttgctgggcattcagtgtgacggggaatatcgaagggcaatggaagctgaaaaagggcgaattggtggagttatcggagcaggaactgctggtgaggcgggagtttgaaaaatggaaatgaaaaaaaagaaagaaaattgaaacgattgaaaggactgcgacaaattggacatggcatgccaagggggcctcccactgcaggcgtacaagtgaggagaatggtcggaaataggggggaatgccattcatgagcccttttcaaaaggaaaggccgacttttgggtgaaaataatcaattagggaaatcgaacgcatcggcggtttggagcgcgagaatgactatccgtacgacgcgcacaaagaaaaatgccatttgaaaagcgaccgcatcagtgcgtacataaacgactcgctgcaactgccaaaagacgaggcgaaaatggcacaatggctggtgcaaaacggacccatttccatcggtcatattcatttgtcatctttttgctatttttgagcttttgaaggtctaaacgcaatgccaatgcaattttaccgccgtggcatttcccacccccctaaatggctgtgcaatccatcgtggctgaaccacggtgttctgatcgtcggatttggcgaggaagcgagaaagcccttttggatcagtgagttgggcttggccaccttcgacggattgatgctttttctgaattaaatttgcccctttcagttaaaaacagttggggaacgaattggggtgagaaaatggcaaagaaagcacggcatttacactgtttatgttcaggcgagaaaggctattatcgaatgtacagaggagggaacacttgcggagtgagggaaatggcgacgagtgccatcatcgaa

SEQ ID NO: 59032 - DNA, 1698 bp, Heterodera glycines
atgaatggcacagcaataacaacaacaattaacagcagcactagcaagagaaccaaaacgacactggcattttttaaagaaaaagggacaaaaagggatacggtacaaccaaatgggcatacggtaacaccgagaggtacagtagagccggttatggaaagacaaaggaacgaaacacaacaaaagggaagagaaacaacggcagaaaaagcaggcgaattggtaatgccactgaaagaagatggaaatggagagaaggaaacggaagaatatggaaaaggaaaagcgaagggaaaggaggaggcgatgggaggagaaagaagaagaggaagcgaaagggaagagaaacaggataaaggcacaatagcaaatggaagcgaaaacggggcagagaaagagacagaaaaaagaaaagaggaagagaaagagacggatgggaaagatggaaaagaagagaggaagagagaagaacaaagagaaaagacagaaaaaagaaaagaggaagagaaggagacggatgggaaagatggaaaagaagagaggaagagagaagaacaacgggtaacggagaagcagaacagagagaaaaaggagcccgaaaatgagggggaagaaaggaatgaaggacagagggaagagcaaaatacagtgaagaaagtgggaaaggaggagaaaaaggaagaaaaagggaaggaggaaaagaaagtgggaaaagaggagaaaaaggaagaaaaagggaaggaggaaaagaaagtgggaaaggaggagaaaaaggaagaaaaagggaaggaggaaaagaaagtggaaaaagaggagaaaaaggaagaaaaagggaaggaggaaaagaaagtgggaaaggaggagaaaaaggaagaaaaagggaaggaggaaaagaaagtggaaaaagaggagatagaggaagaagaagggaaggaggaaaagaaagtgggaaaggaggagaaaaaggaagaaaaagggaaggaggaaaagaaagtggaaaaagaggagatagaggaagaagaagaacaagaagaagaagaagacgaagaagacgaagaagacgaagaagaagaaggaaaggaggaaacaaatttaacaagtgtagagaaattttttgcaacatcagcaaaagcagaagaaacaacggagaggaacgacgggggagagaagacgacgacaattttagtaacagaaagagacggagagggaagcggaacggaagaggaaggaaaggaggaggaagaggagagaaaagaggagggggaggaagcggaagtggaaggaaaggaggaggaagaggagagaaaagaggagggggaggaagcggaagtggaaggaaaggaggaggaagaggagagaaaagaggagggggaggaagcggaagtggaaggaaaggaggagggcacggacgaaattggcattcccacaacgtccaaaagtgtggtgactctgccaacgattgcattgccaacggaatcagttgaaagaaaatgcgcggacacacatgattagtaagtacagtgacagaagggaacactactgtagctgatcaaacagtccgccccaattaattaattgctttcatttattgaacagttgtcgcttttgggctcggaatggcttttgctccaacgctttttacgcaaaagagcaaattgcccaattttgtcgtaagacatgcgcactttgctgaggaca

SEQ ID NO: 59033 - DNA, 1266 bp, Heterodera glycines
atgcagcaactcgttgaaaaactgcatgacaatccgcgacgaatttttggcctacccgagcagcccgacacttacattgaggtgattgtggatgaactctaacaagggaacatcccgaattgtaaatgtgttcgactcaacttttaaaccatttttatcgaacttttttttttttgctccggcgccagaagtgatcagtcagaaaaagtcgatcaaagttttgaagaatcaacaaaattattaaatttttaaaaattcatagccatcaactttaaaaaaagaatgatcagcgaaactttctgaattttggcaccaaaattaaacttttttttgagtaaattctaaaaaacccaaaaacactaaatttcaacaaaaaaaacaatcgaaatgcgttttgaaacccttcatctttttttccttggttttctaaaagtctaacgaaagatttttttaaacaaacttttggaagagctgattttttttaaacaagaaggctggaaaaaatgtgttgacttcacgaataaaaaataaattcccaggtggaaatgaacgaagtgtggacaatccctgagagcggtggctggagcaaagcagggtggacaccgtttgctgggcttcaagcgcgtggccgcgtgtgcaccgtggtcatccgtggccagcgcgtgtatgacgagggccaattcctggttgggcccggctttggccacaacgtgcgattgttgcccggcgccatggcggccaccgcctcaaatttgccatcgccgtcgccagcagctgaattgacggcagcagcaaagaaaactgacggcgccggcggaggcggcaagaaaagaggggtggcggcggtgacagccggcaccggtggtggcaccacaaaacggcacgacacgttgcgacagcaccaacagcaacgcatttcgcccgagctgagccccgaccggaccagcgttgtggggccaagccgtctgtacggccagaacattttgtgcgtggaacagtttgacaaggagacggtggagcaggtgttgaagctggccaagcactttgaggaggtggcggtcaaaatggcgggcgcggacggcgttgaacgcctccatccgtccgcgtttggtttcccgttgcgcgacttcagcgtcagtttgctgttctttgagccgtccacgcgcacaatgtgttcctttgacgatgcaatgcgtttgctgggcggcacggtgtccgtgttcaacgcggaacactcatccgtgaagaagggcgaaacgttggagg

SEQ ID NO: 59034 - DNA, 263 bp, Heterodera glycines
atgcccgacccggtaggtaagggtccaaccgggtccaaaatagggtcaaattgttgaccaaagtttagtgtgaacaaaaaaaaattaatttaatttacaaaaattaaatttaataattatagtaaaagggaatcatttatctgctgggcgccggacttttcgacagtaaaaagtaattaagtttaaaatttaggggtgtaaaatcgtaaaattttatcgaaaaagcaaaaaaattaagcctaatcatatgttatcgaaaagaa

SEQ ID NO: 59035 - DNA, 53 bp, Heterodera glycines
gagtacaaaggcctcacttatatggcagccatgagtcctcaagcgaattatga

SEQ ID NO: 59036 - DNA, 216 bp, Heterodera glycines
atggatatgaagctgaggtcggctcgacaaaatgttgagagaacagtcgctggcgtggaattggcctgggaacaaaagcgcgacgcggacgccgaactcgcggctgcggatgcggcatttaaactggcacaacagcgactgaacgcggcaaaaaacgcggcggcgaatgctaacacggcactggacgcggctgacgcggagcgcatccgtgtgatt

SEQ ID NO: 59037 - DNA, 934 bp, Heterodera glycines
atgcgcacattccgggtgagtgaaattattgaaactccgacatagccagggggggcctaacctaaaaaatccaattttaagggaaaattgattaattttcaaaatttaaaaaaaggccgtgatcaagagggcacctctcacttttttccccagaaaatttaaagtaaaagattttcagtcaccgattgaaacaacaatttaaaattttgaaaggaaagtttaattaattttaaaaattttaccgtcaattgcaattcattaaaatttaaaaaaaaatttccctgcttttcccctgtcaacaccgctggacacccaactttcattttgtttatatgtcaaaatttttaaaaataataatttaaaattttttaattaaacaagcacgaaaagtgctaattttatggatttttgggaaatttaacgaaatttcaatgttatttttctcgtcaaaatttaaaaaataataaaaataattaatgccaattttaagcgcacgcaacgcgcgactacgccagacgccatctgatcaccgattttccctcacttcacggcaaacgttccttcatcgaccttgaagcgattgaacagcgtaaacttcgtcaacaacgaaaattgccggaggcaaaattcgaaaaaaaaatttttttttttaataaaaaaataataaaattccatccaatgataggccggtgatcgtgatcgggatttggacaaattcttgaaggttcgagaagataaggagcaatggaaaacgccgtggcccgcgccgaaggtaggaaaattatatttaaaaaaataaaattttttaaatttagcccgaagacgaatcattgcgcgagttggaccgtcttcgtcaggtataaattaaatatcattttcgatcaaaaaatttttgaattttttagaatttataaaattgcaaatatgttctaaa

SEQ ID NO: 59038 - DNA, 147 bp, Heterodera glycines
atgtgtccttttgggccaaaaattccacaggcatcgatgcgcagaagcaaatcgttgaacgaattgcgcccggtgaaagcatccgcaacaaaacctgaacaatttacattaccgccactgttgccctcgaggcacaaaattttggag

SEQ ID NO: 59039 - DNA, 675 bp, Heterodera glycines
atgcacgctgaaaatatcgtttggctcgaaaaatacccgcgttactttcgcataaactggaacggatggtttgacaatccaagaattgcccgttatgaggcatttgttaagcaactgtccggggtggacgattgggcacgaattggaagtcttcctgttgtaagtttcaaaattctaagcttcaaaggcgtagagccagccatgggaaggattgagttgggtatgaaagtggtgcttttggatacaaagaagtgaaaaatacgcaaaaatcagcgaaaactttgttttttaactttttattccaattcgggtccgggattcggaattggtcgaaatgggtgacgtcgaggtcagcgaccccgaaaaccactggaaacatgttttcatgacttggaagataaaaaattctcggaaaatgggcggcggtaaataaacgttactattagagatcgacattttgaaaaaagcctggacctggatctggacctggattccatgttggacctggatttcctggacaaaaatccaggaaaatccaggtccaggaaaaatccaggctcatcgagacctggatccaggcctggacctggattttttgaaatttattttaaaaatcaaaaaaatgtttgaaaaaattaattatttgcgtagaagcatctaaaaatatctaataaa

SEQ ID NO: 59040 - DNA, 166 bp, Heterodera glycines
gataaaaatgcacgctgaaaatatcgtttggctcgaaaaatacccgcgttactttcgcataaactggaacggatggtttgacaatccaagaattgcccgttatgaggcatttgttaagcaactgtccggggtggacgattgggcacgaattggaagtcttcctgtt

SEQ ID NO: 59041 - DNA, 318 bp, Heterodera glycines
atgtcaaaatcttgttctctctctctcttctctctctctcttttctctctctctcctctctttctctccccaatccggctaattttgcattttgcgaagatccgccgtctgccggccgtcctctacgctgactcgcgcaaatccgactctcgccagctggaggtgctgctccgcgacggctacggcctcccgctggtcactttttatgccgacaaaatcggtcggttggccgcggtggaggcaaatttggccaaactgaccgcccatcgggaaatgccattcctgttcatctgcggaacgttcattggaagtcagtaa

SEQ ID NO: 59042 - DNA, 287 bp, Heterodera glycines
ttctgctgctgctactgttactggcgagacgaaacgggccaaaccaagttcaaagtgccaatgtgacgacggcggtttttgttcaatgctaatcagctaattgctcactaattaccccaaataacaaaactatgcttctcccaacaatggcccccaaatgccttccgctcgaacttttgttcgaaattgtgcctctcatccctgccgaaaatgccacaccgaatgcgctctcgtcctgttggctgctgcacaaacttttgctgccacgtgtcttaaaatggcaagag

SEQ ID NO: 59043 - DNA, 547 bp, Heterodera glycines
ccttaatccaccttaatgacccctgcccctccatcgcatttcacttaagcttcaatggtgccgtctccggttatgacggtggtcccttttctgtcggtggtggcacttctgctgcagctgacggtggtcgaccatggcggcaacatcaaaagccaacaccaccactaatggtggcacaacaaaatgccgtagtgcagcagcagggcaatgctgatcattggcaaatgccgacaacaaatggaggggaggagaagcggcggcgaacagtgacgggtgggtgacggacgagcagcggggaccctagttttggccaggatttcggattttttaatgaaaattcaggaaaatccttttaatagttcaaaaatccttcaattttggcaaaaaacctgttcagaaggatggacaacaacaacctgcagcagcagttgctggagcagtcgctgcttctcgcgctattagccactcagcaacaaacgacggcggcgacacccatcaacagaatgccaacacagccaatgccaatgatgacgacggaaacaattga

SEQ ID NO: 59044 - DNA, 1057 bp, Heterodera glycines
atgaagcccgagttgaaacagttattctgtccaccggtcaaccttttcaaggagtttagtatgcaattgaagaaggtggtggactttcaacaaaacaatcgcatgcgccttaaggaacgacaaaccatggaaaaggtgatggaagttttgcttttacgcctccaaattgttgctctattgccatccaccccttcgttgatttttttaaatttatgtggttgcacaaaactaaaaagtcagaattttaagtgacataaggaaaagtacaataattaaatggatgcattgtcggaagtttgccaatagtagtaataataagaaaaggctaaagtaatcaaagtttcaaatgatttagtcttgttattttataaagtaacagatgcaaagtgctgcaagatacatccaaatactgaaagtggaactgcgcaaatcatcggacaacgagcgcatagctttgaaagaacgtaaccaaatgaaagcggagatggaacgatacaaagagcaggcccaaaacttgaagacgaagtgaggaatttgtaatggattattggaagagcgcaaggtggcgcaatagagaggccttacaattagatgaccactcaaaagcagtctagacaaacttcgtcgactttagagcttagattttgaatcattccttgtatgaccctgaatttgctcaaggattgaaaaggcttgatattgttttgaagactggctgaccgtgagaagcaactccatctccatgcgtgcaaattgcagctgcagccaagaaacccgaaccgggcctttgcaagtctaaatgggaacactccgttgttgggcctttcctttgattgtgtcaaaagtacgccgaatctcaacgatgtaagtaataataattgaaaatttcaagttttttcccagattttttcaagtaatatttacttttttagacaacgatgttccaagcgaataggaaggatgttggcaataatgtgctggagacgccggttttcaacgagagtgaaatcgctggaccgcttcgaatgcctgacacgcccgcaatgcttcgtaatcg

SEQ ID NO: 59045 - DNA, 118 bp, Heterodera glycines
cacggcgattcaattttgggctccaagtacaattaagttggttttttcgtcttagtggtctgtgagttagtcaccaaaaagggggtctcaagttcaattcctccttgtgtttgtgtat

SEQ ID NO: 59046 - DNA, 375 bp, Heterodera glycines
  unsure (1)..(375): unsure at all n locations
atgtcaaccattggtagtcttgctcgttctgtcactggaacacaatctggttctggaagcgagcctcgtgaacgtactctttacgaaagagaagcggagaaggctctaaaactcagaaatgtttgtgtttgtttaatggtttcttcttagttcctggtctaggtggaagttggtcgtgctgtcatggcggaaaaaccaagtgcaggccacgaaggcgatttggaagttcataccaacgtttacgccatcagcatgggtccgctggatatctaccgttacgatgtgtccattgtcggcgaacgtggtggcgaacgatcgngagtcttgttcaccaagaatataagggatgagtcangtgtcttcatcgtacattaa

SEQ ID NO: 59047 - DNA, 304 bp, Heterodera glycines; identical to SEQ ID NO: 53844

SEQ ID NO: 59048 - DNA, 175 bp, Heterodera glycines
atggcattccctgccttggcagaacattcgcgacgccgccggaaaaactccgttggacctttgcgttttggtgccgaagtccgactggcgaggggtcgcctttttgctgaagcagaaacagccggcgaaactgaccaaagtggaagtgcagttaatcggtgcaccatcgctgcaa

SEQ ID NO: 59049 - DNA, 118 bp, Heterodera glycines
atgtccgagtcggaaaacagttgggacaaaaaggcatgtcacgctgatctcgcgctaatcgggccggacaatttggtggtaaaaaccaaagagaccaaaaatcgcagtagcagcaatg

SEQ ID NO: 59050 - DNA, 399 bp, Heterodera glycines
  unsure (1)..(399): unsure at all n locations
atncgtttccagcaaaaccacattgccgctaaagttcaaattggacaattagaaaacgaagtgcatgacttgaaacatcgaattgatcaacttgaaatgctgaatgtataacaattaattaattacctaattagtgattcatttatttagttgttttttagattttaaagctttctcagcggtcgaatgaggtcgccgaatcgtccacttccacaaaaacaaacccaaaaaagaaaaaggaactgatgaaaagcaaaagtggtagaggatgaaatttttttttataatattttgataaaattactattaattaatttttttgcagcaggcgatttgttggtcaacaatttgggaaaaggtcacggaaaaggcacgcaattataaacttaaattaataaa

SEQ ID NO: 59051 - DNA, 560 bp, Heterodera glycines
atgatcactgcgcttgcatttgtgccaattcagcatttaactgctgcaattactgcgctgaactacatcgtgggggaagaattggacccaattttaggctggtaagtttaaagcagggattttccaacaatttgcttataaaaataggttccttatcaactacaccggcgttcctttgccaaatggaacccgaacacgtccgcgttttccggtggactattggaacgtacacgaacggactgtcaatgaagaggaacgaacaaacaacatcgcggaagcagcgcatcgtcgacttcaaacgatcttcagctgtcgctatccgtcaatttggcgcttcatcgacgtacttcgaaaggatcagcgttcgcgtgacgctgattatgtgcgctgcgtgaacggcgaagaaccagcgatgaagaaaaagaagtttcggaaggcggacaagcgaattttgaatattattgaaaattttgatgcccaaaatattattgagtttctcaggggaatttcaagtaattgtgttatggacccgtgattttgttatttaatgatttttttaa

SEQ ID NO: 59052 - DNA, 1071 bp, Heterodera glycines
atgtgcggtcgtctgttagaagacattcgcgaaaaactttacccaaatgggtacaggaaaccaaaaagggcaaacaaacccaaaaatgaaaaagatttagaccaaattttgaaaaagattgaaaacgacaggaaaatctgtgttttcaaaactgaaaatattttgagacaatgtactcggattaaagaagttgtcaaagaaaattgggacatgaatgtatttatccaagggagcatatacaatggccttggaagaaaagaaagtgatttggatttagttatgataaactcaaaaggaataccgaatgattggacaaaagacgacagttgccaattttttgacaaattgcgaaaaaggttaagagaatctggaatggcattaacccggactctgataatcccttcccgaaatgtctccattttggaaatcacaattaattctgatgaccaagaaataaatgctcaaattagttgcaataatttgattggattgattaattcgaaatggttggcatgttgtgtgcagttggatgtacgatttaaaactttatattttgccattttggaatgggctgacttttttgaaattcaccaaagtgctaatggaggcggcactttaaattcttatggttggacatcacttttaattttttatttgatgaaaattcctaaccccgttttaccaaatttgatcaaaattttaccagaaatttttgaaattcgaaatgttacatacacaaagaaacaaatttttgaagtactgaaacaaaaacttatttgggagacaaccaattcccagagcatttcttcactactcattggattttttgaattttatacaaaaatcaatttagaagagagccggttgaatatgaaagaaggaaaaatcgacttttgggagaaaagtgctcaagaaatgaaaatgcatttattcattttagagccgtttggggctttcaatgtcgcaaggagtgtgacataaaatggatttatcaaaattaaaaatgcatttcatgtaacatgggaaaaattaaaattcggtattcaaaatccaaaaaagctgttagaagca

SEQ ID NO: 59053 - DNA, 659 bp, Heterodera glycines
atggcttacgccgaagagctgccgaagatgggtttgtgaatttaaatttctcaaatatctgaggaacggcagcgatcataaactatttaaggaatctctgaaaggattttttgctcttaaacttaaaaaaatttcctgggtatttttaaaaattttgcaattttaaacccatttttaaaaatagattggaaccttaaatggacatttttggattgttttgatctcatttatttttttcaatgaattttaattcgttttaattatatttgaatttcattattaataacacttgttattaagcaaatgcaaacgatccatcagaaatctctcatttggatgatgatgatgatgatgatggcagtgattcggggagattggatgacccgaacagagagcatttgcgcgattacattcttctgtgaaattgaggaaatgccaattgaggagcaacggacgatgttttggcacaagataaacaaaaagaaaataagaaaaaatttaatttctaatattatttgtatttggaaattcgtttattcatataaagcaagtctctttataatatgttgtgctgtttgtgatgagaaacctaaagctgacaatgcttaaaatattattttatttatataaatacttacatttaatgattaacaaaagaa

SEQ ID NO: 59054 - DNA, 327 bp, Heterodera glycines
atgaatattgactcgtatttggacggaatccaattcggaaaccaaaacgccaaactctctgcgactcgtccgaacattgtagaaaagtttaagggcaaatgccaaataaatgagcggactcagaattgccaccagaaaattgtgcacggggtgaagccaatgctcgtacttaaattattcataaatagcttcttcctatttggataagtatcaacaaaaaatgggggactcaattgaaaatataatttttaaaacggaaaattggacaccaaattttgtcttttgcaaaatataagaaattaacttgcttaaggttaagtaaataaa

SEQ ID NO: 59055 - DNA, 261 bp, Heterodera glycines
atgatcctttgtcgttgcattgttctgctgcagttgttccttgtactgctcgcactcctccccccatcttcgaattgttcgtgttattgcggttgctgcgactgttgcggctgttgtggcggcggttgcttttgttgcggcggcagtcgcaaccgaaacaatggcgcagcggcgacagcggcagcaattggttcgggaattatcgcaaacactgctcaacaggcagctgctgtggcaccgccaattaacgtggccgatgag

SEQ ID NO: 59056 - DNA, 1027 bp, Heterodera glycines
atggttgttgaagcaaagaaagaaaatgtcaccgcttctgtcccaacgtggcgaagacgaaggaaaagcacaacgccaacagattgggggtgagagaagcaaaacacattttaaatttcccaaatcactcctaatgattttattttcgataccataatcctagtcatatacttacgaccactatttgaaaaaagtattttcagatcactctttcacagtgatcgggatactcctaaaatgttgaaaatcgggaaaatttcgcaaataatccctatggggttggggaatttctaccaaaaaatgagtagaaataccgtacagtaaaccgagagtacccaatttacacgatgaatatggtaagaaattgagttgtgtggtgaaggattggagttttcccttcatcgtttggcagagaaggcgtcattaaactcaattaacaaacaaattaatgcaattgctgtctaatttgtccacttacagctccgagaagttgttgactccgcaacagttggagggcaagttccagcagattcggctgcttcaacagcgtccgctggccccgcttcagcccgaacttccgcccatccaaccgcccgactttccgcccctttccgcgtccgcgggcgactcgccgtcgttcgcttacgccaacgaagaaacggcgggcaaatttcggccgcaagtgaccagcggaattggccaattcattcacgtgaagccgacagtcaacggcatcggcgacgcaatgggacagcgcgcggacgccgccgccgaatttgaggacccgacacttaaacacccatttgaggagccattttggatatgaagcagcaattggaaagggactggactgtttttatgtactttacatgaaaaacccattaatttgtttgaatattttcttaaatttttaaaagattttaggaattgattaaatcataattaaccaaccatccattaaggatgggaagttgcagcgcactttatgaacataagagaacggattacatttaatgcattaaagcaa

SEQ ID NO: 59057 - DNA, 304 bp, Heterodera glycines
atgcaaacgcaactgttgcaacagcaacaaaagctgaaatcgcatcaaattttggctgctgcggccgcaaaattgccaccggcggcgacaatggccaaccaacagagggcactgatcaacaacggggccaggcagcagcaccagcaacaacaacagcaaatggtaaaatatagtatatgctatatgacaacgacaacaaaaaaaatttacattttacgaaaagcctggcaatttttttaatcaaaaagagagaaatctcagcattttacagaaaccacaaacaaaccaaaccaaaaatcgatag

SEQ ID NO: 59058 - DNA, 526 bp, Heterodera glycines
atgcgcgacacggataagaagaagaagaaggaagtaataatgcattatttaccacagtttaacaaaaaaattttcaaatttcaggaaattattgctgctgggacgaacaatgtagtgagcgaacagcagcaggacggagtccccggcgacgaacactcggactcggacaattccactgaagaacgtgcgcagaatggagtgcccggcgacgaacactcggacaatgccactgaagaacgtgcgcagaatggagtgcccggcgacgaacactcggacaatgccactgaagaacgtgcgcagaatggagtccccggcgacgaacactcggactcggacaattccactgaagaacgtgcgcagaatggagtccccggcgacgaacactcggacaatgccactgaagaacgtgcgcagaatggagtgcccggcgacgaacacgcggactcggacaattccactgaagaacgtgcgcagaatggagtgcccggcgacgaacactcggactcggacaattccactgaagaac

SEQ ID NO: 59059 - DNA, 219 bp, Heterodera glycines
atgtctaattattatggaagaattggacatttggttggcttcaatccgccgtcaaaccgtaatgaagctgaagaaatgataattgaagaagatgcaaggcttttgcttgaacaaagtttggatgaaaatgggctgcttgttgatcaatactttgaagaaatgggtttgaatgaagtgcaagatgaaaactcgcctgatgttaattcagaggatggagaa

SEQ ID NO: 59060 - DNA, 176 bp, Heterodera glycines
tcccaactatttagcccgttcgcttcaactcacgcgccatctcatcacacactccccatggaaaactttacaacagggcgcattgagtgaagttctcgattactgcgtaaataaatgtaaaactacttagacaacaccaaatatacagaacaacacatggatcaacaacagaatag

SEQ ID NO: 59061 - DNA, 1989 bp, Heterodera glycines
atggatgtcagaatcggattctccggaggcctggattttcctggacctgtattttcctggatttttgtccaggaaatccaggtccaggtcgaacatggaatccaggtccaggcttttttcaaaataccgagctctaataacgacatagcaccggggtgggttaggttcggatttgagtaaagtaagtgatttttctgtattattttttcatgtttattaaacatttaaatgaatttcaatttagaattaattaaaattaatttttattaaaaataagattaaaaaaaaataataattccatttatcccccggggggataaaaagagacgggggattatttttcaacatcctcagaaagggggacataattggagggtgtacggacatttcgcctactcgacatctcgcctaccgacatttcgcctactgacatttcgcctactaaccaaaaaacattcatttcgcctactaagccaaaaacattcatttcgcctaccaagcaaaaacattcatttcgcctacaagccaaaaacattcattttgcctacaagccaaaaacattcattttgcctactaattagtaggcgaaatgaatgtttttggcttgtaggcgaaatgaaagtatgcgaaatgtcagtaggcgaaatgaatagtaggcgaaatgacagtaggcgaaatgaccgattttgggttagtaggcgaaatgaatgtttttggcttagtaggcgaaatgtcatgtagcctaattggagacagggccttaattagagaaaatacggtattcttcgaattcaaattttaggccattgtctccgcccgccgaccaaaacaacgaaaaaggcgccaatttgtgaacctatggcaattgatgagaaaagaagaaaggaccgaccatttgattacctctgctggacttgatttgatgctatttactctttgaatgtgcttattttttcttttgtttaatggattttcattcaaaatcaaaattagatttttcgcggctaaatgttgatatttaataaaatcaacaaacattaggccatcaaaacaaataccaacgcaaatttttaaaatttatttaagtggcttataattttatgtagagcgataacgcaaaaatgagttctgctatctctctccccattttatttttgcgccaaaagtcatttgaaaaaaattgctttaaaatttcaaaaattatcgaaattttaaaaatgatgttgagcctttctctaccctcgagcccattggcaacaatttaaggcgaacagatttgaaaattgttttgataaaaaatgcgattctcgtgtttttctcatcaagtactatccgtaaaaaaataggaaaatcctaaaaatccaggctttatccaacgcattaattcttctgctatatattgtgtgacatcattcagaatttggccaaattgtgcttatttctgccaaaaaatgaaccgacggtaaggcatttttttaaagccacaattcctcacttatttagcctaattgtttcccatttcagttggatttgcaacgacgtttggatggacattttccccacttttgaccatgcccaactcggcctcaaattggcacttctttcgccacgttttgatgcgttggtggacaaacatttcgatggcaaaagcgaattgacaatttggagaccaatcgaaattagcaagcgcattggaacaaaaccgaaactatctgtgcggatggatgacaaatatgtgccatttccattgcccgacgaccgtccgttgcccagcaaaatccgttttaagagccttcagattaagtaattaaaaatcaaaagctattgcaataaaagcattcttttcctttttcagttacttcgatcactccgtcatcgcttttcttcgttccaatcaccaaattttcgacaaaagaggcaccaatttacaattgcggattcaatcatcacacaccacggaaggccagcggatttgggacatttttggtc

SEQ ID NO: 59062 - DNA, 1275 bp, Heterodera glycines
  unsure (1)..(1275): unsure at all n locations
ttgggcgctgctgccattttggcatttgcttctgctgactttgtattcgtgggtggcaatcaaatggaatttgatccgacggcggtgaattctntatttcctttcaattctttgcctttttgttgccatttgtccgttttcatttgtccgttttcatttgtccgtttttatttgtccgtccgtccctttcagccgatgttccccgattctcagttcatcgatttgatttcgcgtgacatcgaatcattctccggcccaatggcttttggccacaaatttatgagcggtgtggcccattaattgattaattatctttttaattaaatattgtccccttaattcattattaatttgtttcgttttgggcggtgccggcgaaggcgaccaacagctcggccccgacggacccttcgagcatcggcagcaagtgaaaagtgacagcgtactgcccgcttattgtgagccgccgaatccgtgtcccgttgggtacagtgaaaaggacggatgcatggaacagtttgataatacggtagggaaatggaggagtggggggagtacggtaagaaaaaggaaagagcgagatgaaggagagggaggagtgagaggaaagagacgggatagaagaaagagaaaggattaagagagagagaggtgaaagaggagggatagaaagaaagaggattgagagagagacggagatacagtaatggaaaagggcagtcatcaaaaacgattaacgctttaattgagcagtatttaaggccgaattctcgcgcagttaccaaggccagcagcagtgcctatgtgaccaggaacacatgttcaagtgagaaatgggttaaccaattagagaggcaaagcagctccaaattattgtgcactgtccctttgattacggcacttaaacggtccctttgaagttgcccgtcaaaggaaaacgccgaagagtacgcgcagggcctggagcaactgcttgcggacaacggactgcacaaatcgtacgggcctaagcacaaagcacgaattaacactaattgtcccctttgttttgcagaatgatcgccaaaaagttccatctgacgcgagcggaggtgcgcaattaaatacgctaatgactacagcaaattaccgccactttcccgcaaggaaccgcgccgtcggaaacgctccgtcgcttttgttggcccggcacacgcgacgcacagccgctacaacccgtacttggagggcattccgctgaagtcggttgccaaaaaggacggacgaaacttgaaa

SEQ ID NO: 59063 - DNA, 309 bp, Heterodera glycines
cgattcgtattgcctttaaaattcttgtcaccactcaacatcaagtttatgggtgcaatgagttcttcgtcttctgccgccccatcggacccgcagcaaaaaagcatttatgaattttcggccaaagacattgacggcaatgagaccagctttggcaaataccgtggcaaagtgctgttggtggtcaacgtagcgtcgaactgcggcttcaccgactccaactacagtcagctgaagcagttgctggacaaatacaagtcgaagggactcgaaatcgcggccttcccgtgcaaccaattcaacaaccag

SEQ ID NO: 59064 - DNA, 369 bp, Heterodera glycines
atgccaaatgggaaaggaaaagccaaaggaatgccaaatgggaaaggaaaagccaaaggaatgccaaatgggaaaggaaaagccaaaggaatgccaaatgggaaaggaaaagccaaaggaatgccaaatgggaaaggaaaagccaaaggaatgccaaatgggaaaggaaaagccaaaggaatgccaaatgggaaaggaaaagccaaaggaatgccaaatgggaaaggaaaagccaaaggaaagccactaatccgaataattggtagcaccgctgctgttcagatggagcgcctttctgctctattttggctatgcccccggcgatgtgaaggaccaaaagccgttgaacgtgttcaaaatggtcattga

SEQ ID NO: 59065 - DNA, 243 bp, Heterodera glycines
atgtcgcgcattttggccggagggggcgctgccaacggagacgaaacgctgctacgaaaacggatcggaccgggcacagcggtggcggtggacaagtcgagaatcgcggcacaaacggaaggtaatacggcacggacaaacggaaatggcaccttccaattttttggcattttagcaatgaaaaacggtgccggaattacgactggcgtcgccgctgatgacgacgaactgcttgacggcgtt

SEQ ID NO: 59066 - DNA, 595 bp, Heterodera glycines
atgaccaattcaaacactgaatacactccgatggcgcaattaaacgacgaccgattcgaacaccgaataattttccaaagcaaaagcagcaaatggcttggactgttcatgaaatgcattttaatgatgttaattgctgcttttgtatatgctttgatccgaacggttgactcatcgaaaaatatttcaaaaaaggtcaaaattaatttaatttaatattttatggacccattactatttttttccaaaagtaagaagagaatagcaatgaaatttagcagtttttttgaattcattttgtacataattataatttgattatgtcaaaaattaatgtaaaaatgtaaaaatttattagaaaaattaaaatataagttttttcagcttagttttttaattttatagagaaattaaattattttattttttgtcacttttttagttagaatgtccaaaggttaatgatacaaattttcttgcggcacttgccaaacagcagcgtggtttagtcgatgttcggcttaaggacggttccatagatgtgaacggcacgtggacacaaattcaaccgcatttcaatgttcgggataattaa

SEQ ID NO: 59067 - DNA, 330 bp, Heterodera glycines
ccaggactcaaatgtcccgctgaggtcaaaaattttttctatttctggaaaaaaatcgaaaattttccaaaaaaattaccaatcgatagagctcgaaaaactatgttttggaagtggtctccgtttttctgggaaaattcgttaaaaaatcataaaattaaaaaacccgaaaaccgttttttaggcctaactcgaaaaattttgaaaattttcgaaattttaaaatctggaaaaatcgagcttattgaactctacaataagtctgctggccaccctgcgctcaggtcaaaccctaatgagttattcggctggtactgaagtgggaaaaaa

SEQ ID NO: 59068 - DNA, 1806 bp, Heterodera glycines
  unsure (1)..(1806): unsure at all n locations
atggacctgcggatcagcactccaaaaaatttgctgcagtatttggtcaaccaatacaacaggcagcaagcacggcaaaaccccaatgcccaacagaaaactgttgatgacattggcagtgttgttcggctgtccgagcacaacgtaaattctctccaatattggaagaaaatgtatgaggattgcaacaccgtttttgcacggtgccatgacgcgaaaaaggcgcgtctcttcatcacattcacgaacaacagggaatggcctgagttcaaagagaatatatataaaaatggtcaagtatttactgaccgttttgacatgtggatgcgtgtctggaccagcaacatcgccgagttccgagaagaactttatgagaaaaagttctttggaacaatccttggatatggtgaatccatggagttccaaggtcgaggaggcccacacgctcacattgttgcccaaactgacctggacgcagtaccacatgtcattcaggaatacatatgggcgcacattccatctttgcccgataaagatgacgacacgcccattgcgaaaatgcatcgcgaaatccgcgaaacaatgcatatgcaactgcacagatgcagtgacagttggtgtggtcctagcgacccaatttacgggcggtgcaagaaggggttcccagccccttactcaaaatgtactgttttacgcccggataggcccgcgatgtatttccggccttcaccatctgatggtggtgcccaattagaggtaaacggcctaatatacgacaactcacatgtcgtgccgtataatccttatgttctgctgcgttaccgagtacaccataatgtactgtttgcatatggtaacaaagcgaatattaagtacgcactcaagtacccgtttaaagggccaggacattgttatgtcgagtgcaaagaagagtccggcaataaaatcggaattgatgagccggctcaatatgccaagatgaacttccgtggtgcaacggaagcatatgccattgttcattcaatgccatttgcccgtctttcacatcatgttgtcaaattggcaattcatttgccaaaccaacagcccattgtatatagggcattccagctggtgagcaaagctcaacaaatccagcaaggcgaactgccagaaacgcattgttcagcatattggaaacaatggcaaaatgagtggaagaatgacccaaagtttaaggacattctttttgaaaaagtcccagagcagttccgatgggcaaaggacaaatgggtcctgtacaaaaggcagcaaataaaaaggccacctatcggccgaattgttcctgtacccccatcggacccggaaaggttcgcgctctattcacttatgcgtcactttcctggagatccagatcatcttaagatggttaatgggttgctttgtacctcattcactgatgctgcaataatgcatggtcttcttgaagacggcaaaatttgggacaaaactctggcggaggcagctctgtcgcgctggccagatcagatgagatggctttttgtgagcatcatggtctatggccagccgagtaatgccatagaattgtggaacaagtacaaagaccaaatgtacaatccgcaaggcattattactccggcacagcataaagcagcagagcttgaagccctagccgaccttgattggcggctgcacagctgctttaacttaagctgtgtgcattttggcctgccagacccgccaaactncatttgcaaaatactgacgncgcaattgaagagtttttctttggcgatgatgatttga

SEQ ID NO: 59069 - DNA, 946 bp, Heterodera glycines
atggtgccgttttgggttggtgtcattttgggtggtgccgtattgggtggtgacgttatggaagggacgatttgggtaggacccacatattttgaccactttttgtacatatttttggcagccctaatggttatattttccaatttattttcatgaattttcaaaagactcatgccttaaataaaactgagaaaaatggttatcttacaaaatgtgattggagagtgaatgggaacaataaatagacaaccaaatacattaggaatatgcaatttaaaagtttttttaatttaaaatttttattgatgataattttcccgaacatcgaacaataatattagtaagtcataactaaaattttcgcattcagcaagggattggttaagtcaaaatttttacaaacaagatacgtattccgcgtgattattccgcaaatcctgcatttaaaacttacaggatccagcatggaattttgaaaatttcgaaaaaaattagaattaaattaaaaaaatatcccaaaaaactaaaatttacctaacaacttttgaaaaaaatttaaggatttaaaaaaatggctttatttaatcgaacttatttggcattccaaaaagcaatgcgggtcctgctggatccctaacaaaaaagctcaaactttcgtttgagtaaagccccagaaatttgacttattttcataggaggagtggcgaagaactcagacgccacccaccgagttgagacgatgactttggtcatgaacaaaagcaatggcataaatttaaaatagagaacaattaatcatacaatttccttattagtgactggctttttgacacccaaattaatttttgacagcttttctaagaatgtcaaaaaaattgtacaagaaaacaaggattttagcagaaatttttttatttattattaataatatattttattaaataaa

SEQ ID NO: 59070 - DNA, 821 bp, Heterodera glycines
atgaagcgacttaataaatcgattatggatttgcaagagttaatttctcaactcacactagctaacacggaatttgccgcgtgtaggcgtaaaatgagccattatgaattacaagcgtatatcttggtccacattgagtgtgtgggcgagattaagtaattttctgaaagagctcaaaagcagctttcgaatggtgtattcaattaattgtttacttgaaaattcacagagatatgtccaaccgaatcttgaaatgaataatggcgtagtattctataaaaaaattttttcttaggaattttacagtgcccagggatttgaattatccataaacacatcatagggtaaatatctagcaaaaagaaatttttttacacaaaatcctagtccagcagacagatgaagcgacttaataaatcgattatggatttgcaagagttaatttctcaactcacactagctaacacggaatttgccgcgtgtaggcgtaaaatgagccattatgaattacaatgaattacaagcgtatatcttggtccacattgagtgtgtgggcgagattaagtaattttctgaaagagctcaaaagcagctttcgaatggtgtattcaattaattgtttacttgaaaattcacagagatatgtccaaccgaatcttgaaatgaataatggcgtagtattctataaaaaaattttttcttaggaattttacagtgcccagggatttgaattatccataaacacatcatagggtaaatatctagcaaaaagaaatttttttacacaaaatcctagtccagcagacagatgaagcgactta

SEQ ID NO: 59071 - DNA, 884 bp, Heterodera glycines
atgtcgcagcctcaagaagtacagataatggaagcatttgatgaggtgaacacgcaacaatggcatgacttagataatttaaaatgtaaagcatacgaacattgcggagcagacaaagcagcagctgctgaccccgtgccaattcagctacgcggacggagtgatcgaacgcgtgccgtgcccccaggacgcggaggagtggtcgaaaaatgtcaaaaaagcggtgttgaagatcatccaggtgactgggcatctgatgccgaactgcttgaagttcgtttgccaaaatttcctccttttagttgaacctgaagcaaaacaatgcacagggcttgcatcaaagcggcgcttcgcgtgtcgaacagtttcaacaggaggcgacgggccagagcaaatcgttcaaaatccaagaggtgattgtcactttagtcgtggtttgctaatcagtcccccaacctttgctcagatcaccttggaaggcgcgtgccaaacaatgtacaccatcaacaaagcgcaacgcattggacagcagcagcagcaccagttcaatgtgaccaagacgatcaacttcaaaaagtgccaaaagattgccgacgtggccaacggtttccaggctgatcagccgcaagcgcaatgcgcacaatgccaacagtatgctctcttttgttgttgttgacaatgctttggcataaccaatcaaattaaggtattgggcccagcagcaaagtgatcagcagaacagcccaactgatcagcagaagaccaatgcgtggcaaatgggagaaagtgatcagcacccgtgtgccaaatgcgacccgaaggaagtgaaagaaaatgaggtgatcaatcgatcagattcagtggggagcgatgcggatggttaa

SEQ ID NO: 59072 - DNA, 476 bp, Heterodera glycines
atggccgaaactgatcagtcagtcagtgattggctgatcggggagcttttggttaagaaaacaatacaaatcattggccgatcaaattatcggcctaattatttaattgatcaatcattaaatggatactcccaattggtaagcttttgtttgttaagcattctgctccaatttgttcgcttcttcgtcgtccgccacctatcggtcggtgctgacgcgcgcttcgatggactcgggattggaactggacgaaatggaaaagaacagaagagacgagaggagaaagcgggacaaacggagagagcggacgagagaggaagaggaggaaaagataatggaagaaggagagagtggcagagagcgagagaatgaatcggagaaggcgaaaagtggagagacaacggcggacgcagagagcgaagagacggagagagcggaagagaacaaaaaagtgagaaatttaaacgctatttgaa

SEQ ID NO: 59073 - DNA, 903 bp, Heterodera glycines
atgttcatactgtatcaatttgtgcggttgttgtactgtaacgaaacgatgcgaagagacaataaaaaatggacggcacagtttacgaatgccccatttatcaactttcttgtagaggtaaatataatgagttttcggcactattcctggtggtcctgactttttaaatacgtgtccttgtccttaattttgggataccaatattttttttttattttccattttcgagacaaattctaaatattttctcttttttttgaaattttgatttataatttttttttgatagttataatcaagcagggcagtcagatgtgatgatttattcatcattttgattatttaatgagtcaatgatgattttttaattatcaaagcgcaaattaacctaaattgccaattttcagtgaaaatttgttaaaaaatggtcaaacttttcaattttccccggcggtgccactaaaacattcatattattattattatcgctacaaattttcgttgaccgataaacggtaatttactgtattaaattaccatattgcaaaaaagtttgaaaaaaaattgattttcatatgtgcaattaaggaatttgagaagggcatttgcgatgatcatcagcagctcgggcattgggacattccaaaatttaacaaaaaggaggcaatgcaaatttatgagtcacttatggcacagagagaaagggccaaaacaattaatttatattgtattggcatgttaattgaaaggttcattaaaatgcgaatatttttttgcaaaatgaatgctgatcggttgctacaaagcaaaaagaagctaattacgttaattggggagacaggactggttcagttggagctaatgtatccggaagtgatgaaattctgtgggttcaatggttaa

SEQ ID NO: 59074 - DNA, 605 bp, Heterodera glycines
atgtaccgcggaatatccatggtgcggatgatgccatggtcacctccggtggtcaacgcgtacttgatgtggttggaggtggtgtacagaaaggcctcattgcccgcgtcccaagcgccgcttttcacccgagtcgactcctgcacagtgccgagcacctggagaaaaaagattgaaagacgagaccaaagagtacaacgccacctccaatctcttggtgacgagggtaacggtgtgtttgctgagcaaagcggcgcattccatgttcttggaccagatgacgtactttacctgaaagcaaaaacattgcggaaacagagtgacgatttaggtttatcgttggataaaacttcaatttcaaacactttttttcaaattttcagtaattttgaacacccagttttgtgttacaacacctttgttgccttgacactggccagcacacgcttctgctgcaagtcgtacatttgcacagagtccgcgttcttcaacagcaacagccccgtgccagcatagaaaatgtcgtcgacggcacccgtgtattcaaccttgaccaattggtgataaaatataagatttaagtgaaaaaatagcatagcattaaa

SEQ ID NO: 59075 - DNA, 1179 bp, Heterodera glycines
atggcaggatggaattgccgcctccgaaatggaccgccgttcggattcgtacggagtgccggaggcgcgggcgaacggcaaaaagacggggcacacactgtcgatggttggccgttttgtagccaaagtggaccctttggagcattgcgtctttgctgcgattcgtgacattgccaatgcgagttcacgttcggaaacgatgcgcaaattggccgattggctgcgagctttgggcgtcggactgcgcacaaattcggtcatttccgttcgggaacagctccgctgggcatttcgactgtttgacgagaatctccgtctaatgaaatcggacgacagtcgcataaggtggatacaatactatcaaatttgaatcaacttcagcaaatttgattttgcgtttctttttactagtagtaactttggcggtggctcttcgcttggccgtcgtcctgtcaattgcttgctgttggcacccgaaccaaaacggttgggcgtaatccaacgggtggccctcaaaagcaaagtgcacattttcgtcgaatttgcccttcaaattttgattgaccaaatcgcaattattcgccaccatttgatcgaaaagagtgaaaaactcggtgatggtggggaagaaagtgaagacgagcacaaaactgaggaggaaaacacaaaaaatagtgaggattttaattaatttgattgtgaattttttattttcagccaaatctgtgtcagaaaaatcggaggacagacaacaaattgtgtcacttttggagcaattcgttcctttgattattgaagcgcttaaacaaaaatatgataaagtgaagcatgaacaatgttttgatttgtttttcaatttgttcagataattgcactcagtcttcgcgcattgctcaatttgttcaaatgttcacaaattttttggacatcgaatgaacgaaccgcggaattggtggaccgtttttttgtgcttttggccgattattcgtcggttggaagtgcggggaaacagtcgaatgtgactgaattgcagcagcaactattcaaggtgtacttgcagggggtacaccccaaaacgtcgccggacaaaacgtcgccgcaaaaaaaaattaaaaattttctagatttcaagaaaacttaaaagtattttagctttttgaaaatctaagtgttaataaa

SEQ ID NO: 59076 - DNA, 1951 bp, Heterodera glycines
ggtcgtcagctccgatgggcgcttactcaaatggcactttctgtcgggaaaaaccggcactttccattggctgctaggaatttaattgatgtgtggacttgcaataaagtcccattatttgaccattatttagcttttggaagcattggaaagttgggatacgcgtcgaattgaagaaccggacgcggacagacgatgcgaagtgggcgagtgctttttgaatttgataccaattgtttaaggccctggtacgtcttcacgattggtacgaacatcgggaccggcacattttgttggatgacggcgccgctcgcactcttccgttgttggcacattcgcacgttcattcgatgttacaggtacggaaaataaatttgttgcaaaggaatggcattccattacgacagaagtcggacatttccctccgggggacggccgccaacactttccggcagctgattcactttgtctcaacgacggccaatgactccaatttggacgctgtccaaatgctccgtgcccatttcattccgttgattttgcgcggcttgcgcacttccgtcgatgatgaagtgaaattattatattcatttattaagtaagtaaaaacggtcactttattttttcagtcggctcgacacgaatttatccaatgtttcgcctttctcgtccactgtttccccaatgaaccgcaatttgctgctcttcggcatttaaccgacacaacaccaacatcgacaactgcttcggcgtccgtcgactttgaaattgatcctgacgtcgatttcttcgaatgcgcgacgcatatccaactccaccgtcgtcaacgagcttttcataagcttgctgaacgtttgaacaacaaagaggttctctttccacatttaaatttgcataaatctcccattttcagctctcaattggccattcttcgctcgttcgtttcatcgttccgatcgttgagccctatctgatggacacggcgtccaatcggtcggcactctctgaccaggccctgcatcttttctcctcaatcctccgccgcaccccttggccaaaatattgtcaaatgttggaatatttcttgcgcctattggacaccgctggtgaagagagcacaaaaggtgccatccgagtgatcggcgctgttttgaatgcttttcacttcgatttgcggcacctaaaaataaagggaacgcattcgaatgaaaagggaaactgtgacgaaaaaaaagaagggaaaacagaggaagacgagggtaacgaatttggagaagggtcagaaacaccagtggacgcacaaaaggaaacggaggacatggcaagagacaaaaaggaggaggagaagcggcggatattggaagtcgttcggggaaggcttttgccgcgtctgcgcgagtgtttgcaccgttggaacggcgtcaataagccgggggttggaaatgttcacaagtggctataattcatacaatttttacagaaccactgggacgaggaagaacagaaactgttgcgtgctccgctcactctgtccatcgttaaactgctcgaatggcttccacctgaaatgtcgggccatcatttacatgggcttgtgttgttcctggaccacttgctcatgtccaggtgctccccttctgtttatctcatccttaataaattttgcggcgacagatcgccaaacactcgccaaaatgcgcgaaaattgttggagcaaatggtccgtttgttgggaccagccaaacttccgtttgtggtccgagaagtgaaacagtcgctgaataagggctaccaaatgcatgtgatggccgtaacagtgcacgctttgattggggcgatggagggccatttaaccaacggagacattgagccaattttgaaggaagtggtggacgtttgtcgatgggaaacatttggagggcacgccaaagcaaacagcgcaaaggcataa

SEQ ID NO: 59077 - DNA, 76 bp, Heterodera glycines
ataaataagagagtgcagagaaaaaaacatctctcattttggcgtactatttctttgtctctgtgaatagagaaaa

SEQ ID NO: 59078 - DNA, 162 bp, Heterodera glycines
cgcgtttgttaaaactgccaatgggtttgaaaacaaaaaatgggcaaaataattaaattaatagcttggctcaaattcaaccaaattaatatttcgtggtatcattcaatagctttaattgttctctttcagaatataattttcctaaatttttaacttaag

SEQ ID NO: 59079 - DNA, 1238 bp, Heterodera glycines
cgctggggcgaaaaggcaggaatttgtagtggtttggcaaaaattgaagataaatttgcccatttggggtctaattttcaaaaaacaatggtttgtgcaaaattttccaaaattcgcccttttttctggaaaaatctttcattttccatttcgggggaggggggggggggcggcacggataggtcctgttcaaatcttaccatacttctccggtatgtacagattgagattttgcatccaattttaaactctgcggattttataaaaacaaaaaattgggcaagaaaactaagaaaatcccattaaaattcggtattcggaatttttgtttgaattttttaatccttaattcaattcatgcatatgttgcaatgtataaattggaataatttttttaattttgacaagtaaaatttaaaaccgacaaaaaaagcacttataattttctccagcgcaattcccggatttaacatttgatatccctttaaaatttttgaacaggaaatttgaattttaatatgaataatatttgtctgatgcgccatcagttcttaactttttcctaaatgtttcttcatggaatcaagttcatataggaaaaatgttaagaatagctggcaaatcatgaatttgaattaataaattttgtattcatattttaaaaattttattttaaattcttatagaaagataatatttcaatattaatttattttaaaaaagttttaaaaatatttatgggaattcattccatattattattttttttaattaaatatttatattgcctcaagcattttgaattaattaattggcatattaatatttaatgtttaaaaagtgtcgaatactgacaaaaaaagaaaaattacgcaaattattattacaaaaatgaaaaaaattaacaatttcctaaaattaataaacaaatataaaaggacatgtaattaaaaaaatatataaagtttctcccaatcagcacaaaaatattctcaataacatcagttagacaatgcggtaaaaaatagaaataaaaataataaaaatataaaataaaacagaaatatttaatttattataattttattaaattttcatcataaaattaatattttcagctttatttggcctaccgttctgtcggtccgtctgccgatttgattgtgccggccgttgcgatatatttggttgcgttggttggcattgtgttgaacggcacagttttggtggtactgtaa

SEQ ID NO: 59080 - DNA, 174 bp, Heterodera glycines
atgtgcccatttatggaggagggggcatttgggtggcacaaaagtgccgaaaatggacgacccattgcaaaagcggagggggaaggacgccttctcagtggccaaagtgccgaagaacagccgaaaagaccacagaatgaaatccccaatgggactgctaacaatgcaaattgt

SEQ ID NO: 59081 - DNA, 1127 bp, Heterodera glycines
atgcacatcttcaaaaacttgaaggtgtgttctaatatttttgttcaattctatgccatcatttttgaaatgagtttttagcgaatctttctgaagttcgagaaacatctgtggcaattatacagccaattatccaagatggcacccaaagtgttgttgtcggacaaaggaacaaattgaaagaactgaggggaaagctgagtgagcagcggaattgtgccctctctttcatcagttctaaagaagaagtcattcaaaacagtgggtcattcattcatcgtttattctaaaaatgaatttatcttttctctccatcgttaagtttgtcagcgccttgcgacttggattaaacaagttattctattttttccaatttcttttctgttcattttcatcttttaggcgtaccaacgtctccaagatgttgacaaacgcgtgatgtgttttgaccagaaattcaatggtcttcgacagagaatggatttggcacgacaaataacggaaactccaagcatttatatgaccgctgtgccggaagtgatcagaagagaggcgctcaaaagggaattttcgtcgtggattaatttgcatattggcaaaacaatggaatttatcacagaagaaaacaaaattcgacagcaattctttgggaagttggagaagcactttctccgccaacttttccccgggatggatgaaatgatgccgcaattttcacctcaaattgctcctaaaattgaccaattgcttccgaaagtgcctttctcgcatttgcatgagctgagaagtgtaagtgtctcctttgtttaattttccttcatttgtttattttcagagattcccggagatgaaagagctgctttttgtgggtacgccgcggcttttctcccgattggcaatatccgacccaacttctccgattgcatccgcaccaattcggtccattcgtcgtgatgaaagtttctatgagcgagacaaaacttcgaatattgatgtgatgaatcggaaccttccgtccaccaattggctaaggcattattttgattaattacttttttttgtacattggtcacctccctccctatagtaaaaatatttttagaattatttaatggaaaaaaattcta

SEQ ID NO: 59082 - DNA, 925 bp, Heterodera glycines
atgaatggtatcatttcaagagaatcccgaggcttaaaccatgggctaccattagacactgtaccatttcataatggaatggtaaatttaaaaaataaaactcactcgacggcaaatggaaggaaatgtgccaatggttttcgtccctccgcaacgttttgccggtgatccgggcatagaattcgtaacattcaaagggaaacagtcgcacagcaccgaacgattggatgattttggagatcacttgggaggccaatttgaagcgcattatgtcctcaagcttggcctgaatacaaaatcaattaaagccgaaacaaaaatttgtttttggaaaactttcgtaaaagagaggatgattttttacagaaggaattgaagcatacgtagcagaaaaagcataatttaaaaaaattaagaaaacatttcggctcaatttttgtctatgagacgattcgccaaaaattccatgctaaaaaatgatcatgcttttagaagactaatatattgcttggaaaaagcattctaacgagattacagatttgggcagatatttgtaaataaaaatatgatgatgagttaaagatgccagggaaccaaaaaatgagggactcaatcgatcatttttaaccaaaatttatttttatcgaaaattatttgaattttcagaaactcatgggttgaaattaattcatttttccacaagttttacccgttgtccatcatgaatgcacgtgtggaacagcgaaggcgcaaccgaaatgccgatggcgtccggcgtcattcgagtgccgaatgtttgtgccgagtcggtgatgacgcgaaaagtgccaaacaaaagggccaacaaatgttgggaagggacgggcaaagcggtgacaattctaagaatggaaatgaaatgtattacttacaattaggattttag

SEQ ID NO: 59083 - DNA, 670 bp, Heterodera glycines
aattgtcaccgctttgcccgtcccttcccaacatttgttggcccttttgtttggcacttttcgcgtcatcaccgactcggcacaaacattcggcactcgaatgacgccggacgccatcggcatttcggttgcgccttcgctgttccacacgtgcattcatgatggacaacgggtaaaacttgtggaaaaatgaattaatttcaacccatgagtttctgaaaattcaaataattttcgataaaaataaattttggttaaaaatgatcgattgagtccctcattttttggttccctggcatctttaactcatcatcatatttttatttacaaatatctgcccaaatctgtaatctcgttagaatgctttttccaagcaatatattagtcttctaaaagcatgatcattttttagcatggaatttttggcgaatcgtctcatagacaaaaattgagccgaaatgttttcttaatttttttaaattatgctttttctgctacgtatgcttcaattccttctgtaaaaaatcatcctctcttttacgaaagttttccaaaaacaaatttttgtttcggctttaattgattttgtattcaggccaagcttgaggacataatgcgcttcaaattggcctcccaagtgatctccaaaatcatccaatcgttcggtgct

SEQ ID NO: 59084 - DNA, 1327 bp, Heterodera glycines
atggatgaattaggggctcaactcaaaaagtgtttaattttgcgacttttacagattgatgccaactttggccaacgcccttttgtgtttgacattttcgccgaaatgaatgtgggtggcacttttgggctgtgaatcaacggatgaaatgttttaaaatataaaggaaaaacaaaattgttttcaggcagctgaacaggcgacaaaaaatgcaattgccgccattgaattgccacccgaaaaagtgctttggatgaacaggtcggatgggagtgagggggcgacgagcggagtcggctttgaaattttgtgatttttgtgttagtacttttttgggataatttttcaaaaaaaaaaaaattgaggacaagggatccggcggtgccgatcacttgacaaatggtcgaaaaaattgcaactttcagcttgatcgccaaatggatgacctacgaaggatattccagggcgttggaagcgctgaaccggtcaacggccaatccaaaatcgtccatttcagagcaggccaaagaagaccgacagcagcaacaacaacaacaacagtcaccaccgccaacgacggctgcggagactgtggccaactcagtgatgcaatccatcatcgtgtttggtggcggtggtggcagtgccgccgacggtggcaccgatgccgcggcgccagcgactacaacgtcggcgggcagcatggccaacaagcgccggaccgtagtacgctctgtgcaggaggcgctggacgaggaaatggaacaccacgacaaaatggaccagcgccggtccatcttgcgcatggtcaagcggggccaacttgacgatgcgatcagtcacattgaggtgtgttgtgttgtgttgtgtgacgggcggagtgagtgagtgcttcaaaaactgaaatttttaatttctttagagatttttctgcatatttaagttctttaaaccgaatttcttaaaccgattttttaaaattttcatttttcatacaattttcgaagaaaaagttatataaaaaatctactattttcaattaaatttttttttgtttttttgtatggatggggagcgtgcgtgaaatgagctgctcccttttttggttcttttgagttttcgagactggcacctattggcatattgcgttttaaaataaccatttaaatcatttatctgcactttggagggaatgaatgccaatgttttacacaaacgaatataggcactaatttccgattattttgcaattttttagcaccattatccaacattgatggaaacgaatcgacagctggcacttttactcaaaattcaacccaattga

SEQ ID NO: 59085 - DNA, 122 bp, Heterodera glycines
gaaaatattttaaaaagatgttattcatctcccttttgatagaaaaagcatcagagagccttatttaacttttaattaacatttggtgcgtttcagagcacgttctaaaaaatatttatgaa

SEQ ID NO: 59086 - DNA, 3825 bp, Heterodera glycines
atgaaccagcataagtctctcaatgatgtgaatgtggttgaaaactcatctcgggcgacagcccttcctaataattctgaaattgaatatgaggcaaattgcccagcgtcaggaagaagctcaccatgggaaggggtccgaatgatgcccagaattacacctctgcttccgttcattgtatttctgattgtcataattcttgatttgaatggcgccaaagctgcgcctccttctcttccattaatctgccaaaccgacattcagccaacaatttggggccttcctaaacaggttcagtgcccactacccgcagaagtggccacacatgtgccactcattcaaacaagggaactgttcgtcatcaatgacttcgaacacaacacgcaagcatgggcttgccgaaaaataaaaaagaaggcaaggaagttcacaactctttccggtgtgcccgtcgttgaaccgctcgatcccgaattgctcgaaatgtccgtcgatgaatgcaaacgcatggtggaacacaaaacgtgtgacttcggcatcttgaccgaacgtgatggactttgggggaccgaccatacactcgacttgactccacggctttggcttcttggatcattttcgtggtcggacactgaaagtgaggattgctttgcttttaaaactcaggtattccatcattttggtgaagaaaccattagaaccccacttggaacaacttcacattgccgatatttgttcggtaattgcactcttaatgataaatcgattttagtctggacacctgaaaagcagctgaattgcagatatacttcaatcgggaagttcaaaggcagatacgtagcaacacatggctgtcggacgacgcgcaatatggtcttcatttcaagacaaaaactccaaaggtaagtgactgtaacaaaacacttactgtttcagagcaaggatttgccacgaggataattgtgagaaaacgaaagcgcacaaaaaggagctacggctcagtcgaacatcttggattggcaacttcaccggaaatgaatgccaaactaacttatttggatgatgaatgggtcgactcgctcatgtatgcactccgacattccttcaaaacgcagtgcgatttcttctcggtgatgacgaaaatgctgaccaacactcatcttattgatccaacttctcttgcgcgttcgttgttcaacaacaccaaagtctatgcagtcagagctggatcatctcttctcaaaatttggccttgcgtccaattgaagaaaggtgagttccgtttcaaaccaacccgattggataacaaatgctttgacaaattgccaatcgaatttgtcacacaatccgagaacagactagctttccttgacccatttacgatgatcatcgttcctgattcggcaaaagtcgcatgtgcacagcacagaaaaattgtagttcaaattgaaggccagcctctggaggtagatcaggtaacaggagaaacgaaaatcctcaaaataaaagactttgatattgagccacggctcccagggatattggaaattgaaaggcactcatttcaccaaatggctttgtttaacgtctccgacctgaatacacatgcctttctaagcggtatggtcaaggtaagtgaactcacgtatcgaatcaatgaactgcacaaaaaagtaagagtcacagtttctgaccagtggcgtgaattaacagacgaactcgagaaaaaagtagtcggagactacaaactgacatggctatgcgtcctatcatttgtaagtctagttctcttaattgattttctcttaaggtgacttccagtacttcttgaaacttacaccggtcctggatggctgggccgaatgatttggggcgcaaaaaagtcaagaggctcgtgcaacacgggagatgtgacaactgatgaatttccaaatactagcgtaaccgttgaagaaatccctttacaaagcattccagggaacccaatgaactggccaccttcagtgtcaagttttcagaccatattttcatcttccgaccccacagcagcatcaatgacaaccaatgttgtaaacaaatctccacgaaaaaggcttaggccctcttcggtcatgcaggtcggaacgagcacaacaatggcgattatgatgctgatgatctctttgcttgttgtaccactgaacgcagagaaagcatcccaatctgacttgaaagccggaacaggtatctttctcacaatttcagatttgttcgaactgattggaatcgtggtctctcttggtgcaatggctggattcatgcatgccatatgagtgtgctctcaaagagcaggagtttttgggctacggcctcatctaatcattccattatggaagaaattgttgcgaatcatacagtgacgcctcgcttaacagcgacagtccgttccctgatcaacaacagaccagtaaactgtctggctgataccggagcaagtgtttctcttgcgccgatgagtcttgccaatgaattgaaatgcaaaattttccgacaaatcacaccgttaggtcagcctccggacattggatcaacataacagcagcagcaatggtacacatcgaaattgcaggtcagaaaatttttggcgaaataaaactcattcaggatgaagttatgagtgacagaagggattatcaagtcattcttggatgtgacttgatggcaaaacttccaccgattacttttgattttgttcaaggtctaatcagtatttcaggtaaatctgtaaccatgggagaaagaggggacttgctgtactccaatgtcaaagttgtggcacgtcatcatgttgacattcaaccaggatcctatatcatgctgaccggcaaacttgattcacaaattcaacttgatcaagttgtaacacattcactggatggaggacgactctccaaaatgcatgtcgggatgatctcaactgtcgcaaagcccgtggaaggatgcatcaagatgatattaaccaacccaactgatgcaccaatcaacatttgtgccggaatgcacgtagcacttgccaatgaattgaaacaaagcgcggacggtccatggcttgaggaacaatcgcaagtaaaggaagccaatgtcaatccagaaattactacaaatgacccgtcattcaaaatcaacttcgccaaatcctctgcaacgggtgaaaacctcaacaagttgaaaaagctttgcgctgaatttgctgatgtcttctcaaaatcccaatacgatttaggctcatgccttgtgggagaacatgacatcataacaaccacggaggatccgataactgccaagccgcgcagtacgccatttcgtttcagagaagaggtcagagatcacatgcagaaatggattaaagctggagtaatggtcaattctgacactccgtggatttcaaacattgttttggtacagaagaaggacggagggctgcggccatgcatagatttcagaaaactgaatgagattacagtgcctgatcactttccactgccgagactagaagtcgttctcgagaaaattggcaattgccattggtacacctctttagacttgtcctcaggatatcttcagataagactgaccgaacgagccagcagaaaatgcggcatcatcactgaagacgatgtctaccaaatgacgcacatgcctttcggacttcgcaacgccaccagtgccttcgccagagtcatggatcatgttttttcaggactggaagactctgttatagcctatgtcgacgatttcttgatttactccaaatcgcctgatttcatttgcatttattggcactaa

SEQ ID NO: 59087 - DNA, 2674 bp, Heterodera glycines
atgccttcatcgacctcagggtctgtattgtcttcgggggcgacagcccaacctaacttttctgatgatgagtcgattcttaaagtcgtaaataagacactgtttcaaggcaaacagcaaaatagcacagtccgttttgaggacgtgagaaagttttggtgaactcatacgactcgaagagggagtcagctgcaccatccgacaagttaaccgcaagtcttacaatgttcaaaatcatcttggcatccttgccaatgaagtcaacgtaggctttcagaccttcaccgctgagatttcgaaagttgctggtaaggtaaagtccctcgaaaacctcaatttagcaaacaaaaacattcaacaagctacggctgtcactcaaccacctgtccctcatcatgctcatcctcctgtacagcaattgggacaccaaacaggacagagacctaatcaaagccaacaaagctctagtagcgatgatgaggatgatgatcagcaacgcaatgcactatccttccaaagtgtcaacatgatcactaatgcgtatcccatggcacttgaaggctacaaggatgactgtgtggtcacatttgacaggtgggcaaaacgctttagagaatacatggatgcatttggtcgaaaactcgatgaaaaggacaagcttgtcaggttggtcatttatttggatggtgttccaaaaagaattttggagaaaatggatccgaatcgaaaggccacaattgacctagctttggctaatttgcgaactgatttagattcgccgcaaagcaaaggattatcgaagcaagcgctgattgcctgtcgacaaatggacagtgagccggtcaaggacttcctcaatcgcttcattccactggctgaagcttcagtgtccgatgtgaaggatgactcacaaaaggaagcacaattacgtgagctatttcttgaaaggctacggccaaacatctcattggtcatgaaaatgttagacatgtcaaggggtaagaaattcgaacacctttgctgggaagcaagagaagtggaaataatgctctcggcgcaggctggaggcctgccatttgttcaaaaatttaagtctgttcaagcaatggacaatcaaaatttgcaatcgaattcgatgacaccgccaggtaactttagaacattagctccaacacagcaaaatcggtaccctccgagacaaaataattggcgaaaccaaccaaggcaatcgaacagaaacgaatcaaggaatggaggacgacaaagccgtgatcgggacatgggccacggccccactaatgatcgcagatggaacaatcgcccatattgcaattattgccgacgtgttggacatgttgccaacgcctgccgtactcgacttcgggattaccagaacgaacaacgaggatcctatggcaatactcgctcacaaccacagagacgcactcctgcaaccggagcaaacgcaattcaacatgataggtcaatcgaactgcttaacgaaattgcgtcggatctgcgaaatctgtcacttgacatgaaccagcataagtctctcaatgatgtgaatgtggttgaaaattcatctcgggcgacagcccttcctaataattctgaaattgaatatgaggcaaattgcccagcgtcaggaagaagctcaccatgggaaggggtccgaatgatgcccagaattacacctcttcttccgttcattgtatttctgattgccataattcttgatttgaatggcgccaaagctgcgtctccttcacttccactgatctgccaaaccgacattcagccgacaatttggggccttcctaaacaagttcactgcctactacccgcagaagtggcatcacacgtgccactcattcaaacgagggagctgttcgtcatcaatgacttcgaacacaacactcaagcatgggtttgccgaaaaataaaaaagaaggcaaggaaattcacaactctctccggcgtgcccatcgttgagccgatcgattccgaacttcttgaaatttccgtcgatgaatgcaaacgcatggtggaacacaaaacgtgtgacttcggcatcttaaccgaacgtgatggactttggggtaccggccattcacttgacttgactccacggctttggcttcttggatcattctcgtggactgacacccagagtgaggattgttttgcctttaaagttcaggtattccatcattttggtgaagaaaccatcagaaccccgcttggaacaacctcacactgccaatatttgtcagggaattgcacactaaatgacaaatcagttttggtttggacacccgaaaagcagttgaattgtaaatacacttcaattgggaaattcaaaggcagatatgtcagcaacacatggctttcagatgacgcataatttggtcttcatttcaagacaaaaactccaaaagtaagtgactgtaacaaaacacttactatttcagagcaaggattcgccacgagaataattgcgaacaagcgaaagcgcaccaaaaggagctacggctcagtcgaacatcttggattggcaacttcgccggaattgaatgccaaactaacttatttggatgatgaatgggttgactcgctcatgtatgcactccgacattccttcaaaaccaatgcgacttctttctcgcgatga

SEQ ID NO: 59088 - DNA, 1591 bp, Heterodera glycines
atgaaaatattattaatatttttattattatgcgcattaatattcaaaaaagcaattaaccaaattgaggctggcaaaataagtcaagaaaaaagttttgctgaaatatttggccaaagatgggacgaaagaactgaagaaaatatttatcgaattgggccaataatttatggacaaaatgctgatcagaataaccaatttggacaaaatattcgtcaatttgatcagaattttgatgaaaatgtggaagtgaaagaagaggagagtgaagaaatgtccacagattgtgatgaattgggcgaccaattgccaatgccaacaaataatggacaaatttatgatcaaattcgaattttaaatgacaaacagaaaagagaaattgttgaaaaattccataaaataaaagagaaagttaagcaaatgggaaagaaattcacaagaaaagaatggacaaaaattgaaataaaaattgcaaaaaaattgggtataaatcaaaagaaaatttacaaatggaaaagagaatttggaatgatgaagaacaaaaattattcagttgaagaaaaaagaataatgttaaagcaatttgatcaaatatatgcaaaattaaaaatgaaattcaatgaaaaattggagggaaaaagagaaaaatgcaaaaaaataatagcaaaacatttggacacaaatattagaacaattttttattggaagaaacaattaaaaagtggaaaaatggtgaaaaagcaaaaaactgatgatgaaaaaagagaaattgttgaaaaatattttaaattaaaaaatgaatttatgcaaaatgagaaacattcacgaaaagaatggaaagaatttaatgcaaaaattaaacaaaagtttggtgtaatttttcagacaattgaaaaatgggacaagaaaattggcttaaatcaaattctttcaaagggtgaaatttttaaacaaattgttatttattaattaaatttaaaaatttttattatttaatatattacagggcagaagcattatacatttgcggaaaaaacggaaaaaataaaacaatattatcaattgaaaaaccaaaacccaaagctcaacgatcgccaaattgcggaaattttaaatattacaaaaagatctttagaaagatataaatctgaattcaagagaaaaagtgaaggtgtcacggattgactgagaatatttttaagctttcagggctattcattgttaggttttgataaatttaaatttcttaaaaatttatatattattcggcatttcattcattttccaatttgttgcttatgtaagagttaaaagtattatgcataatgtttgaaggttgtttttttttgttctattttttgttgtaattgccagggaacggatttatatgtgccaaaaaagctccaaaaggcgcggaacgggctcaactctgtctggccaactccgtctgagccaactttgagtcaatataactcttgaagttattgaccgaatcaaacaatcttgatatcattcgaaagctcttcataggctctattagcctactaaaaattacagaaaatttcgaactataaaaaaagatagaaataaa

SEQ ID NO: 59089 - DNA, 409 bp, Heterodera glycines
  unsure (1)..(409): unsure at all n locations
ttttagcacatatttcnggtaggggtcaactccgtctggccaactccgtcctcagcaatgttcaaaaagctataacttttttctttgttggccaaacttcaccaatcatnggtatcattcgaaagccctagatgtntagaagatatttataagctatttctcagtgattaatcagttctcaaaaaagttgtcagtttaaaaccgcaaaaaaggcagaatttcaaagttttttatttctatctttttttatagttcgaaattttctgtaatttttagtaggctaatagagcctatgaagagctttcgaatgatatcaagattgtttgattcggtcaataacttcaagagttatattgactcaaagttggctcagacggagttggccagacagagttgagcccgttccgcg

SEQ ID NO: 59090 - DNA, 1133 bp, Heterodera glycines
atggacaaaaagccaaaagaacgcattaaaaggggacaaagtgtgcaaattgcaattgttgtcactgacgaagacgcagaagaaggacaaaagacggaggagaaaaaaatgtaaaggaaaaaaagaaaaacaaattaaaaataaaattaaaattaaaaagataaataaaaatataaaaaaataattacagtaatatttatagaataattaaacaaaaaataaacaattcgtaataaaaatatttaaatagaaaacataaatcaaacatttttaattttagcgctttttctgccaatcaaaacaatgtgaagccaaaaagcaacaaaaagcacggaagaagcaaaagcggcggagttttactcgtaaaatcggcgggcgttcattgggaagaaacaaagtgaaaagaaaggggaattaatttgaataattagcaattaattgttcatgatagaacgctttttaggtaacaaaacactttaaatcttaaatatttcaattgaaattattaaatattttaatgtttttttcgaatatgaacaaatttttaaaccaaaaaatttttattaagaaaaaaaaaattaagttttgggaccaatttttgaaaattttttcaattcttagggggtgtattttctgaaaaattttttgagtaatttcttaggggtgtatttttcgcttttattgcatttttgttaaggattttttcgaaaatcctaaaataggcacaatatgtaggcacaaaaaccccgaaatagtcaaaaataggcattataaaagtcatcgtagacaccccaaaccaagcggaaaacgcgtttttcgtgcttacctatgcgtatcaagtacgcaaaaattttagcatttgcctaaaaaaggaagccctagtaattactaatcataagctagcgcaaatatcttagctgacaattttctcatccaattttttatcattctttggaatgggaattgtaaaataagcattaaataggcacaaaaaacctcgaatagatagtaaagcacaaaaacttaatcatcaattgttaggaaaaattttcaatttttagaggtatattttctgaattttttagtcgattcttattcacgcaattctcatgtttaattattagctaaaaata

SEQ ID NO: 59091 - DNA, 384 bp, Heterodera glycines
atggtagccgcgccagatgaagcgcaatttcatatttcgttttacactgacgaagaagagtgagtaagagtcaaaattcattatcatatatagagagcggatatttttacaaaaaaaaacagccttgtttaggtgtaagaatttgttgcctgccgagtccatcaatgtgcccgcgtcttcgcactcggaccaactcaatgtgttgatcaaccaaatcgggtcgatgaacgatggtactttatctttaatgattttgcaaatgttttatgcaactcttgcaaatgcattcttcacttaaaatgttcggtgcttttcgggtttttcgactttcaaatatagctcgacttttcgacccccgggtacttggtttcaggactttttaaa

SEQ ID NO: 59092 - DNA, 1236 bp, Heterodera glycines
  unsure (1)..(1236): unsure at all n locations
atggctaatgcttttgacatggatttagaagtgaaatttgaagtattaaaaaccaaagtgaatgatttggaggaaaaattggcaaataaaatatccacaaatttaccctcaggagttagggtaccaaaatttgatgccaccggggatttccacagttttttacgagattttaacatcttggccaccgtttccaactggcatccacccgactgtgtcaggatgttgccactttttctggacggtgaagcaaaagaattatttttanatatcccaccggacaagaaaaaaacatggagagaattaactgatgctctggcagagcagacaaaaaaaattgatggaccaatgtggccaaagaaaatgctcgcgcgtgtaaaaatgggtaacgaaagtattactgagtttgccaataaagtgagagaattggttgaacaagcatccccaagccctaaatacacaaaagaagctcgggaggatgagagtgtccattttttcttaagcggtctaccgactgcacttaaaagaaaattatttttcatggataagccaaaatcattggttgaggccatttcccaggccaaaaaggtggtacaagtaagggaagagctcgcaaatgatgcgcgcggagatgagctgaaacaacaaatttccgaattaagtgagaaagttagcgcaattactgtgcgtaataacgggaataatgagagaaacggtcgagaattttttaattcgaattggagaggaaataataataattacacccaaatgagagggtatgcaaataacaattggcgtggaaatcaaaacatggtcaggggtcgaaatatgggaaattttaataattttaatccgagaaatgccaattttactccgattggtcagaatcggaattggaatcgaaattttggtaatcgaacaaatttcgaaaattcgcgatttcaacggggaaattttaacaataatcgaggtatgagaggaaggggtaatgaaaggcagaaataccgaataaatgcaattgggaataatgaggaaattccgtcttcttctacccgtaaatcgccaaccccaacaatgacatttctgacgatttcaatggttatattttcactgtttggtctaatcaatggccaatatcaattatgctccgagagagtgccaacaactcctatttggctcccanaatataaccgaatgttcaggggggagagtacaagaaaatggcagaaaccaaagtga

SEQ ID NO: 59093 - DNA, 258 bp, Heterodera glycines
  unsure (1)..(258): unsure at all n locations
cagaacagtggcgacanttgaggagcagtacagcacactgcaggaggagtcccaggggatgggcaaatggttgagaaaggggggcaattttaaaaaagaatataatttctccacattttcccgttaaacggtgcaatggatccaacggcaactactaacaataatcaaaggtgccgcaagatgaacagaaatataaaatatcagaaataaaagacactctttaacaatgcgagccatacatacgtcaattttgtttta

SEQ ID NO: 59094 - DNA, 118 bp, Heterodera glycines
tgtccgtttggggtactcaaacaattatggggagcaaaaatccaacgcagaattaaagtcaggctatagggaagctattcccgaaggattcggtctccccataaatctgggcgcatcg

SEQ ID NO: 59095 - DNA, 345 bp, Heterodera glycines
atggctgaggccagaaatattgctgccttaagcttcaccgtaacacacgatggcatttccgtctcttatgaccaggaagttctgcgggacatttggcacgcgttttcacgcagttataaaaaacgcatcgcaaaattcgaggtttgcttttatttttgatatttacttttgtatttcattaactttcgtgttttccagaatgatttcttcgctgggattttcccagccaatatccgttcgttggccattgtcattttccttgtggccgcattgaatgtttcattcggaaatgacaaaactccgttcaatcttgccgataagctcaattactacgtcttttcctaa

SEQ ID NO: 59096 - DNA, 994 bp, Heterodera glycines
atggtcgtgctgaatgggactcgaaagcgcatcccttcgcctaatcagccccaattgcaggaggatgaccgcgatcggcttgcccctctgaaaagtgccacggacggtcggcattgttttacgcccgccgtcggttactccgctcgtccctctactgctgccgttgactcgtcccaatgccattcgacaagtggcggcagacattgcgccgatttttccaatggcttctaccgtaccaccaccgtcgtggctaacggcggcggacttttgtccctgggcagccccggcagcggcactctgatcggagcggagcagaagtcacggtcaaccggaaatttggacaagaatggtgaggaagttcgggcatgggtcttttgcggcgaattgttttttttactttggtcgcgtttccgcgagaaatgtgctgcgagaatctcgactcgggaaatccttgacttattttatctcgcttattttttggttaaattttgacaaattcattgtctctaaaggaatctgtccaccaaatgtcggtgccgttccctcgacttctgccggccaacagcggagcttttccccatcgtcgcgcggccgtgccgaacgcggcggcataggcccacgactccaacgagaacatttgaaatacggtagggttgtcacggtaattagttttgttttggtaatttctcttttgttcaggctcactgcgcaattgtgccttaatctcatcaagcagttcgtcaggcggtcaacatcaattacggcaccaattcagcacgacggtgcccccgggggacgaattgtgcggcgaagcagcgacggcagagcaacagcagcacttaggattcattttggaccgtctgaacgacgggcagcaccaaaatcaacggcacaaagacattgacgagaacggcacggacggaatgccaaggccaaaacaaacagcggaagaatgtgtgagttgctaatgaggggggaagtgggcaagtcggta

SEQ ID NO: 59097 - DNA, 235 bp, Heterodera glycines
  unsure (1)..(235): unsure at all n locations
atgagcggtgattacagcaaagatgagctgatggcttacatgggcgaagcgaaccgaatttttgtcggattcagacaanctttgtgagttttttctcgatatttttacattttattgaattcgctcaattattnggaatttttcagggttgagccgacacttttggctttatcaatgaatggttgagtcatccgagcagcagctcaaatgccgaaaataatgatgaggtaataaa

SEQ ID NO: 59098 - DNA, 83 bp, Heterodera glycines
  unsure (1)..(83): unsure at all n locations
ttttcttaagaaccatgggtgctctatccacccaccaaatttncatttggaaatcccacggacacctggggaccttcctttgt

SEQ ID NO: 59099 - DNA, 873 bp, Heterodera glycines
atggacccgggcaaaggattatatgacaaaaatgtggacaaattgacattggccattgatgtcacagtgccaaacgaaaggaaagaacgcatttacgaaccaaatgggacaattgaaatggaaattgaaaatttgtcggaatttgcgcgagaagcctttggaagcggacgttttagcgaatccattctgttcatcaaagaacttccgtggaaaataatggcacaaataaattcgaagaatggaaacactgatcagaaatggttgggcttttacctttggtgcgctgctgcagaaaaaggtgaaatttgaacttctacactaattaagaatctgggccaaaactccaaaaatccataatttttctataattttcatcgtaaaaatatcaagaaaaagttttttttttttttggaaaatccatgaatgttcagaatttctaaaaatcaagcggcccgccaaatgctctaaaaagcaccaatggcaaaatatgcattaattctcgaaaaccaatatgcaaaagcatagaatttatagtcctattgatattaaggacgaagagaagtcatttctttgaacgagtggaactcagattcagcttggggtaagcaaatctaactttataagtaaatttttcgactcgagaatttagactttttcaagactttttcaagactttttaaaattgaatttgtttaatgtcattattatctttttttatctcattaagaagaaaattggagttgcaaatgttcggcaaccctccgaattgtttcacaaaaaggcgatgtgacggatttcagcagagatttcagtggccaaatttttaaccaaacgtcatacagctcgggattcccatatttcatcacttttgag

SEQ ID NO: 59100 - DNA, 425 bp, Heterodera glycines
atggcaatttttgttggccactcgcttcatggtcggcttgtccattggtggcactttggtagttgtctgcacatttgtcatggaactgattttgcccgcccaacggatggtcagttttattcgtcattcccgtgggcaatattattgatgtgaaaagccgaaaaaatccactcgataatcgagcttttaagcgagaataattacccaatttttaggggcagtcattccttggaaaaatcgttttcacaaatctttaagtgtaaaaaaaattaagcccaaacagatgagaaaagatgtcagttagaagattcaaaatttgaaatctttctcaaggatatcgagcactggtgctctaatttgaaggcctaaatttttttattttgaggaaaaggctgaaccaaaaaggtgagaatatgaaaaataaa

SEQ ID NO: 59101 - DNA, 685 bp, Heterodera glycines
atggcacttctcaagatttgtcttccacaaaaaattggcacaaattctcgcgtgattgtgccgtgttcgccgctgtcccgccgatcagctgcacttgagcagccgatcccattccattcaacggcactccaatttgggtggctatgcggtgccgacgcgtacaagcgtgccctctactcacaggtgggtacagcaaaaatggaatttctacggcttaggttccaaaaaaaaactggaaaataggccctaatttatataattttgggggtataaaattgctcctgtaaattcattgccaatttatatttttgttgaaaatcttaacagttttttttggagggggcgctttttgaacatttaaaaggtaattttcttgtaggaataggtgtataattttttattgcaataaattttaggaaaaatgccaaaatactttaaaaatcattggctcaaaaaagggaacaatctaaggcaactctgctccctttcttaatatccgattttttccggagtttaattatttccgcacactgcccatatccgaaagatactctaaaaaaggattttctataataagcctatttaatgttacaattttttctgtgccttcttacccgggatactgtacaaagaacaaatggtggttacagtagtgatacggtaaccaaaaacaaaatggaataaa

SEQ ID NO: 59102 - DNA, 298 bp, Heterodera glycines
atggcaattcgcaattttcttcgcttctcaaatgcttttcccggtatgtcaatgaaaaacaataagcccaaacagaataaacccaattttacatggtcaatttgatgttttgggctccaattaaagaaaggttttttaaattttttaataaacacattttgcagaaaatgtttatttttttaaagaatcgattattctcaaaaatgatttgttctttagctttttgaagattggttttttgaaataaataagactttattttttactttcaaaaatttttctattaaaaaataataaa

SEQ ID NO: 59103 - DNA, 984 bp, Heterodera glycines
atgccaactgtacgtgaaatacttgagagtctgcaaaatccaattaaaaggccccgaattccaacaaatgaagacagcgtactgaatgctgagaggacagacgcagaacaacaaatggaaggcacgtcaaccaggaatgatttggacgtcgctgaaagcgatgatgaagaaaattgtgcgcctgttcatttccaacgtggcaaaacaatccgaggagcgctttgcatttggcaccaaggtcttaatagttttttggggtttcatttgtttatttttaggcttccgatttctcaaaatacgaagcgatggaagctggttcaggtgcgaacggcgcaattgccctgcgacagcaaaattggaagatgaggaattgacgggcgttttgggtcccaaagaacaccatcatggtcttgccccatcgcgttgatgcaccagtgcgattcggtctgcattcgccgcaaccatcgactccaacaattccatcgacagaagaaagcagtttggagcttattcgacgatggggacacgaaattgtccgtccaccacgcttccccataacgttttggaatgtgcacatcagggctcaaatggcacttgaaaggacgaataacggcatggaagcacggccaattcgcagtataaagcaatacatttcagaaaggcatttatttttttggtcagcgtgaactcaaccatcatccatcatttagtgacttcattgctgcattcactaaggacattgacaaacagttagacatcggacgcgcagaacagctccagaaaagcactaaacgacgacaacggtacatcatcaaagaacaaaatgtggtgcggatccttgacgaggccgactttgaatcggaagaaggattgacaaattctttgcacctgctcgggctcgtgatgcaaggctttgtggaggggcttcacgttcgtggaaatgaagagagtggtgaagaaactgatgatgccgatggaaattaa

SEQ ID NO: 59104 - DNA, 2250 bp, Heterodera glycines
atcgcaaccaccgagactcaattctcctgcattccaatcactcgggactcaattctcttgcatttcaatcacagggactcaaatctccaggacttcaatcactgggactctattctcctgcgtttcaatcacccggactcagtttttatgcattccaatcaccgtgactcattctcctgcatttcaatcactgggactcaaccctccagcatttcaatcactgggactcaaccctccagcatttcaatcactgggactcaaccctccagcatttcaatcactgggacctaacctcaccggtccttcggcatcgcaatcatcgagactcaattctgcgatattccaatcaccgggactcaattctgcgacattccaataactgggactcaactaaccagcattccaatcactgggactcaattctccatcattcctattcccgggactcaatcccaccagcattccaatcaccgaggactcaatccttcactattccaaacaatgaactcaattttacggattcatcggcatgtcaatcacgggacttaattcagacctgttcagcataattttggaattttaaaaacgtatttctattatgaaatacaatttgcgtagaaaatccttttcataataaatacttgttctcttacattttaataatttcttttacataaacatctacatacaaaaaaagaacaaataaactgaccttatatcgttaaaagaaacttatttttgtcaaaacaaacaataagtgcgataaatccatccaattaaaaccgtatccattaaaagaggcataattgacatccgctttaattacaaaaacaaaaaaactccatttcaaggtcaaacaatttctcgaaccaaaactttttcaatacaatatcaaaactaagtgtaagatcatttccattgactttgcatatacaaaaacaattctttttctttacaaaagtgttaagagcaaaaagcactttatgatagcattagtttacacataaaaatacaaacaaataaatttcactcgcaaattgagaaaaaggctatttcaaagggaagaaattccatttttaaatacctacaaaaatacgatgttaatccctttgaaataccgaatttagtctttgaaaacaaatgctatcatgatggtgatgaaaaatgtgaattatttgccaacttatttgcaaattcgtttaacaattctgatgttgacccaggctacctaaacttgggcaatacttttgttaatcaatgttttatatcagatatagactttaacatcatcgagacacaaaaacttttgaaaaaacttccgaataaaaacgggacctccccggataatattagctataaaatattgaaaaactgccattcttcattagcaactgttattactgacctattcaggatttcattagactctggttctcttccagatatctggaaggaatcaatagtttttcctcttttcaaaaaaggggacaaatttaatcctgaaaattataggcctatttctataacctgctcactttgcagggttatggaaagaattcttagccaaaatatttacaactttctcctaaaaaacaataaaatttcggaataccaatttggttttgttagaaataggtctacgacaagtcaactaataacagttgtggaagattggtacgaggcaattataaatggaaaaaatgttgactgtatttatattgattttcaaaaagcatttgactcagtgccccataatttacttttatacaaattggaaaaaattggtataaagggcaaacttttaatgtggataaagggctttttgagtaataggacttttcgagttaaaattggggattctttatcctcaagtaaaaaagttacctctggcgtcccccagggctctgtcctgggccctttattatttttgatttatattaacgatcttcctgatgctttgccatcaggagtgaaaataaaattatatgctgatgatgttaaattatatatttgttataaagcaagaaccgacacagaaattatgcataaagcattgcataatttattcgaatgggcaaataaatggcaaataagagtttcaatgcaaaaaacttttgtattatatttgggttcaaaaaacccaaaagaaacatataaatttgatggaaatagaataaatgctgtggatacaattagggatttaggagtaaaaggtgataataaattacaattttccgatcatattaacca

SEQ ID NO: 59105 - DNA, 693 bp, Heterodera glycines
atgccacagcaggacgaagcagggccgtcaacatctgctgcatcaacagaagaagcgatggaaccatcgccatcaactccaggaccagtgccgacgcccgagatggacgaggaaatcttggaatttggcttttcgctgccgtcgacatctgtcacaccagtcggcgatttggtgccgttttcgacaacaccaactgcgccaatggacaccggagagacgatcccgccaccgctggccattgacgagcgatcagagcgcatcgaacagctggagaagcagctcaaggaccgggatgacaccattcaatttctgcgcgagcaggtccgaaaccgagaagcgctgatcagtgatctgcgtcgtcagctggagcaatgtgcggcaccaccaacggcgacaccaaccaccagcaaaagtgagtgaaatttcgatgccttctcttttcccaattaattttctcaaaaattgatcattcattttttgtcaattttagcaacgccaaacagaggaagaccaaggaaggccatcgacgaactccaacgcagctcgcgaaaacggttgacggagcagattttggacgccattgatcgggaccgatcgagatcgtgctgtatccacccaccaaatttcattcggaaatcccacggacacctggggaacttcctttgtgagacaaaaattcaaatctttttgtaa

SEQ ID NO: 59106 - DNA, 75 bp, Heterodera glycines
tagagaaaaaagataatgtttttctctggcactctctatttattggtacacatctcgttttatgaaacggtgtgt

SEQ ID NO: 59107 - DNA, 761 bp, Heterodera glycines
  unsure (1)..(761): unsure at all n locations
atgcctgctgagggatgcaagctcagtgttggataccttaaagaaacggtgagcaattcgtttctgttcaccaaggggttcgaggaggaggaggaggacaccaagaagggcagtgaccaagcaaatgcttctgcaggtgagttgacggcgggacgtgaaaaaatttcgccgcaggaattttttttaaattaaattttcaacaattttttcaagaaaaaatcttggtaaatcattttttataagaaaaattccaagaagaaaattttgaaaattttttttaataatttgttgtatattttttttttaataataattcaccataaaatacaaatttttcactttttttagaatttcggctgcgagacctttagatttctctatttttacataatttaaaatattttcttttaattttcagaaaaaagatagggagggtattaaatattctgatagaaaatgcttatagttaattgtccaaatgctgagtcggaattctgcatttttttggattaaaatttcgttgaaatttcggcgtggctttttttatatttaaaaaataaaaaattttccattttttgtaccaaataccttaaaatttcttgaaattttatgcctcatcagaacaaacaacggctgaaccaagcacaagcaaaaatcgtcgtaaaaaatcccaatttttgtacgacccanacgatgaggaggacacagtccaggacagtgatgtcgacgatgatgatgatgatgatgaaagcgcggatgag

SEQ ID NO: 59108 - DNA, 383 bp, Heterodera glycines
atgagtgtgtgccgagttggagaatgtgcggccaaagcgatgtattatttattataagtcattaaaacaataataataaatataaatattaaaatttgataattcaaatataattaaaaatatattcaaaaaaatgtattagaattacgttttgttttcttggacaaatggacccggcaaatgcacgactgaattcgcagtatcacatggaaaattatgaggaggacaataaaattgcgaccaaatgcaaaatggcacagcaaacaaaatgggcaaaacattttgaacaggacaaagtgctgcacggctttcaaattgtaatgagtgaaacggatgaggaaaaagctatggatttgtacacatcgacacaccaagaaaagtaa

SEQ ID NO: 59109 - DNA, 483 bp, Heterodera glycines
atgccaatggtgccattcgaattggtgaacgaatggacaaaggaaaagctgacattggccaaagaaaacgaaaatgacttggagaattggataatgaagcgatgcaaaattggagaggccgcggatgttcagcttcagaaagatgaaaattggggcaacaattttaacaatgtgtccatttggcttttcagtactaattgcatcgggtgagcaattaaaaaagtcatttaattttgtttaagtaattaaaatttcgcttaattaaggccattgtctccgccatcagcagaagaacaacaagaagcaggacaaagcagcgaaaaaggggcgtcgtctgctgacaaatgagtgacggacaaacgaacaaaaacaatgatcagccgcagaagaagaaatgaattaattaagaatgatcgatcgaccgatcatattcatccgtgatcaaatgcattttatgaagaaaaacctctcaaatatatataa

SEQ ID NO: 59110 - DNA, 298 bp, Heterodera glycines
atgcctgccgaagagatttggcaagaattcctcgacaaagatgaggcaaacgtaaataactttttttaaaatttttttgtctttcgataattattttattaaaactaggttatacgtgaatttttcggtggaaaagctgccatggaagttgagaagagcctacgtgaatacgccaagaagaaagaaaagagagatgaaattttgatgagaaagcgaaaagaataccaacagaagatggaaaacaacaaggacgaaaattaatctcgtaatgttgttgttaaagttgtttgataataaa

SEQ ID NO: 59111 - DNA, 103 bp, Heterodera glycines
taatgttttgtatgttttaaaataacaaatgagggccatatattaccaagccacgtatgcacaccatagccaactgggcaccctagttatatatacgttatat

SEQ ID NO: 59112 - DNA, 1226 bp, Heterodera glycines
atggccgggaaaatttttgtggtaaatgaaagaattttttatgtgaaataattttaaatattaaaaattcaggtcactggcgcaaacaagggcattggttacggcattgcgcgtgggttggcccaacaagtgaatggtgccaccatttacatgacgggtcattttttatgggtgcacccccaaaacctcgctgccgaaatttatataaaaaattccataactgaaatttttcaagaataaaaccatataatttttttcaaatttcatacttcgaaattatgaaaattttggtagcttttttttagaaatttaaaaaatatataataataaataataaaactttgaaaatattgctaataaatttaaaattttcttacaaaaaaaattctgatatttttgaaaaattaaagtttgaattggtggcgcgattttgtcccgtgcactatttatttatttatttttgaaaaatttaaatattttgattttcagcacgaacgccttcactaggcgaaaaggcattggatgacttggagaaggaattgggcacaaaacgcatttcaaaattggcatttcatcagttggacatcactgatgagaaaagttgtgccgattttgcggcatttttgaagaaaacccacggcggattggacgtgctcatcaacaatgccggctttgcatacaaagtcggcatttttggatttaagggtggcaaaattttgcctcttaaaactgcagcataatgcgacagagtcggccgcaatccaagccgatgttacgattggtgtcaattattatggtaccaaattgatcagtgatcagctgggcccattgatcagagacgggggaaggtgaggtgaaggggcgcaattgacggcacttttccgttagggaccgcaattctttgccattgccgaaaatttggcatgacgaagaagtgccgttaatggatgacaataatacataattaggcagcctaataaatttgccaatgtatttttttgtgtgtgtgtcagaattgtgaatgtgtgcagtcaaatgggcgtaatgggcagtcagattggtgtgatgggcaacctgtacaaacaggcactgattgatcagttcaaacatgccgatgtcacttcggacgatatcaacacatttgtggaggaatacaaaaagtgggaacattaaatcccaccaattttctttttttttcggaattttcgggggataatttttaaaaa

SEQ ID NO: 59113 - DNA, 450 bp, Heterodera glycines
atgaaagcttttggcaaattgaaggactatccgcaaggctcgcgttggttccatgaacggctaaaaaacgcattcgcacgcaacgccaatgtgcaggaagaggccaaagtgcgcgagctgatcaaacggggcgagtacgtggtcaaggagttggaggtgttttttggccattgacaaaatgtacaaaaaaaaagtgccaattattctgggataaggcaagctaattaccacccttccgatttgtttctcttttttttttactaatttaactcaattttgtgattttaaggcgctttatcggctgcgcaaatacagggcaatgaagaacagatattacaatgattaaatgtaaaaaaaaacattaagccaaacaaacacacatttatttgaaaaagctttcacattattaaatatttaacttaaaaattttttggaatatccacgaataaa

SEQ ID NO: 59114 - DNA, 295 bp, Heterodera glycines
ttgaatttttgttcgagtccgggtcaggggttcgaaatgggccgaaatgatatcagcatcaaattctacggcccacataaaacagttttatttcgaaactttttttgaaaattttctttttcaaaaaaggggggtacaaagtacactattaccgagcctgggaatcatacaaaaatggagcaatagagcagttcgcgcacaataaaaaacaatgtaataaataaagcttaaggcttagcctagcacccaaataataagcatgaaagcttttggcaaattgaaggactatccgcaa

SEQ ID NO: 59115 - DNA, 130 bp, Heterodera glycines
atgtccatcgttggagggcactcgcttcgtgccgaagtgattcaactttacaagacggtacaaaaaaaaaattgtttttgctattgccaaattatcatgtttgttcatttagctgtaccacttgggcaag

SEQ ID NO: 59116 - DNA, 122 bp, Heterodera glycines
ggcttttaccatgaagccttggtcaagactcggagaatttgtcttttaaagaaaattttttttcgaaataatgggttttctgggtcatagaattcgattctgatatctatttcggacccctg

SEQ ID NO: 59117 - DNA, 386 bp, Heterodera glycines
atgaaatcccaaatttttgggaataatttaggtttccggtaagttgagaaaattcgtaaaaatgctttcgaatcacaccatatttgttaattttagtcaaatatataagaaaaagctacaaaattttacagtttttttttcggggcccaaacttccacaggccatttgggaagtgaaaaaattattgtacaatttagcaaaataatcctcaacatcgatatttattgtatggagttttcaagaggccatcattgtggccaattggtcagcggaacagtgccacaaatcgggcatacgaacacagttgaggaacagctggttgaaggacgggttgagcaggttctcctccgccgagcattcctgaaaaaataatatgggagtagaca

SEQ ID NO: 59118 - DNA, 88 bp, Heterodera glycines
ggattatttttcaaaacacctcgtagcctgggggataattggagactgcgggattaatagagactgggctataattagagcatatacg

SEQ ID NO: 59119 - DNA, 193 bp, Heterodera glycines
atgcaatgctttttccatgtgatcagtgccagcataaatgaacgattggatggccttcattcgccgttgccgatcgcatttgtaaaagatgaagtcaatccgatccggcggctcattggacacattgcccgtgcatggccaagtgtagccttgatggaagcattggtttcaatgttaaagttcaatgtccaaa

SEQ ID NO: 59120 - DNA, 2158 bp, Heterodera glycines
atgataaacggcggagactgcgccaaagaattggcagagaacgacgcccttctcaaagaccattccgtatccccgttgatacacaacggaacagtgaaggaaagggtcaccgccattgaggtggggagggcacggcaaatgacggcattttcacctttgccttagccaaatcgtccatttcttttcccattctttttgaaaacccatttgaattgctaaatttcgccattttcccaggcttctggcgttgagtcatacttccgtaagtcgccctatgagcagcgcattgtgcagcagaaggcgtgcctgcagctgccgcccctgcccaccaccaccatcggctcgttcccgcaaagtgcgacggtgcgcgcgatgcgtgccaaattcaaagcgcacaaaatggcggacgcggattattgggcatttatcaacgcggagacggagcggtgcattcggatgcaggaggacattggtggggcggggaggaggaaaatgggcaaagtgttgaaaaacgataattttcaaatgccattttataaattgggccaatccatccaatggccaaccaatcaatcaatctgtcgtcattcgtcgcctttgtttaggtttggatgtgcttgtccacggcgaattcgagcgcaatgacatggtcgaatatttcgctgaacatttgcacggcttttgcgtcacttccaacggatgggttcaggtgatttttcgatttgtttccgacactttctcttccattttcaattccttcgcttttttcagtcctatgggtcgcgctgtgttaagccccccgtcctttacggcgacgtgcaaagggcgggcccaatgaccgtggcaatgaccaaatttgcgcaatcgttgaccaaaaagccggtgaagggaatgctgacggggccaatgaccattttgaagtggagctttgtgcgcaacgaccaaccgcagaaggacacccttttccaggcaatgaaaaatcattgccaattaattgttgggatttctcatttttaggttgcgttggcattgcgcgacgatgtggccgagttggagaaggagggcatcaattgcatccaaatggacgagccggcattccgcgagggattgccgttggacccggcacagcacaacgaataccttaagatcaccgtacaggcattcaaagtgagttagttgctacatagtcgtatcattgatttgaaatttcaatctgttcctccctcacaattccccccattttttagatttccactggttgtgttgcggactccactcagatttattcccacatgtgctactccgactttggcgacattttcacgcacatcgccgagttggacgcggacgtcctttgcattgagtgctctcgctcgggtaaaagcatttcccctttctttgacgctttgttcagatttgagtctgctctcctgctttgaccgctttggctatccgttgatggtcggccccggcatttacgacattcactccccgcgggtgccgtccgtcgacgaactgaaggcgcgccttcgtgcgatgctgaaatacatcccggccgggcggctcttcgccaacccggactgtgggctgaagacgcgcgattggcccgagactgaggcggcactgcgcgcaatggtcggcgcggtacgttccgtccgtgccgaattgaaatgaaaaagaaccaaagaacagcaaagaatgtgccattttcacttatggaatcctaagaaatcttaattccccttttataataagcatggttttattcgtatcacttttgacactttttaattaattattttgtttatttattaaaagtttttctgaaattacatttttattgtagacgacgacagaatatattaataaatatttaatatttttcaaatcattaggattggaaatttaagtcaaatggttttttctggtgactcgaaattgcttcaaaacgtgatgagtcgaagtgtcaaaagtatgggtaaggggtgaccggaagaggcgggtcatttcagtacgggaaaagttatttaaataacttaattgaataacatctaataataacaaatatatttgtcctctatttcagtttagacgaccacaaaaaaagacaagaccatgtaatattttgacaaatttcatgcaccataactttttatag

SEQ ID NO: 59121 - DNA, 1023 bp, Heterodera glycines
atgagattcttttctacaaaaactttccgcgcttcgacgcgtccctccgtctgcccaaattttacttcggttccgactacagtcccagccacagtaagtcgatctgaccgatcgattggcgcagtttgcccagcaacggaagcgcactgatttctcacacactttttcagccaggaattgtgtccgcttttgtgatcagtgattttcccttcagataatgggttgatcatcatggaggacctgagcagccgcgcttcgtcccttctcactttgccaggcttcgacgatgcccatgtgctggtggtcatcgacgaactctccaaaatccacgcaatttcttggaagcacggcgaactgaagcaacacttcccgatcgaaattcggcccagttttatcgagtcaatgcgatctaacgcgaaacaattggcaaaggcaaaagagcaaagcaaattcaaagtcgaataatttgttcggatttgcagattgagccgaatcaggtcggcccactgatcgaccgtcttttgtcaatgttcaatgtcgattattacgccatggcattgtacaccggagacaaatacggtcagtgaaattggcattggcacaattttaaatgtgcttttcggcttcttaaaggatttcccagttgcattgtgcacagcgacctttggtcaccaaatattttgtgggagaaaaatgccaacggcgaacccagcgaccgtttgtgtgccatcatcgactggcaaacgcttcatgacggcaacccgtgcaacgatctgtcgcgacttttggcactgaacacgtcgggacagtacagacgcgaaaatacggggcgactgttggaatattacgcaaaaaaagtggccgaacaaatgggagggacggcaccattcacaacggaacaggcaaaacgaagctgaaaatgagagcaaaaagaatcgcaaaatgtgaaattcatttcagttgagagttgcatacaaacattcactgcccttctcaatgatgtgagtgagaaacggcacgaaa

SEQ ID NO: 59122 - DNA, 151 bp, Heterodera glycines
ttacagcttaacaaggcccaattaagattatttccagaaaatctcgcatgaattctcatttttaaattttttacagatttttaaatatttggatatttttttggcttaccaaaacttcatcgaacctggctctttctattctcattcaaat

SEQ ID NO: 59123 - DNA, 186 bp, Heterodera glycines
atgaacagacggtaaggaattttttaaacttggaattttcatttccacttaatttttccaagtttcagttggatgtgcaccgacgtttggctgaacattctgcccttctttgaccatgctcaactcggcctcaatttggcattgctttctttccgtttcgatgttttggtggacaaatcattttga

SEQ ID NO: 59124 - DNA, 1153 bp, Heterodera glycines
aaacttgcaacattttgatcgccttggaatgtttctttggcctcattttggacattggatattatgccagcccttttgtggcagtttctggccaaaaattcattcgttacgaacattgtttctgggctttaatcatcccatgtgtgtgtggtgacttggcccaatttacgatggtgaccatcgccatcgatcgactgatcgctgttgcctttccattatggtaagtacagtaatttgtgtttatttttaaatttcaattcaaggttcaaacaaagagcaaacaatcgatacttggccattgtcttttcatttattttcggctatggcatttatgatttgacacttcgcttcttcgattacacatacacaaaagaaatgtaatttataagaaattaagttttgatgattatgtatattaatgaataatttaattaaatattcttcttcagtatggtctcttgcgcaacaaatgaaatggcccaaagttttttaggaaaaatattcaaaatcaatggattggtgttaagcggccttctgatgtccgcatattcactctgttggttcatggtgttcaaactgcctacagtatcacaatgttctttatttttgaatatgaatcttataaaaataattacgtatttattaagtggttagaatttactgtttctctatgaaaattttagatgttgaggaatggaatcggaaactgatcaaagcattgtctttcatcattgtcctgaatttgattggggtgttcgttagaatttctgttgagctgattttccaggcttttgccatcgcggatgtgttcatccgaacaccgtactccatcgtttcttccttcttcactattatcgtatatagtgcagacggtccattactgtacatcgttaggtgacaaataacaaaattttgccaagattcccaaatgaacatttccaaaagcctcagttgacagccaaaaaagcttcacctattttgaaaattagcatcactaaactttaacaaattcagcactgagtaccgtactcgtctaaaccaacagtttccttggttaacaaaaatatttgggccaaatgagaggaacataatccatgtaacaccttcttcaatgaatttacaacaacagcagaggagagaaagaagtgtttga

SEQ ID NO: 59125 - DNA, 785 bp, Heterodera glycines
atggccacttacctattcatcgctgctgctgccttcggagcaggaattgtaatgctgcgctttcttcattttttcaatttgcatttcataacatttttgtcttttcagtactgttggaaggcgtacctcggcccgatgctcgaccaaccgaagagcgacgacgaggagaagcccaagccggaaggaggcgaagaagcgacgaccgccggcgacaaggaggagaagaaggctggcagcaagggcgacaagcacaagaagaaggacaagaagggcgaaggcgcagcagcagcaccagcggcggacaaaaaggaggagaagcgcaaggacaaacaccgatcgaaggaggcggggaagagcgacgacagcaaagcgggcaagaaggacaagcacgggaagaaggacaagaagggcaagaagaaggacaccgccgatgcatccaccgtggacgaagcgctgggagaacagagcacagcggagacgagccaagcagaggaatagccaggccctgctgcgtgcaaatgacagtgttcgacgacgacgtctcgcgacaccaacacacccgtcccttgctttcgaccattcccttcccatccgattgctgtgttttgtctgttccaatgcttcctaaatgttccccttgtgaacagtgatccttccttatgtgacctgaatatgtatatattgtatacccattaatatattgtgcttcgcttgttcgatatttgtgaaatctcattcatattcatcgtcattgtatttgtatacacatttgatatattaataaa

SEQ ID NO: 59126 - DNA, 226 bp, Heterodera glycines
  unsure (1)..(226): unsure at all n locations
ggatgaaatgattgcccagccatgttacaaccctctcaatcacaatgtcgacaatccgctttactttccncctgattatgaagaatcggaagaaatggaagaaggcgcggaggacgaaaacattgcgaaaattgaaaggcgttggatcaaaaggaaaaagcgcatggcaattacccattgattgaactgtttgttttgttttgtcagattaaaatgtttgttgctc

SEQ ID NO: 59127 - DNA, 2079 bp, Heterodera glycines
atgacagcagcagcatcggagaattttggccctctgtcagcacattacgaggaagacgatgaactgcttacaccgacaaagcgacttcggttatagtgtactttgtaccccccctttttttgaaaaagaaaaaattcaaaaattttttttcgaaataaagttgttttatggattgtctgggtcgtagaattcgatttctttttcataaaaggggggggggggggagtacaaagtaaacgattaccgcgacttcatttaagcgaattgcggctgaattctgacgaaaaatgtgcgatgtccgattcaatcccacgggctgttgagctgtttatggagaagaaacgagcaaggatttcaaaattcctgtacacgtacaacggcaacttgcaattgaatttgccacaattgcacgcatttgcatgctcaacgggcggactgattgatgacgaatttagagaaaggtgggaggaacaaacctcgtaattctcccatagagatctcagtttacaattgccatttttgttctggcttttttaaaaaaatgcactcaaattggttcggcggataagtttttaattatttggccatcatttttctttttactcgaatgaattgtcaagcgcttttaaatagattttttatggcttaaaaatagaagttgtggtcaaaaaattcttacgttgtgttgttcttttgtatttttaaaaccaaaaatcaaaacagaagataaatctaaattgatggaaaatttattgttttagaatttggccaattctcgcaaaaaatctcccacaagcaaaacgatgtaaagatacgcaatgggacgccctccgctcggaggaatacaatgaccaaacaaatcattcgagcgacgaattgcaacaacaacagcaaacccttttcctatcagattccgactttgaatctgcactttccacgttcaccccgtccatttcgggctgtgatgatcaattgatggatgcggaggacgacgccgagggggtcgacgaccaaagaatggccccccaaaacgcaacggtactccgctcatttgggttgataaacacaaaactataaaaattgaaaagaaccgatgacattcgagtgagtcaaggtcttcgacttctctcctgaccagctgcgtgcccacaaggaatggaatcaggtcgaattggacgtggcacggacattggcacggtttccaccgaacattgacgaggacgaaagggcatgtctgcagaacgagttgaccccacttattgtgaggatattgtgcgaaaatgaagacttccgttactatcaaggtgagtgtttgttgtcgatcaactaatccttgaaaaaaccctggcgaaatttgcgttcacaatttaacccatttggcaaaatccgtcctcctttccccaggctttcacgacgtgtgtctgacttttctgttggttctcggcgctgattcggccctccaagttacgcgggacatttgtgcccgaggcgccttccacaattatttgtgctgttcgctcgaagagagtgcaatgcgcgagttgcaggacctgtacgtgttgctgttcctgcatgaccaagaagtggagaagcggctgagaagcgccgagttgggcactctgtttgcgctcagttggcccctcacttggttttcacatgcactccaaaattactcccaggtgaattttatttctgcatttccttttcataattaatttggttctaataactgttgcaggtggtcctgttcttcgaccttttcctctcttctcatccgctgatgccaatttatgtcagtgccgcgttggtcagcgaacgacgggaagaagtgttgggttgtgaagtcgacatgccatcactacaccaactgctgaaccatgtttgtctgttgttgtgtttggctgcgttatttttgacttttaccaaatgccttctccttttaagattccttccaccattaattgccatcgcgttgctgacgctgctcgtgcgctaatggaccgttacccgccgactgtcatttgcgagtttcgagaagagtaccttcgcatctgcgacaggcataagcggctaattgcg

SEQ ID NO: 59128 - DNA, 75 bp, Heterodera glycines
atggaaggaacggaaacagcgcggattgttaacggacgaattgctttggaaggagcggctgctgtacgcccgcag

SEQ ID NO: 59129 - DNA, 1911 bp, Heterodera glycines
atgaacttgcgcgacgagcgggcaaaattgctctgcgaaattttcaacggaatcaaagtgatcaaactgtacgcctgggaaattccgatgctcaaagcggtcggcagtattcgaagactcgagttgcattgtatgttcaaaagtggagtcattcggaggtgagtttgtctataatatggaaatttgtaccgtttttcatcctttcagcctagtcgacatgctcaacttcacttcaccctttctggttgccgttggctctttcaccacttttattttgctcgaccccgccggtggacggtcattgacgccgcaaatagccttcgtttctcttacactgtttaaccaaattcgaagtccaatgacaataattgggatgctgatcaatttggtcgtacaaacgacggtgagcaacaaacgaattcgcgagtttttgttggaggacgaattggaaaaaaacacaatcgaacaaaggaaaacaccgaatggtgcattttgtcatattgaagtcgaattttattttaccaaaatattcagtcacctctccgctgattcgagtaataaatgccgatttctgttgggacaacaacggaaagaatggaaagtcgaaggagggccatcgacagaatgtgcatcgtcgtacgtcctccgtctggaaccaacagaaggcaactgaacggccgacactcaccgacattggcatggaaatacgacgcgaaaagttgatcgccgttgttggcaaagtcggggcaggaaagtcatcgttactcgccgctctgttgggagagatgaaacggaccaaaggcgaactcaaaatgctggaagggatggagttggcgattgcttctgtaacttttcccaaagtccgctgattttccccatttttcctttcctcaggttccccaattgccttggattcaaaatttatctcttcggaataacattctttttgggcagccttttgaaggagaatggtatgaacgtgtgctcgacgcgtgtgcgttgcgtgccgatttggcgatgctaccgcaaggggacgccacagaaatcggggaaaaggtcggacgaaaaatcacttgagtaatttaactcactcacttgcagggcattaatttgtcgggtggccaaaaggcacgggtttccttggtaagtgttggatttttgcgtaactttaattcaggtaagttttatttgtcctcattttcaaggcacgggctgtttatcaacggaacagcgaattgtatttgttggacgatcctttgtcagcggtcgacagtcacgtgggcaagtggatttttgaaaaagtaatttgacatctgtccaaagcgcagtgttttattatcgtatagtcgacaactcataattgttttttctatgtaaattgagattttgtcgttttatcggacgccatttatctgctaccatttcattcttttcttcaggtgattggccccggcagtattttggatggaaaaagtcgcgtttttgtcacccatggtctccacttccttcatcatgtggacctaattcttcttatccaaggtcctcccccaagttcgctcctcgattcacttttactaactaaattcagatggtcgtatcgttgaacggggaacttttgacgagctgtcttcgctgcttgggggaaaatttgcacaatttgttgccgaaagtaagaaaaatggagaaaaaatagggaacggcacaaatggtcagcgcactgctgtgaattatgacattgaaccgggagtatcgaacaatgatccggatgctgaacctttgagcggccgtgttacaaccgcaactccatcaaatgccactggtgaactgacgctcccaaatggaaacactcctttgccaaagcgactgattcagaaggaacgcgtggaaacgggaagggtaaacgaacactga

SEQ ID NO: 59130 - DNA, 2548 bp, Heterodera glycines
atggtacaacaacaacggcatgacaacaagaataatagtgccggcggcgccattcttatcgaatgtagcagcagtcaaatgccgacagaaattgggccacgactaattatgagcaacaatggcacgagaaatggggcggccgagaatggcacggcacgcgccgccacaacgtcacaacagcaacaagtacaacaacaacggtgttcatcgacggacagcaacgggttcccggtcaaagacccggatgccatcaaactgtttgttggacaggtggttgtttttgtggtgccatccttgtttgtgttgggtgtaaatttatgcgcgaaactttgccgcagtaattagaggggtaaatgatgggtgattatggtttctaaggtcttgagggttaaaaaaacgcatgaaatgacagagggaagaattttttgatttatgaaaatgaataaaaagtgatggacggacgtgaaacaaaaatttggcaaaattgtgggccatattaaagtcaaaaatagcatggcagaagtttaaaaaaggagaccaaagaagaaaggcttgcgatttttatatgaaaatttcaaaaaagaaaaatgtaaatttaaagactctccagcagggttcaaatttaaattttattaaaaaaatttaactaaatttacggaaaaaagccaaatacatacaaaaaatatatagtatccagcgaaaaatttttaaaatattctaagggtaagaattagcgggaaattttgaaaattttagtttttcacaaaaacaaaattgaaattatcgaatgtcatttgcaaaatgagtgattccatccaaaaaattgggataaacccatcaaaaaaaaaacaaagccacttttgcagatcccaagaaatctggaagaaagggatctcaggcacgtgttcgaagcgtacggcaaaatctacgagttcagcatactcaaggacaaaaccaccggggtgcacaaggtcgacatttttttttccactccgcctttttcttattgtagtccaacaagaattcttttcactgaacaaggtatacggtaactaaaaaatccaacaagtgttactgtagccggtaatgtgccaatagccatatcacattttctgtttagggctgtgcctttctgacctattgccatcgggaaagtgcgctgaaatgccaggcggcactacacgatcggaaaacgcttccgggggtaaacgagggaaattgttttttgaaaaaataaaattatcgtcaagtttttggcatttaaatacttgtttcaaatttttcatggcatttataagaaaaaataatttcggattaaaaaaaactacgagtatgagaactgtcatgaacaccctccactctccccgttaattgagccgaattaaatgcgttttcccgccacccttctcagatgaaccgggccatgcaggtgaagccggcggacacggacagcagaagcagctcgccaaagcatgaggacaggaaattgtttgtgagtttttttgtccttgactgctaattgttagcattcgctttaccattgaaatttgtccttgaaatcaatgatatttgcattcccattaattagcgcttcatttaaagttgatcttattgaaaagaaaggattttaatgatttacaaaggcgtccttgataaaccgttagcctccggtttagattaaatttgtccttgaaaggaaggacatttccgttgccacatgagcgaacaaattgataacttactttccctcaagcaagaattcttatgattaacaaggacgtccttgtaaaactcttacaatagcctcagctctctgaaaatgtcccctataaaaagggtgggcaatgcaataattgtttaattgcttcatttcaaaggttggcatgctgtccaagcagtacggggaggaggacgtgcgcgcaatgttccaaccgtttggccacattgaggagatcactgtactgcgcgccgcggacggtgcatcaaaggtcggtgtcgctttgacgatatgatgagcggtgccacgagattatgagcacgccagacagaaaaccattgaaaaattcaaaaacacctgggcagaaaaagcctagcaaaagctcgatcgagatcgccaatgcttcttttccggtccatgttcaggacttgggtgcctttttgctcagtttttgatcagaaccgtattccgttgatcaaattcatggtacggcgaacaaagaactcaataaaacttaaagcccgatcaagcactctcgaaacgaggtcacctcatcccggtcgagagtcttgaaacttggtcactaagttcccacacctttccagggctgtgccttcgtcaagttcggccaggcgcatgaggcgcagcgtgccatcctcacactgcacggcagccaaacaatgcgcggcgcttccggcgcgctgacggtgaagctggcggacacggagaaggagcgccagatgcgccgcatgcaacagatggccacccaaattgggatgcttaatccgctgatgggcaaccaattgggcgccgcgacggagttcggatggg

SEQ ID NO: 59131 - DNA, 108 bp, Heterodera glycines
atgccaccaaaaccatccggcaagggagcgaagaaggcagtcaagtcgaccaaggcggtgcgcacgggagacaagaagcggagaaaggcccgcaaggagtcttactcg

SEQ ID NO: 59132 - DNA, 69 bp, Heterodera glycines
atgtccggacgcggaaagggaggaaagggacttggaaagggaggcgcgaaccgccatcgtatagcgagc

SEQ ID NO: 59133 - DNA, 1107 bp, Heterodera glycines
gttgagctgggcaaatcccagcaattcgtgctgaaaaaaatttggaatcggaatgaggatgccgaggagggcgtattgggattgggcgaattgaatgccgaaactttggaaggcttggacttggttattgaggtggttggatttccattttgcttcttttaaattaatgaaataatgattattagacaagtttcaaaaaattaaaaatttaagaaattaagtccacatttttgttttttttacgaaataggacttagttttttctttcaatttcataattttttctcaaaaatttagctaatttttctttacaaatttcgttaaattctcaaaaaaaaatttttttcccggcggcactctcggcacctaattgttattaaaattgattcaatatcgcgaaaattcctaaaaattgctgattttaatttgagatttccgtaatataaaaagaaaaataaccttcacaaattttttattaatgattttttgaatcattgttgcttctaatctaatcacatgtttaaaattggaaaagatattgcaatgatcaaattcttcgcaccaaaaaatcattaatttatatatatttttttaaatttttggtggcacatcctgacatcattcgtgatcatgccaagctgattctgtcttatgcggatctttttgtaattttcattaaatattcattcattacttcatttaatttccccatttttattgataggttgggtcaccgacggcactggcaaatcggcaaacattaaaggaaattcatgtaaatttccaattaaaaaatttatttaattttttcattttagcacagccttaagcagcacaaaaatcgctctgtgttcatcccatccggcgcactttggggcgccaaagacatacaaaaaatggccgatttgggcacattaaaagtccaaaaatgaaatttttcgaatttttaaattaattttttaaagagcctaacagtgataatgatgaagccacccacagcatttcgtctgccagcaatgaacaatgattctttgcccgaattaggtgcactgcataaattgtgtgaagaatcgagagccacaaatcaaccgaaagtgctttatgatg

SEQ ID NO: 59134 - DNA, 139 bp, Heterodera glycines
gtccaggcctgaatccaggtctcgaggagcctggatttttcctggacctggatttttgtccaggaaatccaggtccaggcttttttcaaaatgtcgatctctaattattacatttataaattcttaaatgtttaaacaa

SEQ ID NO: 59135 - DNA, 662 bp, Heterodera glycines
atgccaaacattttcaaaatccttctcattgtgcttttggccgtcatctcattccgtttctcggcttccactgatggcaaaagtaataacataatggaatgttttttgaattatttataatgatgatccttcaaattatgttaattatgtcaaaatttcgccagtttaatggccatgaaaatccttattccgtggtgaacactcaaaataaatgacataaaattgttgtttgctttaagaaactgataatgatcggaatggaaacgactcatcagctgggattggtacgaagatcaaacgaattgtcaccgctgggctgctcttcacttccctggccacgggtgggacaggagcgattgggcgaagcaatgcccagggaggaattgccgccggcgcaatggtatacgaattgttagggacgctaattgtgccaagttaccacgatacgaatgcaactcagtttcaccaggctccaccacctcctcctgcgaactttgaaaaggcaaccccggtagaaaaaataagcacacacttacacgaactttctgagcgaatgctgttaaataaagcgcccgaggtaggaaaaaagtcgacttcaataattgtcttcttattctgcaatttagcgagtggtacctggtggacccaacccattacatcat

SEQ ID NO: 59136 - DNA, 601 bp, Heterodera glycines
cgatttgaacagcgctttctaccgcaaagtacaggacgaacggatgcgtgccgcgggtgtaatgccaaatgatgagctgctgaatccgttgttgccctacgggggcggtggcggcgacactttggaccgacacattccgacggcgccctttggcccaccgcagacgatgttcgagttgaagcactcccagcagcaactgcaccatgcacagcagcagccgtaccgattctgggaaagtggtgcgacctctgccgacacaatgcattcggctggcgtgggatggcatccgccgtattacgttcaacaacaaccccaaaagcaatcctacggcagtgcgagtgccaacaccgaaccaacccaagcggagccgtaccaaatcgcgagcatccaacaagaacaggtcggtgacgacgagttggagggcaggaattttacataattgggcgattaactctcgagtcatttcgttagttttttttcttgcatttagttgcgtttctcggatcagatgatcggcgaggacagcaccacttttttgacactgggagaatgggaaggggcaatgatcagcggtgccactttcaaggcatcaatcgatcaa

SEQ ID NO: 59137 - DNA, 842 bp, Heterodera glycines
atgcttcttagtgggtatttttcggaaatttttagggctaataaaaacctaaaatatcatcccttgttattagtagggcttcgtttttaggcaaatgcctaaaatttctgtgcacttgatacgctcaaataaacacgcctttttcacttggtttggggtgtctacgatgacttttacaatgcctaattttgtctattttcgacttttgtgcccaaagcctgaacgcctatttttgtgcatatttcgccatttttggcgccttcaggattttcgaaaaaaatttccacaaaaattgattccatataaatattttttttcttgataaaaattttttgtttaaattatccttattctaaaaactttaaaatatttaataattttgctaaaattgaaatataactaaaattaagtgttttgattaagtttttatgtgtttgtaacctaaaaaacgatcaaccctagttattagcatggaatattaaaaataaattaataaacaggtttaacaaaaaaagtttaaataaattagttttatcatttgcaactttttattctttctctaatttcctttctttcaatgcataaacatgcacattttcatgtcaatttttcagagttctgtccagacttggtcagtgcgtacggatgtgcagccaaagcaaaaccgaagacaaatatgggactatccgaactcaagccatcagaaatttgttgaattcatgtccaatattgatggacggcaacgctttggccgacagattgccctgtttttagacaccagcaaatgcgtcattcgaccgcttgagactgatgtacgacctcagtgatcattgatcaataaa

SEQ ID NO: 59138 - DNA, 1092 bp, Heterodera glycines
atggacgaagccaaggcggaggtggaagaaattgtcgattatttgagggacccgcgtcgttacacttcgcttggtgctcgtttgccaaaagtccgtgggtcaataacattttgaatctaatatatttttctcagggtgttctgttggttggccctccggggacgggcaaaacgcttttggcgcgcgctatcgcaggcgaagctgactgtccattcttccacgcggtcggctccgagtttgacgagattctcgttgggcagggcgccaagcgagttcgtgaactctttcgtgagttttcctttccgttttgttcctttgtcccctcatttgtcgacctttctttttcttaaatttgctacagatttctctcgcatttattaccatcttttcgttgaataattattcgcctaattttctgattctttactctccaggtttggccaaggagaatcagccttgcgttgtgtttatcgatgagattgactcggtgggctcgaaacgaacaaacagtgccattcatccgcatgccaaccaaaccatcaaccaacttttggccgaaatggacggctttgaacagaaccagggagtgatcgtgatcggtgcaacaaaccgagttgataatctcgacaaagcactgcttcgaccgggcagattcgatgtgcaggtcactgtatcgaggccggacttgccgagccgaaaggacattttcaggttaacaaaatcaaagaatgggttgaaagtaaaaagattttataaaactacttttggtcattcaataatgacccaatcgaacgcaattaccaaaaatactgttaagactgtatttggacaaaattgtgcatggcgacattaacgttacccaattagccaaaggaacgaccggatttactggcgcaggtgggaaattgctttacagggttggaaattactgaattttgttatttcaagacattgaaaacttggtcaaccaagcagcacttaaggcagccaaagaaggggcaaaggaagtggacatggcccatttggacgaagccagaggtttcaaaggcaaacacttaaataaaatttgttaaatttcagatcgtgttttga

SEQ ID NO: 59139 - DNA, 1748 bp, Heterodera glycines
cgaaaaaatttaaattgtactctattgttatggctgaacaacaacaacaaaatcttttggggtcaatgccaccttttggccaagtaataattaaataaaaataaataaatataataaataacttaaattgtttaaaggttgctcaattggtggaaccaatgctcgtaaacgcggcccaacagtattttgcggtgctttcttcttatttaacattattaaaatttaaaaattgccatttcagcagcctttctgtacggatggcacgcacaacattcaatttttgaatggatgtgtttcccagttgggtcagccattgccgtatgtttaatattaccaatcaatcgatattaaattgtgttgagttttttagcccgctgtgcctgatcgtcgtttcgattgagcaccgcgcttcacagcagacgccagctgggcctcttcccatgacgaactgtgtgctgcgcacgggtgacggccaccgcgttgaggccgcgggatggcaggcgcacgcgggtgccctggcggacttgtgtgttggcagcgcctactggttcaccaactgtgtggcccgtgccaggtaccagcgactcgactgctggtaccgcgttagcgtaggcggccccaacgcactggtgatgccgcacgtgtccacagcggtaagttttttttattatttttttattattataataataaaatcttttagccaatgttgagtgcgcatccgatgccgcctgttcagacgggggcgggggtattggaggtaatgggcgaataaaatattgataataaataaataaaaatgcatttcaggtcactgttcctgtgcagcttggaccaccaaggtcacgcgacaccgatgctggcgacatcgacatcaatgtaagaaaaaactttattaaactaaataattctttatttaaatataattcatgattttaggccaatgaagtcgttgagcggggccagacctcacgtgagcgactgcctcagcgacgtgccgcgcaacgggttggtttgcgggtccgattcaatttgtccccagaagtagaagagatcccgagaggggaaagacaaaaaccctatcccgcccgtaaaattaggttgcttcccaattttgacatttcacccattcacattgaaaaatcccttgactgcccaatttgcatgtgcccttttgtgattggggatggggccacttctcttcattgctttcatatttttcacacgggttgtattgttccttggcttaggatccaccgaatttgtccaacttgtaaatatttattgccatgaataaatttttgacttaattaaaggcagggagaccgattgaagaatgctttgtgattgagcggacaacggcaatgcgcaacgcgccacgtaacacccgaggcgaaatttgtgagctgcgctttctgccgctggaggatgctgagcggcctgaccttttgatggaggcgctaatccaacatctgctggatcgagtgctagagggtcagccgcgcccgtccctgattggcctgcaagtccacccgccgggctttgatcgcccttatgtcatccgtcttcgaccacctgagcagaacaacgctgcgacactggcggcagcgattgagcgactaaacgaacagtcggcagcgggcattgatttgttggcgggaaggacgatcaccaaagtgctggctgtgtggccccttgaagcaattcgcgcggacccacagagcggaggtgagctgtccgtttattaa

SEQ ID NO: 59140 - DNA, 987 bp, Heterodera glycines
aggaagaagaactgcgagaaaatggcacaaagagaaagcacagcaaaaaggaaggtgatcagccggaggggggggggcactatttccaagacaagtgccaattaacacaaaaatgattaaactcactctttcatctgaatggttattggccccctggttttccctatggtcctatgcaggaggcactccgtctgttcacacttgggccttttgctaatcactaattacccccctcccctcccctccaccacaacggcactctctctccctctcttccgcactttcacgtaagtcattcgttcttttcacggattgtttttctctgttcgtgtttgtgtttgttgttctatggcgttttgtctaaaccgtcactttcatccaataacaattaccgttcctatgattattagcatttctaattattagcattttcaccccaatcacttctatgtttgacacaatttctcacacaccgaaacacttatcagacttaaaaaaagaaaaaaatcagctaacttctactaatcatagcactacggtgtatcagtaactaatcgaatatttcctttaatttcttctcaaactatcgctccccctcccttttcttgcttactgtgctctttgttatcgtaatccgtctttacatttttctactttgcagtaatcattcatgaacctgcagtgctcatcgaaggcgttctgtttcgggcgcgttatttgggctcaactcaaatgagttcggacggtcggccgtccaaaagttcgcgaatggcacaggcacaagaggcggtggcacgcgtaaaagtgagaaaaacggaatggggatttggaatgaaaaattggaaatccgaggattaaatactaatggatggactgtctatggactttttttttaggctccggacggcgaattgcagcccagcactgagatagacctgttcatttcaaccgagaagataatggtattgaacaccgaccttcaggtca

SEQ ID NO: 59141 - DNA, 896 bp, Heterodera glycines
attcaaaaattggcaggcaaactttttattcaatcattttcagcttattatgtttcgaaattgtctcctggatttaactcctctccgttgtgcatttattgcaaataaactggctcattattcttccaaaacaccaacattttcgaattgcattccttcaccaattttatcgggaaatcaattgtttcgaattattcgtgacaaaattcgcacctcaggcccaattacggttgctgaatacatgcaaatttgtgccacttctcaacttggttattatgctggtcaagtaattctcttttgatcttatcagtcatcacaagtgctattttagaatgaaatttttggagagcgtggtaaaatttctggatttaaacggaagcaagtgcatctttttcaggtgactttgtaacttcgccggagctgactcagatattcggagaattagtaggcaatgctttggttgtaagccgtgtccgttgtatttagattgggagttgggttgttcatgagttggaaatgacctcttggaaggaccggtggcaattggtcgaactcgggccgggctcgggcgaattgatggccgatgtgcttaatgtgctgcgccaatttgatgttccttccgtactcattccttttttaattctcttacttaaggtattacaaaatgttgaagtttatttggttgaaagttccgagcgtttagtggagcgccaacgagaaactttgaagaagaaatttggcgaagatttacttagaaccattcgatggtacgattcattggatgatgtgccacaaggggttggtcagcggaaagccaaaaagggcccatgggacggtgcacccaaaatgtcatcggtcgagacgtcgtcgcattttttggaccgcattttcttttt

SEQ ID NO: 59142 - DNA, 820 bp, Heterodera glycines
atgccagaactgccaaatttgaaaatggcgtcactgcaaatgccgtgttgtccgcccagcacatcggcatccgcttcatccgcaaacacaaccacatccacgtcatcgatggagcccggtggtggtggcggcgggggtggcacagatgccgaaagtgaacagtcacaacagaacaacggactgctggccaagaaggaccaggcatgttcaaggacatttcaaggacaagaccatagcatggattgagtcccttttttggagaggataatccggattagaaaagccaatttagcggctgagtgtgaaggacaactacagcatataatgaagccatataattcggaaaataataatgcctggattaggaaacggatttgtacctatttggcttataataggggcaatagggatttaaggcccaacaacaaacctctccgaaatcggaagaattctgagaattaaataatcataattggaattctaaaaccctcgagaaatttcggagtcggaatttttatgtttcagaaattagaaattgaaattcgtcgaacctccaaaattaaaaaaaaatcgggaattgtattctatcggccgaaatttaaaaaaaaattaaattttttaaaatatttctcagtttagcaagcgcaggattttgggcaaatattggcctccgatgatgacgacttcaaatggtggacaaacattgatggagatgatcagcaacaacagcagcagaaggtgtccatggagaacttcgcgttgatcagagtgttggggaagggcggtgagaaaaatttggaattattaaaaattaaataaa

SEQ ID NO: 59143 - DNA, 568 bp, Heterodera glycines
atgcgcacacgattggaggacatcaaggaaattgtgcgcacggagttgcccgaccagcccaaccatctgcatctcttggaaaagcagttggactgtgagtgtgccgaaaccggcacaattaacggagggagaggggttaatggcaaatcgtaggaaaattgaggaaagaattgacccaaaacatttttgaaagaatttccgctttcgatttggggattccgttggtaaattctgaaaaaaaaaataaattggaaaacattttttcaaaaatttccctaaaaattttacgatttccatggaaggcatcacaaattggagcagtaattcttattttgtcaccacttttgcagactatttcgccaaccattccgccgaggcgttggaggcgagcggcaaactgaatctcggcattgcggagcgggcggctgctgccgcgttggcgccctccgtgtcactgtccgcgagcgggagcagcaccaacagcaactggagcaagcgggaggaggaggacagaagccgacgacatgccggtggaggagggatggaatgggaggagaatgaggagtag

SEQ ID NO: 59144 - DNA, 1683 bp, Heterodera glycines
atgggcgattcatgcttaatttctgattcaacaagaggacacacaatttcgccgccgtcctatgattttgtcgcagttttgcgtcggccgagtaataaaaataaataaagaattaattaaaatgaattaattatcttttagttaatacaacgatcctcatcaaacgacaattaaagaacaaacgaacgctgacaaaaatgctcagtaaaccaaggacagaaactgcaattgttttgcctgaacggaggatggacactaattttttgtcgccaaaagaccgagaattgtacgtcaatttattagtttaacaaataataagaaaaatatatttgattatttattattaattaatcatggcattgaagaatttttggctcattaatttttagaaaaaaatatttacatcaatataatattgtttttttatttttattttatagttactatattataaaatttattaataaaatttttattttttttcagaatttatttgtgttggcacaataacattgtgacaagtcgaagcgatctgttccacaaggcaatgcattattgcattcatgcgagcccaaagatgaacgaaattatcgcgtgcggccactattgctatagagacctgacaaaatggccaaaacttaacagaatttggttaataaataatcaatttaaaaaaatgattcttttgatgtggtgaaagaaggaattggagtgtgggagaaagtcggataaaaaacatgggaggaccccttaaaggagttgcccgtagcgcagtcgggtagagcattccacggtatggaagggcgccgtgggttcgagtcccatcgaagcgagtaaacttttatgttctatattttttcttgcctttttcgatatatatgaccttatacaaaattgttgcgttctaaacatataaaatttaataagttatacccaaagttcataccatattttcttaatgagttaaatttatttattatgaaaatcaaattgaaaatgccaacaattctaaaatattttaaatgataataatttaaaaatataaaagtttattataaattatctatttattcaattttcagtcaggcaattttcaagtttttcgataaactgatcaatgaatacaaaatggatgaggataaaatgtacgatgcatgtgtacatcttggcgaaatgcatgcaaattatgcccagtatgggcttaagcaacattttatggacctttttcaacaacaattattaggtgggagaatttttaatataaaatattggtttaaaatgaattagaaaatttaacttgatgtaattttaggcaagtattaattattgtaaaatttaatttacgcctttttaaaatttgacttaaaaagtgaatttgcagaataatccaataaaatattttgttcttctaatcaaaagccacaattttcttaattagcgccaaatatttaatgtttttttcaaattaatatgtatttacatgaatcaaaaattattttgtctgttactgtaacattttattttgtagcaattattgcacgacttgaaatggacaacaaagtcgaaacatgcatcgcatttacacatcttatcacatttgtggtcgatataatgatacaagcgtacagcaaaaagacatcggaaattcgggccacaacgaaatgatcaaattacaaaaataaa

SEQ ID NO: 59145 - DNA, 321 bp, Heterodera glycines
atgatggcaattgatggatcgccgccccacacaacaacaatggcatcacaaaataatgctgcggcattggcatttgctggcatgaacggcaaccgttcgtcaccgccttacaacaatcgactgtcacagcaacagcagcagcagtacggtatcatcatggagacggtgccggaggaagtgctgctgcacacgcccgattccaccgatgcggacaatggcacatttttcacatctgccggcataatgatgcaattggcagatgagcagcaactgcagcagcaacagcaacgaacaatttcccgcaattccacacatgtttaa

SEQ ID NO: 59146 - DNA, 626 bp, Heterodera glycines
  unsure (1)..(626): unsure at all n locations
atggtcgttttccgcgaggacaaaacgtttgaggacgagctgaggacgtggatgttgtggcacaaacggcaacattcgcacaagcagcgaatcatcgaagtgagaacatttgggggaatttggaggggaaagtcagaaattacgaattaaaattgaagaaaaaaaaacaaaataaaatttaatttaataaaaaaacataaataaatcgagacaattaaactaatattaaaaatatttaaaatttattttcaattttttatggcaaaaatgctttttaaatgtaaaataaataaggaaaaattaaaaaaataataatgaaaaatcgaaattgataattaaaatattgtggattatggactcgaatatttaaatgtaaatctctaataatacaagataaaataaatgctttgtgaaattaaaattattaaactcaatattaaaatattttaaatttattttctattttttatgtcatattttttctttaaagattcgatttaaatgtaaaataaaataaagattcataaatttaaaagatcaaattttagaaacaaatgtttaaatttaaattccctaatattcgagtggttaaattaattatttttanaattaaatttaataattaa

SEQ ID NO: 59147 - DNA, 298 bp, Heterodera glycines
atggaaaatgaaaggaatggaaatggcggtgccgttttggtcaccggcgcggccggcttcatcggctcccacaccattttggagctgttggatgccggatttgacgtggtggcggtggacaatttttccaactcaattcccggtgatttaaatataaaaattaattaaaataattgaagttaaaattaatttttaattattttcagatgccaaaaacaatgcgctaagtttgcaaagggtcagtgagctgagcggtggcaaaagcataaggcaagtgaatggcaatttgcttatttaa

SEQ ID NO: 59148 - DNA, 2061 bp, Heterodera glycines
atccattttcagaggaatccgtggccaaaccaattgattactacacaaataacattgttggctcgctgaacctgatcaaggtacagtactaccatatattaactgtcattattttgttggttactgtattcttttacgccgtttcgttttttgtcccatttcttttttagaacagaaaacggtgagaaaatttcaaattttgcatttaaaattatttttaatcttttgatttatatttgttttttctcgatttcccaattctacttgtaggtttcggaaataaaatttaaaatttttaaatttgtttaaattaatttattaatatatttatttaattaataattatatttaaaaataaaattttaacaatttttggtagaaattcagaaataattttaaatatttattaaaattaaaataaaagtcactttaaggatgtctagattttattagtaaaaatttagttttttttataattattctttttttgttttaatcgccaaaaacactgtctaaaattctcttttcccccccccctattttcagtgctgcaaaaagttcggcgtcaagcagttcatcttctccagcagtgccaccgtttacggccaacccgagcatttgccgttgacggagacgggccgagtgggcgtcggcatcaccaacccatacggacagtccaagcacatggtggagcaaattctgatggacttgaagcgggcggaacaggtcaatttttggggaatgatcagagagttcatttgtgcgactgaccaatcattttgtttgactcgttcattatggtgaaacgtgggactgatcaatgcttcttatggacctaatagacgcatttgttgttgatcaatttgtggtttgatcagtgcttttttgtgtcttatcggttcatcatttgtgcgttgatcagtgcattttactgaatctgatcaaactgtggttctaatcaatgcatttattggcctgatctctgatcagtgaattttatctctgaccaatggaattgtggcctaatctgtgtatttcttctgtctgatcagcactttttgatggtctaatctaagtgtctaatcaatgcatttgttgatcggatcaaaggatttgtggattgatcaattctttttgtgtcataataattcatttgtttgtggatttgatcattttgatcacttcattgactttcaacaggactggcaaatctccattctgcgctatttcaaccccgtgggcgcccatccgagcggacgcattggcgaagacccgcagggcatcccgaataatttggtgggggcgggacaaaaaataattgcggataaaaattggaaaaccattttgtcacagatgccatacattgccaatgtggccatcggcaaactgccccacctgaacatttatggcaccaaatacgacacgccggacggcaccggagtgcgggactacattcacattgtggacctggccaaagtgccgtggggggtgttggaaattggcacgatttgttggcacactttttgggggaaataatgcatggataaagggtggggggagcggagcaggtccttcccctgaaaaattaaaaaacctaactgaaatttttcaaaaaagcatagaaattttaaagaaaatttcaagcaaaaaaatcagcgtttttaaagtttcatgatgaatttatttataaatttttttaaaaaatcgttgaaaaatttttaaaaacactttctccaaattttctcgtaaaaatttttcatgatttttttgaaaattttcaagcaaaattgcgttttttttgggggggggggaaatttggacagcagatcagatctctgggcggattttcccgatcagaaatccgctggatttaattgggtaaataagtttttcaggcccacgtggcggcgcttgtccaccttggcaagcacacaccctcagcagcggatggcaaggagttgtgcgaggtgtacaacttgggcaccggcaaaggccattccgtgcgcgaaatggtcgccggctttgagagggcggccggcaaaacggtgggagagaaaactc

SEQ ID NO: 59149 - DNA, 249 bp, Heterodera glycines
atgccagctgttgactgtttgaatgggtatcgcagttacactgatcgctgtggggagttttttatgggggacccattggacccaaatatggagacagacttcgattttgctggaaacttggcgctttttgacaaggctgttagtaattaatgtgatacttatgcagttttaaattaaatttttttttaataatatatatttagtacaaaaaatacgctggctcattttgattcctttccacctgctaaa

SEQ ID NO: 59150 - DNA, 231 bp, Heterodera glycines
atgggcttgactcggccggcgattgttctcggaactatcgcaatgatgagaatgttcttcaggtatgtaaattattgtttacttctgctctattcatttcgcttaaggattcttcccgtgttatctcgtggaccaaaaataccactgctgatgatgatgacaatcaaaacaattctacctcctctccgatcgactgacctcataaaacgatttgaacatcgcccaatttag

SEQ ID NO: 59151 - DNA, 1282 bp, Heterodera glycines
atggccgacttcgaagggcgtgtcaaagcttaccgcttcgtggcttacacgaccgtttctttctccatcatctcacttttgtcggtgtgcttgacactgccaatgctgaagagttacgtgtcgaacgtgggcatgaaaatggactctgagctcagctcatgccaggcaaagaatacggcacacaatttaagtgctaaaagtgccattttcagcacaatgccaaagacatttggtccgaagtcagtcagctgaaggggctgcctctgctggtctccggaaaccgtacggcgcgtagcgcatacggtagctgccaagagtgttgctccggcggtgcccaaggccagcccggccaacccggacagcctggacgacccggaaacccgggagcacccggctcacccggacagcccggacaaaccccgcagacgccttgtgagcaagtgcacccggtaaattcgggttgggtttagtcttgagtcccgtgaatttggcatcaaacgtgtaatcataatttccatgctcagcctccatgcaccccgtgccctggcggtcagcccggaaacaatggcccaccgggacccccgggagcgcctggatcaccaggccaacccggtaccggaggaggacagccgcaaccgggagagcccggtccacctgggcccaatggccagcctggccaacccggacagcctggagcgcctggacagcccggacaacctgccagcccaccgcagacggagccccctcctccaggcccacctggtagaccgacacagacattcgcttaatttttaacggactaattaatctctgtttcaggagaggctggtgcacccggacagcccggtcagcctggagcccctggacagcccggcgcgtccggacagcccggcccgaagggaccgcctggaggcccaggacagccaggcaacggcggagcaccgggccagcccggccaacccggacagcctggcaaccccggagagcgcggaatctgtcccaaatactgtgccgtggacggcggagtgttcttcgaggacggcacccgaagacgttgaaaaaagctattctgatcaggggaagaaaacgcagaaaatcagtagcgattgccctcccctcccccgtgcccttctcctccccattttccactgcctttcttttccttcctttttttattttgtttagcttttccaattcgcccaaattcccccccccccccccttaattgcttctctttgtaatcgccgctatgccaagttgccaaaaatcaacaacaaataaa

SEQ ID NO: 59152 - DNA, 475 bp, Heterodera glycines
atggcaccaagaatgccgttaacggctgtcggtggaataccaaaaagcagtaaaaacgcttctttgtttaaagcaattacctatgctttaatcaattcagatgcaattggtctctgtttgatttgcaaggaactttcttttggcaaacactacggtttgtttgggaagaatcatttctcgagaattgacttcaatgcccttgtttaggttgtataagttgccttggttgtaaaactttctttcgtcggtaattattccctttttatcccttttgcattttatgctttcttttttgaatttcgttttagtgctgttatgcacaaccaggacactgtgtgcaaaaagccaggcttttgtgagttcgaagtgtcggctcgtcgactttgtcgttcgtgtcgatttcgtaggtcctcgatggacaatgaattttgtcgtttatattttgattatcataggtgtctcgagatgggaatga

SEQ ID NO: 59153 - DNA, 607 bp, Heterodera glycines
atggtaaatttgtggcgcctaattaatcccggctctaacggcacacttaaattaatttatttttaattaatttattattatttacatttctacagtcatttaactctcctctgttaagctttaaagaaaatgaacaccatttgtctgcttctgctgataatggtggaaaacgtgaacagttggacaattgtttggccgagttggaaattttaatgaacggtgccatggaagcaattccaatggaggagattgaccgaaacgaacaccgtttactctccgatttatttgaaaagaaaaatgaacttttcagcgaaaaaattgcgccaaaatatttaaaaaatccatgtgccagggaaaagcatttgcagtttttgtttaatttgcacgaaatcgcaatgaacaaactaatggagggaaaagatgcatttacgaaacgattggaaggtaaaaaaaagtttatattaaatttagtcaatggccgaatttttttttaaataaataaaataataaaaataattttggagcctatgaaagtaggcatcattttttataagaaggctatttttctgtggctttattatgctaaatttgtagataattaaataaa

SEQ ID NO: 59154 - DNA, 225 bp, Heterodera glycines
ttttaaaatttcgaaaattttcaaaatttttcgagttaggcctaaaaaacggttttcgggtttttgaattttaggattttttaacgatttttcccagagaaacggagaccacttccaaaacatagtttttcgagctctatcgactggtatttttttcggaaaaatttcgattttttcccggaaatagaaaaaatttttggcctgagcgggacatttgagtcccgg

SEQ ID NO: 59155 - DNA, 3507 bp, Heterodera glycines
aaaatgtcgccccggcgaaattggcactcagcgcacactgctcaggcattgagcaacattcaaattgttcttgcattttgctggaagaagtgtttccgaacttgccggccatggaccctcttcgacgcgtccaattgtcatcacttggagaattaatcccaatttcaatcgccaaacagaaagggattttgctgggccatattcgcagttgggccaatttggatgaagaatcagcttcactcctttgccacattccaaatttcagtcccgacattcaaaatttcattcctccaattttaatgtgggtggaccgttgtgccgtcgcatttcaaaccctcaaaaatacgggaatgaaagttgtacagcaagagatttgctcaaaaaatccgctccaccggttcggggagttgatcagcgaagcattcgaagaagtgaaggcaaaaaatataatcggcttttcatcaatggaatccgaaaaattccttttttacggcgactcatcggttcgagagtttgctagtaaaatggaaacaaaaaccatcatttttaaaaacacactggaaatggccgaagcattcaaaaatacttattttacgactaaagtccaagaaattctgatcctgatcggaaatgacgatttggaccaaggccttgtgttaaatgatgtcgaagaggccattcgcaaaataattgttcatgcaaataaattctcaatcaaaactattttcattccacctccttttcactattcaaaaagaattttgcatggaaaattgataaatttgttggccaaaatgttgccaaacgatggaaaaattgtgttggcaatgaaaagaggcaaacggagtttggcagaggtaacccggttcgggaacctcgaaaatcgccgaacagtgaatgaaaatggcaagttgaaaccgcctggcattcattttacaatcagttttttaactgatgtgttttggatgaccacgccggtgaaaatgtcgtcagaatcagggagttcaggaattcgaaccccagccacttccaattcgcgtgctccgagtttgctcaatgtgcaaattccaccgccaatcattcctcatccccgtcaagagcaaaatgcttacaggcgtttcaatcgtggtcgaggaagcggccaaaatttccaaaatcggggggcttaccgcaattaccattggcaaaatcatggggattatccccctccccctaaacgtggaaggttctgaacggatcgtcattaccttaattgtgccggataaattttatttttgattgtatttccctgcctcagacctacttataaatgacctcattattgtttcattttgttgtttatttatttgttttttttctcatttaataaattttcatcgcttaaaacattcgtccaaaaagagtagtccctcctatccaccccttcccctttatttcatttcagctctcgcctcttcgcttcatcaaatccgctgtttgagcgccgacgtcaaaactcgcaggcgctcgtctttcgctgatccgggggaggtgcgcggcgatcagaccgtgaggacactggtcttcatacggcgggggacgtaggataaataatgatttatccttattttattgttttttgcaacgattgtttttcgcgttaatttaaaatattttgatccttcatttaattttcctttttatttttgtcttcgtgttctctcaagtttatatatattttgtgcttttgaattatttaataaaactacaaaaatttggtgcttttccccgtggactttcattcagcaacaacaaacgcccaaaggcttaattggtactgttgtctgagttcctaattgcaatttcccttattctctaattccttgtcagtaaagtggtgttgaaaattaagtaaatctttccttgaccccagaatctcaacccaaaccccagcaaatcccaaagtccctccccgaaaatacgccgtctttctccaacggagagagaacattggcaacggacgccgtcccctccccccccccccccccccgcgcttcgctaatccccctcccccagcaacaaaaatgcaaaagaaaaagttttgtaaaaaatacaaaaataaaaatagccctaaacccttgggtttaatttttagcgttcaaataaaagcggggaaaaatttccccgcttttaaaagaaaattttcgaaaaatacagtaacccaaaaaaaatgcgggaaaatttcgcgcactgtccccaggcctcggacagcccccggttcactgctaaaacacgtgttttcacacccccctaaaggtgtgaaaacatgtgttttcacaccggtcagtggatgggtaccgtgtgataactactcataagagaagaactcgaactttttgtttcatatatggaaaaacaatggctaactaaaaacgaacccgcgaatatctggaattttaatagactttcacggaccaggtcaacaaaccctgccgaggcatggcattctttgatcaaaaagttagtattatttcatatttgtataaaaataccctttagggaaccaacgagtatgcgacatgcatcagttacaaattttttgtatttttttcaaagtattatgtcagaaactgatgacagaattaataaaatcaatatgggaaaaatacgagcgcgggggagagatcaattttacgctaaattagatgaccaaattacagaaaccatagatgaatacgaagtaaaattattttataaattgaataatattttcctgattaagggaattctcgaaacaaaatttcatacggacgaggattttaaacaagtttcaaatcattatttaagtaaaatttcatatttgctccttgaaatgaattcaaaaggaacagcaacaaaaaaggaggaaaaaataagggaggtagagcaaaagtactgttatgaatatttttttaaattaagagaaaacgtaaatttgcgagttctgcgtgtagttctaatgaagaagcttcggactagcttgtagtaattgaaagttggataaccaaaatacctaacaaatctgaatcactggaaataatatcgaatttgcctgaacaagtgccagagtcaaaacttttattttttaacccaattgcagtggaagaccaacaagaaatttgcagacaatgggagcttcgttttggtataatttaacttattatttatttaattcctaatgttatagtccgtccttcttattcctttggaattcaaagggaattttttgatttggagactggtccaggtgtttttaaggttatttcttaaacaaattaattttaaggacgtatgataaatgttgaagctgatggaaattgtttttataattcattatcagttttacttaccgggactgagttaaaagaaaatgctaggatcatacgacgaattattacacagttcattgactctgaggttgagcttcatgaccttggaattccttggcatggatggtgggaaatgttacatcccggtcaaactatttga

SEQ ID NO: 59156 - DNA, 497 bp, Heterodera glycines
atgaatcgtggacggaacaatcaaaattatttaattcatggtaaattctcgattagaaattacatagcataccaccaatctgttcaagattttgtcttttaaaattttttttaaggaattagcaaatactggcaagtcgtcggcgctctgggtctgtgcgttgtcatggtatgcatcacttatcaattgtttctgcacgtggacgaaaagcacaaatcgttcaaactgatgatcagtggacatttcaacgatatcaagcaaatcaacaacgatttcacggcgtggtcaaaaaatttcacatcgcatctcaatgagcgtttcgaacagcaacaggctcgatcaagggctcgtttcaaacaacagttggcgaagtcaagagagcgttttgatgaacaacacactaattttgtcaaaatccgtttggattttgataaacaatttcaaaaaacaatgtaccgttttgccgaagttgagttggaaaccgtgctgaacaaaag

SEQ ID NO: 59157 - DNA, 319 bp, Heterodera glycines
atgtttcccaatttcttttggcttgttcaacctcgtttattggatggtaatttattttaattaatttttatttatttgaatttaattaattcactttttagtattacacggcaagggcacaagaatgaattaataaaatggcacaacaacaaagagcttccattaacatcactttttttgttaaatattcaaaatttgttaatctgaaaaaatctcaagcacaattgtttatttaaacatttttaaattggcattttgtaaacataaaaaaccatagagaaaaaaagaagaagatttttaatgccccaaaggaattaaa

SEQ ID NO: 59158 - DNA, 297 bp, Heterodera glycines
aggcccttccgaagacccccgtgccggcttggccacagacccttcccaggtacaaaaaaaaaattttttttttttttataattttttgcaggcggtggcgtttgtggcacggacgtggatgaaccgggcaatgtcgcgcaagcgacggaagccaaagcctgtgccaaaactgttcagcaaatggacgggcgaagacttggacaggtgaaaagatataaaaaattatatttaattgtttataatgataaaaataatttgaaattggaaaaaaaattaatattttaaattgaaattaaa

SEQ ID NO: 59159 - DNA, 775 bp, Heterodera glycines
atggacaatgccggcaaatacaatgtgacatttgacacgggtggcaaagtgacagagtgccattacgaaaatccggaaatgccaccatggacagtgcaatacatcgcggtaggaaattctgaatcaattatgcccctaattaatggccaataggcatgactcttctgcgctaattagcgtcacaaattaattaattatgaagccctaaaattataagcattaccatattaattaaaccaacattaatgttatgaaaatgaaatttgtcgttaattaacgagaattagtaagatttcctttttttaattgtatttagttatatgctttttaataatgattaatgcatgttaatcaaaatttttcacagtaaaattgtttttttcaatatctcaatataaattacataattttttttatgtcttttaatgttcaatcgcatttttttataattttcttaaattttaggttatacttaaaaatgaccctcagcagttaattaagccggaaatcagttgtattccgcaaaatcgttgcatgaaaatgaaagaagttgatgacctattagagaaacaaacaaatgggatgaaaaagaagctttagccattggcataatgccaagaatttttattcaaattgaattttcattaattcactaattaattcataaaattttttaatgaaaatgtgtaatataaagtacaaagcctattgtaatacagtatgaaattcctatgaataaggctaacctaaaaaacattaaagaatgtttagctta

SEQ ID NO: 59160 - DNA, 1548 bp, Heterodera glycines
atgcaccattgctcagagtacaaccgctatgccgaaagtgtgcttccaagcaagcccactgacttcacgctggcgcagacgatcgacaagctcaaggccatgttttgtgcaacaaaatccattttcacccgtcgattagaatgttttcagctcacaaaatcaatttcacaatccccattagatttcgccagccaggtcaacgcaatgtgcgagcgatcacaaatggatctgaccaaggacgaaatcaaagcaatgatcttccttacaggactttcggacactgatcaagagctccgagagcgttgtttgcgacttttggaggaagcgaagaagaagacaccgccggaagcaatctcatacgagaagctcacagaagagtaccgcccgtttctctctcttcgcaacacttccaacgcattggcacattcaactcatgtggccaattcggtcactataaaaccccaaaaattaagggatcataaacagcgaaagcgggatgggtcgcgaagctcgtcaaagacgacgtccaccaccagcaacaatcaacgatcatcccaatttcagcgcaaaccgcaacaaccaccgtcgccatgccgtttctgcaatcaaatgcactgggtcagcgactgtccaaaggcaccgatctgctcaaactgcaatcgtcgtggccaccatcattcaaaatgccgtctgccatcgccatcatccaaatccaattcacagcgcaaccatgcaacaaaagtgacgcatttgattggtatgtctacgcacaacggcgtttaagattggaacgtgcaccttccaaaccacacctgcgccttcaacaactttaccctgcaaccacatgcttttgttgtaccgatagttgagtatcagcacgttgtctccaatcgcgaaagtcgacggtgaacttctttttgtcaattgaactgttttggcatgttgtcgttgctgtgtttggtgttgtttgctgggtgtgaaaagttgttgagagtggtggcaatgggatgttgaagtgccgcttcgaacgccctgatccatggaagaccaaacaaattcattgccccttttggtgcgacatgacactctaattgaagtgtgactccttggaatgtgattgagcaaatgaaatacccggagatttcgaaaaagtgccccgaatatgatttggtctttgaaatgccctttttgagtttggggctgcctaactgttcccataatgcttgctgaatgacggccaaacgtgatccagagtcggccatcagtgatgccttggtgccattgagttgacagtcgaccatgatccaatccgaatttcgccacgatttcccaaattttatttgaagggtagggttagcaaccggaaaatttttggaatttttgatcgattttttttaatttgcatctttggcagactccgatggtcactttggaatcgcatcgcgagcccgtgatcggctgcgcgtggcatccgtccaactcgggccaggcgatcactgcttcatgggaccatcagttgatgctttgggacctccaattggcaggtga

SEQ ID NO: 59161 - DNA, 95 bp, Heterodera glycines
gttggcgttgtgtccgatgtctgttggcactcaaccgaccagcatttgtttgtttcggccagctttgacaacacagttaaaatgtgggacgtccg

SEQ ID NO: 59162 - DNA, 177 bp, Heterodera glycines
tttgtacagaaattttaactataataaaacaacaaatgatatcacgataaacaattagatattttcttcggtcccatgtgagaacactttcaccgtcgagtccaccgaaccgctgcaaatacggctcggcactgtccaatcaacgcacagcacgcggtccgaatggcccatcaaatc

SEQ ID NO: 59163 - DNA, 799 bp, Heterodera glycines
gttcgtcgggaggcgaagcacagcgcgaggaattgcatctttgtctcaatgtgctggtttttcctaaaattgttttacttgcgtgttcatttaaaattccattgttttttatatagtattttattttgcagcatttttatcgtctctgttcatcaaattttaattttacgacagttttcagtcattggtcagcactttggagagcgctgacgcggagagagaggcgaaatgggaacggctgaagcaatttttgagggtgtgcggaacggccgcaatttttgccgttttggcatttctgttcactttgtattggccggtgagtgagcgaagggattaacggtgctaatttaagcaaaaagtgccattcacgttggatgaaattattctacaaaccgttagaaattttttctacggtataatgaatttgaaacttttcgaacttaatttgggttgaaaccgctctaaaaatttgaattttttactttttgttcaaatccgggccggaatcaacaaaaaatgaagggtcagcggcccttaaaacctccaaaacctgacgtgtaaagaaggccgctttatcccccccccccccccccctcaaattggccaatttctacgcttctttttcggctcagttgttctcttctctggcggttggcgttgtgcgcaccgtttggactctgatcagttctctgcgcgatctgttggtcgcccattggcccgatttgctcttcggcggtttgctcctcagcactttcgtcgacatggaatcttccgactcgcagcaacagcaggcggaaac

SEQ ID NO: 59164 - DNA, 127 bp, Heterodera glycines
atgattgcacgtaattgccgaaaaaattcgagaccaatttccgaatgttgaccgactaattgcaaaacgaaagccgtctttatcaaagcgccttaccgagtcaaaaaatttggaaattttatcctcc

SEQ ID NO: 59165 - DNA, 274 bp, Heterodera glycines
atggggtatgaaaagtttattgggggaaaaaagaagcaggaacaagtgatcagctttcttcgacagcagatccgcaacatagacgcactgatcactgcgcttcggcggcagttggaggaaaagatggcaccaccgatggagacaccgaccaccaggaaaagtgagtgaaactaaaatcccctttttatctttttcaaataatttctcttttttaattttagcaattccaacaggacgaccaaagatgaatgtcgatcatttagctgaattttaa

SEQ ID NO: 59166 - DNA, 804 bp, Heterodera glycines
atggacatttggtcagcgggaattgtcatttttatgatagcgacaaacattgaattagcaagcgaattgtatcgaagcgcagcattgaatttggaagccgatattacggatgatttgctaatcaaattgcacctgataaacacaagtgcgcgtccgggtgccaaagaatggtgggaaagatattttgtggtgatcattcaaatccttagcacatggtaccaaatgccggacatcgcattcctcttgggggtaagacaaagttgcaacaaaatataccatacctatttagattagtcgtgtcataaataccgccatagtccaaaacaaattcttacatttttatcggtattagagtgctgttagttttcgacactgattgatttcgacagtaaaattttgtttttaaaaaactttttctatacggtataaatctcgttaacttttggaattaaaaggatatgctcatactcttattcatttagaggggtttcgattttcgaattctgctataagagcctgcagtttcgaatcttggcacccaaacccggcaattattagcaattcccacgcgattcaagaagcttatctagaaaacttgttgtatttttgaatgcagtccagcaagagatgtttgtatagaaaaaagcgataaatcttggcaaaattctattgtcgaaacccactgtcgaaaacacttggcacggatattagcatggctaatttattttatatgggaaatgttttggacggccggaaaagggttacgaacaactcatcaccagaaaaaagcatggattaaataaa

SEQ ID NO: 59167 - DNA, 723 bp, Heterodera glycines
atgatgggtttgaattatttcgaaatttttatgttcaaaattttgcatttcatcatagagttatattgtcgtatgtatgtatttttagaggaagtaaaattggagaatttggaggatgagggcgactcacgcaatggatggctgatcaaaacgcgcaccaaatcttttgtcgtttatgcggccactcaaattgaaaaggaacaatggatgtcacacatcaggcgatgcgttgaggagctaattgatagttaggattattccatcagacattttatcaacaaaatatttttgttgtttttgatggaaaagtgccaccatcggattatgccgcactttgggtacctgacaaagaagcaaccaaatgcatgtgctgtcaaacatcacattttggtgtcatccaacgtcggcatcattgtcgcgcctgcggaaagggttcatcaatttgttcaaaagttttggtactaaaaccatttaacatttttattagttgtgtgtagtggctgttcatccaagtcttttgtgcttgatggtataagtaagaagccggttcgcgtctgtgatacggtaggattttttttattcatcattttttggaaaatgaatttaaaacaattccttgaaattgcaaaaattaagaaaaaagaacttaatttcgtttacatggaaaaaaactaatttttttttgtggtgggcgggaaatgattagaggagagcagaggaaaa

SEQ ID NO: 59168 - DNA, 171 bp, Heterodera glycines
cagtgtcatttctgcgcgccaccatcaggcgcagtcgcgcaacgcgctcaaaccgcgggcaccaaacaacacaacctctttcttgatgagcgatttggagaagcggcaacaggacgaggaagatgatccgcaacagcacacggacgcccttaaagaagtcgcggggacgcg

SEQ ID NO: 59169 - DNA, 1042 bp, Heterodera glycines
  unsure (1)..(1042): unsure at all n locations
atgacagcggaaacttcgtcgaagtcgtcgttttgttgtgtggcagcaacgacggcagctgcggaggacacaaatttaataaaacaaagcgaaaacaaaacggaagaggagggggaagaggatgaagaagcggaagagggggtaattcacctgggaggtgcccaaatcatagatttggtgtggccaccgttggcattgaaattctatggctgccgatttcctaagcagtttgacgatcttcttaggttggtgatgcgtctctgccgcctccgntctgctcatcgccctcctcctcctccttttgcgcgttgcccaaagagtcggaactttcggagagaaagcgaccggcggccatccaggaactgctggagaagaagcgggcacgacttgcgcacaacgaaagtggaagtaaaagtgaacgccgatcgatgacaccgacgacggacggaggagcagagacaaaattggcacggggagaggggacgaacggcggaggatggaggaggagggagagggagaagaaaggggggacaacggacggacaatgccaatgccatcgaagggagaaaatgacggcacgggagggaacggcagcaacagttattggtcaacggaacgtgaggacagcgaagtgagcggtgtccataggacggcaaaaccgagaattaagagtagggcgaatattttgtccgtttcggttccatttgtccgtcctccctccgtccgctccctttcctttccttccgttcatttcccccctcttcagactgtcagcagttgcggttcgtcttcagcgttcggcgcttataatggcggaattttctgcaacagcagcagtaaatcgccgttcgcttcatccgccatcggcgagctgaacctgggacaactgctgaagcgcgcctttggcgagtcgagcagaattttggccgacccgcaaatgttcgctgccattcaggcacggcaagaaatgaaaatggcaccgattaattgggccataaataataatttgtcaggagacaatgttgcaaaaatatgccgttaa

SEQ ID NO: 59170 - DNA, 235 bp, Heterodera glycines
atgcaccaaattttgcaaggtaacagctgagaagaagaggtaattaggtttaaatttcctttccattttgtggaatttgaaattttttcggtattcttattttgcgtacatttcaaattttgaaaaaaataaattcattaatattttttcagagagtgatctgaaacgcaccaaattttattttcaagttaacaagccctctgatgcttttactatcaaaaagggcgatgaataa

SEQ ID NO: 59171 - DNA, 716 bp, Heterodera glycines
atgggcctttactttggtctgacacttttgaccgtttttgagctgatcattttcttcctgtttcacaaaaaatcaacggccaccagcagtggcagtggcagtcagcctcggcaaaatgccagaacagtaccagctgtatacagtattcctcgtccaaaaacagtagcaaatgcaccattatcagtggccaaagatcgtcggcagccaattatcatcaaaaggggaaaaacggtgcgaagtcattagttgcggattttcgtaatccaattcatgtattcttactatgattttgcaaattattggcccaattattgtaatttggataaattggtaaaaatcaactacaaaagtcaaacattcacagtataaatttatttaattttttctttatttgcgatgaattttaaagacaaaacaaaaaacggaaaaaacaaaaataaataaattgtttaaaccctatgtataataaaccttatacaccttaaaataaaaaatgattgaaaattatatcacaattacaaaaaaaaaaaaaaattaagaataatttcgcagtttcgagaggtatcattaagcaattgggtaatatttacaaggttaacgcggaattatcgttgagagcattgtaagcatgtagaaggagcagttgcagttattttagctttaccatgcttaaatgggcactcacagactaaaacgactcccactcaaaaattaaa

SEQ ID NO: 59172 - DNA, 1240 bp, Heterodera glycines
atgaatgatcggatgccattccaatacccacgcgggctcaacagagaaatgtttgttcgggagaagaaccgccagtccaggatgctggcggaacgcgtccgccgtctcaacaatgacgcatttcaaccatatttgtgggcggaagtgtttaaaatgaaaaaaccaattaaggtattatgagttcgagaaattgattcggcacttttatgatgggcacagccgtattttggcattgttcaatttgccaatgtattattttcaaattgctaaaatttttatttggttgtaactcattttccaaattaggggggctctcatagaagagcaattgtcaatgagcaattatttgcacaaaaaccaaacatcagaagaattggaatgctcaaaaacggttttgattatattaatataaatttaatatttagtttcaaggtctcaagcattttaaaatttaaaaatgatctaatcgaattggtcaatcggaattggcaatttgattggggaagagtaagtgattattgtgattatcaactcaatttgaaaccctttctaatcattttgtgttcagcacaatgaagatgtgactgacatcaccttttttgaggcggtcaaataccgtatccctccctcgccaataccggtgtttttggcatttgtttaaaatgatccattgcttttaataagatgatcgaagcttatcagaaggagacgcgaagcaaacgaaaacttgttgaagtgagaaattatctgaagctaaccgtcagtttaattataacaaacagcacaccaatcaactgttccgcttgttgctcgaactttggcgcgatttgtccaaaaatgttgcagcccgtgaaaatgcgaaatgccaaaaagtgattgctgaaattgagcagatcatcaaggtgtttgttccttaattttttatttttctaattttgtttcatttaaatatttatcataaatgcatagaatgaaccgttggtggcccgggtggcttacaacccggtacggagcacgcttgtgcgcaacttagaagtcattcttcaatcaaagatcagttttgccctttttaccaatgtccatctcattttatctgtagattgattcaaattgttaggttttctgtttcaaaaattgatggtgacttttcaattgggaaatctgaaagatgatttaatcggcgtaaatttggcaaaaaaagaactgagaatttaaaaaattatccaaaaataataataaa

SEQ ID NO: 59173 - DNA, 1043 bp, Heterodera glycines
atgactttttgcttgtctctgttttttcttagtgccttttttggtgcgagtttcgttgacgaagtaaaaatttgtaacccataaaaatgtaaactttgaacatgccttggtaggctttcgcctgtgccgcagtgacaattggcaatggctgctgcgactcggaatcaatgccaatgcacgaatggaacatcactgtgtgcgcacttcaatgatatttaatgaattaaaattaaattttgaacacgtttctctttttcacaggtgccccggccatctcgtcccaaagtgcaacattttcggccacaattgcgtggcgtgccgttacgattactcgccgccctcgtgcaatgttagcgtcgcctgcagctgctactactgttgcgatccacagtacgcctctacttgtccggatgggtgcaaaaattgcgttaaggacggggagggcggatgcccgcagaattcagcagcccatttcaagcagatcaagtacaaaatttacaatgacagtcggatagtaaaaaaaacataaatgtatgatacaaagtgtgatgagtacggtagtatttgtgcatttttgggaaaatgccactgggcaatattaataataattattatgaaaatgctctctgtcttaaatgcctttattaagaattaataaagcactcatatttgtagtgacaattcttcgctttcacacttggaatcggctgcaaaaaagcgaggagaattcgggaaggtattttaacttttaatttttgaatggcataaattaatcatttttgtaattaaactaatgtgcagattgacgtggacaaaagcggcggaatttcgtcaaaagaggccattgcgcatttggttaagacaaagaatggcacttcagctgacgatttggccaaaaacatgtcctggtttgcccacatggacagcaatgggaacaatcgaattgaacctggagaatttgatcgatcactgacggagtgaaaagtgacaaagcgaatgaaaagcggacaaaatgtataaatccaaaggacgattttaataaa

SEQ ID NO: 59174 - DNA, 1302 bp, Heterodera glycines
  unsure (1)..(1302): unsure at all n locations
aatgcttttaatcgtcctcaaaattgttgggatgtcaccacttgccaaattggacttgagttgattgacaccggatttttaactgtccgttgtaaagaaaacggtgaattaattaatgcatttagaaattttcatttaaatttttttctaattaactcaacttcaggcaataggagtgcagttttcgcgaaatatccagtgcaaaatgggattcattcttctgccacctttttttactatgaattgagcatcttacaaatgaaacaaaaatggtaaggaatatttggtgaatgtttgtttaaaaatttaaaaaaaagtcaaatggcacaaattacggtgcaccccaaaacgtcgtcggccgaaacgtcgtcggaagactttttgaaccataactttgttcactgtcaatcaaattaagaattgttggtgttgttcgatagctctatgtgtttattattaatttgcaaaatctcaaaaattttggttaagtttcaaaaaagttatggccagaaggaactcaaaaacccagtatttcgaactttttttgctctgatttttttgtgcataaataaaattttttgaaaatttacaggctaatagcatttttcgaatgctttcgaataataccaagaatgtttaatttggttgagaaagaaaaaagttatggtcgaaaaattcgttcgacgacgtttcggctgacgacgttttgtcctactctgcacaaattatgcctaaaatatgtaattcaattaaaagtttctttcaagaaatacttttataacaccaaaaaatgaattttttcatgtttgtttgttttcgtaaatgttgcaattttttaggattccgaataaaattttggcaattttaaccaacgaaattgtcaaacaaaactcaaattttcatcctgtccctttctccttattggggggggggggggggagtcgagttaattaatgttaaagtttgccaaaaggcattgtagcaaatttgtttaattttatcttgactcctattacttaattaataaatgttaatttggcacatttcattcagttgcgtttacattggactcgccctcaagcaaagtgaccaaagtatcggcacttcggcagggaccatcgtttatcaaagtgatggctatttttggtttgggaatgaatggctgccaggaaaaccaattttcacgactggtgataccgtcggttgtgggctcaatatggtactaatggacaaantaattttcacaaaaaatggcccgggggggggttagaaatgccaatcaaaaaaaaaaaatgaaataaa

SEQ ID NO: 59175 - DNA, 388 bp, Heterodera glycines
agtaggacaaaacgtcgtcagccgaaacgtcgtcgaacgaatttttcgaccataacttttttctttctcaaccaaattaaacattcttggtattattcgaaagcattcgaaaaatgctattagcctgtaaattttcaaaaaattttatttatgcacaaaaaaatcagagcaaaaaaagttcgaaatactgggtttttgagttccttctggccataacttttttgaaacttaaccaaaatttttgagattttgcaaattaataataaacacatagagctatcgaacaacaccaacaattcttaatttgattgacagtgaacaaagttatggttcaaaaagtcttccgacgacgtttcggccgacgacgttttggggtgcaccgtaattt

SEQ ID NO: 59176 - DNA, 763 bp, Heterodera glycines
atggtcgcccaatcgtccgaccgaccaatggaggaaatcggaaaggaaaggggagaagcaatttgcgataagcaacaaatggcggaccatggaggagaagcgattgacagtaaaacgcagcaacaaacggaaaagggggcaagggaaacgacaacgtcgacggacaggtcggatttggcagggaaaggcaggaccaacggaggggcacagaaagacggaagatcaggggggggggttatgggaaaatggaattgtaacaatcgatcgcgggagggtatttttaacaaaatggcaactaacagaatgccatcgacttcccatgggtcaaagagcactccgacgactccgtccaaagaaatttgtgagacgaacatttgcaaaaaacaccgagaagaaatagccagtgaaacaatagacaagaggagagtgaccgatggagaagggcaaaatgaggaggacggagcaaagcgaaatgccatcggaaagtgccaaaatgggaagaaaaaggctcaaaagcaccgaaaaggtgcaaatgggacacgcgtcgactctccgagtaacgaatctcactcaaattttaactttcttatttcatttatgtccaatttttagtgtccgcccttagttccgacattttgacatggacaaactctcaacaaagtgttgcatatcccaccgaaacaattgctcaaatggccagacacttcttcactcgccgggacggctttaaagggaccaaaatttcagcaattttagttcagaa

SEQ ID NO: 59177 - DNA, 506 bp, Heterodera glycines
aaaccttaaagcactagccgattgaaataaatggacaaaaaagcaaagtcaaagacaaaaccttaaagcactagccgattgaaataaatggaaaaaaaagcaaagtcaaagacaaaaccttaaagcactagccgattgaaataaatggaaaaaaaagcaaagtcaaagacaaaataggaactttatacaaatttaaaaaagtaatattttgtatattgtatatgcatttaatcaaatttctactttctttataaatgttagctaattagtcagcgtctatttattttctgtaaaaatttgcctctttatttaaaattaaattaatataatttcatgaaataagacactaaatgtatagagaatgaattaacgtggtcgattggaataaatggaaaaaaaagcaaagtcaaagacaaaaccttaaagcactagccgattgaaataaatggaaaaaaaagcaaagtcaaagacaaaaccttaaagcactagccgattgaaataaatgg

SEQ ID NO: 59178 - DNA, 141 bp, Heterodera glycines
gtaatattttgtatattgtatatgcatttaatcaaatttctactttctttataaatgttagctaattagtcagcgtctatttattttctgtaaaaatttgactgtttatttaaaattaaattaatataatttcatgaaata

SEQ ID NO: 59179 - DNA, 775 bp, Heterodera glycines
atgaaggcactcgccgctcgtgccgtggacaaaatcaaccgacagacgaacaatgccttcctgtttatccctgtgaaagtgctcagtgccaaagcaatacccgtagctggagtaagatatgaactgcgcattttggtcggaaagtcaaaatgcttgaaaaaggtaagtgcaaaatggggagaaattggcacaaaaatgggcaagtcggcactgtaatttttaagaaggcgtataattttaagagggggatataatttttgggggaaatcgggatcaccaaagtcggataagccgagctcagcagtagaccctggactgacagtttaaatcggatttgtatcgggattacttttttttctcaaaagtcggattggaattattgggagggataaatgtgaaatttaaaaaaaaagaataaaatttaaaactccaatgaaaagcaaagtaaaaagtgaaacaaagcatgtatacaattttaatttaaaaaagtgatgtttttaaagcagccaaaggcaaagcgcgcaaactgtgcaacggaaactgttccggcagagcgaaaggcatcgatttcttatttaattatctgctaattagcctaattatctattctttaggtctttgaagtgagtgtgttccaacaaagttggaaaaatgttgaggacattacattcgtacccgaagaacacatgggcaattcgacaaaaaattgtgaataaaatgataagcaataatcgtgggtgaatacaaatttttaatttggtgcaatttttaatta

SEQ ID NO: 59180 - DNA, 360 bp, Heterodera glycines
atggtagtggtaatttgggagtacacaggtgtgtggcataggcattttctaatgacacaaaatgattggccgacatttgcggcgttacatttgcggcgcctagtcagaacgacatttgcggtgtcgacacttgcggcactaagtcaaaatgacatttgcggcaccgccgacattttgtggcacccccataattaaagctcaaaattaaatctcgaacacccttttgttttctccttatggtcataagaaattattttcaattagcaataacgaaccactgaatgaattctttttttttaatatttttcagcgtgggctttaagaaatcttttggattttgccgagttcattaatttttaa

SEQ ID NO: 59181 - DNA, 813 bp, Heterodera glycines
atgccaactcggattcttaccgaaaatggaacccaattcgtcttggcatccaaagtttccgcggccctcgaagccggtagagtgccgacttcagcactggatcgattcatggcacgagaggcaatccattggcgttttatccctcaattgtcaccttggcaagggggagtctacgaaagactcgttgccttggtcaagagctgcttcaaacgagagctcggccgcgcaatgctctcatgggaagagctagtcacatacacagccgaagtcgaagcagtactcaaccaaaggccgctctgccatgtctctgaagagcctgatggaatcctgccactccggccaatcaacttcctccttccgagagcaaaacttggcattgtgtttactgccgagaccgaccacgatgagttccgaatttcttccaccaatcaaagagatgcgctcatccaacgttggcattccgtgtcatcatcaatcgaccatttctggaatcgctggcagaaacaatacctgctgatgcttcgccagagacttcagtggaagtttaagaaacaacggaaccaaattgcgcgagagcccacggaaggagaagttgtgctcatctccgaagaaaaacttccgcgcaactgttggccaatgggacggatcgtcgagttacaacgctcacacggggaaatccgaaatgccaaacttcgattagccacaggaaaggtgctaagccggcccctgaatcgtctttatccattggaagtggcttcctctgccgaacaaaatgagagccaccagcagctgacagacccgccgcttgagtaa

SEQ ID NO: 59182 - DNA, 1562 bp, Heterodera glycines
atgtcaaactcgaaccagcactcgccgatcctgagaagcgcctaccaattcagctcaaaaacttgcttatccgaaatgaaaagcgagacattttcgccgaaatcacctacgcaccgattcagctgtccattcaatttgaggggcttcgaatcgccacggaagaagacctcacaaaatgccatgccatgtccaagggtcttttcgggtgctattcatgccacactggatctcatctccatttgcaatgccacaccgactttggttcagcacttatgctacgttcgttgttcggatggcaccgagttcacagctctctgccacaaaacgccagaagttttgaatgtcagcctatcatttaaccgtgccgaagtcgacatcaactgtaccattgaatgcagtggaggacggaacccatttgtgatcggtggtcatcttcgctacgtgccaaaacattttcaagcacctaatgaggggagctcattcatctcgaaggccaaacccagcaactcatgcctaatttggtgcccagattggaacttcgatttttctgatgtcttctggtacttctttggtctacaaaatgctctacgaaccattcgcatcatcactctggcactttttatcgtctatatcctattgcgctgcaaccctgcccttcgatcttggagagccataaaccgaattgttcttctgttccttgctctttggccagtgacatgtcattctgcagcgggagggctgagtcgcccactcagcattcaaaacgcaccaaaacggcagttcgaagaccattgtgcaatgtcagaacggatgactacgcctcatggcatttttgaggtccaattgtggaacattcatcccttcaacgaccaaaaattgctcataactaccctataaaagcggttcccaagtcactcaatccaccattcgttcaaatccttgaatttgccttccacttccgaaatcaatcccaattctcttcctttccaatggccaccctgctctctttcctcgccaattcgatgaacatcgatgtcgaacgctttggacttgccgtcactacatccttgagccgttggaacgaagcccaggcgatcgttcaaggactgcacgatcgaggctacgaattgaagacacggcacttgcacccatttgagcgcaatgtcagactccacgggactgaactgagccgaatcgctgctaatcgtcttggcgcttacaacggacaggcccgagggcccactgtttctgaattctaccgctctcgccatggaatcgtccttcgatgcccctcagctccttgtcttatggaacctggcggaaatgggcaccgagattttttccctattgaactcatccgagtggtgtctcctgatcggatctcggcgccgcggcgactcgcgactcatccactccctggccctcgcccctcacactccgattgttcgaccgatttccccattccgccatgcccggtcatcttttcgttaacatcagcaccgacgacgtgccaattggagagccgggaatggagcgccgactttcacgtggacaaacagtaa

SEQ ID NO: 59183 - DNA, 987 bp, Heterodera glycines
ccgaaaagatgcaagcctcgtcccgtgccattcgcgttgcgttccgaggtggagaaggttataaaccaatgggaaaaggaaggagtcctcgagcctgtggcgacatctgaatgggcaactccgcttgtcattgtgccaaagcctggcaacaaaattcgtttgtgctgcgactataaggtcacagtcaatccgtgcctggacatccatcagtacccgctccctcgaccggaagaactgttcagtgctctcaacaatggcaacaaattctcaaagttggacttgaaagaggcctatttacagcttccgttggacgatcaggcgaaggaatgcctcacaatctgcacccataaagggctgtaccgattttcacgcatgccctacggggtggcatcggcaccagcgatattccagcaggtgatggaagaaattctctgtggaattgacggagtggcagtgtatttggacgacattgtcgtcactgctgcaaacgatgctgaacatttgaagagattggatgccgttctccaaagacttaaaaaggcaggactacgagtaaaaaaggaaaaatgctcgttcatgcatgaaagcattgtttatttgggacacattatcgaccggcaaggaattcggacttcgccagagaaggtggaagcgattcaaaaaatgccggcgccggaaaatttgaaagaacttcaatcgtttctcggcatggttggctattacggcaagttcatcccttcattggcgacggtttcggaaacattgaatgaacttcgccggacagaaaagaaatggcactgggggaaggagcaacaaaaagccttcggagaaatcaaggaaatgttggcttcaaacgacatcctcgtgcatttcgaccctgaaaagcctcacttcttggcaacagacgcgtcggattatggaattggagaagttttatttcataaggatgccaagactggaaaagttggagtcatcgcttatgcttaa

SEQ ID NO: 59184 - DNA, 308 bp, Heterodera glycines
atgtcagacgaccgaaaagaggcagaggaaaaaatggcaaaagcaatgtaaaattaaaacccaattttaatttccaatttcaattttgttttccttttttcagtttcatctccggcgatggttggctggcggtgttcgatttgcttgcgccttcccaacttggcctcggaattgcgctgatcagccaccgttttgacttttacgtggatgaacacttcaaaacgcgcaaatgggcattaggaattattcgaattggaagcaaaattggggagaatggcacaaaggaaatggaaattgccaattatcat

SEQ ID NO: 59185 - DNA, 63 bp, Heterodera glycines
atggctctaaggttaaatttgttttacgatattttgtgtcctcgttcttgggttttctaccag

SEQ ID NO: 59186 - DNA, 415 bp, Heterodera glycines
atgccaatgccccaactgcgagtgccaaaagcaaaagggacagtgccaaccccaggggaagggatgctgtgcttagagaagcgaacggaaaggacggagagaggggagagggtgaagcaaagagagagagagggagagagagaaaaaagggaccacagtgatcggaatgaccaatttgtgtgccaatgataagagcaaatgacaaacataattactaattgtaagcaaaaagacttgtatttttaggggttcgcttccgtatttcctatggaagagtttcttgccgcattctcatttcttagtggcgccaataattgcccactttttcaacattcgatgaagtgtatttttctattaaattccttttttttggcaattttttgtgactcaaatcaaaatatttatggctgaaaaa

SEQ ID NO: 59187 - DNA, 920 bp, Heterodera glycines
atgacgagaatcattcgccatttccgtcgaagagatcaattcgaacttccaacggaatacgacggggaaaacgaattggaaaaggggggagagaatgggaatgattactacaattattaccagcagcggatgcaaatggacaacgaattcatcgcttctctgctgaacgaagacaacgcaaatggaaacggcggaaatgccaattttctatataggccacaggacgaaacattccatcagcagcagcaacagcagtacaacatcagcaacaacggcatcgatggcgtggaatttgtgctgcctcaaaatggcggtgagtaggcgaagaccgacaattttcatgggtgtgtgaccttttccgccctttttgttggggaaaagcctccggaaattgatgtaaatatttctctccttccgtcgtccttttgtcggtgcttttcttccaaaatgcactgacaaaacagaaaaaaatatttttaaaagtccatggattagcgcaaaaagaaggcgaagaatgggttttgtttggtgcgcgtgggaattaacagaaaatgtgaaattttgttgtgaagagtgctctcagacggttagcaaatatctctcctccccccgtcccatcatcaaaacgttcgtcgtcgaagttattgtctctcttgtgggaaaacgggaggggatgaagtcgttggaggagttgctggggggggggggcaaggggaagggaatatttgcattaacgggggccgtctcccaaaaaaccgcacgcacccgcgcccaacgcacggctaaaacgcatcccattccccaaaaagcgaagggctatcagcccaaaacttttttacctcatttgtctaatatctatccccatttcgagtataataatctgaaaaaagtctaccgtaattctctctcataataataaa

SEQ ID NO: 59188 - DNA, 229 bp, Heterodera glycines
caagccttcgcattcctttcctctcccaacctccctttttcttttcctcctccttttttattcgttccctaatctctatctctctctctctctctttctctctctgatgcaaaagcattggcatttttattaattaagtataaccgaattaattgattaatattaatttacgattaattgggtttgtgtgaattggtgattaatccgttccgttgccattgctctcttt

SEQ ID NO: 59189 - DNA, 276 bp, Heterodera glycines
atgcaggccagacgagaagaagcggagaagcaagcggctaatatgggcatggagggcggtcaaatgcccccggcgatgatgatgatgatgatgtcagcagccaccgccgctggaggcgaaggcgcagccgcaaattcgttcacttttgcggcgcctccgtcgccggccgttccgcttgacccgcacttggaacggatgttcatccaacaaccgaaacacgtcgccggagaagaacagcgaccacagcacgaggacgaggaaaattatgacatttga

SEQ ID NO: 59190 - DNA, 963 bp, Heterodera glycines
ttgtccttaaaattgtcttaggcgtattcaaaaaccgaagtcagcacagtaccgtacagcgatggccgacatcagtcagggtatacggtatcgacagtgccaagcgaatggggcacaggacgagaccggtaggaaagaagcggccattaaggaaagggaggaaatgccaatcctaccgggcatgccaacacacagaaaacactcgcgagtggtcgaagtggcggacactttcgtggatcgccaattggccgaagccgccccattggcacatcgctacgggggccgaataacgctggaggaggcgttggacgccattttccaatccaccaaaccgttggaggaaccgcccccggccgacccggggtaattaagggagcgaaagcaacggggctaaggaagaaaagctattctcgcacaagcagattgtccgaacagcaaaaccagctccgcaacatggacggccccggcattttctcgcccgatttggcattgatggaaaggctggcggaacagccgcacttggccgagaatctgttgaaggtcagagacagaaaacaaaaaagtgtgatagagagagtaaaaggcatttgacaaaacactggaacgtttaataatgagaatgacactaataggctcattaggaatacgatccattttcctttattgcctttcccattaacagaatgagcctctccttgtccgttgcgctttctgcgcctgcgtccgtccgttgcgtgacgcgcgttcgcatttccgttggtgccgccactgctacacttactattgctctcggcaatgtcgactcagtgattggcaccggcacagagaccgatgctcatttgcccgaattaacaggtgggcgggtggcgggacctcataattatgagaaaaagccatggtttcagcttgtgcaaagaagtgattatgaaggtgaggaataaaaagcaattagtacatatcact

SEQ ID NO: 59191 - DNA, 164 bp, Heterodera glycines
atgaagcaattaaacagggaaattattcgagttccgaaacaaatgatacggtaaaaattgatttattattaaagaaatagtccatatcaatttaaaatggtggaaatttacagaatgcaaaaagcattggggaaagtgatgatgaattggaaatattaaataaa

SEQ ID NO: 59192 - DNA, 833 bp, Heterodera glycines
taattaaatccattccttcgggggaccgtgccgggtgccgcggggtaagcagtgctggttcgtttcatcacggcaccgaaccttttggctagtcagcaatcgttgcttaacttgccagatcggacgggtgcgcatgattccactgttccaagcaccccaccaaaagcaaaacgatataaccaaaatataaggaaaaattttttaaaaaattttttctccatcttcctttttgatactaaagcatcagagtgctaaaattaagttgtaaataaaatttggtgcgctttagagcactttctgaaaaaaatatttatgaaacaaaaaaatcgattttttcaagtgtccgtttggggtactcaaacatttatggggagcaaaaatccaacgcagaattaaagtacaggctatagggaagctattcccgaaggattcggtctccccataaatctgggcgcatcggttcggggggactgccccgaaaacaaaaaaatcgattttttcaagtgtccgtttggggtactcaaacaattatggggagcaaaaatccaacgcagaattaaagtacaggctatagggaagctattcccgaaagattcggtctccccataaatctgggcgcatcggttcggggggactgccccgaaaacaaaaataaatcgattttttcaagtgtccgtttggggtactcaaacaattatggggagcaaaaatccaacgcagaattaaagtacaggctatagggaagctattccggaaggattcggtctccccataaatctgggcgcatcggttcgggggggactgcccccgaaaacaaaaaaatacgatttttt

SEQ ID NO: 59193 - DNA, 302 bp, Heterodera glycines
gttcacgcaacaaagaaacgcggattttgccaagtaatgcaagagcaatagaacaaccaatacatttgtttttacgaattctttgctttttgacttgacttacaattaaaagggattttcaaacaaattttcgaaattcaaaatcaaaaataactgtacatgcaaaactctatacaatttcaccgagcaaataataaattaaagtatttttaatattttttagactcgagaagtacgacaaatttgtgaaatagagcgtttcatccaatggaatgattgattttaagttacggggcagcaga

SEQ ID NO: 59194 - DNA, 1386 bp, Heterodera glycines
atggcattgctttccgatcgtttcgatgttttggttgacacgcattttgatggaaaaacgacggaattgacaatttggagaagtgtcataattcggaaggacaaaggaccaaaagcgaaaatatatgccgattcgaagcctgtgcaatttccgttccccgaccgtccgctgcccaacaaaatccgctttaagaaccttcggattgggtaaattaaacttatacggaaaccaattaatatggttggtcgtcgtcttcattgttcccccttttcagctacattgaccattctgtgctcacatttcttcgttccaacaagcaaatttgggacagaagtggcaccaatttggaattgtctatatggccaaacaaaactgaggatgatcagccaatttgggatgtttttgtccgtgaaatttggccaatttttgcgaccaacattcgtcatttggtcttttgcaataccgatgctttggacaatttgcgtcgtcgcatatcgccaacatttctcactgatcttgatcaattgaattcgatcaattccggtaatctgttccccgatggaattgctgatgatgggccaaatggaaatgctgctggtccactatagtaatttggtggatgtatacatacgtacgccccgccctttttttataatagctcacttattaaaacgatttcctttttgtttacctttattttgcaatgagaatagagagaaaaacaaggatgattgagcgagagagaataggtaaaaagagaaaaacaaagaaaggagaagaggtgagggagagagaggtgagcaaggtgaattggaaacaaaaagaaatgtgatgaaatgaaattttcacaaatatcttgcagatgaaagagaagagagagaaaaaagacaagaggagaggaaaacagagagagggagagagaaaaggggagagagagagaaaataagtgagagagagaaaggaagcgagagagagaaaaggggagagagagaagttagaaagaaaataggagagagataaggagagggagagaaaggagagagggagaaacgagagagagggagagagagagatagaaatagagcgaagagagagagaggaagaaagggtaaaatgaaagagaaaggataagagcagaaaaaagaagggagagagagagggagaaagagaagacagaaaaagacgagagagagataaggagagacagagaggagagacagagaaaagagggagaaacgaagacagaggagatgagagaaaagagaagagagtgagagaagagagagagcgaaagagagaaaggataagaggagagaataagaagagagagagggagagagtgagaacgagagagagagaaggagaaaaaaatgtaagaaaaataaa

SEQ ID NO: 59195 - DNA, 373 bp, Heterodera glycines
atggcaaattcggaaggaaatgatcgcttcagccatggccaagcactgcacgcatttgccaacatccgacgcaaaatggagcaagccgaaagggcagtgaagcggagtttggccacgatggaagtgccattgttaatggacaaattgtttggcgaaacgttttttgaagtcggatttaacggatttggcgagaagcaaagcattgaaaatgtgcggaacgaattggagacaattgtacaactgaatttcacacaaaacatgatggataaggcgaaggaaacgctgaaactgatcaatggcacgcgggcggaggccgaatcggaagcgaccgccgcgttggaaaccatccaaatgattggcgaagaagcccagg

SEQ ID NO: 59196 - DNA, 795 bp, Heterodera glycines
atgaatactgaaatatatttggtgaggaatttatatttgatattttaagtaagttggggagaaatgggacagtgagtttgtaaaccgaactgactttcatctccacattttcgctaagtgccttcagcttccagatgaagtccgaccgtgccacctgctccgagcggcgactttgcatgccaatcagaaggacagcgaagaagatgaccagcgtgttcagcagttgcaacttcagcgaatcgttgctttaaaataaaaacaatattttttaattttgctattgccgattgaaaatcctattattttaaatttaattatatttttttgaaaattcactcgcaaatttcttcagcttttacggatggagacattgtggccaatgttgttaatttaatcgaattttggccatttgcttcggcgttcgtagaaggaaaatcgagcatccaacatctgttgtttgttaattgaattatttttataaaaataattgaattaattttgttaaaaattagcaaacaataaaaaaaagggggtacaaattcattaaatttaaatgaatacaattttatttaaaaagaaattgttaatccaagttaatatttcagttatcaaatttatgccaattcccaattaaaccaattaattggccacctgctccaaattgtgaccaaaatgggcaaacacagacaaatggcgatgaacaccttctcaagtgcgagcagagaatggaaagcgcaaacgcacaacaaaaggggcagcgcacattcaaagattagctaaaagttaattagccaa

SEQ ID NO: 59197 - DNA, 1432 bp, Heterodera glycines
atgtatcacattaaacatgatttaaccctaataaacccagacaaatccggacaaaggatggttctactcggtcaattcgaaaaagttttttgccaaaacagtatgaataagaattggctcagaaagaaatgagcttctgcatacaatcaacccattcccatttatcaatcattaattgaaattctgccttcagaagatgccaattgtgtgcatctgagttcatcagttgaaagcatcatttataatgcacacaattggcgttttctgtttggagtcgctgtcaacgaatgtgtactataatcatgttgttttgtaaattttggtccatcccttttggtatgataccaacccagggctctatgcaattaaatgttttcgtaaacttctgaatgggcacgcataaaagttaatagcccttaattttcttttgtaatattcgatcgagttggggcagtatgagttgggtttttaccggaaaaagaataatagaagctgtgaatttatttaccttttaaaaatgaatactaaatgacaagcaaatctgagacggagagagacattcaaaaaaaaagttccatgacagataatttgattcactttattgtcatttcgtttttgctgatcctccattcatttcaatttctcatctggactaaaaaaagaaatttcacaattcgatctatccaatcttcatcaaatcgttggccaccgacacggaaattgagccggaagttcgtcagcggacgagtacgaattccggcgggaccgagccaccaaaattccgcgtaattttttgacagaaaatttaatttaataaagaaatcttgcgtttcaggttgggaggtgaaggcgcttgagcaggactttgtcgaggacggggacgaaccaagtgcgttggaagtgcccgtggagccgatttgtgccggtggtgacgggacatcgtcgctgacaacgactaacggacgacagagtaccaacggcgtcgacgcaatgatcggcgccggcgccgaccatgacaaagatagtcagtcaaagtttgacattataatcgataaagcaatggcaatttttgaaaaaaatttggcactgattgaaaacttgtgccaatctttcagattttctggagttccaacttcgcaaaaccgccgtcggaggctttgcaatccgcgaagccaaccactgcactctaatgatgccaccagaaacgatacgtcatcattctgatggtggcgacggtggcacatcgacggcaccacagacgacggaggaaccgaaggacgaacagacacagcaaaacgaggacaaacacgccgaaccaaagccttcgtcatgttctctgctgaatccgtcaccaacaatcgcatcagtggagctggatgcactgaaagtacagcttgaaaaagtgggaagggaaatgcgcacattattttga

SEQ ID NO: 59198 - DNA, 1602 bp, Heterodera glycines
atggagcaaaatgaaccccaacaacaacaaggacaggaacaacaacaacaaggacagcaacagggacaggaaccgcagggacagggacaaggacaggaaccgcagggacagcaacagggacagcggcccgagatgggcaaaaccccatcggtttgctttataaaattgaataaggcttccaaacttacctatttaaaaattttggtaatactggagaattggtgtccctgcttaaattaaaaatttttcttttctaaaaattaaagcatttatgggagttttctgggtcgatgatcacgaatctgacattaattttgatcaaaattcgaatccctgacccggactcgaacaaaagtcgaaattcaaaattctcacacacaaaaacaagttttttcggaattggccaaaactaaggtcatattcgtgattaacgactccaaaaacaccagaatacatgtttcttacataaaaatttattaaaaaatcaagtatttggtgaaaaatcatgacaaaatcaatgatttttcgaattctgagctcagatccgtaatcagcgtattttttacactagaaaactcgaacagaacgattttaaatttattttccgtcgggactacaattctgccctttgccacaatttgcatgtttcattaagtttgccattaaaaaactattaagcgaaaaagctccgcaatgcgcaatcgaatttggaaattcataaaaatatattcagtttttttttaccggcggtaccggtactagacaaaccagtaacggtaatttcatttttgaaaaaaccggtaccggtaccggtaccaaaaaaaccggtaattaccggccagtaccggtaccggtaccgctcaaccctactattaagcgaaaaagctccgcaatgcgcaatcgaatttggaaattcataaaaatatgtttagttttgaaacgattgtctttgtaccataacaaaaatatactgaatttttaaattttatttgtttcaatattttaaattcatggataattcgcataaaataaaacttccacccgaactcctttcggaaattgtccgaacccttcctttcaacatccgttggtccattgtccggatttccttcactttcgattatttggttgtaaaatggcagctaaattgggttagaatggaaaagcttcgtcgtcttaaaaagagagaggaaaaattgcgacgacaaaaagaaaaaattgtaaggagtgatgatgcgaaagcacaaaacattttcttacctgaaatattaattgaaagaaataatttaactgttttccgttgggacaacaattctccactgttaccaaggtgtgggttcgattcctacccgaggcttaaaattttagctttttattactaagtccagtaacgattttatacaatttcatttttttacattacagcgggtcaggacttatattgaccatttggagcgccagttggagacggtgcgcgcggcgcatgctcaagaaatggcgacggtgcgcgcggcgcatgctcaagtcgttgatgagcgggattttttgagacgcataatagaaaatttctcaaatcatgccgtggcaccaacaggtcagtga

SEQ ID NO: 59199 - DNA, 594 bp, Heterodera glycines
atgcataatgatattcatttaggcaacggaggaggaaatcactggtggcaaaatgcgcccggacatggaggtcattttcattggcgttttatttttcgtttttaaaatttttctatttcgttcagtgcccttcggtggagcagtggcaaacaacggtggacaaggaggctatgggcaaaacatcgtacctggtctaaacggtggtcagggcggctatgggcaaaacatcgtacccgctcagggtgatttactcaagactattcagtttattatttttatttaagtgtaaatttatagaataggtaaaaaaaacattttttgaatccaaattttacttttttgcattttagctggcgctggcggcgttggatactttccggcggcctaccagcagcacggagggcaaaatgtgccgggtggaggtcctttaaaatcaattaaatccttcacctgaaaaactgattctcattgtgttttaaattaacaggccagtagtgttgttcttcggatgagactgattgtatgatgaaagactccgtcgatcgcttttattctcattctgtcgtcgtttttcccgctttattttggatgata

SEQ ID NO: 59200 - DNA, 1447 bp, Heterodera glycines
aaaaaatcgatttttcaagtgtccgttggggtactcaaacaattatggggagcaaaaatccaaggtaaaaataaagtagaggtatatcgaagctattcccgaaggattcggtctccccataaatctgggcgcatcggttcggggggactgccccgaaaacaaaaaaatcgattttttcaagtgtccgtttggggtactcaaacaattatggggagcaaaaatccaacgcagaattaaagtacaggctatagggaagctattcccgaaggattcggtctccccataaatctgggcgcatcggttcagggtactgccccgaaatccaaaaaaaaattttttttggataaaaattatttaaatgaactgactagataatatttaaaataggttatttctcttcctttcagtatccctgctaagtttggtgcgcttctgatcagtttctgaaaaaaaagttaagcctaaactttttggcctgtttaaaaaggaattaaaaattttttaaaatttattcatctccctttttgatagaaaaagcatcagagtgcctaaactaacatgtaaataaaatttggtgcgtttcagagcattttctgaaaaaaaatatttatgaattaataccacacaagtattatttttttttaattatttttttcatttatcacccaacgttctagactgatcagaagctcaccaaattttgcagggaaactgctgagaaccctacaaatgcttataaattttcttagaattttttgcctggaggaacacagttcttcacacttaccacaccagcattatttttttttaattatttttttcattttatcacccaacgttctagactgatcagaagctcaccaaattttgcagggaaactgctgagaacccttcaaatgcttataaattttcttagaattttttgcctggaggaacacagttcttcacacttaccacacaagcttaaaatttttggcctgtttaaaaaggaattaaaaatttttttaaatttattcatctccctttttgatagaaaaagcatcagagtgctaaaattaagttgtaaataaaatttggtgcgctttagagcactttctgaaaaaaatatttatgaaacaaaaaaatcgattttttcaagtgtccgtttggggtactcaaacaattatggggagcaaaaatccaacgcagaattaaagtacaggctatagggaagctattcccgaaggattcggtctccccataaatctgggcgcatcggttcggggggactgccccgaaaacaaaaataaatcgattttttcaagtgtccgtttggggtactcaaacaattatggggagcaaaaatccaacgcagaattaaagtacaggctatagggaagctattcccgaaggattcggtctccccataaatctgggcgcatcggttcggggggactgccccgaaaac

SEQ ID NO: 59201 - DNA, 138 bp, Heterodera glycines; identical to SEQ ID NO: 50950

SEQ ID NO: 59202 - DNA, 676 bp, Heterodera glycines
gaaaaaaatatttatgaaacaaaaaaatcgattttttcaagtgtccgtttggggtactcaaacatttatggggagcaaaaatccaacgcagaattaaagtacaggctatagggaagctattcccgaaggattctgtctccccataaatctgggcgcatcggttcggggggactgccccgaaaacaaaaaaatcgattttttcaagtgtccgtttggggtactcaaacaattatggggagcaaaaatccaacgcagaattaaagtacaggctatagggaagctattccggaaggattcggtctccccataaatctgggcgcatcggttcggggggactgccccgaaaacaaaaaaatcgattttttcaagtgtccgtttggggtactcaaacaattatggggagcaaaaatccaacgcagaattaaagtacaggctatagggaagctattcccgaaggattcggtctccccataaatctgggcgcatcggttcggggggactgccccgaaaacaaaaaaatcgattttttcaagtgtccgtttggggtactcaaacaattatggggagcaaaaatccaacgcagaattaaagtacaggctatagggaagctattcccgaaggattcggtctccccataaatctgggcgcatcggttcggggggactgccccgaaaac

SEQ ID NO: 59203 - DNA, 687 bp, Heterodera glycines
atggacaaccgccaatttggtgcgactgatcagtttgaaaagtttttggcaacgggacgtcaacgattacaaagagaatgtgccgaattgaaacgccaaaagctcgtcagtgcacgttttgaacggaagcgcaagcgcgacaatgagatggcactgctcgctgacgaagtggatcagctcaagttcgaactggtcattaaggtagatggaaaaaattaattaattgttatttgctatttaaaataattaaaacaaaattaatcatagaaaaagttgaccacaaaatgaatatagcacaagcaaattaggaaaattaaagcaaggtgcttgaagggcataattaattgtctaaggtgcaaataattgattatacacggattagaataattgttttccataaatttttgtagataaacatttgaagtttaagaatttttttttaaagttaaattcgtaaataaacctgatttatagggctaatatttatagttgctaaaaactaccaaaataattagttttgtttctaaaaaaacccaaaatagttgctaaaaattggtaaatagttgctaaaaagttccgaattttagggggtgtaaaatcgaaaattttcttcaaaaagcaaaaatattatgccaaaccattaatgagatacataatttttacaatcaaaaaattatcgtcaataaa

SEQ ID NO: 59204 - DNA, 615 bp, Heterodera glycines
aatgccatccaattggcctggctcccgccccatcccgaaacttctccggtggtcgcttatcgtctccgttacggccccgccgcaggcacttaccggccgcaggaagtgattctgcagggcgacgaactcagctgtgccgactacgagtcgcgcattttgactggcgaacacttgtgcacttcggccacgggtctgaagccggccacgatgtaccgcttcgcggtgcaggcgcagtcttcgtctggcaattggggcccgttcacctcggacagtttcggcaccactgaacccgaactgaaggcggtggaggggggacagttgcgactgatcggcgcagggcacgactttttgcgagtgcggtggacggcaccgccggtgattgttgcgcacatcgaacaatacgaggtggacaaggcggaggacgagattcgcaactgtacctatttgtttaaagttgcacatccaaccgaccgaacgacttgtccaagcgccacaacggcacgaagtgccggacagtcagacggacttccaattcaaagggttggtgccggtgacagtgtacaacgtaacggtacaaggactggcacagcaggggaagagcctgtggaggattag

SEQ ID NO: 59205 - DNA, 1090 bp, Heterodera glycines
gctaaaagagaagctcgtaacggagttcactcacttgcgcaacaattctctggagcctcttgcgacttttcttgattatataacgtacgcgaaccgacggaaatatttattagaagcgtgatttttaagttattcatacatgatcgacaacatcattctgctgatcactggcactctccatcaacggccaatcaacgagctgatctccaagtgccatcccctcggctcatttgagcaaatggaggccattcacattgcatcaaacccggctgaactgtacaacgctgtgctcgtcgacactcccctcggttggtcgttggagaagggctttgattcgttggcctcgaaatcttcttgcttttatttacttagcattttctttagccccatatttcgtggattgcataagtgagcaagaccttgacgaactcaatgtggagattatccggaacacactgtacaaggcgtacattgaggacttttataatttatgcaaaaagatgggcgggaaaactgctgaggtgatgtgcgaaattttagctgtgagtttcctttttctctatttcatcttttttatcggtgtattaagttcgaggctgatcgacgagcaattatcatcacaatcaacagttttgacacggagttaaataaagaggaccgcgctaatttgtaccctcggtgtggaaaactgttcccagagggattggctgggctagccaaggccgatgattatgagcaagtgaagcaagtttgcgagtactactccgactataagcaactcttcgagaacagtggcctcaatccaggcgaaaaaacgcttgaagacaagtttttcgaacatgaggtgatccattccagcgggattgagttcttaggcgactccaaaatcatttatttaaaatgggtcaaatcagtgttctgtcgtttccaggtaaagctgaacgtccaggcctacctccaccaatttcattttggcgttttctacgcgttcataaaactgaaagaacaggaaatgagaaacattatttggatcgcagaatgcatagcacagcgtcaccggaccaaaattgacaattacatacccatcctg

SEQ ID NO: 59206 - DNA, 1344 bp, Heterodera glycines
  unsure (1)..(1344): unsure at all n locations
aaaagcatgcggggttcatccaaaaccaatggcacgacctctaagccaaacatgccaagcagagtaacattacggctccacccaatgccactggggaaaatgccgaacagagcaacattttggcattagaaaatgccaacaaaaccgcaacaaatgccgaacagaacaagatcgtggcaccgaacaaaaccgtgacaaatgccgaacagagcaacatcgtgacacccaacaaaaccgcaacaaatgtcgaacagagcaacatcgtggcacccaacaaaaccgcaacaaatgtcgaacagaacaacatcgtggcaccgaacaaaactcaaacaaatgccgaacagaacaacatcgtggcacccaacaaaaccgcaacaaatgtcgaacagaacaacatcgtggcaccgaacaaaactcaaacaaatgccgaacagaacaacatcgtggcacccaacaaaaccgcaacaaatgtcgaacagaacaacatcgtggcaccgaacaaaactcaaacaaatgccgaacagaacaacatcgtggcacccaacaaaaccgcaacaaatgccgaacagaacaacatcgtggcacccaacaaaaccgcaacaaatgccgaacagagcaacattgtggcaccgaaaaaaaccgcaacaaatgtcgaacagagcaacattgtggcaccgaaaaaaaccgcaacaaatgccgaacagagcaacattgtggcacctaacaaaaccgcaacaaatgttgaacagagcaacatcgtggcaccgaacaaaaccgcaacaaatgccgaacagagcaacatcgtggcaccgaacaaaaccgcaacaaatgccgaacagaacaacatcgtggcacccaacaaaaccgaaacaaatgccgaacagaacaacatcgtggcaccgaacaaaaccgaaacaaatgccgaacagaacaacgttgtggcatcgcctaagttgtgaagaaataaccaatgaatgaagagacttttaaatgttccgtaattcataaaaaatgtcttatttatgtttgtaaagcaatttaaataaaatattctgaatatcggccatatgcttttttatttatttattttttctttaatttctaaatttccgtattgtgtttagttggaaacgccgaaaggttaaacaggaaattttgcgcaccaataatacccactgcactatcatttgtntgcttttggcccagcaataaaatgcttttgtccacaaaaatattcttttttgtatggtgctcagttggccacccccgcgatggttggactcaaatgaatacgctcaattgtccactcccccccccccaatttcgtcatcttaatcacatctt

SEQ ID NO: 59207 - DNA, 515 bp, Heterodera glycines
atgcccattcgacctaggaggtacgacgaagctggcctttatgtaagtattttgatatcgctaatattgcttgcttttatatattaataatagaaaataaattttattcgtctttttttgaatattatttttttcataattcctttttcatctgtctttcctagttttagataataaattatatgtttgcataactattattaatgcctttgtaataatgatttttagcttacttgttgacatttaataattctgtcctttttgtgtttataccggaggaatttttaaaaaattatttaattttttcactaatgatataatttttttaattttaataataaaataatgattaaattaaatttacttttagtttaaagaattggtggctggacgtttcgccaatgaccgtttcgccaatgaccgtttcgacaataccttttcgacaatgccgtttcgacaatgaccatttacgactatatcatatcgccaaaatttaaaatatcaaattaaatata

SEQ ID NO: 59208 - DNA, 1600 bp, Heterodera glycines
atgtcgaagttctttcgaggtgctatttcaagctccgagtcatcagaaagcgaggagtctgccgatgagcaaatcgttcaaacccgtacgatgtgagtgattgaaaagaaggaatgtgcactttcgcttttataattaaatttttaacatatttaagagctcgcgatttcgcatatccgagtgattctgaggacgaaggcccaaaacgaattgtgcgcacccaaaaggacaaaacttatgccgaactcaaagaacagatccgttcttcacgaaatgctcgaaatatcaaggatattgctaaacttcaaacaggtttttattttacattttagataactaaagcatttggatatcgtcgagtgtatgtcataaaaaacattttaattttgttttttactttttaagtgtttgaggctcaactgaaattatgggaaaaggcaaaaacgtttattgtacgcgaaaatctgagcattcctcgcttttacattcgctatttggccgaacttgaggacttcatcaacgaacaatgggaggacaaagaaggaagaaaagtttggacaattttcaaccaatttaatagagaaattgaacagataatgtcaaaagcgaattcgaaggcattggcctcactaagacagaagttgaagaagtacaacaaggactttgaggaggatttgggcacttaccgaacggagcccgacccaatgggttattccagcggcgctgctgaagacgacgaggacgaggaggttatgggaagagagaatggagttcgtcatttttgagcattgaactttaaccataccaacgaaggaatgttcagatccctacagcgccggccattgcaacaaatgacgtaaatctgaagaagagatttatgggcgcggagtccgagtcggaaggcgaagagtccgagtggggtactgagtcggacgaatcgtcatccgcttccgatttggaaccattggagggcaaggaaatggaggagcttcgacgctatttcttaaagtgagcattgccacatattccctttaattttaaattgttttttaggaaggataaaacggacagaggcaaaacaaaggaaaagaaggaaaaggcggcacaacgcgagaaaatagcgctggagaagaagaagttggaggaggcagacgggcagaacgaggagtcttggcagaagatcacctacaaacatgacgtggccaagcccctcttcgacggccaggccgaagtgactggcgatttggtggtgaagaaacttctcgaattgggagccaaccgaggccgacgggcgaccaaccgaaaggtgtacgtgcgctacttgcaggagttgtacaaagctgcagatgaacacaatttgggcgttggactgctcgcaaaggtgctcaccgccattatcgctgcactttttgagctcaacacacgcatttccgatgcaatggaattcaattcgtggatgaagtcggttttcaattgtcacttcgtttcatttgcttttttaaggactgtcgaaacggtggatggattgtttagccttttgtccgaacatccaaatgttatcatttccatttcgactaatgaagacgaagaaaacattttg

SEQ ID NO: 59209 - DNA, 454 bp, Heterodera glycines
atgtcgactgaaagtgtccaactcggccagcagcaacaggaaagggaacagtcgcccgatttggcgggactgaacagcgacagtggcagcgaaaagaggcgactgcgcgtggccaaaagaggtggggaaagaatgccgacaattttcacgtgagatggctcttttgaggtgagaagtcgcgtagaaatgccactttggtcgcggtggagcgtgccgtgccgagtccgcccattgctctgcccaagtccacgtccgtttgttctgccgcttcttcgtccacttcttcgggtctgtcttcactatcattcagccattatttttatattcaaatttatgaaatgtttttaaaggtgtcccgcaattttccaatggcattgaagaaggagaaactgagactgattgatattttttaagaaaatcaaataattcatttttatattttatttcaaataaa

SEQ ID NO: 59210 - DNA, 506 bp, Heterodera glycines
atgccaaaaggtggcggtgtaagtgccaatcgaaagaaaaagggaggggacagagttaggatttatggcaaacacgaaatacaccctcagaagcaattttttaatccaaaaatacttttaaaaaccggtctcatatgaagcgttaattactgtaatcacgttgcaacgtattactgtattccattaaaaatactgtcaatgacgctttatccgagaactgaatgagcggacttcagaagggttttgttcccaatcccatttcaaatgctttcagactttcatgaccgcgtttgatttgaacttgcacatgggcacccacacggggttcacctacgactgcaaagattgcggcaaatgctttccctgccgaaagactctggcggagcacaaccgttcgcatcggatgattcttagtggcgggggcggagggagtgccagccccgaattgtctaaaaaggcaaatcattcattttgagtaggaaatacgcttaaaaggagaaaataaa

SEQ ID NO: 59211 - DNA, 1060 bp, Heterodera glycines
atgaaattggataatttgttggagcaaatgatgatgatgcaacaacagcagcaacaccaccaacaacaaaatcagcagggagaaaacgaacacggagaaggcaatgtgcagcagcaaaaggaacagagccaaacgcaacagaaacaacagcaaaagcatcgacaacaacagcagcaacagcagtgggaggaaatgccacaaaataatgtcggaacagcaacgaatggggtgagggacaaggggaaacaattggacaaatgaatgaggggtgccaaaggtcactaggatcaaattagttttagagtgaaaataaacaattttgatttgcttgttgagggggggggaggcgtcttttgggaggaagggtcatctcccccggggagggggaaagggtgcaaaatgcgtcctcttcgccccccccccgtcaccgccctccttcctattctatctacttgaaagtgcacagcaattacttggaatattacagtcttttcagaacgatgtccaatcaccaaacggcgatcatcaaagttttgctgaactttcggcgtccacagacaacgcaaaacgacaaaagacaaatgcatttttggccatttctaatgggaccagaaatgcggcacaatgcaaagaccctttccaatcccaaaatcaccagcaaatgttgacggtcggtggattcggtgaaaacaatggcagagagtccctccctcagcatttggaatcgttctccgcctttttaaggggtgagcaattaattgtcaataattattatttaattatttcttattgatcaaatttaacggatggattaatttgctttttgttaattatccttttctatagcatttaaaagctcccttttccttttctctctaattaattgtaataaatttcagcgaatttgtcgcttttgtccgccttttcgcctcctttgctcccgcctcaacagaattcggtccttccgccgatccttccctcgcctattcctcaacaaatcgttccgttgagcaaggaaatcgcctcgcagggccttttggccgtcggtggctgtcgtccg

SEQ ID NO: 59212 - DNA, 1044 bp, Heterodera glycines
attccttttttggttccgccttgtccaaaggggtccgtcttctgccgttgtttctgacgctctttgctgtcctcgtcgcactttgtgtttctgtggaggggcagcagccatccgccgaggtaagccatcacaatttagcagaatttatttatgatcatgatttttggaacatttttctttccttcctttgctagtctcttattcgttttctctccctcccttctgatcactttcactctcttcttttcccttatctctgactctttgtttcccttatctctgactctcttcttttcccttttatctctttcattgcttttctctcttctgatcactttcattctcttcttttccctcttcttttcccttatctctgactctcttcttttcccttttatctctgtcattgcttttctctcttctgatcactttcactctcttcttttccctttatctctgtcattgcttttctctcttcttttccctttatctctgtcattgcttttctctcttctgatcactttcactctcttcttttccctttatctctgtcattgcttttctctcttctgatcactttcactctcttcttttccctttatctctgtcattgcttttctctcttcttttccctttatctctgtcattgcttttctctcttctgatcactttcactctcttcttttccctttatctctgtcattgctttctctcttcttttccctttatctctgtcattgctttctctcttcttttccctttatctctgtcattgcttttctctcttctgatcactttcactctcttcttttccctttatctctgtcattgctttctctcttcttttccctttatctctgtcattgcttttctctcttctgatcactttcactctcttcttttcccttttgtattgttttttttttttgctttgtttcgtcctgatcactgttcccccttatttcagcagcctcgcgcagtccttttggatctgatccctaaagaacttgtggagaataagcgatcgccgcgacactttgcctt

SEQ ID NO: 59213 - DNA, 553 bp, Heterodera glycines
cttctgtcaaagcacaaacttgaactggagagggccaagcgcaagtttggggacaatcagcgttcattggtcgacgcgaagcacagtttggacgtgatcagacagaaacaccaggccaccgtcgacgaactgggcaaaattgacctgagattgggcaaactccatgacgaattggccgagaagcacaaaaatgtaaaatgcattcgcagtgatagactattaaatgtttcgaattttaataacagtatttggactacaaaaatcgtttggacacacaatacaacgaattgttgtcggcggtgctggagaaagtcacgaaactctgcgaccactttcagcagatcgaggtaaaaaaagagcagaaaacagttggtattgttcggtttctcattgaatgagagatttttttttgctttagtcttcacaaattattaattgtttaattcaggaccagaagaaatgcttcgcagaattagccaatgaaatagtcacgaagaacaaggaggatttgaagcaattggaggcgaaggaaaaggccgaagcggaagattaa

SEQ ID NO: 59214 - DNA, 703 bp, Heterodera glycines
atagaaagagccaggttcgatgaagttttggtaagccaaaaaaaaatccaaacattttttataaaaaatttaaaaatgagaattcatgcgagattttctggaaataagcttaatatggcctagttaagctgtaaaaaaaatttggggcgatttgaatgagaatagaaagagccaggttcgatgaagttttggtaagccaaaaaaaaatccaaacatttaaaaatctataaaaaatttaaaaatgagaattcatgcgagattttctggaaataagcttaatagggcctagttaagctgtaaaaaaatttggggcgatttgaatgagaatagaaagagccaggttcgatgaagttttggtaagccaaaaaaaaatccaaacattttttataaaaaatttaaaaatgagaattcatgcgagattttctggaaataagcttaatatggcctagttaagctgtaaaaaaaatttggggcgatttgaatgagaatagaaagagccaggttcgatgaagttttggtaagccaaaaaaaaatccaaacatttaaaaatctataaaaaatttaaaaatgagaattcatgcgagattttctggaaataagcttaatagggcctagttaagctgtaaaaaaaatttggggcgatttgaatgagaatagaaagagccaggttcgatgaagttttggtaagccaaaaaaaatatcc

SEQ ID NO: 59215 - DNA, 833 bp, Heterodera glycines
atggggaccaatgttagaggagaaaagcgaagcaaagaaaaggcgaagggaaaagccaacggcgagggaaagcggcggaaggcatcgccggagggggaaaagtgccgaatcaatcgacagaggaaaagacaaagcgacacaaaaaacacgcgaattgcgacaacttttggattttgtggacgaccgaaagcaattggcagacgaagttttggacagtttggacgtgaggactcggaacagaatattcccggaattaaaagtacaaaaaaacagacgcaaaagtgattggcaaatcattttttcaaatttagacaatgtcggagacggaaatgcgaaggattgtctacggatttatcaacggaatatcaaaaaagcgaattgtggcattgctccaacgtccgttgtgccaattttcaattaaatactcgtcatttgcaggaatagacttcgccgacagttcgtcaacctccgattcggaggaatgtccaaattccattccgtcgacttcgtccgattgtcgaaatcgctcaatttcgaacgaaccgaaaaaccctaccaaaacaaagagtaattcattgaaagaaaagcacaacagaaacaaaagggagaaggagttggaggagggcgaattgatttcggaggaggaaatggaaaaaggagaggagaagggaggggaagacggatcagaaccaccaccagcagcagaaagggcgacattcgaagacgacacggggagccaatcggacgacgacgaggaggacggccgattggcacgacgacaaaagaccgaaccgcaattcgtcatttcgcgtaataaacaattagtgttttaa

SEQ ID NO: 59216 - DNA, 1626 bp, Heterodera glycines
atgtccaattcgtccaacgaacagcagcagctgggcaatgggcagtcacaaaatggctcgaataggtcttctcttaacaatgctcaagccaattcgtccaattccatttcgccagaagttgaagatgaagttcagggacaacctcccgaggtgtttatggaatccttggacgaatattgctttttgatttccaattttgacctgttaacctggaaccagatatctattttcattggtccatgtttacatcggtagttaccgtaggtgtagaaatttataaatagacatatttttggcgaaacgcctttaatttggtaaaatgaaaccgtagtactacacgcagatggggattctttaaaccgagaaaatacccagaaataaaattgaaaacgcaaaaatgaactttttaggtgtttcggaacggatgtgaaattgaagacatggaggaattttggaaacaagcgcaacaaatacaaacggacaatcacgaattgtccgaaagagtgtcttctttaactcgagaggtttaacagatggggaaataacaaaaaaaattacaattacagcacaaccgaattcttgtcgatcacaacactcttcgcaccgaacatgaacgaattcttgtcgatcacaacactcttcgcaccgagcatgaacgaattcttcagcgacagcttgacgatttccactattgggtgagtattgctaaaatttaaaaccatgacagaagagtttaataatttttgcaaaattttagattctttgtttcgccttctttatcccggtatgttaattcgtataatgaataagtgtaattgaaaagattaagccgctgtcaatattagccaccgcgcgtaacaatgggctctcatttccggtaactgttctgtccgcactcgccgcgacaaatttctggtgcgaaaacaggaactcggtacaaaaattaatttctaactcatttcagtgcctttctgtggatccccggcattctcttcgccttggcattttattttggtttgaggaagaacgcgaagaaagagtgatctgtacgaattggaattcccagtctttcagtctgagtgtattttaaaaaaagaaggacaattttctgtccctttaatttttattgcattgcatctttgcttttattttgtaaaaatttcctgccttataattgtgttttagtgtttgttatttcaaataatgaccaccatcgaagaaaatttgttggacggtcctccggctggttactgttcctcatctgaggaagatgaagaggagtttgcggtttcaagaggcgcaatgccatgttcttccgcagtcagaggtagaatagagggggttttgcacgaccatcccaatttttttgttcagcttgcaattagatcgagacgaacggcaccgcggacggggccgaagggcgttttggcggactttgaacgttcccgacgagaaatgatggcacaaattcacactttgggtcgacaaatacgcgccgagcacctttctggatttgttgaccaaagatgtgaggcaatttgagcaaaatgttaatttattaaaatttagcacttttaggagacaaatcgaatcggtgagaatttaaatgagaattaaaaaaataaa

SEQ ID NO: 59217 - DNA, 785 bp, Heterodera glycines
atggcggagctgaagtcgcgtcttgaaaatgccaccgattgcacgtccattgacgcgccttccacaatttgtccgtctccgccgcttcgacaggtgaagcaccgccaccacacgtcggcactcggccgtgctgtttcattgtggacgcggtggaacaagcgtcgccggaaatggttggtggacgggccggacagtgccatgaattcgagcattgattccctcctcaccccatgtacaggttcaattcctttgttcatgggtccgtcgttcccgcgcttcctccgtcgtctgtcggtgtcccgtcatttgcacttgcgcctccctttggcgtgcgcccgcgctgcgcgagttgcgcgccaactgcttgcccgtgcgcgtgcagcggtgcaatcgccagcggatgcagcgacggcttgagtaggtggggacaaacgcttgcattttgaatggaccagaggtatacgaatttcgtttttggttgttttgtttcattttcataaaaacagactacgaaaggcagaactaaaactgtccagaattgaaattactcccctaattttgaattgtcagatttgccattacgaaggcgtgcgaattggccgtgatcagctggacgaactgttcctttcccacggcagtgacattcgcctctgtctgaacaccctccaattcagcacgctgaaaacgcacacttccgaccgaatccaagccaacaggacgaccaccgggacgacaacgacgacaaatgccaattttgtgagactatttttgctttcgtccggtag

SEQ ID NO: 59218 - DNA, 969 bp, Heterodera glycines
atgtcacgcaaagtgttcaaatttatgttggagaaaaacgacggatggttgaaaaagaaattggacgaatatttggaggagaacgactacgaattcatcgacgaactgatcaatccgccaaaagacatggtgaacttctccacgacaacactttcgatgcaaaataatttggtgttttttctattttcagatgagcaacgaccattggaccctcaggggacgaacgcgtgaaaagtccgtcctttaccaaattgtgtccgagccgaccgccggattggacgtgggtgagtgatgcgttcattcaccgacaacaatgaatgatccgctgaaaatgggcctttttatgaagataaaatcgactatttgcttcgtgattctctgctgaccgatgtttcgatcaatttgagttcggtagggttttgaaaattgcaagagacagtggcaattaatagtgaaattaaattaagaacgaatggcaccgcattttgggcgctgtcggtgtcaccgtcgacagcaaagggttcaatcgcatttgccacccacacaaaatcgtattacaatttttaccatcggaattcattatactaaatccatttccttaacattttcgaaacttggccgcgtttttgattcccgcaaattgatgcacgaatgtgtttatggacacaaaacggtgatcgccgcagaaatcatgtgcgttgccttcgcatcctttttaccatttttttgaatgtttctaaggtacgtccgagcacttagggcagccgacccgcacctcgaatttgtcggacagaacgggacaaagtataaaatgtccaccggtgatcactttaaagggcaacaccttaatttacctaattcaaaattgcagcacacaaagacccgcaggcattttgtcgcctcgacaataatgtcatttccctggtagaaaatcgtccatttttcaaattccaacagacaaattgttaa

SEQ ID NO: 59219 - DNA, 1368 bp, Heterodera glycines
atggacatttctcgacttcgaaggatttgtgccatttacgcttccgatgggattaacggatatccattcagtttggcggtgattaagaaggcattggagtcaaaattaaatgtgtgctcattattgttccttcatctccggagggatctgcccgatactctcaaaaataacccaaagtaaggcaataaaaattgtaggaaatactgccgagtgacccccagtcataaaatttgttttactagtagagggttttcggagtctcagattacagatctgacattgattgtcacaaattccggacccggattcaaacagaaagttgaagtttcaaattttgcgagtttccgacttaggttctaaaattgaataaaataatggaaaatcaatcaggcaaataaactatgcctttggaatgtccaataattgacttgtttaaacagcaaaatttgattgttcattgtgttatttccccaccatctttaaagtgcagattcgtcgcgttggaatgttttggtttcgattcattagaggcaattcgcaaaagattggcaaaggaagacatttcgcgcgaatctttggtgttcatcgactcgcttcccgttctgatcgagcagttctcgctgccctccacctcgtggttcctcacccaaattgccgaactgtccgcctgcgttttggcattggttcacagctcagaatccgaagatgaccaaaacagcgaagattggcgacgaattgaatcaattgcatcgactgttttcgagcttagggcgagggataaacacacattgtgccgaacgaagaccaaaaaaaggaatggcaccgcagaagagaaggcaatggcaattgaaaaatgcacaattaaaaacagacatttggaagttactcgtttattttactttcagcttgaacaattctccatcgaagaagactattccatcactttttctccatttgattattcttctgatcggactgacgacaaattcgtcgagaattccatttcggcaggcggaaccgtcggcaatggcaccgccactcatttgtccacacttccgtttgacctcggcttgaatttgagtgaggaggagcgcaaagcgaaggctcgcgtgcctttgccttatttggacgcgcaaacagagaaaggtcgactctttgggagttctttgccttctcatccaaacaaatttgcccttttccatttgtttggacagctaacaaaaggccataaatcgactcttttaaggtttggttggtctcaacatttcattcaacaaaaaagtgagggtcggcggtcgcattttgtacgtaccggacaaagaggacgacttcgacgagagcgacccggacgacgatttgacaatctga

SEQ ID NO: 59220 - DNA, 1053 bp, Heterodera glycines
atgtttaaaagtgcccgcggcaaaggccttcgtcgagtcaatccgacaacacttttgtattccacaaaaagggatgggaacgagcgttgggaggaagaggtcgcaatttgggaaggaataggcgacgaaaacgaaaatgccaacggaggcgaaatgcttttgacgcccattttcgctatgccaccgaatcaaagcgacggagcggcacaaatggacgaacatttgcaccaattggttcgcatttgtacgattgtccaccgccaagcgtacgctgtgacacaaaaattgggaagggcggtggacgcggtcaatgcgacggacggcgaaagtccgcgaaaagcatgcgaattgttgcgcatttacgaagtgagcagttacagaaaaaaaccaaaatcacaaaaacctatgtatttttaaattgaccctcccaaaatttgcagcgcataatttggcggtccatcatagaaattgaccagaacatcaaaacactttcgagttccgtccgcggtgaattgcaaagaaatgctatgaacctaatttttttcttgtcaccacagaaagcattgactcgtgcaaaatcaatgaaccgcgactcgaatggctgctgagcatcagcaaatttcgggtcaccgtttttgaccaaattaaaatttaaaaaataattttaatcccattttccgttggcaggtggaaatggaaaatgccattgacagcgaaattggcatttgtaaagaaattgagcgcattctccgaattcgtgcgaggggcgaagttcgcggactccggattaaaggggaaacagtcgcaaaagtcaacgcgataacaaacgaaatcgccaacaaaacaatgaaaatcattgaaaaatgaaatgctatttaatttaatctttgtttttattgagcataatatctaaattaagaaattgaggtattcctaatcaccggatcgttctccttctgcttttgttgtccatcacctgaaaacagcgctttacattcggccattttttccgggtccaatttgttgatcaaagcgaatggcttaacgagggaa

SEQ ID NO: 59221 - DNA, 136 bp, Heterodera glycines
  unsure (1)..(136): unsure at all n locations
taattgtctttcgatgttttattccgattcttcttctgtctctcctttcattttcacatgtgtagaatctttcaaattgtctaaatgcttctttcncagattccaagccgattttgataattaattttacaaaata

SEQ ID NO: 59222 - DNA, 1111 bp, Heterodera glycines
atggaaaaggagaggagtgaaagactaattaatgagagtgagagagattaatgactaatcagagagtgagtgtattagaaagtgagagaaggagacagaggaagagagagagagcgaacgaaataaggaatattaatagtgaggaaagagagagagagagagagataaagggagagagagagagagagaaagggacaaagagagagagaaataaagggggagagagagagtaaaagcacaggatgaaaaatgcccaaacttggctaaaaaaatttgaatatgaaacaaaaaattttatttaatttcaaaccgaaacccaactcataccgtaaacgaatgaaatcattcagttatcgtaagaacagcaaaatttcattatttaccttttttcgttttcttctatttttggctttgggttcatttattttatcttccatttttcgtttggaccgtaccaccgcctccccccccccccttcttactaattaactaattaatacgaattatgaacaagaattataaattgcatttttcagtgtgtgtaaaaatgggtggggaattcactgataatcaaaacgaaaatgatttggtgacaaaaaaggcaaaggaacgaatggaaaaaggaggggaatttaacaaattagaaaagcaatttaaattaaaagagcattttaaaatttgattgaccaatccttggaaatgttttctgttagtgcttttagcttttttaggctaattaactgatttaaacaaattatagagtctttaatcaaactctttaacaatctcatttatccccccccccccccctcctcaaattggtcaatcttccgatcgtttttcctccactgaaaaagcaccatattattttctctccctcccccccccccgggggattcgtttttgtccatcgattgattggtccgttggtcgggcgaaactctctaaatttccccgtactatctcttcattctctgctatacagcctctctcatcttacgtttactctctctctcctctttttttattatgttaataattctgtagataattatcaaatcagtgcctaattagttgaaagaaatgtttaaaaaagtgacgaaaaaagata

SEQ ID NO: 59223 - DNA, 862 bp, Heterodera glycines
aattcggtgtccaactcatccgaatccgccagcagtgatcagcaccagcaaaagccgtccctcgtgctgcactcgtcgacagcagccaatcgcccgccgatgttcccccattcgctgctccagggcttcactgcttccgcctcctcctcgtcgtcgtccgccgcctcgggcggcggtgccgtgccgaacggcgctgggggcggtgccgtctccggcgcttcgcccgccacgccgtcgtcgctgctgcagacggacagcaaaccgtcgcccaccgaaatgctgctgtccacgtccgcaacggtgccgcgcacattaatgattgttaaattaatgatcaaaaaggcttccttccattcattaattgcttttaggcttccgcgaccgccgctcaattggccgttgccgcacaaatgtcggcgatgaccccaaatcagcagcagggtgtgttcagttggaagaaggaatagtagggtccaaacagaatgatttgatgctggaatctgaagcagttcattcgcaaaaaacaacgaaattcccggctaaaaaaatgctaaaaaccccaaatctttggaattatccatgtaaaaattgttttgtcattttgttggtcgaggcggactttttgtggcactttttttttaaatcgtctcttcggccaaatcactccatatttgatcctttcccccttttaggctccaatcgcgagccaaagccgttcaaatgcgggcactgtccgaaggcattcgccaacaattcctacctctcgcaacacatgcgcattcatttgggcattcgcgcgttcggaccgtgccaattctgtggcaaaaaggtggcacaaacaaatttcgaggaagacaaatga

SEQ ID NO: 59224 - DNA, 1180 bp, Heterodera glycines
tcactcgtcaaaagtttgacctgccttcgttgtccgttgaccagttggtctctgagcagaaccagcaaatcattgggcccgactttgaacttcatcagaatgtcagtgtcactgtcagaggagggaaaagcaacaatggagaccaatatttgatcaggtgaaagcagcatttagatgaagttaacttcattttagctcattccaagaggcaaatttgtcccaacaaattctccaaaatttggcccaaattcgtttcatccgtcccacagttgtgcaaagtcgcatcattccacttattatgcggacaaatggttggccaatttgaagcaaaagttgaagcaaattctgtccatttttagaggatttgctgtgtttggcgtccaccggcacgggaaagaccggcgcctttctcattccgttgctaaacattttgcacatgttttgctccatcaaagagcttgggaatcttctctttccagtcaatcggcactttccgaaggcgattatcgttgcgcacacaaaggaattggtgctccaaatcgacaaaatggcgcgaatcctcgcagacggtgaattttgaaccattcattccaaatcaaattgcgtcgtctttgtttatccttttccgtcgatttgcagggactggcgttggcattgttctaatgatgggcgagctgagctacgcttcgatcaacagccgaatcaaccgggacggatgcgatgttttggtcgccacccccggccgactaaaggaatttctcctgaagaatcggatcgaattggattgtctgcagtttttggtgatcgacgagatggacaaattcttttcggtgtttttgcctttgtttttgatccgattaattgcttcttcatttttaggactttgaatttctgcaattgtttcacgaattgaacgaaaaaaagagacaatgcaaagtgacaaatgttttgtccgcttttatttttccactttttcagagcaccgtttggccctttcgtacttttttgttcagtgccacttccgattccctcgacggcgtcgttccgttccttcgccccgatttcttccatgtcatcgctgggccggtcaaccaaagtgttgcgcacgtgcgacaacgcatcatttcgacaaacattttcatgcgaatccatcaacttgagcttatcttgcaaagagaag

SEQ ID NO: 59225 - DNA, 825 bp, Heterodera glycines
atggtcaatggatgttcaattttgaaacaaaaaaagacaacaacgggatactgtataagaatattaacacaagacgattggacgggattggatgataatgcttcaatcgatttcgtagataaaaatggaacggtaagcatttaaataactataaatacccaaaggccctgaaatagaatttttttttttatgtttaaatgtagaaaaaaaaagattcaatataattgaaaatttttcgaaaaatgcaaaatttattattcaaaaaccccaaaaaaataagtgggtgaattttgagataatatttagaggtggaggtgtattttttttttgttaattaggaatatgcgttgtatctttttgcatatttttctgcacatatgttatgaaaaaacggctcaatattagcatttctgcgtgaaaatttttttgatgctttggtttaacttttttattacatatgtataaatgtgcatatttttacattatttggttttaaagtatgtatgttttttcttagttctaaaaatattgttattttacagattaaaactatagaagtaagacagctgcgcgtaaaaaaagaaagtatattttacaccaaaccctaaaactcatatggaatttctgtctatttcaatgaacaattcattgttcgactactaataaattatgatgactcggtggataagaattatttggagatattgatccaaagcaatggctacaacgaaatcccaatgatatgattacattcaaacgcaatggaccttatggaatacagacagacaggtaggtagtaaatgaaaattataaaagtttttaaaa

SEQ ID NO: 59226 - DNA, 79 bp, Heterodera glycines
atgaatataataaacgaagaaatgaacattgttaatctttttaatttatatgtgcatgacaatgacgaaaacttgtcag

SEQ ID NO: 59227 - DNA, 689 bp, Heterodera glycines
  unsure (1)..(689): unsure at all n locations
atgtccaccttcagcgatttcatcgctctgtcncaacgctgtgatgagctgaccgcgcgcattatcaaccgcgaagtcagcgacggagtcattgcgccagactttgacgatgcggcgctgtccatgttggccaagaagaagaacggcaactacgtggtgctgaaggtgtgcgtgcattcattcattctcttgccaattttcctccgtccgttcttttttttaaattggcgccctttggcgatatgtttctctccccgccccctcctcagattgaccccaaatatttgccggcagaggacgaagttcgcacagtttttggtctgaagctgaagcaaaagcgcaacgcggcgcctctctccgcagaatcattcgccgatgttgcggtcggagacggcgacgaaatcactgcttcgacggtggacgatttgctggtgaatttttagggaaagtgaatcaaaatgccaataaccgtcaaaaatttttctacgctttttcaggtcgcctgtgttgcggtaaaatacgcacaaagcaacgcggtgtgctttgcgcaccgaggacaggtcaatgatcagtcaaacaaaagcaatttgaaagggcgcgaaaagaatggcattggcaaagtgccattagtgaaaatgcccgaaaatgcttttatcattgaattagcagttgaccagtttcatgttcag

SEQ ID NO: 59228 - DNA, 669 bp, Heterodera glycines
atgtccagcgaatcgttgcacattaagccacaagcaagtggccaaacaatttaccaaaatccaaatctacaactaattggccaacccaattatcaaaatccaaatccacaactaattggccaaaccaattatcaaaatccaaatccacaactaattggccaaaccaattatcaaaatccaaatccacaactaattggccaaaccaattatcaaaatccaaatccgcaactaattgcccaaaccaattaccaaataccaattaatccacaaccaattggccaaaccaaactaacacataacttgccaacagaagtacttagtctcgatatgttaagtttgggggatacctcacaaaatcaggctcaacaaatggccattgctcccgcaaatttggcaaatagcacagaaaccgtacgaccaaatgataaaacgactacttctaaaccacgtaaaaaaaagaattcccatgatccatttgcggacaatgcgggcaatcaaatgccgactcagtacccaaaagtgccaattagcaaatggacaaatcaccgattgcctgttcatcccaaagagcttatagcgaaaggacaatttgatgttaaaaagaaattcccagcagagactaatggacttgacaaaattgccgagttcatggatgacacgggcgaatga

SEQ ID NO: 59229 - DNA, 1802 bp, Heterodera glycines
atgtcgcgccaaaacttcttgctttaccaccaaggaattgcacttttgtccgacaaattggccccaatacatgtaaaatttagttccgaaactccatggacacttggcatgaaagcgtgtgacaattcagcgcttttgggaacttttcagtgttttttccattttttttgagggttttgtgatatgctttttggatgaaacgacattttcaaaacgatgtgatgcgttcggcttaactccctcctcatactggaagtgtctctccgagcattccacggaattaaaaagttatttttttgtgtaaaatttaatatatttttttttgaattttacacataaattttcttttgattcagtgatttgctctcgtttcgtatgcctatgctctcagatttttaaattccatttttcttctttatttctattttgtttttaaaaaatggttcaaatatattttttattaaaaaaattttatttttaaaaaaagatattacaaaagtcaaatattgttcaaataaatttggcttaaaatttaaaaatttttgttatattttttcttattacctcataaaatgaaaaacgagtgaaaataaacacattataatacatattaatagagctcgacctggacctggatccaggcctggatttttcctggatccaggtccaggtcatttttcggcaacctggattttcctggattttttgtccaggaaatccaggtccaggtctattataaattagatatttttagatgttcccaagcaattaattgattttttcaaaaatttatttgctttttaaaacaaatttcaaaaaatccagtccaggcctggatccaggtctcgaggagcctggatttttcctggacctggattttcctggatttttgtccaggaaatccaggtccaggtctaatgtgaaaaaaaaatccaggtccaggcaaaacccgaaaaaatctggattttcctggacaaatttttagaatttattatttcaagtgaccgatgttttttcaagttttcaaaaaaagatcaaataaatcctggatccaggtctcgatgagcctggatttttcctggacctggaatccaggtccaacatggaatccaggtccaggcttttttcaaaatgtcgagctctacatattaatattaataataattgcctgtcagtattagtttttcaaggaaatggttcagcggcgtaaagccacgtctatattataagcagagattcagccagagagcatataagaaaatgaatttaagtgcgttggcaatcgatttggcattttttgccatttttcaaagcaaaaattcttttggctttattatatttctttttatgcatatcatttactatattcatattttttcaggaattgttctcccatggaattgcttccttttttccttttttgtgcctcctttttctgcgtgccattgagtcaagtaaaagccgcttcaaaaaatgggcccattttcgacgcttcgcccccgcgcgatcgcccaaatcaaaagccgtcgctgaccgatctatcatcaattggacagaacaaaaaaggagcggcaaatgcatggcatttgccggaaagagcggctgaaacggcgtcagccgaagcggcaaatgtcacaagctcaagcagtacccaagcggatagcagccattccagcaggaggcaaacagtagatattacgaaaagtcgaagaacccgaaggcctagcattgcagaaaatgaaccaattaccaagcagctaaacgatttggccatccaagaacgtattcattgggtttcttaa

SEQ ID NO: 59230 - DNA, 1773 bp, Heterodera glycines
atgacctggacctggatccaggaaaaatccaggcctggatccaggtccaggtcgagctctattaatatgtattataatgtgtttattttcactcgtttttcattttatgaggtaataagaaaaaatataacaaaaatttttaaattttaagccaaatttatttgaacaatatttgacttttgtaatatctttttttaaaaataaaatttttttaataaaaaatatatttgaaccattttttaaaaacaaaatagaaataaagaagaaaaatggaatttaaaaatctgagagcataggcatacgaaacgagagcaaatcactgaatcaaaagaaaatttatgtgtaaaattcaaaaaaaaatatattaaattttacacaaaaaaataactttttaattccgtggaatgctcggagagacacttccagtatgaggagggagttaagccgaacgcatcacatcgttttgaaaatgtcgtttcatccaaaaagcatatcacaaaaccctcaaaaaaaatggaaaaaacactgaaaagttcccaaaagcgctgaattgtcacacgctttcatgccaagtgtccatggagtttcggaactaaattttacatgtattggggccaatttgtcggacaaaagtgcaattccttggtggtaaagcaagaagttttggcgcgacattttggttattctgttgattggcattccttttgcggtaaatttttggattttgatttttttaatgtcaaatttgcagtttttgtctgagaaaataaacaaaattaacaacaaaatagacgaacagcaaaaggtaaattcattggcaataaattaaaatattttatttgaaggttttccttttttcaggcgatcgacaaaatttgggatcccaaagaaattcagcaggtgtaccgatttttacaaaactgaatcatttcttttgatattttcttcaaagttcattattagggtggaaaaaaggacctttgggaaaatttttagaaaaagtttataaatggaaaaaattttcaaaaattaaaatgggatggatataaattgtctaattcggataagtaattttgcatattttcagtcatttgtcagcgcatcgacctatgagaaaatggcattttttgtgtgcggaatcgtcgttggcttcacactttctgatcaaaggaaatgccaacaaaatttgggcggaaaaacaacataaatgcaaaggatgatgaggaagaggccaattgaaaagaaaattggggaggaggaggagagaatgggagacgagtggaggcaattttagaagcgaatgatgagcaagaaaaggaggaggaggataatgatgaacaggaaaaggaagatggaagtaagtgaaccatttttgagcaattggaagggatgacgaacgatgaggaggacaaggaagaattcgacaatgaggaagaggaggaattggaagaaaatgaaggaaggcaattctggtggccaatgatgagagagaaaagggggaggagaaggaggaggaggaagaattttacaatgaggaggaggaggaattggtagaatgaaaaggaagaatttgacaatgaggaggagttgacggagcagaaggccatttagtgagtagcattctcaccgagaaaaaatttttacaaaacaaaattttttttttgaaggaaatgggggaattcagcgaaatttgcgcatttttaagatttcttttagcttttcggctccattccccttggctttacactaaatttcattcatcaatgaaaaaaa

SEQ ID NO: 59231 - DNA, 343 bp, Heterodera glycines
cggaggaatatgtcaaattatgcttcgaactgagcaattgtgcggcacaaagtttgggcgccgattggctaaaatcgtcggataagcaattcctgcgtctgttggccagtctctccagtggtcgtcttcgcattttgttggataaacctgaggaggtctctttttatactacgattctttaattgtcgacgtttaatttctcagattgacatggctcagctcatcgcctgtcttcagctccaggaatatttttgcggctgtgttgaggatgaacagatttggatgagcgacgatgagcaagtttttctgtcatttatgaagcgagttgataaaactgtcgaaa

SEQ ID NO: 59232 - DNA, 83 bp, Heterodera glycines
aaccaaggcccctgagcaaggcggacaagttgcggggcaggcaaaatcggctgctcgcgcaaagccatcccgactttttggag

SEQ ID NO: 59233 - DNA, 226 bp, Heterodera glycines
atgaatatttcattgtgtattcttcagaatcagcaatcggtttgagcattctttcttcgtcatattttaccaattttaataattctaagtttttttcaattaattattaaaattaaattaattgctttttaaataaattctagtttgaattgttttgtttttttgttttctaattttgattcagcctcctttttagatgaagttccttctacaattactttatgta

SEQ ID NO: 59234 - DNA, 310 bp, Heterodera glycines
atgctgccaaatgatcataaaagtaagggtttttctttttaaacatataataattttctattcagaagagaacaaattaagaaagttgaagcaatattacgaaattaaagaatcaaatccgaaaatgagcgacgaaataattgccaaaaaattgggaattggaagtgcaactctgaaaaaatggaaaaaggaatttgtttaaaaactgatcttttgttcttggaaaaaaatgttcgaaattttgtcatttggagaaaatctatataaaaattattctttgtttcgaaaacattttgcacttttcgtataa

SEQ ID NO: 59235 - DNA, 384 bp, Heterodera glycines
atggcttcttccggtgcttctcctctgtcctactccaaccctgacgagtcgctaactccgtcctccaccaatgcgtccacaccaacggccacaaatggggcgacaacaattgtagggggacaaccgcacaacggcacaagcagcaacatgggcaatggaacagcaatgcttcaggggaatttcgaagtaattggcagtgccggcggaattgcgcactttgcgagcagtgccggcggagagtcgaactgctcgagcagttcaagttcagtggttgtgcacaagggaaagaaaagcaaaaaggacaagtcggtgagaaaagggagggaagggatccatgggaaaggcattccccggggacaaaatcgaaatgcaatcagtgagtga

SEQ ID NO: 59236 - DNA, 49 bp, Heterodera glycines; identical to SEQ ID NO: 51181

SEQ ID NO: 59237 - DNA, 505 bp, Heterodera glycines
atgtctataactcaaaataaagtccatattcatgatcagcgacccaaattacgtaagaaaatatgtttttttaaattttagagcaaaaaaatgtgtccatgaaatttccaaaggggtatccctttggattttggctccaaaatcagttttatttttataacttttttcaaaaaagtgataaaaatgctaaataaaatttatataaaagagaaaaaaattgcggattttatcaatatttttgtataccttagcacattgtttggaatgagttatgaatttttatgtgaaaaatcgaatttttcaactttttcaggaataacatttttcatattaattgtagaaaaatgcaaaaataatgataaaattctcccaatttttctgcattttttgatcatttaatcttcacatttgacccatttcaaagggagttattaatttttgaaaattcccccaaatttcccctgggcgaaaaatgaaaaattcaaacacacccaaatttggtcaa

SEQ ID NO: 59238 - DNA, 5082 bp, Heterodera glycines
ggaagtcatcaaagccgttacccaggccgcgtgggcgattttggcgaaaggctcgaggaaatgtctcgaaacgcccgggacgcttcgccgtttatcaacgacaaattctttaacgatgagctgaaaaaacgcgaagatttgctcaacaacccgttttctttaagggtaagtttgccttatttattctatttgggcttgaatcctactcctctcggtctaatgagcaaacacgaaagaatttttttgcggcaactaatcgctgaatagttacaaacccggaactgatataaccaaatgactttgggattgaaccgtccaacggtaaaaaaacgcatgaatgtttagcaaattttatattatgagacaaaacccattaaaattgttttatcctgttcaatcagaaaaggaaaaaatggcaaatttaaaaagattaaattttgggtggttaaagacagactgggaggagttaattgccgttaattttggccatattctcgatattcacaaaattttgttctaaaacaaatatttaatgagttgaggtcattgacaatgaaaaaatggtttcttcgcttaattcaatacacatgtgcaatgtatataattttatttggtttcgttatttaatttatccacttttgagaccttccatgaattgcacaaaatcgcggcatcacacaaacacggtgctggacaattcagaaaaaccgaagcgagcgtgggcgtttgttggggagcagccgtttcacaaatattaccagaaatggaagcgctagttatggaatgcaataaagcaaaagaaatagaagacgcagtgatttgtcatctgaaatttgtaagttacacgaaaaaattaaaatcagaatagttgggttttgaaacgtgctgaattttttaatttgtttgctgtgagtatatttttatttccggttttacgctaattgctttattgattccattaaagcctgttttcgatttttaaaacaattgaccaaaatcaaccctaagaaatgcaaaattcgaacggaatttgagaaataaagaacttatttcaattctgaacaacaaaattggtgctctctcagacagtgaaaaggataaaatgcaacaattttggctgggattttctgatgtttttgcattaaatgaatttgaactcactcaaaccgatttatttccccatgaaataaaaactgaaaacgcaaccccaattaaaactgctcctagtccaattccattcggtgtccgaacaaaagtcacagaaatgataaatgattatttgaaacgggaaataattcgaccatcaaactctccctgggcatctccaattgttttagtagccaaaaaagatggctcaatccgattttgcgtagactaccgaaaacctaacagtgtgacaatcaaagattcatacccaataccgaacattgaccaaattttgatgtatttgggaaacaagcactattttactgttttggatctaatgtcggggtattggcaagtacgagttaaagaagaagatattgaaaaaacggcgtttacagtacctggtggtctttatgaatttttggtcctcccattcggcctttgtaatgctcctgccaccttccatcgttttatgaataaaattttgggcgaatttgtgaatgattttgtttttgtctatttggatgatattttaatagcctcaaaaacttttgaagatcatatggtccatctcagaaaggttttcgaaaaactgaatgaaaacggaatgaaagtcaaggcagaaaaatgtggttttgctttagaccaaaccccatatttaggacatattcttacacgagaaggactcgcaaaagatccggaaaaatacaaacccatcaaagaatttccgatgccaaaaacaatcaaagaattacaaagatttttgggaatggtcaattggcaccgaaaatttattatgaattttgcaaaaattgcggcacctttaacaaaaatgttgaaaaaacaggatgctaaggtgttaatttggtcggacgaagcaaaaaagagttttgaatcattaaaatcgctaattgttcaggaagttgtacttaaatacccggattttaatttggcacaaaattatccaaaatttaaatttcatattttttcggatgcgtcgaaagatgggttaggtgcagtgctttgtcaacgggatcaatctgggaaaatgagaccaatttgttacgcatcaagacgctgtaaacaaaccgagtcaaattatgggccaacagttttagaatgtttaggcataaaatttgccgtacaaaaatttaagcattttatcgcatggcttccaacaatcgtatataccgaccataaggcccttccccaaatgttcaaaagcaaaaattcggtcggaaattcaaaagtagacagatggatcatggaattaggtgctccattaaagagaatcacgttgctgacgtactttcacgagcctttaactcaaaaactcttacttggaagaaaagggaagcgaaaattgcgcatcgggcgataagcacccgtgtaagttcaacagatttaaaaaacgggcgcgaagcgcccgtcttgagcctcgatgtggactaaaagcctctaataattttttaaaaattcaaaaaaaaaatctccaaccaattcgatcaatttgaatcgcttcacagtctaggtagcgaagctcaagaagcgcgaagcgctttatcccaagcccagatccgacggttcacgcacccgctagtttatatattatagaaagaagtggggattcgcacttttttgctattttgagcctaacgagcgccgggagggctttgcaaattcgatgtcccgaccaactttttgaggcggattcaggaaaaatacgggctttccggtccggtggccaggtgagcgccagcggcgctgaaatggcccctgtttgcagtctcagtgttacgaaattttttgcttttgctcagatcgaaaaacgcttgctgggaggaaatccagttggactatgccggataacattgccagcaaacatttttcgatccgagcaaatccgtgaccgggacaggtggccaaaaattggtacccaaaaaaccggatttctgtttttcgtgaataactcggccgcaagtgctcggagccggtttccctgacaagtagcagtgcatctttttgagctgcatccaaccgtgtttttggatttttgaaattttcgaccaaaaaaaatccaggccccctcgacggtttttcggttttttgccaataattttttttacatttgcgccatcgaaaaacgcacggcacttttgggttgcaacttttcaagagctttcgaatgatataaaaaaaattttgaaaactcaaaaaaagtttttccctgcagaaccggttggtccagtggtgtgtgctgggggccccccgggaggggggcccgggttcgaatcccgcggcgtgtggatgattttttatgacgtgtaacgatgttctaaggggctggaaatattttctaaaatttttctatatttttttcaattttttaaattttttatttgaccaaatttgggtgtgtttgaatttttcatttttcgcccaggggaaatttgggggaattttcaaaaattaataactccctttgaaatgggtcaaatgtgaagattaaatgatcaaaaaatgcagaaaaattgggagaattttatcattatttttgcatttttctacaattaatatgaaaaatgttattcctgaaaaagttgaaaaattcgatttttcacataaaaattcataactcattccaaacaatgtgctaaggtatacaaaaatattgataaaatccgcaatttttttctcttttatataaattttatttagcatttttatcacttttttgaaaaaagttataaaaataaaactgattttggagccaaaatccaaagggatacccctttggaaatttcatggacacatttttttgctctaaaatttaaaaaaacatattttcttacgtaatttgggtcgctgatcatgaatatggactttattttgagttatagacattttggaattttttaaaaatttttgaaattttaaaattttttggcccttgaaaatttaagctacattttgaaaattcataactcccatcaaaaaggtccaattcagtccatttaaagtttaaaaaatagagaaaaatagggagaattttttgagatttatttgggatttcgatcttgcaaacaataaaagttattccagaaattctggaaattttcgatttttcataataaaattcagaactcggttctgaaaaagtattttataaaaataataaactcaaaaaatccacaattttttgctctattttataaattttattttagctttttatcacttttttgaaaaaagttatagaaataaaagtgatttttggattcgggatcaaaggggtgtgaccatgatttttgtgtggaaaatttttttcaccaaaaatcttccaaaaaatgattttaggggttatttgggccgctgatcacgaatatgtaatcagatttcactttagagatcgttaagacttcagaatccctgcgtgattggggattctgaggcatcattttgcgttggtcaggttcgaacccggacggtgtaaatcattttttgatttattttttgctatattttaatgctaattattaagtcaaaattatttttgttattttttataattcaatttttaaaaaatgaaaataatttttctataaaataaataaagaaaaatttaaaagtgcatgcatttttaagtaacttttatctatttagattatttttgcatatgttgttattatttatttatatttaattaaatgaattttaaaacagcataatattttaatgttttaattagaataaatattagttaaaattaattaattaagaataataaaaaatgaggccgcgaagcggccgaatgaacactttaggtggggcagaatccattattaaactgcttaaagtagccgcgcaagcactagcaacgaagtctttttgcgcgaagcgctaatttcaacacacacaatccaatgcattttcaaa

SEQ ID NO: 59239 - DNA, 683 bp, Heterodera glycines
atgccgcttcacgttcctgcttcctttccgcgcccacctctccaaacattttttccacgtccaccccccccattgccatgtcctcagccgttctccacgtcaaatcagcaattttcaaatgtttgtccgacgccattaatcagccatacctttagcgccgataaattcacgtaatttcaatgattcacatattttttataatataattatttcaatttaagcaccatcaaaaaaacgacaaataattgaggacagagcgggtaatctattaatggaaagaaattgctaacaaataattttgataaaaaaagcaaactaattccttatatttagaacgctggcgctgcggaacttatcgaagcatacgccgggatgaacgacgaccggacaaacagcactacggagttttggctgaccgaaatgggcgctgtgttgaataccgagcatcctcaagacgcatgaccgacgacaaaaacaaggccgaccgggaccgacgttcaagaaaaggtccgttgaaaattcgcaaaatttttttgtatttaataattttaaaaatttttgaataacctaattaatctcaatcgtttttttcccattttaataggaccgatcggaaatgctgatgacaaaaacaaggccgaccgggacgaacgtttaagaaaaggtccgttgaaaatatgcaa

SEQ ID NO: 59240 - DNA, 343 bp, Heterodera glycines
atgccgcggaaggatcgcagcagcagttggagtgggaggcccctttggatggaagtggcggaggccatcagaataaaggcaaacactgccagcagcagaacaaaacttggccatccgtagcagaacactttaatggccctgctttttctcactttttgcattaaatccttaattaaataatttttcttttttagttttaaattcttaatttatttgatttattttttctttctcaggtgccccacactttccaagtgcacagttacaaacggccgacggtgtgccaacactgcaaaaagctgctgaagggactgatccggcaaggactccaatgccgaggtga

SEQ ID NO: 59241 - DNA, 667 bp, Heterodera glycines
atgtcccaatattcaattgctcaagtgtgcaaccacggagcatcgatcattttggacccgttgagtaacatcatccgatttgtccattgtgccctcggcgttgccattctgatcggtgttgcggcactgatccgacaatgccaacgatcgcgctttatcttccacggcaatttgatggtgagcacaaaagttcataaaagttcgatttactgttttccaatcagacaattttttgaaaaaaaacaataaagtttcatttttaatttttttattaaaaaataaaaataatgaatgacatttgaattaaatttgtttgctaattaattcagtttatttccaaattttctgcatttttaataatatatttttttggcattttttcgtaacaattaaacaaaaatattgaactggtttcagctgctgattgctaatgtgctatgcctatacatagtatacaccatcgcactgatcggaatggctggccgatcattggtaaaagttaaatattctttttcgatttatatttaattttgccatccaaaatatgcaggccttatacctgttctggccagttgctcaatttgttcagcagccgtataacaacagcagcggcggaaacattagcaatagcagtgatgggactgaaatggcggctgacaaaaagtaa

SEQ ID NO: 59242 - DNA, 148 bp, Heterodera glycines
atccaacgcagaattaaagtacaggctatagggaagctattcccgaaggattcggtctccccataaatctgggcgcatcggttcggggggactgccccgaaaacaaaaaaatcgattttttcaagtgtccgtttggggtactcaaaca

SEQ ID NO: 59243 - DNA, 344 bp, Heterodera glycines
cttcctgtccgatgtggatcgaattgcaattcccacggccattacaaatattggacagggcactgatggaaagtgccagcgaaatcggcatggaagaagtgcacagcttttcctgaccaaatcaattcgtgatcagtggtgccttcggcataccgaattataaaaacaaagacattacccgtgttacaatccaaccgatcatttttcatttttattgaacaaaattcacttttgactttcgacccaacaaagtttaagtttggtaacacgggttgactaacacaagctttgattaatttatttgattcatataatcagctaaataaacttgaatttattgcaaa

SEQ ID NO: 59244 - DNA, 2775 bp, Heterodera glycines
  unsure (1)..(2775): unsure at all n locations
tggtgctcnagcgaaaataggaatagtggctcggaaattgtctcggcaaaacattttcattggcttttgtttaagactttttaactttaaattaattaattttgtttattaaatcgatttaattaattaattattttcatttatttttaattttcgtttcatttatttcttagaaaagttctcctccaaggcggcaatgccgtggacgcggcactttcggtcggtttttgcgtcggtgcgcttaacccccactcggctgggctcggcggtggctttttgatgacctattatcagcggtaaggatataataataattatatttaaatgcattttatttgactaagcttttatggcaaatgcacaacaatcgacgcccgcgagacggcccccgcgcgtaccgccaaagacacttttggcaatgggccgaaggaggacagtcaatttggtaaacaaaacaccactaacaattagcgcttgacaaatgttaaatattttttattcgggctacaaatcggtcgcaactcccggcttattacacggcttttggacgtctttcaaacgctttggcagtggaaaaatcgcttggatggatttgctaatgccaactgttcatttgctgaccgatggtctcatgctcatctatttgaaaaaacaaaaaaaaaccaattaaggatttcccgtctccaaacttatggaaaagactttggaaacgtacagcgagaaaatcattaacagctcccatttggggatgaggtgggcaaaaaaaggaagaggagggcattttggggagagaaggaattttgggcggagggattaaaagcacttagaaagcaaacttttcctaaggaaccacttcattaatccggcaaccagcgacctttacaaggagggcgaacagatgagggacggcattttggccgagacactcaaacgattggcactcagtcacgagccgcttcagctgttttacagtgcaaacggcgaaattgccagaattattgccgaagaatttgcaaataatggtaaaaattgggaacaaaacgtaaaaattaaatggataaagcaaagcaattttttaggtttggattttgattttttattttcaatttttttgagggggttttattacgcgaaaagaccttcacacgtaccgaactgttgtggacgaacagcctttgctggtcacgagcgcggccgagcccaaattggtcttctgtggcgcgaagccttcctcgagttttgccatcactcagctgattttggccgtaatgcttagtgagtggtgccgaatttattaattatttaaaattttaatttttttttagaattttatccccccggaagcaatgcatcgatcccttggcattctgccgattattaccaccgtttgatcgaatcgcaaaagcgcgcatttgcaattcgacacaaattaggcaaaaagatttgaaaagtttaaaataaaaattcaataagacattctgtaaattaaaggcgacgtcaaattcgacaaaatttcggaagaaattgcgctgaatatgagcaaaagtgaaatggttgacgaaattgccagtgaaattcaaagaatgggcgcgaccaaatgggcggattttgccgaatcgacgaaagaggcacaattttgcatattttaaataattataaaagaataatttttaagtttttccctgaaaatagcgggggcacaacgcaagtgattgtggtggacgcggatggaaacgccgtgtcaataaccagctcaattaacaaagcgtaagtggtggcaccaattgccaaccgatggccaaataattggccaatcgtttggcaatccgtcagaatttgtgcattattttcagtttcggctctctgatccgatctccccaattgggcatcatttggaacgatcacatggacgacttcagccaacccaacagaacaaattattacggactggcaccttcaaagacaaattttattgaacccgggaaaaggccaatgtcgtcgatgagtccgctgatcgtttatcacaaagagaacaaaaaggtgggcaccagggggaaggagggagagagggaggggatactatcggaaagggatactgtatcttctggaaaagaaaacggtatagattcaattcaaatttgaatatatatactccgtactgtatcactaaacgtaataaataaaacaaaggggccaaaataggagaagcttccccgagaggaagaaaatggaccaatagaggcgacaattaatccaatattatcgagcattagtgggcgagagaagggagtgccgtagttcagctgatagactaagaacgcctttaacaggcttcttactcaaggcaaacaacaaatgaaatgaaatgtcaataagtccgtccgacaaatgatcacattcgccccacaggttaaactcgcgatcggtgccagcggagggacaatgatccccacggcactgtcccaagtgttggtccaactgttggccttcaatcactccgtgaaggaggccatcgacacgccacgcgtgcacaaccaattcacaccttttgtcactgattttgaggaagaatttccccaagtaacatttgatcattttaatttataattcaatattcagtccattctccaatcattgcgtgcccgggggcataatatgacaacgaactcgcgcgattttagtgcctcggtgcaggcggtgctaacggacgacgagggtaatttggtggccaacaacgacttcagaaaaagggtccattcgtgccccgtgggatat

SEQ ID NO: 59245 - DNA, 511 bp, Heterodera glycines
atggcaagaaacggcaccaatacgaacaataacaacaataatagtcatcataacaataataaccaacggactgcgaatattttgatgaggaaaaagtgcgtaaatcttattaaacttattttataagacaatgtaattgaatataatttttattaattattcagctttcatttttaatgcaattttaattagggtaaataattattataaacttttatcgtgtcaggaccagtcagctgtctgtgtgcataaagaccggatccatggcccaaattagaagggaaacatggacccgaaggtcgggtcgtagactcgcatacgatccgtatgcataaatattaccatttgcgatccatggatcattttggcgattcgcgtatcagaatccctatctacctccaatggattaggagtgatacgcggattgggtgggaaaaactttttttctaaaaaaaagaatttcttttcgttaagactccaaggaactttttttacacacgaccaaaataaa

SEQ ID NO: 59246 - DNA, 567 bp, Heterodera glycines
  unsure (1)..(567): unsure at all n locations
atgctttttctcctttttatatttgtgttcttaatcataaacaattcaactgacaaaacattgtcagttaatctgtgtaaaaaatgtcggccaacttttgctgaaatatttggcgaagaatggcaaaatgaaataataattggaggagatgaaaatgaaaatgagactgatcaaaatgcaaattttcatcaaaatgatcaaaatgaattaactgatcagacagatcaattggatgttcaacaaaaaaacgaaattattcacaaatttcatgcaattagagaaggaattaagaaaaagggaaaatattcggcaaaattttgggttaaaaccgagcaaaaaattgcgaaaaaattgggaattaatcgaccaaaaatttacgaatggaaaaaagaatttggaatttattattataaaaagaaaaaacaggaatttattgaacgaatcgaagagattaaaagaatgtccaaatatggaaaacagaagcaatttgcgaaagaattgggcattaacagagcaacattaagcaaatggaaaaaggaatttggcattgaaattggcaanaagtaa

SEQ ID NO: 59247 - DNA, 862 bp, Heterodera glycines
atgagaggcacaagcagccgcggcaccagtcaaaatgccaaagaaaatgggagtaggaggcggagaagtatgccattcattcattcattgaatgtaataggaaaagtggtggtggtggcggcatttaccgaaaattgtacccgcgggggctttcgaagctcattagacttgattttttttcttaatggtggaaacggcaaattggaaaggtaatttgagaagaagacgacgcacttttaaccctcatccctacgtagaaaatgccaaatgaaaaaaaattagaaagtaaaaaatatgtgatttatttttaaattttatgtattttaaaaattggaaaaattttaaactggaaaattcatggtgattttgttttttaagaaaatttcagttatgcttataaattttatttttaggaaaagcctaaaaacatttaaatagaaaataacaaaaacaaaaattagtaaaagataattgtttgggatggcactcgagcatttcttcaagaaccacccatggacacttcctgtcctcattagatttaatttttatggctgaactcacaaactcacaaattgaaaaggtattaacggaaaaattacttccctttctgccattatcaaatggcattacatcgagcaagcaattaaagcccaactaaaaatggcatttaaagcaattagtaaaataagaaaaagaaaagaagattcgttgaaatgtaaatgcattagaaagctaagaaaattgaaaatattttttacaaattgttgcaaggattgagccaattgaatttaaataatatgcttaaaaaattcattctactacctaaaaatttttaaattaaaccaaatatttttaaaataaa

SEQ ID NO: 59248 - DNA, 1155 bp, Heterodera glycines
atgatattattcaacaagaaaatcggagttgtcagtattcttcacttttaccctcttttatgacttataactattttttagggctttagtgagagtgaaatcacttcaaaagttaacgaatatcgtaaacttttgtttaccgagtttgagaacggtcgattggatatggacaccgaattggatcttcggaacactcattcgagggctaaagttgccaaaggtactaactattctagtttacaggtctaaacgtttcaattcttattttttttaaaacttattttagataacagagataagtggcgatcagcacttagaattgacgcagcttttgttgacggctcttcgctggaaaaattgaaaaaagccagcgaatcggtggttgaaatggcaaagaatgtcgataagaaggcgctggacaaagaaatggaaaaatcgcttatggaaaaattgatggaaaaagtataactttcccttacaaaataattctatcggtttttgaagattaaaaaggaaaaagaacaaaagaaagagagaaagaagatgaaacgcgcgatgcgcaaagagtcttcaagcgacagttccgactcgacttcctcgtcggacacttcctcgagttcgtctgaaagtgatgattcgtcgtcaacttcgtcctcatccgaaagttcggccgatgaaaaagccaaacgtaaaagaaaagccgatgagaaggaaaagcgcaaaagaaagagcaacagaaggcgcagtgaagagacgaaggtcaaaagagaaccgatcgaatcgcccgtcggaaagagaagtcgcaaatgaaagaggggatggaaatgtcggtttattacctatttatcatttcattgataaatgatggttttggcacttttcacgaaaattaaatgttgattcaacttacagtattatttttgaactgttaattgtaagcattatactttttagtagagtagagcgggaccgggaattttgagcaaaaccgggaccgggacctgaaaagccgggaccaaccgggacctcgatttttgtccggataccgggaccaactgggaaatttaaaaattcaaaaaattaaaaaaaatttaaattttatttatttcaagtaaaaataatacaaaattaaatttttattttgttttttattta

SEQ ID NO: 59249 - DNA, 996 bp, Heterodera glycines
atggatccaggtccggccgagctctgcttatttgttagccatgtgaggcagccacttccctcattctaaatttcaggaaaaccaaaaaatcaaccacaaccgcaacaaccgccgcagcaaagtatatttttacaataaaatttcaattttcctaaagtttgggtttcaacaaataggtaagtgttattgggcccgtggccaacggttgatgagtcaatttaagtctttatcaaaattttcgttaatcgaattttcaacttttttattacaatatttgctttgaataaatcgaaatgaacccaaaatcttattcaaaaacgacttatagtcattgagcatttaaaaaaaattgcaggaaatccatggcataagcagctgaatgggcaaggacaacggtcgtcgatctttttgcttaatgatgttaacgagggacatggtcaagaagatgccgaattattaaacgaggtaatttaatgggatgaaaattaatttttttgagagcgaacaaaaaagcagaaatactttttttagaaaaagatggcgttaaaaaaatgaaaaatttcttcccattaattgaggaattttgacgtgcattccgtaggaagtagttagaaaaactagtgttcgtcatggtaataatttatcgcagtaatggtaaatttatttcatatcagtcgatttttggaaaacatgtaacggtaattgctactgtttttaccgtaaccattaccggtaaatcgtgttgccgaacaatactaataaaaactgatttagataatgcttttttttacttataggacagtgccgattcgcgttatttgggagaatatttcatcgacccattgaaattgcctcgtgacattgcttactcattgaatgaactgattggctaattgatccctaattgataattgaggatgctgaagtgataatgatacaatgttattgagtttttaacaatgatttatttaaaaaatgatgggcaatacaaataaa

SEQ ID NO: 59250 - DNA, 1067 bp, Heterodera glycines
atgaccccttctgccgttttaggctttcaagggtttggcattggcacggctcttttaaatgaagcgcaaaaatacgcgcaaaggcaatggcacgtcgctgagatgcaattggaagtgcacggcgtcagacgaccgattggccaaggcgaaattgggccaatgacagcgcaaatgaatttctatgcaaagcgcagctatcgaaggacgggaaaggtgcgaaatgagaagcaaaacgaggagctaaatttttaggaaaaaaataaaaaattaaatatataaaataaaatgtaaataaaaaataagtataccgtaaaaattcattttaaagatttaaattatgtgatccaaaaatgttagaaaatacgttttttttctctaaaagatgttaaaataagttcaaatgattttccatataaaaatttagcaaatctatttataatgagaataattttgaagcatattttagtacttttttagagaaaaatgtttagtttgaactttttgcattttctattctatttttcgcaattattttagttattttggggtttagcaactgaaaatccgttcccaactaaataaaatagacgtagtacatttgttttggttattagcttattcagcccccttgttagctcaaattaatatttaatctaaaaatattttgcttttttggttgatttaaaaaataaaattgaaaatatattattggtacatccattactgggacgcaataactgtgaagatttttgtcaaattctacaaaactaaaaaagccaaaaagcttttttttattttaaaaagtaattttttttttatttaaaacgtatattatcaaaaaaaacaattttaagcggattttattctttccttttatcaaattcgaacgcttcttaaattgaatgaatgaattcaggtgcgatggttcaataagccatccgatgccaatttcgtggttgtgccaagtcatcttgcatatctggaattgatggtcaaacatttgagtgaatttggtgattattaatagaataattccaatcgtataatgaaattcgatccgtaaatga

SEQ ID NO: 59251 - DNA, 1119 bp, Heterodera glycines
atggtttccaagcttcttccggtcattctctgctgcttgtttttggtatgtttaagcattcggtataaaatactgtaattcgagtagaaaatcagggagtacggtatctatgatattattaatttctaaaacagggcttaaaaaatccgtgaactattttaaataaagattaagcttaaactttactttttaggcttctttcgccctctgctcgcccaaggctgctgatgtgctggtaaatggctcatttttggcattatggaaaatcaaaataatattaatatcttgagacctaaaaactcaatttcacggacatatttgcaggattaggattcaaaatccgttaccggatgaatccgctttattaatccagcaaaatgccaaacaaatgcacacgattgtgggcccaataagccctacaaattcttccgtctccactattatccatattaaaattgattttttcagaaatttaaacgagaagcggcgatcagcagttgtggagctgtaagacatatttaaaacaatagaaatattcgacaaaatattcatggaggtcgcttaatccctaaatttgttaatgaaatttaaatttatttgtaccactaaaagcgttagatgttttttaattagccatttttgtcctgttttctattttcggcacttttagggacagtttgaatacgggggcggctgttgtacgacatgcacaagcgatgctgattgtacgggcgggaaggtgagttagccaaattttgagaagcatttgccactgttagaatgggattaatcacagatttaagtgaacgattattaattaaatcattaattatgtccaatcggagtaaagtttgacaaattttccaactattttttgtcttaactttttcaattattttccactcttttaatgtaaacttttaatttgtttttatctaatttagctttgtgtgcccatcctcaacttgctcagcgtcagtctgtgctttgccccatgcggaaattaagacagaaaagaaagcagcaaatgagggtgttgatagtgtgataaattgataggattaaatggaaaatggggagttaataattacttaaatgcatttaaatagtgattgatca

SEQ ID NO: 59252 - DNA, 580 bp, Heterodera glycines
atgaccccttctgccgttttaggctttcaagggtttggcattggcacggctcttttaaatgaagcgcaaaaatatgcgcaaaggcaatggcacgtcgctgagatgcaattggaagtgcacggcgtcagacgaccgattggccaaggcgaaattgggccgatgacagcgcaaatgaatttctatgcaaagcgcagctatcgaaggacgggaaaggtgcgaaatgagaagcaaaacgaggagctaaatttttaggaaaaaaataaaaaattaaatatataaaataaaatgtaaataaaaaataagtataccgtaaaaattcattttaaagatttaaattatgtgatccaaaaatgttagaaaatacgttttttttttctctaaaagatgttaaaataagttcaaatgattttccatataaaaatttagcaaatctatttataatgagaataattttgaagcatattttagtacttttttagagaaaaatgtttagtttgaactttttgcattttctattctatttttcgcaattattttagttattttggggtttagcaactgaaaatccgttcccaactaa

SEQ ID NO: 59253 - DNA, 570 bp, Heterodera glycines
cctatcaatgcaaatgcaagttcttctatagaacaacaaaataaaaaagaaattgatcaaatgggttcaaagctcccagtaaaaagcggattgaacaagattgaatgggttctaagctcccagaaaaagcggtctgtaaaccttgataacactgaaatttataatgaattatcaacctcaaatgaaagcattgaaagacttaatttgaaagaatgtattaaaaaaagatgagattttgttcgtttttatcaagtgtctctattttaaattaacacccctttttcgggaaaaaattcataaaatttttttccgtcgtcatttcgccttctccttttcagaatcttaatattttcagaattgctacgtacagttaaaaattcagctcgatcggttcatgggaagtggtcaaactcccaaaaaacagggtgtctttattttaaattaacacagtgtatacgcaaacaattttttttttacaatttttgctgatatttataattattttttatacatttctattttgtttatgttaaagagcgtaattttataatgaattatttttttatttaa

SEQ ID NO: 59254 - DNA, 1065 bp, Heterodera glycines
ttttttcaaaaatgcctccaatcgatagagctcgaaaaacggttgcttgaaagtggtctccgttttcctgggaaaaatctgcaaaaaataataaaattcaaaaacgaaaaaattttggagggggccatgctggaaaaatccccacactcgacaaatttttaaaaaaaaactttttttcttagaattttcttatgaaaaaactttgtaagagttttttcttaaaaaatgccgcaggcggcgagcagaagagggccggcgggcagggccttccgaccatagaaagttggaaattctaggaaaacttgtccatttgatggatggatgaagatttttctgttatttgcaatttttacgttcaggtggcgtcaagttgggcctgggcgacttcatcttttacagtgtgctggttggcaaggcgagcagttttggggattggaacgtgaccattgcatgctatgtgtccgtgttggtggtgagtgagtgttgatggcattccaagaaaatgtcccccaaaaaaaaaaaaaatttcgtacctctgaaatccgagtccaaaaatatcggaaagcccgatgcattccgtatttatgggttaaagtgtgaaatagtttttcaggaaaaaaattttgaaaattttttaacgatttttctaatttttatgatgaattacaaaaaaaaaaattgcggaaaacttaatttccacgatcaaaaattccgatgaatttcagacagctttttgccaaattttcaacaaccaaataaaaaaccaattaacaattaattacctcaccgaataaattttaaaactgtcacacaaattgcccaattaaaatttagtaaatttgatgcattttcctggtcgccattttattttttcataaatttacatgtgaaatgtgtccccatttcctccagggtctcgcttttacgctgatgttgttggcgctgtaccgcaaggcgttgccggcgttgccgatctccattttcaccggcatcatatttttcttcgccacccattggctgatcacaccctttctggcccaagtgagcgtccggcagattttgttg

SEQ ID NO: 59255 - DNA, 483 bp, Heterodera glycines
atgacctggacctggatccaggaaaaatccaggcctggatccaggtccaggccgatcttagtaaaaatgttaaaatttaaaaaaatctgttttttttttggcaaaaccatgaagtttattgtcttggtgattgattgtcccattgtgttttcagcaccgaatgtccgcctccgattgtgacagatcaggccgtcatcagccaagtccgttccgcgcatgataaagtaggtttggcatttctctttttggcaatacttacgaacattggtcccataagaaaaaatgattttatgcaatttgagatgtgatcggggattttttagggtgttgccacaaatctaacatcagacttacgacgtcatataatctatgatttttgtcaagctttattaatgttttttaatttttaaatgtgaaaaaaatatttttatttttttgggtacttttctgttttgagattcccacctgaaactttcaaataaa

SEQ ID NO: 59256 - DNA, 60 bp, Heterodera glycines
gaagaggccaaagtgcgcgagctgatcaaacggggcgagtacgtggtcaaggagttggag

SEQ ID NO: 59257 - DNA, 748 bp, Heterodera glycines
atgcgtccggtccacggccagcgggaactgatgcaccacgagtgtatgcagcgcaaccctacgctgcaccgacgcgatcaatttgtgagtgaaatttgaattaattttatatattttttattgtatatatcaaaaaatgttgataaaaaacatttctttatttatatttaagcatctgtcagcaaatcgaggggctcaattggtcccgaatatgagcaaacggcggccgaacaatcgccgccatcagtgaaaccgccgagtacacgcacaaaagcgcagcctgccggatcggcaccgtgcaacacgcagcggtgcaacggaagaggcggaccaggagaccattcttgggcatacatcaagaaaccggtaattaaaaaattaatagatttatattattttgataaaaattaatcttttttatattaaatttgttcaagaaaaaaggcggatctcgacctgctggaggtggtgcagcgcagcaagcagtgacgccgccgcctgcggcgggcactgcacttggcggtcttggaaagtatcataccaatgcgcaaacacacataattttatatttttgtatttttcaggtattttacggcacttccgcaaggtgttaaggttaagcacacaaaaacacatgcacaaacaacaaatgataacacacaattgcaccctttttaacattccgaaaactgaatggcacgctaaaaacgcaatttattattacaatggcctaatatgactaaataaa

SEQ ID NO: 59258 - DNA, 264 bp, Heterodera glycines
atgtccaccatttttccccctcttccgtttgttgccatttttttgttcgcactttttgccaacagcgcaaatgcgtggaaaaaggaggcaaattcagtggagtccgccgacggacacacaaaggcattcatggacctgatcagattcattttgccaatggaagagcccgagggatcggaggaaagggaaggagcaaaagcagagacagaagaaggagcggaagaagcagggtgaagccaaaccaaaccaaatcagagcaatcaa

SEQ ID NO: 59259 - DNA, 356 bp, Heterodera glycines
atgactgtgcgacttgtaaatgctgttcatctgctcctcagactgatcaaggttgatcaactgatcaaagctgttgcacactttgccgtcgaccaactcgtcacaatggcgacagttaaacaaattcccacccgattcccggcagaatgtgtagaacactgtcgggcactttttctcattatctcgtgcgcatccattaacgcggaaaatgtctttaccatttccttaaaataagatgaaaacttaattaattacatttgtttttcagcactatctcgaagctattggaaatttaacatttaaatattatcatacaatatataattgaatttatatattttattcgggaaaataaa

SEQ ID NO: 59260 - DNA, 651 bp, Heterodera glycines
atgccacacgattgggacgcaattgtaagtgaaaatgtttatgtgtgtgttagctaaaaataaagcgcaaatagggttggagtccgagtgaagatgaagcgtccgatgatggtggaaccgagggccaagaagcagctgcaaagagtgcggttgtgcaaccaaagacaacaagcggacgaacgaaaaaagaaggtaatctgcaagccagcagcaacataggaattcattctatctataatgaacaattttttttctacttcacagcaccaaaagaaggctctgtgacagctgcaaagagtgcggttgtgcaaccaaagacaacaagcggacgaacgaaaaaagaaggtaatctgcaagccagcagcaacataggaattcattctatctataatgaacaattttttttctacttcacagcaccaaaagaaggctctgtgacagctgcaaagagtgtggttgtgcaacaaaaggcaacaagcggacgaacgaaaaaagaaggtaatctgcaagccagcagcaacataggaattcattctatctataatgaacaattttttttctacttcacagcaccaaaaaatgcctctgtgccagctgcaaagagtgcggttgtgcaaccaaagccaacaatgggaggcacgaaaaaagaag

SEQ ID NO: 59261 - DNA, 1024 bp, Heterodera glycines
atgaacaataaatattttttttatttgttacatgggacgggggaaccaagctgctcccatgcagagtattttattcactcttttattcgagaaaagaacgcatttacagtactcgcatccggtaccattggctaccgtatcaacaacgatgacaccaccgtttccgtcagcagctgcggcagcagttcaaccgcagacggtagcaccgagcgccgttaaacaacaccgcggcagccataaaagggtgggcgctaattatagtaacaaacacagcaattaatttttagtcataatatttcatgaaaattttgacaccaagagttttctgagtttagtgatcatgaaaccaaacatgaacttgaacaaaatgagtcaaaaacatggattttccgacttttgggttcaagattcggaattagccaatattggttttatatttatggttagcaatcccgaaaatccacggtacaaattttcacgtatacaatccttatgtgggaaccaaggagtttttcttttggttataataaaaatttcaaaaaataataaatattatttatttttatgttaccaatgcttcttttaaaaactgatatttcgtttcttttaattaaaaaatgtttaaaattaataaatttaaacaaaaattttttattttttaagcccaaaacagcggcaggccccggcggtttgcccgcgtacattccgacaccaatcgctcaattggaaaaggagcagaaagagcgtgagcggagaagagaagaaaggcgggcgagaaaggaggacggacagccaaagaaagaaaaagagcatggggcagagaagcagagcgacgatgcgaaggcggcgagacagcgggagcaaatggagcagcagaacgacagaggaaggagagagagtgttggcgagggagagagcgtgctcggcggcggcgcaggcagcagcagagagacagtgaaagagagagagggtgggcagagaaatgaaattaaaaaaaataaattaattattttttactaataaa

SEQ ID NO: 59262 - DNA, 204 bp, Heterodera glycines
ttcgaattactgggtttttgagttccttctggccataacttttttgaaacttaaccaaaatttttgagattttgcaaattaataataaacacatagacctatcgaacaacaccaacaattcttaatttgattgacagtgaacaaagttatggttcaaaaagtcttccgacgacgtttcggccgacgacgttttggggtgcaccg

SEQ ID NO: 59263 - DNA, 666 bp, Heterodera glycines
atgccggtgaagcttgagtcgctgaaagcgacatttaatttggactgtgaggacaagccctttttcccctattattacaacaagaaagaaaattatggaatacgattggaacatctgccaccgatggaggactattcgccgggatctatgaacaaggataaatttataaaattcgaaaaatggtaagaaaagaaggacaaaattaacaataaataatttttcaggtacaacgaaaacaaggagacacctttttatttggatgatgaattgaaaaattattgccgaaacgacacggagattttattcctgtcaattattgagtttcgaaggatattgattaacgacattactaagggatttgacccactaccgaggagttgtacgaatgcgggggttgcgatgaatatttttaaggcaatgtttttgttgacggagcagttatcgattgtgccggagaagggatatgagcggtgtgatcgcgccagtgtgatggcaataaagtatttggagtggcggagccagcgggatggaattgagatacggcgcgggcggggaacggacgagaggtcaaagttggaaaatataaattggatggatttattgcgaataacggagctagggacaaatgcatcgaggttatgggatgttacatacacggatgtttga

SEQ ID NO: 59264 - DNA, 455 bp, Heterodera glycines
atgtatgtccgcctcaaccagcaaatcttgttcccgttgaattggccggtaactaccgtacctgtaatccatacgccaggtccggtaccccacaggtcagtgattcctttcttcttatttattttcttcacattattttaacgcgtttttaaatcaagaatttttgaatttttaaggcctgcccagagaattctgcatgtcgtctgtacacaggccaagacaatggctttatatgttgccgagtgcagctgcaaagttcgcccttttcctcacgtcgtgtgcatcgatttttacattagaaaattttgaaaacaaatttaaaatttcatcatacatgtatgatttcataaaattatgattattatcaatggaaacgaaacaaaaactgtttttaaatcacacctgtcttttctgtaagcgattatatcacttccaaatgttcatcaaaaattaaa

SEQ ID NO: 59265 - DNA, 146 bp, Heterodera glycines
atgcccgccgtcccttccggctaccaagtggtgcagcagggccgtcaaggaccttcgtgcatggacaagctgaagttgggcttcgccatgggtgttctgatcggtggctcgaccggcgttctcatcggcactttcacatcactaag

SEQ ID NO: 59266 - DNA, 621 bp, Heterodera glycines
atgggctatgaatttcccttcagcagtgccgaattgacctgggcaaaggtgaaattgggcgagaaggtcatggccgcggctgttgccgcacaggcattcgatgtgaaggctgatctgcggaagcacactctgttcgtcgagccggttgtcatcaacgagatctcaacccgaagcgttgtcatccaattcgtcatgccggtgacgagcattgaggagctcaccgaactgtgcaaaatctgggagatcgatttggcggtgggttgcaaagtcaatccggcagccaaggcaaagccttgtgcgcatgggtatgtgctaagcatcaaaaaaagggcgttatgtcgggggtacgaaattgatgttaaagtgatcctttcctaccaagaagcgaaggatcaggacgcgcaggaggaattcgatcagatgcgctgcggcgaactcgacggatgcgttgaactcatcccgcagacgtcagtcagggcactgcaggaacggatgttcactttgcggtccaatgactgctcgaaagtggcaacggacgaaggaaaggtgggccgaatcatgtcaattttattgggccgaccggtaaaaccggaaagcccaaaggccaataacccattatga

SEQ ID NO: 59267 - DNA, 600 bp, Heterodera glycines
atgcgttcagtaaaacatggaggaaaaaaaggaatgcgattcagatacaaattgtcagcagttaagaggcaaaacaaaaagcagaagaaaaagcaaaggaacatagctggatggtaaaaaatattgaagttttaaattgctaatttcctgttgttgtattcaatttgctgatggtctcacattattttaatttttttttgaaattcctctttcagaaatttggaattcgattttgaattttattttcatttcaaatacatagatcaacaagctcagcaaatagatacaattaattcatggcattttttttaatacttttagctctttgatcaaaaaagcatggcaaacccaactatcatcgcggcaaaatttaagtgcaatgggactggtctatgatccaaatgaggcattgaaaaaggtatgtttttgatttaaccatggccatttaaatcgaatcctcgacaatactcatttagaatcctgaattcgccatggaaatggaccaaagcgaaattgaagtaattggattgccagaagccaaagctttgggaagcgtgaaggaacaaaaaaaggcgaccaaatcaaagaaagcattcccaa

SEQ ID NO: 59268 - DNA, 256 bp, Heterodera glycines
atgccttcgggaggcgacgatgaacaacagtttgaggaggcggtcaaaccggcattgggtgggcaatcgaagtgccattgggacaatggcattcattcaatgagtgaataaatgaaacggtgcctttcgcagagtcccttttggcggatttgcaaaagaccaccgaagttcttcggcaaggcaaacatggcaaaggccgacggcaacagaaggaggacgaatccgccgctttgttggacttgaagaagcttcggaa

SEQ ID NO: 59269 - DNA, 114 bp, Heterodera glycines
agggcatgtctcgtgatcctttgaatatttggcaaaacactccaagacaaattgagcgaaagattggcgtatacaaacgaagcatcgcctgtgactgaatgtgaaaagcgaaaa

SEQ ID NO: 59270 - DNA, 2098 bp, Heterodera glycines
atggaaaattataaattgatggattatcaaacgactacttgccaaaaatttggatttacgaaaaatattacggaatttcgtgtcaacccggacgtggaacgccccgatgaagcgatgaaggatgcgatcgacaacatgataaaggtggctttaaaaactacggaagaaaggatgaagcggaaagtgcggatgtttggagtggcaattacgggtgctgggcttgctttcccggtatgggtaccgtacagggcgtacccgcagaacaatgcggatgttatcatgcaggagattaataagttggggcagagcggggacggagatgaaaataagaaaatgcttttattatctgagccagttacgatgaaaattacttgcgtgaccatgcccagtggagaggggccgaggaatgtccataaatttgactttggattcaaggaacaccagcggatagggtaagtgtttttaataaaataaaattaaaatagaaaaaaactaaaataaaaaaaaatcaataaataaatttaaaataaatacattaaatttatttaatgaagcaaaaaaattttttaaagaaaaaaattgaaaaaataataatttaatgaaacaaaaaaaaacagaataaaattaaaaataaagaaagtaaaaaataaatttaaaataattattttaaaaaattaaatgatacaaaaaaaaacagaaaaaactaaaaaaaaaaattaattaaataataattaaagtaaagaaaaaaagaaataattatttttaattaagcaaagcagcaaaaaaaaaaacagaaaaaaaaattttaaaaataaattaaataataaagaaaaaataaatggaaataataataattttattaaggattacaaatgtggataaattatgtctgttttacgcgctcgtagcctcgaaattttatctggaattgcatgtggacagcttcaggagatttatgaaaaatattgtgagacagagggatgcagctattgaacttttacgtaattgtggaattgatggaaacgaaattagttatggtgtggagcaattgccgacggttcagaattattgggtgggtttaaaaacggtgaaaaacatagaaatgaccaatttttcaggatgagatttaccccggaaaataccggattgtggcgtttgaaaaatctgcggatccgagaaaatcgatacgtgttttgtggaagggcccaatggggcgagaaagtgtagtgccgatatttttggagaacggacattgggatggtctgaagaattatgtctgctttttcaatcgagggaaaaaattttgtgttgattgtgagtgcttttactatcaggatgttaaacatacgatggagtgcagggccaggtgttattactgcaacaaagtgggtggagtgccatgtcaaaaggagagtggagtgaagattgaatgcccgaagtgtcatcgttatttttacaattgggagtgttataattatcatcagggacatcagacttgcaaattatggaggcgttgcgtgatctgtgacaagacatatttatttaacacgaagaagggacatgaatgcggagagacttattgccagctttgtagtgtgagccacgaccccaagcggggttgctatattataccgatcgaggagaaggaggaaaaagatgtctacagaattgtagtttgggtaagttctacaaataaaatcaacaaaaataagtctttaactccaggattcggagacttcgcaggattctatttacaagggggaccagaaggagcatataattaattatatttcggcgagagtgacgtgtacagaatgctgtgatgataaaaataggacaaattgcaacatttgcagggaggtgaggaccaaggattggagtgaggctgagggacatgagccgaccaaggattttgtggagtggattttaactgcttttaccaattacgatacgtacatattcgcgcataacgccgggcgttttgacggtaatgaaaaaattaatctaaatttttaaatcctaaaatttttaggtcattttgtttttaattacctctgccgtaccgggaagaacccgctaccgctcatcaatggattga

SEQ ID NO: 59271 - DNA, 111 bp, Heterodera glycines
atggctgaagaagcggtcgttgtgccggagatggaatcgcttgctctcacttcttcgtcaccgtgttcgccggtgctctctctgctcagcgaggaaatgcttcagaaagag

SEQ ID NO: 59272 - DNA, 945 bp, Heterodera glycines
ccctcaacttcgacggcttccgccgcaacaactccctcagtttcgactgcgccgacgggtggcgctgcgccgaacttagctggaactccgccgtcgttaggcggaattggcgatcttttcaacaaccctgaacttgttcaaggcattctgaattcacctttcatggagaggtctgcgataatgtttgtttataagttcataaaccattttagtatgctggccaacccggacataattcgaacgatgctgagccaaaacccccagtttcagcaaattatccaagtaaagaatgggtcattttttgttgccttatcatgtgttgttattagaacaatcccgagctgggccacattatgaatgaccccggcactatgcgacaagccatggaaatgattcgcaatccaacggctcttaatgaggtgttttcaattaactaaaaacaattcattttattttagttgatgcgtaaccacgaccaagcaatcagaaatctgcaagttcggacaactcacatatatttaaccttttaaattcgtttacagggaattccaggcggcgaagcggcgcttcaacgcctttatgaacgcgttcaggagccgttgatgaacctaacacagcccggcgctgacaatgtcgccggttctggtgcacaaaatacaacagatgcttcaatggccggtacaaatattttggaaactattgagttaaggtaacatttactttcgtgcagcttctcggagtcagcatgccggagttgaaaatgcacaaccgttgccaaacccgtggagcagcatcgtgaaccaacaaaatcgtcaggctgcgggttccgctggcaatgcgccggcacagggcgcggcttctacaggcttaccatttgcaagtaaagtgaatgagtacagaattgtttatggattggacaaaggtctacaaatactcattgtttag

SEQ ID NO: 59273 - DNA, 764 bp, Heterodera glycines
atgcgacgaagtcgcttttcctatggcactgccggctttttcatggacataaaaggtaattaagcacaatttttaattgaaataatctggctctcattaatgtccattttggcattgcattgtcaaaactaatcagtttacttagctcaatttggtcattcttggtgaattttctcaattaggtttcgtccgccaattaatgcaattttaagagccatgttaatcaagagtcttgtcatgacaagtttttgcattcattacatttattaattgacattaagcatatttgtacttcaatccaataaaagtgcatgaattggacccaacagtgatcgacattgagaaattgatctattccggttataatcaaatttaaacatgtaaattattttttcaattcaccccatatttatcagtaggccccaactcgcgcgtgtattacggccgtttccgcttcgcagaagcggaattccgccgggtggtggtcaaagtgccgtcaaaggacgcgttccgcgtgcagtccatcatcgccgagacgcgcatcaacgcgcagctgcggcacccgcgcgtggtggagtacgtcggcttctaccgcgacgcgttcgacgacgtgcgcattgtcagcgagttcatggcgggcggagacctgcacacattccttgtggacaagcgaaatgtgcgtcgggggatatcatttttgtatgatagtgcatctaatagccatcgattacggcactaattagagaaggggaaaaacaaataaa

SEQ ID NO: 59274 - DNA, 4731 bp, Heterodera glycines
atggtccaaaaccaacaacagcagaaagcgcacgaagttggcgaagtgaacgcggaaagccaaaagagacaaacgacgacgagagaggacgaaacagcggaaggacagaagcaaataacggagcagcaacagattaacagcaacaacagcagcaacacaacgccaacaacaacgacagtgaaagtgggaaagaagcaatttgaaaattgaaattaaatataataatagaaatcataaagttttgtaaataattaatatttattcaggttggcttctacgaggtggaccggaccattggcaagggaaattacgcggttgtaaagttggccaggcaccgaatcaccaaaacagaggtgagaaaaaacacatttacgaattatctattttaaatattattttaacatttgaaatcatttattttggtgaattttctgatactctcagcaaaaaacccattgaaattttattgtactctcgccaaatgcctaaaattggatttttagctgcgaaaaaaattcctgtgttgtaagaggaaaaacggacacaaagggttgatttaacggaattttattttaaaattttctatttaaacaataaaatattaattgatggggcgcacaaaatgcttacgggacgcataatataatattctgtgaatttggcgaacttgtactattctctataatcttacaaaaatatatatgaatataattcaaaaatgcttttatatcgttaattacctaattaatttaaataggtcgccatcaaaattgtggacaaacgtcgtttggactcggttaatttggcaaaaatttatcgcgaaattgatgtgctgaagaaactcagacatccgaacattgttcgactttatcaggtgacaaattgaggacatttattactaattgattgataattaattaattgcttaattttgtaattcaattgaaggtgatggagacgaacaacatgctttatttggtcactgaatacgcaccaaacggcgaaatttatggtcagagatttaaatttaaaaaagcatttgcattttcttttcagatttaatttcaaaacaaaaaaaactcagcgaggaaatggcaaagcaaaagttttggcaaattatttcggcggtggattatctgcacaatttgaacattgtgcacagggatttgaaggtgttttttaatttaatttaaatttggaattcatttttatttttgtatgattttactaaaatttctttcctttttgttatatttcgcatcgatttgccctcttttttacgtcattagcagtttaatttgttttatcattaggcgaaagaaggcgaaattatcaaaatttggcgaaatcaaaaaatgattaaataaagttcagtgacgtaaaatgagacctctaaaaaagcaaataaaatccctttttttctaaaagtattttaataattaataaataataaaacaaattaaggccgaaaatcttttgttggacgcaaatttgcaaataaaattggccgactttggcttctccaatttcttttcttatgatggcactttggacactttttgcggaagtccgccgtacgcggcgccggaagtgtttgagggcaaacgatacgccgggccagaaattgatgtttgggtgggcatttggccaatcattattttattttaaactaattatttaatgggttgatttaattgaagagtctcggagtgattctctatgtgatggtctgcggcgttttgccatttgagggcctcaatttgcagctgcttcgtgaccgtgtgctaagcggacgcatccgaattccctactttatgagttcgggtaataaatgttgtctgaaaggcattggtttcattttccaatattggcgttgtgttcagactgcgaaaatttggtgcgtcgtatgctaacggtggattcgcgccgccgtccgaccattgaacagatcaaacaccaccggtggatgcgctacgaagagttcgccccgaagtacgaactcaacgagcaggaacggcacgcggcgacggagcaacacgtggcggaaccgcacccgcaaatactgagactgatgaacaacattggcattgagtcggagaaaatcaaaaatgtaacacagaggaatattcttttcataaaacaatgaaagcggatattgtgcttttcgcttttttcaggccattcaagcggacgcctatgacaatttccacgcgatttatttgcttttgttggaacgccttcggggccatccgctgtcgcgcagccattccgcctccagtcatgccaaccatcctctggtcaactctccctccgcaacttctttgccctcgccgaccgcgccacacgcacaagcagtactcgcgagtccgaccacaaaggcggcaccggcagttgttctgacggagtcggcaggaggaggagacagcggagaacaaagaccaccgatcattcggggggttacggtccgtaatttaaatgatttgaactatccacattgatcgatacgatttgcagattcgtcgccaatccgatggcattgccattgtgggcggtgccgtgccgtgccattgctattgttgcagtgctgcccgagcacatccgatgctacagtcaatacagccgcaatacgcgcccttgggcatcatgacgcgatttgcgcaacatcagcagacgcgacgggacagtgatggaatcgcaatgcaatttgcatatcaaatgcagcaacagaaacaacagcagcaggaggaactcgcgcgtggcgtacaaaacacacagcaaaagcagcagcagcagaataacgtcgttgttggacacgtcgcggcacaaccacagcaaaagacaggacggcaacagaacggcacgcaactcggcaccatggtaaagggagggggagaagcaaataaattaggaaacgattaaattccgatattgccagcaccatcattccaccacttcggactacgagtcggagaattgtttttcgggttcatccgctggaggctcaacactttccagacaatcgacaatcggaacaatcagctcattcgatgatgtgattttatttaattaaatatttttattcttttaaatccttttaattgttggaaattattttcgaaatttatttttcttttggtgagacatttttggagttataataaaaaaatgtaaaatcacgcaaaggtaagtcagtgccgacgatataaacattaaataatttgtttccaaatttccccaattttagtgttgtcctgacgattctgcggccactccgtcctgttcgcatgctgcgggcggtggccccggcggtctgtcgctgttcggcggtgtcgcactgcccccgcttcaccaccaaccgccgattggtgccaccgctttttgtggtgccgaccaattgccgccctttgacagccaactgagtcaggacccgctgttctcctcacagtcgtccaacaaaagtgccacggcatttcgtcctatcagcggcagtcggtcgaccaataacagcgaaaatggtaaatttggccaaattaattactgtcataatttaagtctttttttgagtttaccataatagttttaacagtgctcatttagcttataaatgactttatcatttagcaataatttttatatttttctttaatttaatgctattattgacgtctttatgtgcggtgtgctcagtttccttttttcgtcttaactttttctaaaaattgcgatgggcgcactttcgtcgatgacgcaaattggggaaagagaagaaaggggacaaaagtgaactttttaaaatgacaaagaccagcagtttattaagtcgaaaacaaaatttattatttttgataccttaacataaaatggcgattaattaacaaaaagaaaaaatatatattattaagctttgacataaataattaggcttttgtattgcgtcattcgcttcttttcgtgctgcttgcctacttcatttttatttttctgttccaatgcttcttggctcatcatttgcgtcatccgttgttcgcccttttgttgttttttgcttgtgcaaatattttacgatggtcgagagtctcgaaaagcggcgatgcgagatgctttacgtggagggggggggggggggggggaggaatgatgatgacattttgggatgaaggatgactgacccattcacccatacattcgcagttgcgtaattgcatttttcacacgttatggaaatttgtgttgacatggccaaaacaaagtccaaatgcgtcatcaaataattgcaaatgggagggatgtttaatcaaataataataataaattggtaatcgcaggttgttgctacggtgttgcaccggcgggcattgtcgtcggcccatcaggcggaagcagcaacctgctgatcaaaaatgcacaggcacagcccccgccgatgtttccgaataatcatgcgaacactcaccttcaccatcgtctccatccccacctattgcaaccgtatcaacagcagcaattgcctccattcctccagcagcattactgccaacaacaacaacaacagttgacgacattgtcggcacgagcgcatgggacgacgacgaatgaaacgacgaacgaagacggcgccggaggggacgcagcaatgcaacgacaacaccagcaacaacaacagcagcagcagaacagcctttgtccgcaacaacacatggggatgatgtgcgagaacggatggagggcgag

SEQ ID NO: 59275 - DNA, 2692 bp, Heterodera glycines
ctgcaccggacagtttaattatggaaaagccaatttggtcaacctgggccaccttttgggtcgctgtgaaccaaacacaggtcgcatcaaattcaaacacaattaaattgcaatttttgttaaaattttatttgtatctaatagggatgaattttatttaaaaaagataattattaactagaagtgaaacagccaaaagtaacggaataactaaaaaaattacgaatttaaattttgaatgcaaaaaattaaccaattttaaaaaaaattaaaataaatttctgtcatttttattttttattttacgatatacatataagcggttcgtcatgagcggattgatactggcggacctgaaaaaattataagacgcgtaaaaatcctttggccgcatatttgcactaggactattttttttattcggaatatttttttattatttaattaattataaatttgaattgttgcaggtcgaaagttatgtggacgaaattaacagttatggaatgccaatttcgcaattggaattggacgacatgtggaccaccgcttacggagactatcaaattgacagcgcaaaattccctaactttgccggaatggttaattacatcagaaacaaaacgggtgccagactgactggtacagttttgcattaaattgatttttattccattaaattcatattgtttgttgaagcctgggttcacccattcgtcaacgacgactcgaagaatggccaggatttgtcgttgcgaaatacaattttcatgaaatcatcgcaaggcgacgttccgctgacctggtggtgggactgtccggtgaccaaggacagcgcaggcaatgaagagaaaaagccatgcgcatatgtaaaggagaagcgattaaaaccaaatttgattgtggaaccaaaacatgcacaagggttgtctcaagactcttgccccctttggttgtgattaacaaatcagaaccggcggagccttttggcaccgccggaccctttcttcgttgccaactaaaacttaatcgtccgtcgttggcttgagaagccccttatgcatgtattatgtaaagaccaactcactgctaatgtttagtctgtccaatttacagattttggatcttaccaattctgatacccgagattggtggagaacacagctcaaaaacatgcaaaaggcactgattcaatcgatttttgtgacgagggagtggggcaaccaatctcttcattattcattgtttcttcggtctttaactgtctgtccgcattctctcttccacccagctattgattccatccggcccggctaatggggatagaacgtacgcttttatttcaaatttattttcaggagggcatttacacattcaaattcgatgccggcgagactaattggtttccgaaaaattttgcacttaattacggacaaaatccaaacagtaaattctttcaaaagtaaacaattgtttgatcgtattttcattcaaggcttcggccgtgattatgcccattttgcggccgaatttgggccagccgttgaaaaccgttacggcagtaactcacaggacgcgaatatctttatgagaacaatggacagaagttcatattggttgaacactgaataattaaaaaaacatatttttcattcggatttgtttagggacaaatccgaaggtgaaggcggactcagcactttgatcccatggtcaaattaattaagaattgagaattgaaagatacacgcatttaccaaaaagaaaaaaaagtaaatgttttgtttttgccccgcagggcattgcaagcatcactgcacggctattattggaatttgccggacatggtcggcgggaatgggattgaccacagccccaccaacatcaaaggcaatccgcctgaggaggagctgtacatcagatggactcaggtgaggacatcaattgcaataattaaacaagcaaattgtttaatataattcaattaatacttctttccattaggctaatgcctttctgctggccatgcaattttcatatcctccgtggcatccgagcttcaatcagtccaaattcaaagtggtggagcaggtgaaaaatgtgctcgaattgcgagccaaatggatgccgtacattctggaaagtgtggaggatgctgtaaaaaatggagagccagtgatacggtatcataagtacagtaatcactgtgaaatggacaccaacagggaattcaacaaaaaataacctaaattattgcatctgaattttaaacgagaatgtttcggggcacttaattcccccatcccttccgttcgtttcaaaacgagtattgaaatttaatttatcgtgtaataattttttaaacagtacattttttgcacagtccaatgtggtggtccagtgacaatgccacttttgcttacggctgcaaagaccaatacatggtcggctggaaattggtaattaaacatcggcggataactcatttattcatttaattcaattgttattgtcactgcacaggttgttgcgccagtgctgcaaaaaggcaaaacgaaacgggacatttttttgccaagaggcgaatggaaagacggcaacagagggggcgaagcagcgattattgtgggagagacactgttgaaggattacgaagtaatgtttatgatttaaaattaaaagaattatattt

SEQ ID NO: 59276 - DNA, 54 bp, Heterodera glycines
atgaaccaaggagcgcagagaccactggaaaagccgaagaagagacaggtaaag

SEQ ID NO: 59277 - DNA, 813 bp, Heterodera glycines
atttatcctttgttatacctagtgggaacaagagggtggaacttcgatatataaaaccaagatggaaaaagaatttcgtactgtgattttacaaaatttaagctatttttcagacaaaattattttttgccacatcattattcgaaaaaacttttccagcagtgggtcgttgatcaagcggcccgcgttgaatggggaaggttaaattttattagaactcatcaaaaagaattaagagcatgcagttataaaggattagaggattttctttttaataaagccgaacaaacaggatcaattattcgaaaacaagtaattttaccttcgtcttttttgggcggaccaaggaataaagaccaacattttattgattctatggctattgtgggagagaatggcaaacccgatttatttttgacatatactataaatcctgaggatcctgatataaaaaaatgtttattgaaaaaccaaaaaacagaagataggccagatattgttgcacgcgtttttaaattaaaatatgataaattgattgaagaagtcgtaaaaggtgaaatttttggtaaagtgattgcttattgttgggttgtagaatttcaaaaaaggggtttgccgcatttacattttttaattaccttgcatccaaaggacaaatttaaaaatacaaatgacattgaccgattcattcatgctaatctcccaaataaagaaaaagaaccatttttacgttcattagtaaaaaatttatgttgcatgggccatgtggagaataaataaaactgctccatgtatgagaaacggaaatatgcg

SEQ ID NO: 59278 - DNA, 56 bp, Heterodera glycines
gctatagggaagctattccggaaggattcggtctccccataaatctgggcgcatcg

SEQ ID NO: 59279 - DNA, 208 bp, Heterodera glycines
atggagatgaactgcgaaggattaaaaggaccaaaacaatggcaacgacgacgaccaccactgacagtggaaaaagtagcagcaaaagccgaacaacaacaaccaacacgacgacgacgacgtcgagcagtacaagcagcagcaaaaaattgttggtggtggatgaaaatgcaaaaacgtgtggtggtgttggcattggtgctgatgg

SEQ ID NO: 59280 - DNA, 331 bp, Heterodera glycines
atgctttcatttacaaaattcgactgtattaacttttccaattttcatgataatttaattttaaaatgaaactaaattaattttccatttttaaaatccattttttcagctcagtgctataagcagcggaaagcggaaacgacggcaccgtacaattttcacggagtaccaactgtacacgttggaggaggtgttcaccgcctgtcagtacccggacgtacaaatgcgggagcatttggcggacaaattaaaattgcgcgaagaacgcgtggaagtacgtgaaactattttttaaaaatttaaaatattttcgtaaattctaaataacata

SEQ ID NO: 59281 - DNA, 121 bp, Heterodera glycines
atgcacccacttgtccaagctgcaagtgcagaagcaggtccaaaaatccgaagaaaccgcgcaaaaaggctgagccatcggaattgcgaaggaattgatcgaaagttattcatcgttcgat

SEQ ID NO: 59282 - DNA, 2089 bp, Heterodera glycines
atgaaggccgggacactgtatgtgtcgcaatatgcacgaattgaagaggaaatgttggagtatcgttcccgactaaacactttgcccttagctaccttacgaactatacaaagaccaaacattacagaagtgattaagctgatcaaagctgaagctaatgagacacttggtgttgtgttcggaaatacgggatggattgaaatgatgaaaaatattccggaaaaggcacggaatattgtgaattacgtaaaagggatttcagtggtactgattgcagtcggaataattatacttacagtaattgtcatttacgtaattgtaaagtaccgatttattattatggcgggactcagagcaggcacaattatggcaagagtaattagagcaatattcggtgttaaaaggagaacacgagttgccgccgtgccaacggcaccagacctagactcagtggaccaagaagcatacattttggattatcttcccccaagagttgctgcaattacaaatgaccctcgaaaattaccatcaatacgagtttatttaaatggtttgccaacttcagcgttggtcgattcatgcgctagtgtttcttattgtcgccaaagaacagcaattaaagcgggactcgaaataaaggacttaggcagtgaaaacccaaatttaacagcagcaaataattcatcaatccaaattattggaaaagcaaatgctaaattacgagttggagatacagaaacaggaaaatgtgcagaatgggaggtaacgttattagtgtcaatcgataaagattgtcctggcccattattactcggactgccattgttaagtgatttaaagggtgtaatagcatttggggaacaaaaagtgcgtattggtgaaatttggacaaacattgtctctgttcttgaggccgataaacccaatcaaattaaagttagcctcgatcagactgaaacttttgagccaagaacggaaaatattattacggcaagagtaaatgagtgtttttcagcaaatcaaaattttttggtaaaaggaattaaacatcagtacccaagtataataatcggtagaactttggtcacaccaggggacagtaattgtgttacaatacaaattttgaacgctggaaaaatgccagtaaaagtatataaagggtcaaacatcgcggaattggaaatggtcaaaattaatgctttaccaggggatgaaattccaccgaaagattatattccccccgagacaaaatggcatgaaaaattaccgtatttaccgacagaagggaaaaaacgactaccatctgaaagaataaatctgacggggacaagattgagtacaaaatcacaaacggaactaaaaaatattgtggacaaacatgatgaagcttttgtgggcgatgatggcaaaattgggttatacaaaggaccaattgtccataaaattgatttagttcccggttctttaccatttcattttcgaccctacagatacccacccgaaacgcagaaagaaattgaaagacaaattaaaataatgttggaccagaatatcataagagagagcgaatctgagttcgcatcccctatcgtaatggtgcccaaggcagataagaaatcttggcgttttgccatcgattaccggtcgctaaataaaatgacaaaaaagcgagtattccatttaccaaatattcaagaattgttagacttaatgggctctaaaaaatattacacatcaatggacatgcaaagtggtttcatgcaaattccaatgtcaacagaagacatagacaaaacggcatttatttcacaccttggcatttatgaattcataacaatgccatttggtcttactgctgcccccgatacatttcaaagagtgatgaattcacttcggaggcgcctaacagcagcaatgttaatttatctggacgatattataatcggaagcgaaaccgaagagatgcatttgattgacattgaaaactttttaaaattattaaaagaagttggatttaaattgaaaatggacaaatgccattggggaatggcagaaattcgatatttgggatttttgctaagtgaaagag

SEQ ID NO: 59283 - DNA, 264 bp, Heterodera glycines
atggacaaaaaattaattcacgaaaactgctcaaacaactggtaataaatactgaaattcacatataaataaaataattttcacccaaatttaaaaattttgttttagcattgtctcctccatctttgatattattaaagaactgaccaaattcagtggcagaattgccaaaattgagaaggaaacaaaagtaatggcgaaaagcaaaaagcttctcacgttaacactaaagttttaatgaattaaaatatatttaataataaa

SEQ ID NO: 59284 - DNA, 181 bp, Heterodera glycines
gacggttaccgaacacaactgctcgtacaagggggcggcaacgagtgcaaatggtcctccgcttaaaagggccgacggagaggcgaagaaacgcgcgattggtgacgaagcacagagaatgccttggcaagagcaggacggagatcaaaccttggcatttgttgtcggcacttatgcggca

SEQ ID NO: 59285 - DNA, 1437 bp, Heterodera glycines
atgattcaaatacccgccattattataaataatatgttgccattattctggcaagagatcaataccaatggaaaagtatttagggagttagtgttaagtaagtaaaaatggtcattttagaggtcggcatttttgatggcagatttaaagaaaaataaattagatacagagccagagaaatagtgattaaaaagagcaaagttaggactataagaacacaaaaatataaaattttaattacaaaaattgaattattggagagccgagactgaaagtggtctccaaaaacggcatttttcaagaccaccaagtaacataatgttttaaaagtggttttggaaattctgaatttaattaaacaaggtaaatcgggtatgttgagttcgtatagtcttagatttggtctctgggatcgcaacaaacctgtacagctcgaacttcatgcatggagttggagcagtacaagctcaggttgaaaagataggtccctttaaggccatattcggattctactggtctaaattgtatagaaaaactaagattttgttatatcagctttggtttttgaccataaaaaattcgagaaaaattagtgggccaattttcaattttggcatggtcgggaaaaaaggcagaaaaatctatcaatcaaataaaaagtgaaacgatagtaagatataaaagaggacaccatgaagaacaaaataaaaaaagaatcatttaaataggcgcagaaataacggagttatgaatttttaaaaattggaaaaaatttgggtatcataaattatgttccaccctaaggttataaagcagcacattagaacatttaataaatatattatctatagaactaaaattggatgaattctttatttttcataaaaaaaaatctatataattgaaactatcaaagaaataataaacttaaaataaattttaaagaaaaaataattattattcattaaaagaaatgaaaattgtataaaatccttgttttaatgtttcaattcattttgacatgttaaaaaaatataataaaatttaagaaaaattaccaaaacatacatagtgtaaatgaaattgcaaattaatataagtattttttattataaattcatagaatagaatgaatgatattagatgatattttcatatttgtgaacaagatataaatgcaattaattcatttaaaaatcaaagggattaaataatttatattttacaatcagtgtatcattaaaaacatttttagaaatcgcaatataagattagattattaaaatagtgacagcaacaataaaaattataaaatttaaatattaaatattaaaaaatatttctagtttcagaaacttaaatcaaggaattaattacatatgggcagtaaaaacaaaaattatgtatccataaatcatcaaaagttcataaaaaata

SEQ ID NO: 59286 - DNA, 270 bp, Heterodera glycines
atggcctccagcaaggtaaaaaaaataaatttagaaatttcaaaaaaattcaaaattttagttccgcaaattgctcaaccgagagctttccctgttcgccggttcgtccaaggcgggcccacaaatttccaaatttttattgtgagtaaattttggtgaaaacttttcaaaaatttaaaattttctcaagaaatacctacatggctcaacagcccgaggatgagcttgccaccattgaagaggtggacatatatttttttaattaataaa

SEQ ID NO: 59287 - DNA, 1496 bp, Heterodera glycines
atgaaaatggggacggagacacaacgcgaagaggaagacgagcgggaggaagaggagagagcgaagagtcaaagcgaagaaggtggggacaacggagggtcgaccaaaggcaagcgaagaccgaattgaatagggacagacgacgacaacgaggaatcgcgaccgaacccacttgtgttgagaatcaaaaaggaaccgcaggaagaagcatctccaacgaaacacgcaacaacacccaacaattcatcggcaacaaaattactctcacaatcagcaagacaaaacgaagaaacggaagcgaaaaagagacaccactttggtgcgtaaaggacgagcgaatggatgaaacacatccaaagagtgggcttcaccccgcttcgtttcccccctgaaattaaaagaccaaaaactttaattttctaacgttccatcgttagagattttcctatttaaatttttttaatccaagtttttcagaaattttagctttcctgaaaacctctaaaaaatttcatatcggcttgccacccttgggaatgtataaaccatataatttgataagattagtccggttcagacgatgactgcgaaactttcgaggatgagcagccaatcgacgccttcgcctcccaacttgccgctgctgacaaagtacaaaaaagtttaccgaaaaagcccaaaaaggtatcgatgccctccgcagaaagcattcaaaattcgttgctggattcgttgaagaatccatcgaactttggaccgtccattggtaaatttctaaatttggttaaatggaaacaactaatgaatgctaacttattgttagcccaaccccaaccaaacaatcagcaaatatccatgcccaccgacctcaacataaacatgttcaaagcgcccaaagaaaagaaacgcgtttatgcgggaaggcgaaaaacgacgggcgatgtgcaaattgtgccctaccttttcgacatttgcatgcgatttttgctcaacaacatagacggtatttgccaattcggggttgggaatgggaattttcaaaaatgatttggattagccctatcatgaacaattgcataccaaaactttatttcacctttaaaagggtgtttaagtaattgcaagacggcctattcattattccaatccacagactgataatgagcatggaatttgcttaatttagcaatcgatgagacgggcgacattccttttgatgtgttaaggccgatcatggagaaagctaacgccgaacagctgatgcgactggagaagaaaaacccggtgcaatttctatttttgctaaggctaaaatgaattacaatttcgttttttttcagtatctccgtgaggatacgaattatttgtggaaaaatcactgcaagaaagaatttgggaaggaattgaccaaattgagggaagagttcggcagtgatgaggaggaagcggaggaggacgacgagacggacgaaatagcatggcggaagagatacaaa

SEQ ID NO: 59288 - DNA, 507 bp, Heterodera glycines
gaaaattcccattcccaaccccgaattggcaaataccgtctatgttgttgagcaaaaatcgcatgcaaatgtcgaaaaggtagggcacaatttgcacatcgcccgtcgtttttcgccttcccgcataaacgcgtttcttttctttgggcgctttgaacatgtttatgttgaggtcggtgggcatggatatttgctgattgtttggttggggttgggctaacaataagttagcattcattagttgtttccatttaaccaaatttagaaatttaccaatggacggtccaaagttcgatggattcttcaacgaatccagcaacgaattttgaatgctttctgcggagggcatcgatacctttttgggctttttcggtaaacttttttgtactttgtcagcagcggcaagttgggaggcgaaggcgtcgattggctgctcatcctcgaaagtttcgcagtcatcgtctgaaccggactaatcttatcaaattatatggtttatacattccc

SEQ ID NO: 59289 - DNA, 4213 bp, Heterodera glycines
atggcagcggttgtaaaggctggcaaaggaccaggcccttatacatcggaaacgtcgtggaccatttgggaagaacgatttgagtttttcatcaaactccgaggcatcactgatgcggagacgaaaaaattgctcttcttctcggagattgggccaatatacgaagagcttcgccaaatggcgttgccagacgacgtccgcgacatgtcaattgatgagatcaaagcgctgatggaggaacgatttggcgagacgaagacgattgcggcaaaaaggtttgagctgttttcagccaaacaatcatcaggactgtccattcgtgattactcaatccaacttcggaccttaatttccaaagccgaatggcataaggattcggtcgacatgtgcctgagcgctcttttcatcaacggccttaaaaaggattcaattcgggccgagttgataaagaagggagtgaacgaaatgaagttcaaagatgccgttgaaacggcagtgcttctcgagcagtccgacttggacgcagagcaaatcggtgggcataagaaagcggaagtggcgaaagtctttgctccaaagggaggaagaaagattagcgcaccaacgcagcaaatgcaatgccatcgatgcgggaggaatggccaccgcaacaacgagtgcccgaacaaggactcaaaatgccgaaagtgcggcaatgttggacactgggctgtgatgtgcaagacaaagcagggctccaattggccaaggaggcaagggaagccggttcaccaggtcaacactgaaagccaaaaagcacacgatattggaacactggccaagtctgaagaagtcaaatcgatttcagtgccaccagcgatgataaaacttcagctgagtaaaaaggcgacagatttcgaattggactgtggcgcagatgtcacactcatcaccaagaatgattggatgtccatcggaaggccgaaacttggacaaacttcaggattgatggcatatggaaaaaagccgatcaaagtccttggatcgttcaaaacggatgtggtgtacaacggcaaagaagtgaataccgaaatttatgtcgtggacggcgaaggcaaaaatttgtgtgggagagatttgattggtgaattgcaaatcgatctcaacaaagcgttcggaatgcgatcgatcaatgaagtcaagtgcaaggcagtggatcgagagctgggagcggtgcttctaaagtacgatgaggtcttcaatgacggactcggccgatgcacaaggcaaatttcgttgaaatttaagccggaggtgcaatcgaagaagtgcaagccacgccccgtgccttttgcattgagacccgaagtggagaaggtcatcgacaactgggtcaaagatggagtgttagagcaggtgacaacgtctgagtgggcaacaccgttggtgattgtacccaaagccggaaacaaaattcgcttatgttgcgactacaaagtcacggttaatcaatggctcgacattcatcaatacccgttgccgcgcccagaagaattgttcagcgtgttgaacggaggcgaaaagttttcaaagttggatttgaaggaggcttatcttcaactaatgttggatgataaagccaaggaatgcttgaccatttgcacgcataaaggcttataccaatttacgcgtatgccttatggtgttgcgtcagcgccagcaattttccaacaagtgatggaagacgtccctcgtggaatcgacggagtcgccgtctacttggatgatattgtggtgacagcccccaacgacgcggaacatttgaaacggctggaaatgactctccaacgcatccaaaaatttgggttgcgtgtcaaaaaggaaaaatgttcctttatgcaaaagcaaattgcttatttggggcacatcatcgacaaagaagggattcgaatgtcgccggacaaagttgaggccatacagaaaatgccagcccccaaaaacttaaaggaattgcaatccttcttgggcatggttgggtattatggcaagttcattccgtcaatggcaacaatttcggagccgttgaacgagctacgccgatcagagaccaaatggcattggggacaacaacagcaaaaatcattcgaacagatcaaaattatgctgtcgtcgaacgagctgttggcccattttgatcccaaaaagccactttatttggcaacagacgcatctgactatggagttggagcgatccttttccacaaagatggaaacacaggagagtttggcgtgatcgcatacgcctcaagaacattgagcccagccgaaagaaattatgcgcagatcgaaaaagaaggacgcgcagtaatcttcggcgtgaagaaattcaaccagtacttgtacggtagaaaattcattctacagacggatcacgagcctttaaaaaggatttttggaccaaaaggtgaattgcccgtggttgcggcacgacgacttcatcgttggagtttgaagctcatgaattatgacttcgaaatcgaatattgttcgacaaaaaatttcggttacgccgatggattgtcgcggttgcctagtccagaaattgatcaggtctgtaaggaaagtctcgagctgaacaaaatccagcaggagagccaaaacgctttgccgatcactgcgaaggacattgcgaaagaaattggcaatgatccggtcttcgcaaaagtaaaaggttttgtgctcaatggatggccaacaaggatagaagacgagaaaattcgcccattttttctggtaaaagacgaattggagctgaataacgaatgcctaatgttgggatgtcggacagtgattccgagcaaattccgtgagaatcttttgaaattgatccacgagacgcatccaggaatcgtccgaatgaaggcattggccaggcaaaaagtttggtggccgggcatcgacaaagacattgaaagcatgaaaaagaagtgcaaaatttgtcaaacgaatgcgccggaaatgaggaaagtccctctccatccatgggaagtgccagaaaagccatggcagcgacttcacattgacttctgtggcccatttttcggaaaaatgtggctgatcacggttgatgccaagacaaaatggccagaagttgcaatcatgaaaagtactacgaccgaggcaacgattgaggcacttcgaaaattgatttggacccacggattgccagaacaaattgtgtctgacaacgggccgcaattcgcgtcaaaggagtttgaagaattctgctccaaacgcggaattgaacgaacgctgacggcaccataccacccgcagagcaatggggaagccgagcgttttgtccaaacattcaagaaaggaatgttgttggttaaaaaagaaaccaactgggacaatgaattggccatgaaccaattcttactcaaataccgagtaactcctcattctgcaacaggacggtctcctgcagaaatgatgttcggcagaaagctgcgaacactgctcgacctcgtgcgcccgtccgaatcgaccgaaattgaaggaggagaagagaaggcgaaagaaaatgctgaaaagcatggccaaaaatatttggctcgcgccaaaaagaactttgatcgacggacgtggaaacgatcgtttaaaactggacaaagagtctttgccaggaattacagagacggttcgaagtggatggcaggccaaatcatgagccaaataagcccatcactgtttcttgtccgaacagcccgcggggtctggaagcggcacttagatcagctgaaatcggacgagacgaagcctgatctggagagcaacaccgacgtggactcaacatcgtccataggtgatcagacggaggatgaaaaggacggaggacagcagacggacgtggaagaagagccgaacgatccgccaaatttgcacgatccgccattgagaagatcggtgcgcgaacgaactccacgacagatcttcgaccccagcgcgtgatcgctgacttcagctggtggggaggagatgttgtgttcgttaattatttgaattaacgccaaaagatgctcgtttatcgatcatccttttgacccttcgtgttgtccatttaaaccccccttttcccccattccgtgcattctccctcattcattaattgtttccatttaattgtgacccgctccctcccttcgctatttattatatttatttgtgtgga

SEQ ID NO: 59290 - DNA, 117 bp, Heterodera glycines
accatcaacgctcatttcagcgaagcaaaattttttgatgtccgtctcatgccattccgtctgtttgactttggccatttcaatgattgtgctgccaagtgtttgcaacatttttgt

SEQ ID NO: 59291 - DNA, 462 bp, Heterodera glycines
ctctccccacagattgacgcgtggccaaattccgatcatcggctgcggcgggatttccagcggcgcggatgcgtacgagaaaatcaaggcgggcgcctccgctgttcaggtgatgggatgggtgtttacgggaggttaacacgagcccacccagaaatttgttggtgactattttggctctctcaaatacggaagtgtcccactctgtactttttaattgaaattttcaaaaaaaaaaaattattttcagaaaatcaacctaaaagcgttgttttttagtagtgtttcactaaacaaaacctcataaaaattttgccgcttttgcagctgtacaccgccattgtgttccaaggctttccggtggtcggacgggtgaagcgcgagttggccgaactgctccaaaaggatggctatgcgcatgttgcggaggcggtgggcgcacagcataggaaaaaatgatca

SEQ ID NO: 59292 - DNA, 614 bp, Heterodera glycines
tggagagtcatttccagccgtttcaaatgttccgcgtcgttgggggctgtcaccacaatatcatccaagtagacggcgactccgtcgattccacgagggacgtcttccatcacttgttggaaaattgctggcgctgacgcaacaccataaggcatacgcgtaaattggtataagcctttatgcgtgcaaatggtcaagcattccttggctttatcatccaacattagttgaagataagcctccttcaaatccaactttgaaaacttttcgcctccgttcaacacgctgaacaattcttctgggcgcggcaacgggtattgatgaatgtcgagccattgattaaccgtgactttgtagtcgcaacataagcgaattttgtttccggctttgggtacaatcaccaacggtgttgcccactcagacgttgtcacctgctctaacactccatctttgacccagttgtcgatgaccttctccacttcgggtctcaatgcaaaaggcacggggcgtggcttgcacttcttcgattgcacctccggcttaaatttcaacgaaatttgccttgtgcatcggccgagtccgtcattgaagacctcatcgtactttagaagcac

SEQ ID NO: 59293 - DNA, 303 bp, Heterodera glycines
atggcacggatggagacaatgttggcattgctcaacgcattcagcaacagtaataatggcacaaatggagtggtcccccaacagctgcaactcgtcgaagacatcgtcaaacagcaaatgaatccatttgacgctgttgggcctccggcactgccaacgccggcggcgacagtgtcggcgttgcccaacccgagaccgatcaacccgatggatctcgaaaggtgccaatgaaaatgctaattttaagtaattcgttcaaaatttctcacaaatctaccgtaatttcctcctacttttttaaaa

SEQ ID NO: 59294 - DNA, 541 bp, Heterodera glycines
gtttctgacgaacaaagccatttggggagaccgattcagaccaaagtcaccactaaggacgtgagtggaatgcttgccatggtctgtccattgcctctttttgtgatttcactcaaacaattttttacagagcaccgattttccgatcagcctcaatttggcacttgtaagagtttgcgggtctttcttttctcatcttttaaacaaaacataaaacttttgacattttgtaatttggtgttctccaggacattctcagcgtcatggagccggtgaatccgacggtggccaaattacgcgaattttgcaccgctaaactgcctgaggggttcccggtacgcgtggaaatgccaatttttgcgacgattcaggcaagggaattcaaaaagcgtatttccaaaaattaattctttatcaggctcgggtcatttttcaacaatttcgctggtgcggtgaaggcgcctctccagcatttccggatgcaatgttcagaacaccggacgattatcgcgaggacccgaagagattcaaacggatgtag

SEQ ID NO: 59295 - DNA, 441 bp, Heterodera glycines
atgtccattcgtcgccttccttttgttgtcgcaagtttttttgctctcgcatttatgcacaatttttgtgatggtaattttgtttagtttttttttatttaacaaaatgattaaattaaataatttcttaattgagcattggaatgcgctcaagggtcaatcggagttgttgatccggaggaagagccattcatcgttaaagaatgtcccgctgatgcaaaatatatgttctgccacaaaaccaactgttcatctggtaaaaatgcatttcagcagattgttctctcgagcacataaatacgtattcaagacctttttaaacattagtatccatagaaaaaattttatatttttgatgcgtggaagtaagaatttggaactgcaatttttcacaatcacaaaatttttcggtgtaaaaaacttagaaaaaaaagaaataaa

SEQ ID NO: 59296 - DNA, 552 bp, Heterodera glycines
atgagtccagcagtgattagaagaggtacaacagtgattagaagaggtacaacagtaattagaagaggtacaactgtgattagaagaggtacaacagtgattagaagaggtacaactgtggttagaagaggtacaactgtgattagaagaggtacaacagtgattagaagaggtgtaacagtgattagaagaggtacaacagtaattagaagaggtacaactgtgattagaagaggtacaccagtgattagaagaggtacaactgtgattagaagaggtacaccagtgattagaagaggtacaagtgattaaaatttgaacaaaagtgattagaagaggtacaatcatggtttaaaatgaaataaataagaaaattgtattattggatgtattataaatttatcaaattaaaaaaatccttttacttattaaaaataaagttagaaatttataatatattgtagaatatttattgaaattgaaaggaattaatttctcgaaaattcaaattaaataaaacatttattcatcagaaataatttaaaataatta

SEQ ID NO: 59297 - DNA, 3711 bp, Heterodera glycines
gaaaattgttcctcttctaatcacagtttgcacctcttctgatcactgttgtacctcttctaatcacttttgtacctcttctaatcactgttgtacctcttctaatcacagttgtacctcttctaatcacagttgtacctcttctaatcactgttgtacctcttctaatcacttttgtacctcttctaacaattttgtacctcttctaatcacttttgtacctctgataacaattttgtacctcttctaatcacttttgtacctcttctaatcactgttgtacctcttctaatcacagttgtacctcttctaatcacagttgtacctcttctaatcactgttgtacctcttctaatcacttttgtacctcttctaacaattttgtacctcttctatgactgttgtacctcttctaatcactgttgtacctcttctaatcactgttgtacctcttctaatcacttttgtacctcttctaacaattttgtacctcttctatgactgttgtacctcttctaatcactgttgtacctcttctaatcactgttgtacctcttctaatcgctgttgtacctcttctaatcactcttctaatcgctgttgtacctcaaaatttaaaaaacgggcgcgaaacgcccgtatgagttcaacgaatttaaaaaacgggcgcgaagcgcccgttcaaggccaacaaaaattgaaaaaccggcgcaaagcgcccgactgaggccgcgaagcggcctaacaagctaaaaaacgggcgcgaagcgcccgtatgagttcaacggatttaaaaaacgggcgcgaagcgcccgttcaaggccaacaaaaattgaaaaaccggcgcaaagcgcccgtctgaggccgcgaagcggccttaatagcccaacaaatttataaacgggcgcgaagcgcccgtctgaggtctctaagctgccttaatagcccaacaaatttagaaacgggcgcgaagcgcccgtataagcccaacaaaattaaaaaaacgggcgcgaagcgcccgttcgaggccgcgaagcggcctaaaagtcccagataattttttaaaaattcaaaatctccacaaccatagcttatctaggtagcgaagctcccaaagcgcgaagcgctttttcccagctaaatagccgacggttcacgcacccgctagttactatatacgttatattgacaaggagtttcgtttgcaaaaacaaaatctcccggccgaaggccgggagcgccctgaaagtagtggaagggtcttacaactttttgaggcgcatctgggaaaactatagaaaaaaattcagcgcggacgactgagtcccggcgaccgatttctcactttttcttgcgtttgatggcccataactttttttctaaaactcgaatcaaaaaatgttcgctgtgagggggctaagttgaagtgttttctaaaaaacaaaaaaaattccaggcctctacctataataggaagggctgcagaaaaatggagaaattcagtaccaactttgtccacttcagtcccaggcgaataactcgccagggtttgaactgagcgagggggtgccagcagacttattgtagagttcaatgagctggatttttccagtttttaaaatttcgaaaattttcaaaatttttcgagctaggcctaaaaaacggttttcaggtttttgaattttaggaatttttaacgaattttcccagaaaaacggagaccactttcaagcaaccgtttttcgagctctatcgattggtgatatttttgaaaaaatttcgattttttcccggaaatagaaaaaatttttggcctgagcgggacatttgagtcccgggtccataactcgttaggggttggttttatcgaaaaaacgccttagggcaaaattgtagagcttttgaagctctatcgaatggtgtgccatatggcgggaaattttcaaaaattttcgagctaggccccctagaaattttcggaatttttttttgggttgaaaaagagggtgaaaatttttttctgggtatttttaaggtgctgagcacgaatctgatgatcattttcagtttaggaaattttagaattttttaaaaattcaaaaatatttttcaattttttggccctcgggattttgggcgaatattggaaaattcataactcacctcagagagggtaatttttcatacaataaagctttaaaaatagcaaaaaatcgggagaattttatgagatttatttgggatttctatcttaaaaagaaaaaaagttattccagaatttctgaaaattttcgatttttcagaaaaaaattcataactcccttctgaaaagtcattctgtaaaagtaatatactacaaaaatccgcaattattttctctataatataaattttattttacatttttatctcttttttgcgaattgttataaaaataaaagtgattttggtgttcgggaccacaggggggtgaccaggatttttgagtgaaaaaattttttcgacaaaaatcttccaaaaacatgtctttaggggtagtttatgacgctgatcacgaatacgtgatcacattttacttttgacatcgttaagacctcagaatccctgtgtgattggggattctgaggcatcattttgagggggggggggggaagttcgaatccgggcggtgtaacattatttttctgtgcattttttcattattttcaatgtttttattaataaaaaatagatttcttttattaataataaataaaaatttttaatttgaagtaaataattttggtaaataaatgtattaatttaaaattaattattttttatttttaaattaaagaatttatttgtttttttaattataatttgtcaaaaatttattttcaatacaataatactcaatcattgtaaatttaaagtttatttttaattaataaaagaaagcattttttaataattttttaaaaattattaatacatttttttaattatattttttcataaaccatttttttctgtgcattttttgcttacttttacattttttaattaatttgttttgtattattaataataaataaaaatttttaatttaaattttaatttaaattaaattattttggtgaacaaatgttttaatttaaattatttaattttttatttaatttaatattgttttattaattattttaaattatttctgatgaataaatgttttatttaatttgaattttcgagaaattaattcctttcaatttcaataaatattctacaatatattataaatttctaactttatttttaataagtaaaaggatttttttaatttgataaatttataatacatccaataatacaattttcttatttatttcattttaaaccatgattgtacctcttctaatcacttttgttcaaattttaatcacttgtacctcttctaatcactggtgtacctcttctaatcacagttgtacctcttctaatcactggtgtacctcttctaatcacagttgtacctcttctaattactgttgtacctcttctaatcactgttacacctcttctaatcactgttgtacctcttctaatcacagttgtacctcttctaaccacagttgtacctcttctaatcactgttgtacctcttctaatcacagttgtacctcttctaattactgttgtacctcttctaatcactgttgtacctcttct

SEQ ID NO: 59298 - DNA, 1665 bp, Heterodera glycines
atgtacatccacagggcacaccagtgcgctatacgccaagcacgggagcaggaagcgctagccgacattgattggcgattgcacttctttaactcaagctgcgtgcactgtggcctcccagatccaccaaattcaaaagccaaaaatatcaatttggcagttgaagaagctttctttggtgatgatgatctgaatatgtcgcctggccagcaaaatcctaggcagcagcaaaacgctccacctccactcaacagcgaccaacaaacggtctttgatgctgttgttaaggcaattaagtctgatccaagagatcagactgtgccgcgccgtttcttcattttcggcgatggaggtacaggaaaaacattcctgtttggccaaatcataaggcgcttgcgcaagcccccatacacctacaaagtgcttgctacggcatccacagggtgtgcagctattttgctgccatatgggaaaacggcccattccacgttccgtctcggtagagatgtctcattggacaagcttcccagcattccgcttgagagcttctttgctcgacggatacgtgaggctcagctcatcataattgatgagatcaccatgctgcacaatacggtgattgaggtcattaaccgcgtgtgcaaagagatggcaatctcacagtacaagaacctccccttcggaggaaaaacggtcatagtcagcggtgactttaaacagtcgctgccggtcgttcctcacgagggcctgactgcgcaagtaacagcttgctttcaaacatccccattgtttggtgaattcaccacaatgaaattgactatcaaccagaggttgggtcaagggcaacaagcatacttacaaatgtgtcgtcaaattgggctcggagagaccggagaacacttctggattcctccgcagttcctggtaaagagcagggaagagttgatagactttgtctatcccgacttccaaaaactccttggcaatgacaaggagctgctcaatcgtctgatcctcgcacctcacattgacacgtgtgatgagatcaacgaaatcatgatggcgaatgtgcctggtcaagtgcgcgaatatttgtcctcggataagccgcttgacgagcgtccactggacatcgatgaaatcgagtccgaagtggcagcgttgaaccggcgcacagactctgggatgcctccccaccgtctgcgactcaaagtcggaagcgtcgttgttctccttatcaacaaaagtgataaagaaggactgatcaacggcacgcgcatcgttcttgaagaacttggtgacgatcgcctggtcggtcgagtaatcaacagcaacgctgttggtggccaagttaagttcttcattgaaagaacacgtaatgtgtatgaagacaaaacgcctggcggcttaaaatatgagcgtttgcagttccccataaaacctgcattcgccatgaccattctcaaaggtcaaggccaaacaatcaacacggtcggaattgaccttgaaagggatgtattttcccatggtcaattatacactgccttttcaagggcaacggacggtaacaacgtccgagtgtacgctcccagaagggagaccgatgcacaaggtcaaaccaaagtgttgaacattgtggccaaaaacatgctcaaattgcaataa

SEQ ID NO: 59299 - DNA, 4348 bp, Heterodera glycines
  unsure (1)..(4348): unsure at all n locations
atggtatgggaaaatggcttggacgntgtcatgcaatataaaaatatgacatttggggtatgacccaaatgttcaggcagaagtcattcttttgccagtacatttccctggacattggactctaattatccatgatgttcagtgcggtacacattttgccgattctttgcctaccccttatggcaggttggattggcaactgacggaaaaaattggaaagatcatttctgacattttgccgtcaacagtgttgaccgggatttttaatgccgtaaatcttacggtacaacacgatggtaacagctgcgggtacttcgtgtgcctatatgctgaatcatggctcatgaacaatcgcacgtttgttctgccagatttgtccatcaattatgaaaagcggcgcatattgtggcacattaacgagctgtataactctgataatgttccatatcatccaagggaaggggtacctactccgtgcccaattgtctatcgacatgcggatgaggctccatcgacatccaaggccgctgagccagttgaagttgatgatcatgatgatataatgatcatcgaaccacagacgagtggacaagcagttgttgccattccaacacaagcccaagtggcaggtgaaaaccaagctgacacgcttggattggtgtcggaaacttgcgtcccgcaagagccaattgcgcagactgacgattcaatatttgtcagaccaaagacgcctccaaggcgttcatcgcgcattgggagacggcaatcagcttcgattagccgttctccttcacccgcgccgagacgtcggtcatcgacaaatgccgctgagcaagtcacagcatttacgcggcgttgctaccttgtccacaagggttggtgctgtgctgcagcagcggcaaagcattatccagaatactcagattctggtaagcttggtgacaagaagtgttctcactgtggagcattacatttcccacacgaggacagcagcatttgctgtcgtcagggaagggttgttttgccaaagctcaaccctcacccaaaagagcttgaagagctaattgtggaggaaaaacaatcccgtaaaggaaaagaatttgtacgacaaatgtcgcggtacaataatttgctccaatttgcaagtgtttcggctggccataagccaagtcctgcaggcggaccgatggcagtaattctcaacggagaattccatcgccgcattagcagcatgcaggcgggtacaacacagatacctggcttcggtcagttgtacattctggatccagttgaagccatggagcagcgacgaaaaaatcccacctttacgggagagaaaatcacaaacgaggaagagtttgtgcagggtcatcagcttaatgaagagacccttgaaattttggaacaaatgatccaagaaaatcacccggctgcatctgcttacaagcaggctcgtgagcagctacaagagttgttaagacaacaaaggactgaagagctgcggttcttcagaatgactttgttgaatgagcgctctgctccgggtggtatgaaagaccctaaattgcatccccaccagataatcaccccctcaacgggtgaaggtatgttcgcaatacacgcggatcccacaggtgccccggcaccaaaagggatatgggtcgaaaacaagcaagggcagttaaacgaaatagccccgttcagtccatggactgatagcttgacttatccattaattaagcctaagggcgatgatggatatcaaattggtattccatatgccaaacccgcacaaaaaaagcggagaagcgatcaatgtgtcgatcaaatgtttgacactgatgcaatgtccgacgatggctcatgcgagactgagtcaattgctgcatcagatgctgagtcggtcgaatcgaccgaatcattgattgatcgcattgataagacgagaaaattcatttctctgcgagattactgcaagtaccatctcgcaataagggatgaaaatttggagtggcaatatcaccacattctgtcatgtggcggtggtcttggccagcgctgggtcttagaccaagcggccaaaattgattggcaaattgccagttttttgcgccgtccagacatggacctgcgcataagtactccaaaaaatttgttgcattatttggtaaaccaatacaataagcagcaagctcggcaaaaccccaatgcacgacaaaagactgtcgatgacattggtagtgttgttcgcctttctgaaaagaatattaattctcttcagtattggaaaaaaaggtatgaagactgcaacaccatttttgctcgttgccacgacgcaaaaaaggcgcggctcttcatcacattcacgaacaaccgtgagtggccagagttcaagcaaaacatttacaaaaatggtcaaatgttcactgaccgttttgacatgtggatgcgagtgtggtgcggcaaaattgctgtcttccaccaagagctctacgagaagggtttctttgggactatccttggctcaggagagtccatggagttccaggggcgtggtggcccacacgcacacattgtagcccagactgacctggacgcagttccagaagtcatccaggaatacatatgggctcatattccatctttgccgtgcaaagacgatgactcacccatagcgcaaatgcatcgcgaagtccgcgaactaatgcatatgcaactgcacagatgcagcgatagttggtgtggtccacgtgaccccaactttgggcggtgtaaaaagggcttcccagccccgtactcgaaatgtacgatactacacccggacaggcccgcattgtattaccggcctagcccaaccgacggtggtgcccaaattgaggtgaacggcttaatatacgacaactcgcaagtcgtgccgtacaacccatacattttgctgcgttaccgagtacaccacaacgtgttattcgcatacggtaacaaagcgaacatcaaatatgcactcaaataccctttcaaagggccaggacattgttatgtcgagtgcaaagaggagtccggcagcaaaatcggtatcgatgagccggctcaatatgccaaaatgaacttccgtggtgctacggaagcttttgcagttgtgcattcaatgccatttgcaaaactctcgcatcacgttgttcatttgtcaattcatttgccaaaccagcagcccgttgtatacagggcattccaactggtgagcaaagctgaggaaattcagcgaggcgaactcccagagacgccatgctctgcctattggaagcaatggcaaaatgaatggcagcatgttccttcgcttaaggacatgctttttgaaaaagtcccagagcaatttcgctgggcaaaggaccgatgggtcttatataaaaagaagcctagcaaaaggcccccaatcggtcgtgttgtacctgtccctccaacggaccgggaaagatttgcgctctatgcgttaatgcgtcactttcccggtgatccggaccacttaaaactggtcaatgggcagcagtacaacaccttcacagaggccgctttacagcatgggcttcttgaagatgaccaaatttggcacaaaacgctcggcgaggcagccttgcatcgctggccggaccagatgagatggctcttcgtgagcatcctcgtctttgggcagccgagcaatgccctagaactgtggaacaagtacaaagaccaaatgtacaatccacagggcatcaccagtgcggctatacgccaagcacgggagcaggaagcgctagccgacattgattggcgattgcacttctttaactcaagctgcgtgcactgtggcctcccagatccaccaaattcaaaagccaaaaatatcaatttggcagttgaagaagctttctttggtgatgatgatctgaatatgtcgcctggccagcaaaatcctaggcagcagcaaaacgctccacttccactcaacagcgaccaacaaacggtctttgatgctgttgttaaggcaattcagtcggacccaagggatgcgactgtacctcgccgtttctttatattcggcgacggagggaccgggaaaacatttctgtttggccaaattataaggcgattgcggaaggtcccatacacctacaaagtgcttgctacggcatccactgggtgtgcggctatcttgctgccatatgggaaaacagcccattccacgttccgtctaggcagagaagtctcgctagacaagcttccaagcattccgcttgaaagcttctttgccccgacgatacgtgaggcccaactcatcatcattgatgagatcaccatgctgcancacacg

SEQ ID NO: 59300 - DNA, 2642 bp, Heterodera glycines
atgattgaactgattagaaagtttgatcaattaagaaaagaaaaaattcatggttttaaatatgacgataagaaaagaaagatattgaatataattacagaaaatttgggaatttgtcgtcataaaatttacgaatggaagaagcaatttggtaagaagaaatgaaaatatttaaatcttacaaattgactcattttaagatttattaaagagcctaccaaataaataaaagctgaaaaaaattgagcaattcgaaaaaatcaatgaagaatttgaaaaaaaaatttaattttaaacccaattggaaaattaaagtaaaaatagcggaaaaattggtgtttcgtgggattcaatttatcgttggaagagaaaattcggtttaatcactcgtaaggagatgaaaaaaagaaacaaaatgattagtaaaaataaaattgataaaaaaattggcatcccatataccaacttacaacaatggacgaagaaatttggcaccaaaccaaatattataattttatttactatttgaataaaaggtaggccatgagttcaaaagccatccgagaaagtattgcatatttctctcattttgccacttcttaagtgctggctcgtagccagcgggacatcccgtcaaaccggggaatggtgagaacggagatgaccaaaccaggatccccgaaacttcggtcggtcggtttcggttaaatatactatgattactaaaataagacaagtgaaattattaataattgatccacaatatttttaaaaaatttaccgacaattttgacccttacaattcatgactatggtaataataaaagtatttgataaaataagattttgttcagtcaaaccaatgaaacattttcgagtcttatgcgtgacaaaagaaatggcctttgcataagaggctttggactttcacaattaaaattgccaatcattcactcacaaaaattaaaaaaaggcagtaaagattgaggattagtcatagctctcaaacttaaaacttctcaaaaatggtggatacgatttaaaatgacccaaaaaatgagaaaatacaattatggcgagcttgacattaaaagttataaaactaattaaatttaataacttttaacaaatttgtgcttaaaaatttatattttcttgaaaattaaaaaaatagaagaattgaaacctgatgatcttattatttagtctatttagtcaattcttacagctgtttaaacgtaaggttagacgtgtactagttttctgtttggacttagacctgaatacccggcttatttgggcccgaaaatatcaagagacccgtctaattctatttaaacttataaatcttaagtcttgaacagactgagcttattatggggctcccaactgaaaatttccaaatcagcatttggccgacaaaaatcagcattttaaaattttattataaatgaaaaaaataaattaaaaaaattttattcgggctttttaaaatttttttttttgaaaatatagggccggtggcgtcgggaggcgccgcgaagataaaatttgttatgattgttaacagaatttgtccaaaaatggccatttctctgtattttgggacagaaaagggatttttggtccgcattaaaaaatttttgcaccaaaaaaagatcaatgaggattttcaggctaggttttaaaatgtaaagaaatattctaattgtttatttatttttggtggtaataaaatttcaattaattaaattttgaaaaaataatgttttgctttaggaaaatttacaaaattaataataatgaaattttgttaagtgtgtggcgatcgaatccgggcagaaaatgaagaaagattgatgctttaaccagttgaccatatatgtatgtttcacactgtagattgatcaaattattatttttatttaaattttccttttcataatttttctgttcgattaaataattttttttattattattattaaattaacgtaaattaaaaattattcttcaaattatctaattttttactttcgggttttatgtatgtctagtgtaaggcctctgacttataaatctacatataagacatgtcgtatctgagataggatccgaattgaaataggccccaacagggaaaagtaaaactttttttagatttattttaaattttcccgtaaaaatttattcatatttttttactctttaaattgttttaatgtgctcaactaccccaagcgtttttctcgtcctatttttatccagtaattccttgaaatttgactcaaattaagccaaagctgctgccgattccatgctttatgtatggggacacaaaaactaagcgccaaatttgtggtcgctgactttattaatcaatttactaaaaatgttggctactatttttttttaaacatttatttcttattttagctttcctaacaaaaagactaatttctgcgcttttctattttcattggaaaacttctgtcaaatgcagcattttctggtgtaaaatctgccaatttacacgcgcaaataaggcacaaaaatggcttttggcacttttgaaagaaatgttataatttgaccatttaaaatccctcatggccatacttatataaattctaaataataaa

SEQ ID NO: 59301 - DNA, 577 bp, Heterodera glycines
atggaaaaatacacagctatcgattcgatcccgaaaagttttaaaaatcaaaaatacacagaaaatcaatcgataaaggaaacaattattggtaacaatgaaaattataaacaacaaaatgctaaggaaataattataaagtctgaaaattacatagaaaaagaaaatgaagacctaaagccaataattaagcaagaaattaaaacagaaccattggaggaacaaaagaattatttaaaaacaacactcaaagtgccaaaaattgaattcgaccaattgagcgaaagatcatttgaaaatgagattaatgatattgatgagcagtttgatcaaaatgctccgtattctgatcagagtatttttgaaattgatgaggattacaatgatacggtaatatacgataggacttccacaagctcgaataaataattattattttttaatttaatgggtccttataatatttgaggtagaaaaaagaaaaggaaaggaaaaaatgggcgctgatcgaaatacaatttgtaaattgaagaaaaaattaggacaaaacagaagtgcactgtacttaaggacataa

SEQ ID NO: 59302 - DNA, 492 bp, Heterodera glycines
atggaaaatgtcaaagacccacgggaaagaacactttcgccagaacaaagagcgaaaaagcagatgatttggctgaaaaatgtgctgtttatgagccctgatcaaatcaaagtttgtcattaaccaattaattacccaattaaataaatatttttaaattaaattcaggataacagaagcacaactttggtgaaagacttggtgtggttcgtcggtttgctgctctacagaatgttgttcaacaacaaacaccccatggacaattgggagccaaagcgccgtttggacatggaatttatggcaaagatgggcttctcagggtcagattatttctacatgtacaaaagagatgattttgtgccgggagactttcgcatctttccgttgaagccaaaaagtcggtggatttggatgccggagaatgggcgagacgaaactggggaaatggcactggtggaggaacgaattggcatggaacaggtggccaattaa

SEQ ID NO: 59303 - DNA, 515 bp, Heterodera glycines
atgggcaaaaaaatggagaaaatttggataaacaaaatgttgaaaaggaaaagcataatgactggtcaaaaatgtgcaaagtaaatcaaacggaagaagaaaatgaaaggcaaaaaatgattaaataaatattaatcaattaataggaaaaaatttaatttaatttaaaaatataacaaaattttttaatgaattattttaatattaaatttgaaggcttttcccaagagattttgacaaatatttattcgccacttggggcggactttgtggcggaattggaaatcagatggtactctaaacaaacacttattaattaattaatgatggccgtttagtggcgttttgcttctttgtatggcattggaaaaccgtacgggcgaaagccaatttttaaggaagaccaaaaatgcgaaaaagcacatggagcgcacgaaacggaaggagagaatgaaatcgaaaaactctttcctgtctatgccagccaaatcaaatacattgtaaaaacaaattaa

SEQ ID NO: 59304 - DNA, 752 bp, Heterodera glycines
atgcatgaaggccttgcgaatgtttgtctgatcggttcttcaatgaccgtggtgaagtccaaaattgacatgcaggttggtcggaacgggatttatttaattgtctttttagtaattaaaaattgtttgtttttttcagatcgctcgcaaacggaagggactgtcctcgcaacatgacaaaagtttggtcgcctttatgaatgcaatttgtgccgcatttgttcggcacgtgaacatcgaagtgactttcccccccccccatctctttttcactgccaaaatctctcaccgattttcagctgatcaaatgcgttgttgtcgatagtccgggattccttcgcgatcagttcatcgagtttttctggcagtacatcgaacgcgaagggctaaagcagcagttcgccccgcacagaggtaaatttgtgctcgtccattcgtcaagcggcttcaaacacgcgctaaaagaagcactttcggacgccactgtcagccaacggcttagcgatacgaaggcactgatttttggaaaaatggcattttccaatgttaggtcattttaggcacaggccgaagttaaggcattgaacacgttcatggagctgatgtgcaccgacccacagaaggccatctactggtacagacacgtggtgcacgcacgcgaacaacagtccatcgacactttgatggtgtccgactcgttgttcaggcaggcgaatgaatttggcatggaaataattggcagaaacatttaa

SEQ ID NO: 59305 - DNA, 951 bp, Heterodera glycines
  unsure (1)..(951): unsure at all n locations
atcgatgaagaacgcagccaactgcgataattagtgcgacctttagaaaccttgaacacaaaacattcgaatgcacanttgcgccattaggagttacatccattggcacgcctggttcagggtcgttaccataaaatgcactgcttgtgcgttgcttcgtgggatcatgtacttgtacgtgttcttacgttacttgctcagctcggctgtggggttttggtgtgctggcgcgaacttgtggttctaattcgcgttttacggaccgtaactcaagcgcaccaatgctttgcatgctgtggcggagtgcctggattactggcattcctgctttgatttttcgacctgaactcagacgtgaacacccgctgaacttaagcatatcagtaagcggaggaaaagaaactaacgaggattcccgtagtaacggcgagtgaactgggaagagtccagcgctgaatcgcagctcctctggggttgcgaggtgtagcgtatagaccgtgagcttgggttggcccgcttgttcaagtttcccttgaccggggctccagagaaggtgcaagacctgtccaactggcggtgcctacccatctttacgtgtcttggagtcgggttgtttgggatcgcagcccaaatcaggtggtaaacttcatctaagactaaatacggccacgagtccgatagcgaacaagtaccgtgagggaaagttgcaaagcactttgaagagagagttaaagaggacgtgaaaccgatgaggtggaaacggacagagctggcgtatctggtctgcattcacccgtttgttgctgtacgttggcctgctagcctccagactggggtttgctgtccttctgttcagtggcgaatggggcatttgcaggcggagtgcgctgagatgctcggagtagctgcgtgagctcggtcttgaggccagcctttcggggtctggtaccc

SEQ ID NO: 59306 - DNA, 1582 bp, Heterodera glycines
atggaagaaaggttcggcgtgtttcagcactatttcgatctaaagttaagtgatgcccctgggctttttccatcgaaatttcccacgcaccgacggaacaaaaacgaaggcacaattgagatggaaattgaaaaagtgtccgaatttgcggtggaggaggtgggaagtcgccgatttagcgatgccatggacattgggggaatgccatggaaaataatggcagaaatcgaaacgaaaaacgaaagcaatgagaaatggttgggcttttacctttccgacgatggccttgaaaatggtaaaaaaaagtctttttcataaatctgtcagggaaaaacaaaaatatattattttttactcattgctttaagcggaggaatacatttactaaattcttttttccagaggtttttaaatattatttaaatcattcgaactaaataaacgattatgtagacaattttctacaaaaatagaaattcaaaaattgaaaatgtaggtgaaaagtaccctttcaacttaaataagtaccggatttaatgataatggtaattttattgaatatttatttattgtgcagaatattggacttgtaaaagttcggcaaaacttcgaattgtttcacaaaagaatggcacggaggatttaattggaagaattggtgattacatttttaataaggaagggagcagttatggtggatttcctaatttcattagttttgcggtgagtgggattcaaataaatttaataaacttcatattttgaaattaaaatttttaaaattttaaaaaagaaagtgacaaaaaatagaattttttgaaattttttggttataactctttgtaaatttttttctagattttaaaaaattaaataagataggatttgataggatatgtaatgcatcgtttaataccaatttttattaatttaactaaatttaagctaagttatgctttcttattagcaataaaattaaaactaataataaatttaaatgtttctatcattgacacttttgtaactttggctcaccatgattttatattacataattgatttaaaattaaagttataatcggaaacattgctgattttcatgttaaaaaattaattacaatatttgtcaaatttttgtattgcaaaataaatcactaaaaattaaggaattgttggatccgggcaaaggattttacatcaaagatgaggacaaagtcacattggccattgatgtcattgtggatgagccaaaaactgagaaaagcatttccgatccaaacaaatccaacggcacactttcgacggaaattgaaaaactatcggaatttgcacgagaaatcgtttggagtgaacgtaaaagtgaaactgtgtacataaagagaatgccatggaaaatattggcaaaaattagaaagaaaaatgaaagcactgagaaatggttgggctttttacttttgtgcgatgcttctaaaaaaggtttggttatcaaattattaatagaaataaaaattattttttctataaaattggtgtaattaattattgaaaaaacttatgtaaacagtaattttttaacataaaa

SEQ ID NO: 59307 - DNA, 815 bp, Heterodera glycines
atgaatactaccaaaaagtcagaatttttgcatatttttacttataacttttttatatgtcggtatatccttgtggtttttgggaagccgatagagcttattaagagctttcgaatgatacaattattgttggatttggtcaacaaagaaaagagttatgatgctctaaacttggttcagaataaaccggccagactaaactgtcccagtccggtacgaaagattgcgaaatatatacgaaaaaagtccaaaatatgtataaaaatatgtacatatgtaatatgtagaaaaacccaaaatatataccaaatatgtaaataaaggtcccaacttttgttcgcaaaaacaaaaaataaagtgattttcctactattcaaagcatgtagaaaccagaaaaaaatatgtatttacataaaaaacaatccctagtaataattatataattttttataatatttttatttttgggatttttctctccgttgtttgcactacattgatcgaaatatcaatgctttgatcaaatcagaatcctttttgcaaattgatcaaaatttgttgtgtgaaattctcaaaagagatgagctgagaagcagtgaaatcgaaatttggaatgcggtaaattaaatattataaattacaattatttattttctaaaattaaggcactccgttggtccgacgaacagtgccgtcaaaaaggcatcgaatgttcggctgaaaatcgaggcaaaattcttgacccaatattgtccaacattcgttttccactcataccaaaagaggattttacaaaaagcgttggtaataaataa

SEQ ID NO: 59308 - DNA, 780 bp, Heterodera glycines
atggactcgaacaagagcttttacaacaaagcagaggacaaattggcattggccattgatgtcataactgttgatgagccaaaaatggagaaattcatttccgatcccaacaaatccaacggcacactttcaatggaaattgaaaaagtgtcggaatttgcgcgagaaatcttttggagtgaacgtaaaagcgaaactgtgcacatcaaaggatttccatggaaagtatgggcacgaaaaagaggggaaattggaagcactgacactgcgaaatggttgagcatttatctattgtgtgatgctactgaaaaaggtgcaaaattactaataattaatatatatattaaaaacaattaattaattgatattgagcagaaaattggagttgcaaatgctcgggaaatgttcgaattgtctcacaaaagaacggagtgttggacgaattcgttgaccttatttttgacaataagaccatgttgcaatgtgtcgctatcatttcttttgctgtgagtgacaattaaactttcccttaattgacccaattatggaaaattaaggaattgttggactcgagcaaaggattgtatgacaaaaaagaggacaaagtgacattggccattgatgtcacagtgaaagaagcaaaaacggaggacgaaacataaatgcccaatatgatctggcaaaaatctcatcattgaattatcatcctatggacctgctgtgtttagcttctttcttattgtttatcttttgggttttacaatattgatttatggatta

SEQ ID NO: 59309 - DNA, 1616 bp, Heterodera glycines
atggccgatgaaattcaacaaaaaattgttcagggaattggtccggattttttttctgtgacctctgatggatggtcgcaaattacaaaatcacccgcactcttaaggttctctattccttttcatagtttataaaaacagactttagtgttactgtacaccatataaatcaacaatttgtacacgccgattttgtacttgatgtgattccaatgacaaatcacacaggagttgacatagcggaagaaattggaaacgctcttcggacaaatggattaaacccagaaaaaattatttgtttggttcgtgacaacgcaaaaaacatgataagggccacaaatattttgaacttgaataggttttacctaatttttgttttttataattatttttttaagctttcaatgtgtgtgccattttcttcatcttgttatgggagacgtattgggactgtctgagttggcaggactcatttccaaaattcggtcttgggttactttttttcgtacaagtaaaggcctgtccttgctccgcgactatcaagaaaagacaaattctaagccaaaaaaactcacaatggtttcataaattattgttttcacaattattcttttaaattaaggcctgcccgacccggtggaactcgacctttgaaatgatgatggcatttcgtgaacaaaaaaacgttcttttaactattgaaggagaaagacgaggatttggtgttggctcatcaaaaaagtcgcgcctagatattgtccctgaaaatttaccaaatttggaaattaacgactttgattttttgcgcgaactgtgccctttattggaaattaatcatcgagagactttaaaagcaagtgaaatatgttaaaactaaaacaattgtaaacaatttcagttttctaatgaaaaatcgtcagcatcaaccgttatttcgactataaaaagattgcgtgattttttgcaagaaaaaactttctcaaatcgcattttgggcgtttctagggtcatagtggagtctttaaatgaacgagttcgtgaactttgcagcaacccactgttgcgagtcgcaatgctacttgatcctcgatttgcttacacagaactgttttctcagcaaaattggagggttgtcgaacagcaattaatcgaatttgcaaaagagagttggttgaattattagaatatttggtaattaaaatatgaatccctttagaattggtctgcccaacaatagaaatggacgataattttgatgtgaacaactttggtcaggttgaatcaggaattgaccgttgctgatcaagaattgagtccaagcagcaacgagagcatagagaaatgtattgacgattgcatcacataaatcggagtaggacaaaacgtcgtcagccgaaacgtcgtcgaacgaatttttcgaccataacttttttctttctcaaccaaattaaacatataaatactttattttctttttagatgatatctgggcccaaccaaaatcaccatgtggtatttctattccctcaacaatttccggagatcatgactctgattttttatcaaaaattgaggctgaacttgcttgttataaggcaggccaaaggatggagtga

SEQ ID NO: 59310 - DNA, 269 bp, Heterodera glycines
cctcaacgggttctgctgttgttgctgctagtacggtttgctaaacaaattcggggtcgattcgcctcctcttttagagtctcgcctcgctttgttccatcggttgctccttctcccctattccgtccccgggcaaaaatcgcccttttatcagctccaaattgcttctgtagaattcagtcacgaattgcgacatgtgtacagtgccctcaatttgtattggcgtaatttgcggagtatcgccgggctaatataaaaagaaaatgaaa

SEQ ID NO: 59311 - DNA, 296 bp, Heterodera glycines
atggtggccatcatcgctttctccagcattttcggtttcacccgcgcgatgggaacgatggaaggccgacggagggaagtgacgaaacaatcgcaaaactcagcggcagagggtaaagccaacggaggagacgcattcgccacaaatcggacatttcagaagcccttgaaagagaccgatggctaacccactttttcatcgtccttctgatcggcgaaatacttctgatgctaacgatcgcatgcatacgctgtaatttgaagttcctaaaacagtgctttcgactcgacccctaa

SEQ ID NO: 59312 - DNA, 484 bp, Heterodera glycines
atgccgggttccgggccgggttgcattttcaaaaacgaccgggttccgggcccggcctctcaaaacccggtcaacccggatttccccaaaaatcgccgggccgggttgccgggcccgggaaaacccggtaccgggcccggcccggtccggtctctacttactattacctgttttagttctcgaatatatttggtttgaaaatattgagattgatgccagtgacagtctcaggattagaaacacttaattcgctgaatgtttatgaaaatatgtattaatttttaaaacagaattcaggcaaaaaagtcgcgaagacaattaaaaaaagggagaaaaaggaactgaagaaattggaaaacctgaagatgaaggaaatgaagaaaaagcagaaacggagaccttagttgttgagcacagattcggaggaggagaataagcgaagaaaaaagacgggaaaaagggagaaaagtcactgaaaattata

SEQ ID NO: 59313 - DNA, 382 bp, Heterodera glycines
atggacaatccgtcagtggacaatccgtcagtggtcaatccgtcagtggacaatccagcagtgaaggacaatccgtcagtaatggacaatccgtcagtggataattcgtcagtggacaatccgtcagcaaattttttttgagcaatgatcaaaaaccttgcgaaaataattgttaaatataataaatataaatttttttatagcttcttaacatttctagttacttcatgcttcaattaattgccatatcgaaaataatcaattaattcttttttaaaatgattattcgtaattttttttaaataacacaaattattaattcaggattttagcgacttaaattaattttcacatgattacaaatagagatgggtgttttaaa

SEQ ID NO: 59314 - DNA, 95 bp, Heterodera glycines
actgacggattgtccactgacggattgtccattactgatggattgtccactgacggattgaccactgacggattgtccaccgacggattgtccgg

SEQ ID NO: 59315 - DNA, 136 bp, Heterodera glycines
atgtataaaaaattatttactggtgcagcaagtattcagtattctgtccttagatgacaaaataaacaattctgaatttttaggtgagtttttaggatcaatttgtgtaatcttattggaattttaaaaaaataaa

SEQ ID NO: 59316 - DNA, 661 bp, Heterodera glycines
gttttcggggcagtccccccgaaccgatgcgcccagatttatggggagaccgaatccttcgggaatagcttccctatagcctgtactttaattctgcgttggatttttgctccccataattgtttgagtaccccaaacggacacttgaaaaaatcgatttttttgttttcggggcagtccccccgaaccgatgcgcccagatttatggggagaccgaatccttcgggaatagcttccctatagcctgtactttaattctgcgttggatttttgctccccataattgtttgagtaccccaaacggacacttgaaaaaatcgatttttttgttttcggggcagtccccccgaaccgatgcgcccagatttatggggagaccgaatccttcgggaatagcttccctatagcctgtactttaattctgcgttggatttttgctccccataattgtttgagtaccccaaacggacacttgaaaaaatcgatttttttgttttcggggcagtccccccgaaccgatgcgcccagatttatggggagaccgaatccttcgggaatagcttccctatagcctgtactttaattctgcgttggatttttgctccccataattgtttgagtaccccaaacggacacttgaaaaaatcgatttttttgtttt

SEQ ID NO: 59317 - DNA, 264 bp, Heterodera glycines
ccaacgcagaattaaagtacaggctatagggaagctattccggaaggattcggtctccccataaatctgggcgcatcggttcggggggactgccccgaaaacaaaaaaatcgattttttcaagtgtccgtttggggtactcaaacaattatggggagcaaaaatccaacgcagaattaaagtacaggctatagggaagctattcccgaaaggattcggtctccccataaatctgggcgcatcgggttcgggggggactgccccg

SEQ ID NO: 59318 - DNA, 1385 bp, Heterodera glycines
  unsure (1)..(1385): unsure at all n locations
atgcggcacggcacaacttttttccaacaattgcttttgtgtgctatttccgtcgttggcattttccgggcccaatctatggactttcggcaccagcaacagcaacaaccacagatgagaaaccagcagccttccgctggaggcattgttggagttggcacattgcctgcggcagacccggcggcacaacgccaacaacaacaacatcgacagccaaatttgaaaaacccttacgacccaatgttgttgccactgtatggccatcaacagaatcagcagcagcaaaatgctcatggcatcatcaacaaccgcaacaatggcacatggagtgccattgggagcggcacatttggtcaaatggcaccggctgatgccagccaaaacgtaacaacaatggcatttgggcagcagcagcagcagcgaatgtttggtgccggtgggtcggcagagactggtggcggtggcgttggccatggtcatgggtctgtccaagtgcaggtgggctttcaacagtgaagataatccgagtcgaggttctcggtccaggcggccggaccgagaaatttaggatatttcttttgttttcgagtcatggaaatttttcgaccctcgagatttctaaatttatggcggattaaatttttgaaaaagtaataatttgaaaattcaaataaaaaaatgttaacgcggcgttggaaaattctgaaacttattttcagcccctgctttcacctgcttggcttttcaggtccaactccgctcatacgctaaccccggatttcggctgcccgactcgcgtctgtgcacatgcccggcgggcaatgagcgttgcttacatgcgagcccacaacgcaacggctacaactgtctgacgtcattggctgtgtttgtgctgtcggcagagtaaggccataaagtgcagggctcattaggggtaattaacgcctacttgggcaattaatgaatttaggcttgcttattccaagcaaattaatacattaactctggtgattaaaataaattaataaatccatggcacgggctcatttattttgattagtcggaagtgctaaatcctaattacctaattaaatttgccgcacatacgcagtaatacaaatttactattattaataattgtttttttaattagttttcgtttttcggtttgcaatttttcctaattgcctggggcattgttttcagtgacaccattcatttcgaggaaacgccgtactttccgctgaacccggctggacagcttggacaacagcaggagtttggcactccattgcgcttccatctgaactctngaaccggtgggcaacacgtattcaagactttctcgacttaatttttcaaaacagaaaatttttttaaataaa

SEQ ID NO: 59319 - DNA, 1993 bp, Heterodera glycines
ttggaccgagagtctcggtcggagttcattttgaccgttttggccgaagacggcggagaaccgccaaaaaatgcgtcccttagggtaaaaatttaaaaacgaaatgttttaaatttaaaaatttcagataaaaattcacgtcaaagacatcaacgacaattcgccttttttcccacaaatgctttatcgaattgaacttgaggaggacacggtccgcttccgctgcttctctttttgctaattagtcctaattaagccccgcggccattcgctgctttccctgcgggcaaatgacgcggacgaaaacgactcgcagaagctttcctatcgaatcgggcgacaaacgccggcggcgagcgatttgttcgcattgaccaaaatgggggcagaacaggcagcgaattgacatattttaaattagttttgttttttaattgttttcatttttaagggcgccgtcctttccctggcgcgcgaattttcgccaaaagacgaggaatttttgttggaaattttggccaccgacgaagacggactgagcggacaatgcaatgtgtccataaaagtgaaggtgggcacttttaaacatacaaatccaagagggatttatttattgtaaatccgcaggatgtcaaccgaccccctcaatttgtcccccaccaatttttgctgcgaatcgccgaaaatgcgcccatcggagcgccggtgaccaaaatggaagcgacggacgaagacagaggggagaacgcacagctcaaatacacaatgaattcgacggaatttgggtgtgaaagttgaaagccaaactcaaaataaatcccaagatttccaatttcagaattgaccctctgaacggaatggtcaccgtccgcgcgcagttggaccgcgagcggaaggcggtgtacgcggtggaagtgcgggcggaggacgcgggcaatccgccgctgagtgtggggacgacgctggaaattgagctggacgacggtgggcgaattgggggggggggggagaaacgacgagcaaatcgagacgaacactcagtcccggcttggaccccgtttattgatgcattttaaattttaaatgcttttccgtttgtcaaaatgacatatgtcccctcctcctccccaaattcacagtcggatgggcaaatttggagggcatctcccctttactgccccccccccccgtctttcgctttgccttttgtctctctctctgtgccattttattcattcatcggttacttttgaatgggagcagcgaagcattgacaaattggtcatgaatcggtaattactccatgaaaaatattttttggttcaaattccaattaaatatgaaaattcactaaattttttaatttatttattttcatttcattttattgtctcccattaatttttctctttttttttgcatatttggggtaaattaaaaagagaaattaagtgccaatgccaacaaattttagtgggaaaataagaagcaactaaaaatgaaaaaaattgtggaaaagggaggcaatacggaataaatgagctgtgaattaggaggagaaaagaagaaaaatgaaaataatatttccgaatttaaatggataataataaaataatatgttccaatttcagtgaatgacaatgtcccccgctttttgtcctcggaatatcgcgcgacaatccctgaggacatttcggtgcccatttttttacctttttgccatttcttagccattttggtttaggtcggcacttcatttttgcaagtgaacgcggaagacccggacgaaggcatttttatttgtttttaaagctacaaatattttggaattattccattccaatttttcctcatttaaggtgctaatggccaaattgaccatttgttggactccgacgacccttccgttcgcttgggccttttccgattggaccgaacttccggcactctccgcgtcaaccaaccgttggacagggaaaacgtgtcaaagtag

SEQ ID NO: 59320 - DNA, 736 bp, Heterodera glycines
atgagacaatcgaaaaagaagaactttaaatttgcaattgttttttgggccattttattttttttggcactaatcgaaaaatcaaacggaggaaaagccaaaaaagtggcgaagcaaaagcaacaaaatgtgaaaaaaagcgaacgatcggcggagggaaaagcggcggcggacagtgaaacagtcgcggagaacagaaaatgtccggaaaaaggcgaaatggcagaaaattttatgggtgagcaaaaaaaaaaaagaaaaataatttcaaaataattttaaaaaataataaaaataatttaaaatgaaataattgtaagtcacgtcagcagcagatgaagacagcatcgaattgattggacaattcaaaaaatttattatcggcgaataccgcggaacactttcggcacaatttgagctaaaattccaagaaaattcgctgatttggcatttcacgcaaaaaatttccgagctcctaagcgccgacaccagtcaatttagtggaaattcggtggacgaattggaggcaaaaattgaacactttcgaaataaatgggcacaattaaaaaagtatcaaaagaatgccgacagaatgtttgtcttttgcatactgtacaaatacagtacggaaatgatcagagaaacggccgatttgaaaatcaacgattgggaccaatttctaaaggggaacagactgagagaacagattttggtcagtgatttgagaagggtgtga

SEQ ID NO: 59321 - DNA, 612 bp, Heterodera glycines
atgcttaaggcctggattttctcccagacgaaattcccgggcgatcaggatttgaaaattcggaccgtcaattctgcagttgtctctacgagtaatcgagccgattctcgtatgaacccgacggttgttgtggccccgaatgttaccgcaagagatcgagtcgatccttgtcggattggaccgttcccgccccaaaatcgccgtggcacttcgactcgccatcatccgtatgctggacaatggcgcaacaccaatcgctatggaccgccgatgaatcgtcgttccgatccgtccgactctcgcccttttcgccgttgactgctcgtggacccacctttcgatggacgagtgatgtttttgaggcgaggacgcctctcgagattgttcgggggtgttggagattttaatttaattaagatatttgttttaatttaaaattattatggcattttatctctatttattttatgtttgttgacctctttaatttatgtttggtacattttttttcacttctcattattctcattaatttgttttccaaaatttcctctctaaatttcgttctcaatttgcttcacattggtgatctcctcggacttcaaaaataaa

SEQ ID NO: 59322 - DNA, 49 bp, Heterodera glycines; identical to SEQ ID NO: 51181

SEQ ID NO: 59323 - DNA, 1221 bp, Heterodera glycines
atggaaactgctgaagatggatgcacaaaacgggcccaaaatgagaaaaaattgttgttttatgatctcatcgtgggtttttgcagatttcctaaaaatcctaccaaaaaaattccgaaaagaaaatctggaaaagaaaaaaatctttactgggcgccaaaaatggcataaagtcaaaaaataataattgaagaccagcaaaaatagttatcagcaaaaatagttaaactaattcatttaaaatatatttttattaaatttcatatttagttttaacaaccaacaaaagttacgtggcagttataatttgatggcttgaaaattcagttcattaagaattttgtttattcagtctgattaacggattcattaagcactaacagacacattggtaataaatgggcaattgtttaaataaattttaagttttttgatgaaatttatgcctggcatttacagctaagcaaatttaagtgattgaaaaagttcaaaatttgcatctataaaatcagcaatgaaagaaccaattagcacattttgaaattggcatttagaaaccagtaaacaaaatgcgaacccaaagcattttctcaattttcttccttctgctaatttgtgaaatgatcaactcattcccagtacgttttttaaaattaaaaaaataatattaagtttgggttttaattaatttttaagcagtttataccaaatcacattttggctttgaatggccaaaaatgttttgcctgcctggttttgaggatacgtgcccttttttctcggtttctcgggtttttgcctggtttgttattttcatcgttttgctatttttcattcggtttgtcagattatgaaaatgtttgcccggtatttgagcgcgtctagcaagtttttgagatttggtgatataaaccgttttttgtgagaataacgggtccccttaaaaattcattagaacctaattttcccccatatttaatttcttctgaaatgaaaatgcacaaaaaatgatacaaaaagggctaaatattttagccatgcaaagccaaattatgaaaattatctcattttatcaaaagctacatcaataattagtagatgcatgcgtttagaatataagtattgtgcttaagtgtaaaattaatttatttcagtcaaagtcgagtgaaagcggcgaaccgcctgctaatggagcagaagtcgcgcaaatccgaaagaaac

SEQ ID NO: 59324 - DNA, 546 bp, Heterodera glycines
atggtgcagcttccatgccatgttcgtgtccactttatcaaaaatatgaataaacaaattttgtttggcccttttttgtcaacagaaaaagcattattgaaaaatttgatgaatttggtaggtttttgtttctctttgtttaccattttcaattttgcttcgagaccggggttctcaagcattaaaaactttatgaggatttaagagtattagttttccattccgtactattttagtaaatacggtaggtaatttacaattcgatgaacaatatttaaatttatatatatttagtgtttttttaattaggacatgaggatgactcatgctgggtccattctgagtggatggatgcgcaagaaatgatggccaatttcattgagcaacattcggtcggttcagttctctcggcatttgctggtcatcatgtgccacaacatattgcaaatttgctcaatgagaatgaagaatccacgcagggtcaaatctttaaaattaatatttagtttattaaaatttgacattttacttttaatataaaaaaaa

SEQ ID NO: 59325 - DNA, 176 bp, Heterodera glycines
aactgacacttttttgagagctgattaatcactgagaaatagcttataaatatcttctaaacatctagggctttcgaatgataccatgattgtgaagtttggccaacaaagaaaaaagttatagctttttgaacattgctgagacggagttggccagacggagttgacccctaccg

SEQ ID NO: 59326 - DNA, 49 bp, Heterodera glycines; identical to SEQ ID NO: 51181

SEQ ID NO: 59327 - DNA, 4042 bp, Heterodera glycines
cttaagccgtgccgaggacgggtcagagtcgtcgtcaacaaaaagtggtggtgactcatccttgccgtccccgccggcgcttgaccacgagaccaccattggttgcacattgtgccaacataaacagcaacaacatcaatccgtcgccggacaaggccgtgccagcagtgaagaaacactgaagcgcggggacagccgactgaccgtgccgagagtgagtaataatgccgtgggaagagggaggacccctcaggggatggatgacacgatttggggattttccaatggcatcgttttgctcaataagtgccaataaatacgttgactaatcttttgttatgctaagacaggggtagagccgtgcgtgcacctgagcaagatttctggtaattagtgacacaattaatggaaatatggcaaatttttgaaatttttggaatttcatttgaaaattgcgcaaatttttaattcttcaaaaaagggatgctgtttaaggattagatattggggtcttttttaaaagcttcttaaaatttggtgagcttctgatcgtttctagaataactgtgggtaattagtcaaattataaaaaataattattaaattcctgttaaattttgctaaaatttctgaattttgctccacggcgggaatcgcgtcgactctctctcggacgccaatttggaaatttttttttctcatccctatcaacagcgtattgagaaaaccgcaacccgagatactaatgtattaaaactctaaaaaaaaatacgcaaaacccagaagttaaggggtatcgaaaaatttctattaaaatttgacgtctcattgttagccccttctcttcaaattttcaaaaaattttcaaaaattttacagggctcagcgtcctcttctcagccttccccatccccaacaacagcacgttacacggaaacaattattcacagacaaactgcgacagcagctgtacagcaacagtttgtcgaggtgaacaggcagctgaacaccgttgtggcgacgacaaaaggcggcggcacgtgttgccaatgcgaggtgaattgtgtgataagtgtcggataattatcatggcacaatattggaccaaaagttttggcattttaatcaatgttacagcattgatcagagatgttaatgctttttccaattctactaatgaatatagcaaaaaaaaaaaatatcttttgggtcaatttagagatgaatcattatggctttggcatttcaatgcttttcctttttcattatggacttaggcatttataactctttttcgaattttctcggcacaaaaaaatcccacttttaattgccgttttaattgctttctaaaatttgccaaggaatgtgtgctggcgtgccgtcgtgagcagcaacaactgcagcacgagcaacagcaacaacttgccggcccgtccggaagcggcgccgggcgatcgtccggcaccggcgttgccagcggtgcgctgagcattgcactggcaaacgcgcaacttggcaccgccagcagcggtccgaccacgtcgagcagtgcgggcagcggtggcacaacgcagcagcaacaccaccatcatcagcagcaacaagcgcaacacatgatgatgtactgcaacagcactggtgccggaccatcgccgctgatcagcaccaatgcgcagaccattgaggaacagatcaagcagattgaccgcatttccaaggtgggctgggctgcttgctgctgatcgaagtgatcacacatatctttaatgctctgctggaatcttactggatttctgtaatccagtttcttggatatataaaattggacagccattaaagtgatcaattattgtaagaattaaatgaaaggggacatttgtccaaacaaaaatcaacggtcattttgctgttttttgatcagaattggctcaataagtcctgttttttttctcaatactgatgtgatcagtcttgaaaatttcggtaaagtacgatccagaaaaccattccatttaaagttcaagattaaaaaacaattttattatcaaattccattaaaatttccaaaaaatttcctcggcggcgcctattagcattgtcagacccgcattttatcatagtttattggtaattcaactcgaaaatggcaaaaatttagccattttttttttggcggaaaacggctaaaaatcccaaatttttcttcactactttttataaaaatttattgacagagttagcttttttttcttttaaaataaaagaggaaaaaattaagcagtcatttcgtgccaaatttgttaaattgcatcttcgcgtgaaacgagaaaattaaatttgtcaaaatgcaatttttcccccttttatttattgcacaaaaacaaattaagtcaattggcggtggcacccattgaaaaaaacaaaacaggaaaaatgcaatttgccctgagggcaaacgctaaatgccactaaaatgaaaaacatttatgaatgaaatttattgcctatttgagtgtattaaagaactaaaatagaaaatagaacaatattaaaaatccaaaatgaaataaaatttgttaatgaaatttcccaaaatatttgattaatttttaattaatggaaaaaccccaatttcttttgacaaaatgctaattttaaagtccactaattgcatttcaataaaaaaatatacattttttaaaactctaacgatttttattaattattaaaaaaataaatttattttggttttaatccatttaaggaatgtgataattcgcgcaaaactttggagcacatcaaccgtcggcttgacgatctgaacgacgaagtgcgacggtaccgcgaatttcttggccacgaaaaagtgaggccaaaaaatatattgacagaattgcagacactttgaaaacaaatggggagagagcctaattaactgattttgactaattaattagctattaattgagatttgtgaattaactaaaataattataattattaaaattattaattttaattaattaactaaaatattataatgatttaaatccgagttaattaatattcactttaattaattatttattaaataagttttattaattaactaaaataattgtaattatttaaatcctattcaattaattatttattttaattaatgatttgttaattaagatttattaataaccaaataatcatttaattattgatttgaaattattttaatgaatttttagtcataaaaactaaaattaattagccctaattaaaattggcttttaattttttgaaggcacgtcgtgatccgacactgtacaaaacaagcaccgcagaaccattaagctcgtacaatgacggcatttgtcggctaatcgactcattgacaacacaactcacaatggtgaggaaaaatgcggaggtccggctcgatttagttgaaattaaaaattctcgaactttccaaccgaataattcccgaaatttggtggcctgtgggcatttgattgaaatttcattttccaattatatttaaagcatgtgcacttagcattattttacatgaatcacaaatgtccctattttttcagattttacgctaaaaaatttcataaaataccaattttaccgcgacgatgcctaaataatagcatggaaattcatacaattgacatcttgtactacttttttaaattttcaatagaaaaattagcaaaattattttttagctttttctagaaaaaaaaaatcattctaattttgtggaaaaaaaattctgatttattaaaaaaaaattttacgaactgccattgattaatacgttaatttcccataaaaatttttaataattcgttttcaggaatggactgaaaaattgcgttccatacagaaccagacgattgccaaatcagtagctgaaaagggctgatcagagatgtaaaaacaaaaaaaattgacgaaaagaacaatcaactaattaattaattaattaagtaataattatgtgtattttatgggttgggaggccgcctcacaa

SEQ ID NO: 59328 - DNA, 504 bp, Heterodera glycines
atgaacgtggaaggcccaaccaaagacacagagtgttcccgaaaatgtgccaaagcatcgtttgccattggcacatccatcaaaaaacagctgagggacttgcggaggatgggctgtgccgcggcaaaaacacaatttgccgtaggtttcttagttctttttaattaaatttaatctaatttaattatttttttattaaaatttaaaattttcttaatttttaaggcattggaggattgcctaaagggcccagcacagtatttcaacgacataagccaaagaagcagcagcagaagtgccaacgacgacgacgagcaggacgaggaaatggcaaaaatgcgggcactgaagaagggcggaggagcagcagcaggaaaaatgaccaaaattctttgaaaattatacttttggcccataaaataattagggatggattaattatttgtattctttccatttgaaattaaaatttatttgtattttatattaaaatgtaaaaataaa

SEQ ID NO: 59329 - DNA, 409 bp, Heterodera glycines
atgcttccaaacaaatcagcaccccgcggagtgatttgcccgacacttcctcccatttgttgcgcaatgacactggactggcgtcagtgtgagcagcatcgaatcggtgaaggtaaattatggctaacaaacccaggaataaattcctaaagtagcgattttgatgaattttttaattgtaaatagaatgtcactaaaatttgaaacaaatccgctagagggcgactttgaacaacgtgttttcctaaacatgctcctgatttttttaaactaaaacaatactgcttctgtaattttaggtggtgtttacgtgccattccccggcggtgaacaatcgacgtgttcagaccgccaaaatcagtccgtcttcaccaactgttttgggaaccggaggacgggaaaattttga

SEQ ID NO: 59330 - DNA, 143 bp, Heterodera glycines
atgggtaggaagaagaagaagccgcaaaagccatggtgttggtaagtcgaaatcaaattagttttgatgggcatcattccttttgtttaaggtattgcaaccgcgaatttgaggacgaaaaaatactcatccaacatcaaaag

SEQ ID NO: 59331 - DNA, 55 bp, Heterodera glycines
atggagagagaaagcgaaaagtgtccatttggtggtcaaaatgaaacaccaaagg

SEQ ID NO: 59332 - DNA, 1274 bp, Heterodera glycines
atgacggcaagcggtggcgtcgcaaaattgggaggacggtaattagcaaaattaaattaatttttaataaatatgcattaatttgtggccaggcgtcaccgacggaggccctattcgtattacgggggaatgggcggcggtggtgcgagtccatttttggtgggttttcttgatttattttattttaaaaaaatatattttaaattttttatctctaatgattccatttgctcttgattttatcctggattcccctgggggtgtaaatttttttgagggagggtcgccggcgaagggaaaaaaattaatttaaaattcaaaaaattttcccggcggcgcctttcggcacctccgaatctcctcccccccccccctagttcaccaaaatttttttgaaaaaagcgcgccgcaaaaaaaggtttaaaagcaaaaatcgtttacattgccggaccccttcgcaaattggccggccacttaccctcgcccttcaattagaggctttaattagtcattaattttgtccctgattttgtgcccttctctcccctccatttgaactacccccaccaatttttaggcttcgtccgccggtggaggccaccgcggttggctgtgccgcgcgttgcactgccggaggttgaagtccgtgtgcttttttttgcttccattaaaccaattaattaatttaatgagtggcttaattaaccgtcataaaataggaagcggcggatgccacttagccaaaaaagcttttcaaattaataaaattactttaatataatcgatagtttaaaagctgcaaatacaatagaatagaatgcttattagcttttcctaatatagcatagaaaaattgattttaaaaaaattaaaataatttaataaaattaattttttttaaccattcacttcaaagcttcctaagaaaaagccaaacaattaaaatttataaaaaaacataaatttttctttttgttcagcccgtccaaaatcgacaggctttcccgctcatgtttccccattttgttcatcattttcaatttggtctattggtaaaaataaatttttttttaaatttaattataattatttattatgtttatatttttaggtccgctatgacaataatgagtcagcgcgagttggagaaggtcgaatttgtgccgttcaccagctgaccaaaatgccaccatttctttttctcattttctccacaattgctcactcatttttttttacatttttgtacattttgaagaattttatgatcaata

SEQ ID NO: 59333 - DNA, 336 bp, Heterodera glycines
atgaaatggatcaacggccaacgggacaaaaggccaaaatgcaatggatcaacgggcaatgggacaaaaggccaaaatgcaatggatcatcggccaatgggacaaaatacaatggaaacggccaatgggacaaaaggccaaaatgaaatggatcaacggccaataggacaaaaggccaaaatgcaatggatcaacggccaatgggacaaaaggccaaaatggaattggtcaacggccaatgggacaaaaggccaaaatgcaatggatcaacggcaaatgggacaaaaggccaaaaataacatggcaaaggccaatgtgacaaaaggccaaaaataa

SEQ ID NO: 59334 - DNA, 331 bp, Heterodera glycines
atgcaatggatcaacggccaatgggacaaaaggccaaaaagcaatggatcaacggccaatgggacaaaaggccgaaaagcaatggatcaacggccaacgggacaaaaggccaaaaagcaatggatcaacggccaatgggacaaaaggccaaaaagcaatggatcaacggccaatgggacaaaaggccaaaatgcaatggatcaacggccaatgggacaaaaggccaaaaagcaatggatcaacggccaatgggacaaaaggccaaaatgcaatggatcaaaggcaaataaagaataccaagaggattttgaaatttttattaattgagtta

SEQ ID NO: 59335 - DNA, 1588 bp, Heterodera glycines
atgccccgacgactaccgaaagctgagaaatttgcgcaagaagcggcaactgctggaacaacaggtgaaagggggaggggcaagccaaatgagtgacttcctacgttttcagctcgattacgcctcaatcgcatgccgacagctttcccattcggaaagccaacagaatggaggcacttcggaggaggaggagggcgaggaattctccgagacggagtccgacatcaccaacccgtccctgctgggcctgtccatggaatgttctcccgccggcctgggtcgtaagcactcgttgcctcggggcgctcttcccccgggtgacttcgccgcccatccgtcgtccgcttcttccctcctgcccaacacttcctcggcacttttcaattccgcttatccttggctgcatggggaaatctttccttcgccgtcctcctcgtcaacttcgacgacaaacaacgaccatttgcagggggcacagaacggaacaacaaacgccggaggagaaatggggacgacggacagaacagaagggacgcagcagcaccacaacgaatacggagggggacaccaccacaaccaccatcacaaagtcattagcgattattagcaacaaatggtgggccatttcagattcgaagcgtagcgaacgcaaaaaaaggtgcacagccttcggccgatggtttcttccattgtcgcctttgtgagaagaggtcgcttttcttcgtccgttttcccccacaattccccccccaaagttcagatttgaaaaggtcaaatctctgaacgcgcatatgaaatcgcacgcgatgaaagcgcgggcggaggccgaagtgcaaatgcagcacaagcagcagcagcagtcgacgtcactgccctttccggtgcctaccaaaaaggaagcggcggacagcgcttgttggggtcgttgggccgcccccctcggccccgtcgcttcgctcaatctgacaagctcacaagcagctgttgcggctgctctgaacaacctcaacaggcagttccagcacagcagggccaagcggtgcaagaagcaatgggtggcataatggggagcaatttgctgctgaggaacatgctgcagtacggaccggcagccgcagcggccgctgcccaaggcgggggcgccgcaacgcctgggggcacggcatcgcagtggaccaccacgcagcacttcaacgcgtagcgaagcggctccgctgcacatgctggaacgggatgacccaccgactgacaaaacgcacttataatttaccacccttagggggattcccccctttggttttttactttccttttcccttctttttgctccaccggtgatttgccctccctttttagcacaatgttcgctattcacctctctcccccattttcctctctttcttgccctttcattcttttgttttctatttcttcctttttcccatttactgcttctgtccaacttcctctccctttcttttgtttctcatttatccatttacaatcactcagcagagccactcactatgtcaattaccatcccggttaattaatatacaaaataacgctaataatcaaagttcgttga

SEQ ID NO: 59336 - DNA, 1599 bp, Heterodera glycines
  unsure (1)..(1599): unsure at all n locations
atgtggacagacagtcaatgctcagtcgaacgacttcgagaaaacaagcgccaagatcgatttgtggtaaatcgattacaaaaaatccgagaagcgaacttccaagtccgacacgtcagaaccgactcaaatccagcggacatggcatcaagaggagcggatcttcaatgccttcgatcatcactgctttggcactttggccccgtttggctttcgaaagcagacaaatggccaaaatcaaacgtcatctaccggcccggagatgaattcaaagaagtggaagagccaccaatcatcgaactgacaacacctgttcatgtcgaagaacagttcaaaccatcaatccacttcgaacgatttttgaattggaacaggctgaaagccaccgcagcacacgctatgcgcttcatcaaaaagcttcgcacaatcgaaaacggcacaattagtgaaccgcatcaaaacaacaaaccactgaccatggcacaactgcaacaagccgaaaattggatcttgagagaagcacagcggcttcattcaccatccaacgaccaaatccgagaattgcaactcttccaacaagaaggaatttggagatgcggtggacgactcgaggaagcaccggatctgccatacgacagtaaacacccaatctttctgccgccacacgcatggataaccaagctcatcatccggcattatgacaaacagctcaaacattgcggtccgagaatactcctgtcaacattaagagagaagttctggataccacgcggacgcaaaacagttcagcaactgctcaactccccgcaacacggatgtcttgaatgtcgtcgagaacgagtcaagccgtacacatatcctgaggcatcggatttgccaaagggaagagtcagcgaagcacgaccattcgacaaaacgggagtggactacttcggtccactcaaagtcaaacaaagcaatgacgtggtaaaaatctacgtcgcactcttcacctgcttggccatccgcgcccttcatttggaagtagccgaagactactcggctgaagcattcctccgagcctttcggagattcacggccagaagaggcataccatcacttatcatgtccgaccaaggcacaaacttcgtggcaggagcaaaagtcatcaaagaaaactggaccgacacgttaatgccggaggacatgcaacaacaaatggcgcaaagcggaattcgttggatttttaacacagcccacgccccttggaaaggcggtatttgggaaagactcgtcggcatcaccaaaaacgcactgcgaaggacagtcggcagaaaccttctcacattggacgagttcggcacaatgctctgcgaaattgaagcgatcatcaacaatcgaccactcacgttcgaatcggatcaggaaccgatcaaagtgctgcgaccaatcaacttcctgataccatacagcaaagcagacaacaacttcccaatcattgatgacgacacaaacgatccaacatacgagccaaacccaacaaatcgcgacaaaatggtggcaacactgagccacgttaatgctcggctgaacaattnctgngaantttnggaaaagtga

SEQ ID NO: 59337 - DNA, 519 bp, Heterodera glycines
atggtaatggcaacattaaaatttgtaaagcttttgacccgacgatttgatggccgaaggctttacggacgaaaaggaacactttctgctggagggattcgaaacggaaataagcgacatcgactcgaagtgaacatttaccatgtgatataaagggacaataaaaataattagctaattagccaactaattcatttcaagaattgtaacgacgaacatatccctgtctgcagaagttctccattgaggtgaatgaaatttgaatttgaagacatttaattcaataaacttttagatccccgacaattacataaccgaagaaaaacgatcaccacaaaagatttttgacattgggaaattgaatttggaaggcaaattctcgggccaacatcgagattgtattaatcggacattttgttgaatttattaaatacaaattaaattttagaagtaaaataatcgataggatctgtccgtatgtggcttcattcaacttaaaaaaactcaattattttcaaa

SEQ ID NO: 59338 - DNA, 330 bp, Heterodera glycines
atggaggaggcgctcaccgtgtccctttcgcagggactcaaagtgcttgccctgcaggcattcggagtgctcactggtgagagaaaaaatggctaaaaaacgcaaatttttcaattcgttctccccccccccccacatttttcaggtctgagcgtgatgtttttcatggcattttatggcgaaagcattaaaaatgttgttgaattttagtcggtcgattttgcatttttgtggaggatttgttttgtttttctttgtgcataaatttatcagaaatttcttgttataaattgttatattttatttaatattaagcatttcgtggtaaaa

SEQ ID NO: 59339 - DNA, 695 bp, Heterodera glycines
atgcagccattcgctttgctttacgtggcctcaattttcgcgcagttccctctcttctttacgccgtttgaatgctttttgaaatgggcgttcacactttggcattttgctttttgccaatttttggccaattttgtgtggtgcattcgattggccgaatttgcgcagtttaccgtcgctaaatttgcactttttcaaatggtttcggctcaattttatgccgatttttgtcatcgggtaatcgttttttcaattaaaagtcattttttgtgtcttttcagctgatttttggctcaaattttgcgtttttgccgatgatggtcccttctgttgcctgtgctcttttcgtcttttttgcttatttccatttcattctcattgtttttgcggaatctgttcaaatccattttttcaaatttcgttgtcgccgcaaagaagtgatttttaaaaatttattaaaacaggcacgagaatatttattgtcagtttatttatttttgaatctgaaacttttatttttcgttgaattttattagtttggttatttttaaaattaaaaccttactaaattcaaagattaaatttggcaaatccccaatacattgttagccagtagtcagcctcagttttccgtcgtctctttggtggtgcaaacattccccgggcttaaggcaataatgatttgaacaaataaa

SEQ ID NO: 59340 - DNA, 741 bp, Heterodera glycines
atgcttcatttttggccaaaaattccgagtcccaaaccgattatttggcaaatttgaaaaacagtgcatttttgggcgaattttccggcctttggctgctcggcttggacatggtgccaatgacgggccaacaaacggttcatctgcacgtcaaccgaagctgtaactgcgccatggatgcatgggtaagtgagaaggagggagttaaattgcctaatagaaaaattatcaggggccacttttcatttaatttgtaatttttaaaatggattttcaattttttgttttagaaaagaaaattttctttctttttttaactgctttacgtattacttgagaaggagtcaattaaatccccatacttatctatggataaatacggccatttaattattgacaattttagtttatccaaccgatggactcgaataagccaattgatcccaaagtgccaacatttgggtcagaagcatgcccacccttgtcaacggatcaaacatttgccctaaccggccgcatttcgcttttcaacttttcctttacggcactgaccgatgctaacttatcaaacattacggtgatactgctcggtactgtataacatgaacatacaggttaaatataaacaagttgaattttgttaagatgaagccaaaaagatggtagcgagtttctacattggagaaaatgttatgaaagcgcgctttaaaggggtaaagcattgtttaaaaaagcaataaa

SEQ ID NO: 59341 - DNA, 1294 bp, Heterodera glycines
gacaatgaattcctccacttcggacatcgacccccacttccgagttttggttcttgctttaacagcattttttcgcttcataccgaaactgggaacattttgacacatatgtacggtgagtatgaatgacatcgtttctccggcacttttattttttcaggtgcaatagcattcattggcattttcatttggtttttggtccaagccgaagatgtcgtcagttggcccgacaaattgatattctcttctttctttgttggagccattctctgcatgggaatgtcttttgcctttcacacggtccaatgtcattccgaagatatcggcagattgtttagcaagtaatccaaatccattttggacatggcatcatgagtcattgtcaagttcgtcccctgtgggcatttgcccatgtttaggttggactatgccggcatttccttgcttatcattggctcatttgtcccttggctctattacgcgttcttctgccgagttctcccgatgaccatttacatttcgatgatcttccttcttggaattgctgcgcttgtcgtttcattgttcgacaaattttcccaacccaaataccgtattttcttcgatttttctttgttccgatttctcatttgttttgcttcattaaggccctctccgtgcgattgtttttatggcgatgggattaagcagtgagttttttacattgttttattttcacttttcttttttatgcgttgttcccgctcttcatcttttggtcactgatggcattgtgtggatgtttgaaaaggcttctttacactggttgattttgatgggaatactgtaccttagcggagcgactgtaagtgatttcgctcatttccgaatccatttcttttagatttatatggtgcgcttccccgaaagatgcttccctgggaagtgcgacattttggtgtgttcattaattttaatgggcaaagtgcacaatttttgttatcgggtaattcttacactgaccatttttgatgtcttttacggcggaccttttttactgtattttctcctgatgccccccccccccgaaaattggcttctttccgttcggagttatcattttgttctgttccgtcatccgccaccattctttttccagtgtcaatcccaccaactgttccatcttttcgtcattttcgctgccgccgtccattaccacggagtgttagaactcgcgatgaagcggttgcaggacggttcctgctcggaacaactgatttcccacagcggaagtgacgaggcaaccattcagtgg

SEQ ID NO: 59342 - DNA, 377 bp, Heterodera glycines
cggtaggggtcaactccgtctggccaactccgtctcagcaatgttcaaaaagctataacttttttcgttgttgttcaaacttcacaatcatggtatcattcgaaagccctagatgtttagaagatatttataagctatttctcagtgattaatcagctctcaaaaaagttgtcagttgaaaaccgcaaaaaaggcagaatttttgaagttttttatttctatctttttttatagttcgaaattttctgtaatttttagtaggctaatagagcctgtgaagagctttcgaatgatatcaagattgtttgattcggtcaataacttcaagagttatattgactcaaagttggctcagacggagttggcccgttccgtcg

SEQ ID NO: 59343 - DNA, 1874 bp, Heterodera glycines
atgattgatttttcaggttttccaagttcgaaaagtgactgggaaggacagtggcaaaatcttcgccatgaaagtgctcaaaaaggcgacggtcattcgcaatcagaaagacacggcgcacaccaaggccgagagaaatatactcgaagctgtcaaagtaacgaacaaatcgacaaatggtttcaaggggtgaagtggggggggggggggggctcgtgctcctgaaaaattgaaagggttcggtaattgattctgacattcgtttcgacccattcggaacccaaagcccaaaatgaatgtaagaattggactcgtcaacccctgaaaacgcctaacactattttatctcaaaacggattacgtttgcatttttgttttttttcagagtcccttcatttgtgacctccaatacgcctttcaaactggcggcaagctttatctgatcctcgagtatttgagcggcggcgaattgtttatgcatttggaaagggagggcacttttatggaggacactgcggcattttagtgagttttaatcgaaggaaaaacaacaacaaagaaaaacgcaattttatctttcagtctagcagagattgtaattgcacttgaacacctccatcgacaggttgtcatgtttaacttgtggtgactgttttaaaatttattcctttttttttttgattttacgagtgcgtcccattgaattatttaattaaaatttcaacaaaaaacacatgtaattttaaataggagaattacagcgcattttctcagaatgcatttaaaatatttttctgaatgaacacgacaaaatgcatactaataaaatttttttggcaataatacctgtggttccatacattccaatccttttttcattaagggcattatttaccgtgacctcaaaccggagaatattttgttggactgtaaaggtatttttggtttgccattggacaattaattgcccatttaaggccatgtaaaactgacggacttcggcctgtgtaaaggttgtcgtccaagtggtatttccgctgtccaattgtaataatcattcagaggccatcgaaggggaccaaaagacgcacactttttgtggtaccattgagtacatggcacccgaaattctgatgaggcaattaccattggtgcttcagaaataaactcctcttgtgttcagaactgggcatggcaaagcggtcgattggtggagtttgggggcgttgacttttgacatgctcaccgggggaccgcctttttcggcagagaatcgcaaaagggtgagtcatcgtcggcatccgataaatatatcttcgtgcgaataaaattgttttgcctttagacaattgacaaaatcctcaagggacgccttacacttccgccctatttaagtttcgaagcgaaagacttggtattttacgttcaaaagtttgttctgctgccaaccaattcattgtttcagataaaacggttgctgaagcgacacgtggacactcgccttggggccgggccgggggacgccgaagagataaagaaacacgcctttttcacccaccacgtcgagaattggacaaatgtttatcggcgagagttaagtcatgccaatttttagttacggttattcgacagatttaatgtttagatcgaagccccgtacaagccgaacatcaccagtgaggaggacgcctctctgttcgactccaaattcaccaaaatgactcccgtcgattctccgaccgccgaattgccaccaatgtccgtcaatcccttcgaaggattcacttatgtgagcagggacagacacccctaacaaaaaacggaaggtattctcagatagcgccttccgtcctcgaacaagtcagccaacccac

SEQ ID NO: 59344 - DNA, 302 bp, Heterodera glycines
  unsure (1)..(302): unsure at all n locations
atgaaattcccactctgtcaccctcttcttcgtatatgtaagagcaaaagttggactttcaaaaatcattgtcctttatttgagaaatgggccggaagtcgttgaaaccattgaattaggcgatatcccgagttggtgaatcgccgaaccaaaagtggggccggaggatttcaattgctcaagtgctncgtaagggagctatggaaaggtatgaatatcccgcaaatttgtactttcatgattgattttcangtttccagttcganagtgactgggaagacagtggcaaatcttcgccatga

SEQ ID NO: 59345 - DNA, 475 bp, Heterodera glycines
  unsure (1)..(475): unsure at all n locations
atgtacctcaagtggtacatttgggtttgcggactcaaaaaattaacaggaaacgtgatcactgatcacactccaacgtatgagaccatccacagatttctcatgaggtatttttgccaaaaataatttgaatgcaaatttgaaatattcgttgggcgagggatgtgggaagacaccggcggaggacaaagcgccgtttaaccaattattaaaaactgtcataaataggaattcaaacaatcccgttttccagtattttaaaacgcagtttattatacncagtaaaattaggcgagataaacacgaatatggtgaatggatcagaggctgagttccggaccgagggattctgtaaatccaacagaaattgaaacagagtaaaaaaggcgcatttgtttattatcgaaatgaagttataataattaagctaattgtatttagaatacgaaaaaagcgtagcatcacgagggcatca

SEQ ID NO: 59346 - DNA, 1131 bp, Heterodera glycines
tgacgaatggttacgatgtccaatgcttcatctcgggcacgcttatgacatcaattgatgcgcacgggttcagtgtgtcgattctgcgcatcgttgaccaaaaatggctacacgttttgactggtgccattctatcattcgactaatttaatatttaaaatttaagaatatgattctgctgtgtcatcgttttgggttgcctctcgtcttaacaaggagcccattgttggacaggattcagttcgttccattgaggatgaaaggccttgccaattgagtcttggcccacaactcccaaaaagtattcattttaagtcagggttaaataatttacatttttagttcaagagtcattgctaagaagctgtattgagaacgcttgtcaagccttaatcaacgctgagcacgatttgaacaggcttgactcctcagttggcgacggagactgtggcacatccatgaagataggagcatcaggtccattttgtttttgttttatccagtattcatcaaatttagcaattttaatagcagtggaaaatggtgaattagcgcttgaccatccgaagggtctttttctgcagttgtccaagttggtcgaatcgtcagtcggtggcacttccggagcagttagcaattatcacttgtttttgcttctaacagttgccttttagctatacgctttaatgcttaatgctgcggcgaatgcctttgaaagtcctctttgttccaatgttataaaaaaagcgcttaaacttgcattgaaaagcgtcgaatattatgccggtgcaaagccgggccatcgcactttggtgagtcgcttcaaaagctattattgtcctatttgtttgtttaaaggtggacccattgcatgcagctgtaagttttcgaggagagaattgggaagacattgtaaaggtatttcgtggcgtatataataaatgaggttaattggataagacggtggaagaacgagccaaagaaacggcaaaaatggaagcaaaggcaggccgtgccagttacaccgacaaaagcctgcagattgagcctgaccctggggcaatggcattttcaacttggtttaaagctgttttcgaaagttatgagaagaatcgtgtcacaaatcgatag

SEQ ID NO: 59347 - DNA, 292 bp, Heterodera glycines
  unsure (1)..(292): unsure at all n locations
atgaacaaaacttattgcataaacccagctaatgaatggtacggtaaaaaattctctgtcaaattcttccattaaatttcgttttttactcctcctaatcttaaagtgtcatttgctcgtttgaccattttcatgccaattgcagaaatatgttccattggtccagctgtaagtgatggcgacgatgagcttactgccgactcgcatccggcactcctgcagcaggcaaaagcagctcttatcacggatgcataaaaccaccaaaaataggggatgggngggggggggggga

SEQ ID NO: 59348 - DNA, 228 bp, Heterodera glycines
atgagtgatttccgagaaaagcaaactgtcggcaatggacggaatggcagcgatgtcagtgacgacgaggaacagacattcgacagagttttaaatgcgcgattaaaagtcgtgcccaaacgcaaaggaccgttaagcaatggaggcgcgtcgacgtccacggggaatggcaatggacaaaagacagacgaagcggaaatggtaaaaggactgaaactaactgtttaa

SEQ ID NO: 59349 - DNA, 592 bp, Heterodera glycines
atggtcgaacaattcgaaacccggaattcgcatccgtcgtcacattccgattcggccagcacttcaaaagatgttcgatttgctgaacgttagtgcaattaccatttttcaatctttcgggttgtttttcagctacccgtttaaaacctctgattatcgcgcgttccgaggcgcaaaaacgcgttttcggccttggttatccgagtgtgcccacagtgacagtcgacgaatggtacaatgagatgcaaaaaagcggcacttttggcaaagggccaatgccatcgtcgtttaaaattgaccaacgcaaaacgcaagaatacgacgagacggaagagggagaagaggaggaagagaggaaaagacaggcgcaaatacagagagatgagtggaaggacgtgaacagaagggggtgtgggaatacgtacaacaaaggatgaacgaattggcaaagcaaccgaaaacggacaatgatttaaaaatgacaaccgaaaaacagaattgttgggtaagtaattgcaactttatttagctcaaaagagcaagcatcctgttcaaatatgtttaccgtgcatttcatttatttttaaataaa

SEQ ID NO: 59350 - DNA, 153 bp, Heterodera glycines
atgtggttggaattcatgtgagtgttgagcagaaaaagagatagacgttttttcaaaattttcagagccaaactcgcccagaaagaaaatccagaaaaattagggtcgtcgctactattccgaaaatgtggttggaattcaaaggagtgttga

SEQ ID NO: 59351 - DNA, 1838 bp, Heterodera glycines
atgccaggaattgatttgaacaatccggcagacaaacttggtccaaaatgcgatacattggtttttcagtcgaaaaaaagccatctttttggaccaactcttggaccctttcgccctgccatggcaacggtggaagtgtcttaaatttaataatttattttttgaaaattttaatttttattcacccgaaaatttgtgtgcctttggcaaacaaattttcactgcaaattgataaaatggttcaagggaaaaggaatgggttgaatgaaagcaatttgaaaattggggggggaggagtctcccaaattttttaaaaaaattttttttaaatttttccacaaaaaaattgtttttgggtaaaagccgcaaaattttctttgcccccgtaaaaatttttgttttttaaaaaaaaatttttttttttggtttttaaggggggggaataaaaaaaaaaaaaaaatattatttggggttttctccgcgaaaaaaagggggggggccccctccccctctcttataaaaaaatggttttttgttttttttttttataaaaaaattttttttttttttaaaaaaaatctctcttcccccgccccgccaacaaaaaaaaataataatataaatattttttttcttttttcttcaaaaaaaaaaaaaaaaaaaataatagtggggggggagaaaaaaaaaaaaagtttttttttttttattattaaaaaaagagggggggggggttgtgggcccccccccccccccttttttttttttttttaaaaaaaaaaaaataaaaaaaagtggtgggggtgcccccccccccccccccccccacccaaaaaaaaaaaaaatatttttttttttttttaaaaaaaaaaaaataaatataaaaaaaaaaaaaaaaaattttttttttttttttttttttttttcccccccccccccccccccaaacaaaaaaaaaaaaaaaaaaaaagggggggtgggtgtttttcttttctaaaaagggggggtgggggtgtctttcttttggggggaaacaaaaaaaaaaaaaaaaattttttttttttttttttttattattacgacccccaccctcccccccaaaaaaagaaaaaaaaacaaaaaaaaaaggggggggggggcgcccctccttcttaaaaaaaaggggggggggtttttttttttgtgggggagaaaagaaaaagaaaaaaaaatttttttttttatattttttttagaccacccccccccccaaaaaaaaaaaaaaaaaaaaaaaaggggggggctctttttttttcaaaaaaaaggggggggatttttttgtggggggggccaaaaaaaaaaaaatattttttttttttaaaaattttttgaaaacaaaccctccccccaaaaaaaaaaaaccaaaaaaaattagggtcgtgctctttttttccaaaatgagggttggagttcatttgagtgttgagcagaaaaagagatagacgtttttcaaaattttcagagccaaactcgcccagaagaaaatccagaaaaattagggtcgtcgcttttattccgaaaatgtggttggaattcatttgagtgttgagcagaaaaagagatagacgttttttcaaaattttcagagccaaactcgcccagaaagaaaatccagaaaaattagggtcgtcgctattattccgaaaatgtggttggaattcatgtgagtgttgagcagaaaaagagatagacgttttttcaaaattttcagagccaaactcgcccagaaagaaaatccagaaaaattagggtcgtcgctattattccgaaaatgtggttggagttcatttgagtgttga

SEQ ID NO: 59352 - DNA, 48 bp, Heterodera glycines
atgaaatgggcgcgaagcgctcgtcctgaggccgcgaagcggccgaat

SEQ ID NO: 59353 - DNA, 541 bp, Heterodera glycines
aattttatgatttatttattttctgttgactaaatagtcagttcttatagcaaatattaatttatatttgcgtagcttcaaataagcattctggcttcaatttcgaagggaattgaatttttttataataaattgatagagagcaaaaagcacgattgtataatattcaaaaaatttatctatgcatttgttgaacgtttctaaacccgatcgaattttttaaacctttatatgaaaacatttattgcaggaaatgacaaattccaatctgggtgagcacacatttcagataagcttcctatcattatttcttagaaacaactaataatctgttgaacagttatttcaaaataaattcgaatatattagcttattatgcatcttcagtgtgcattctaaaataaaatcattttttgttctaattttatgatttatttattttctgttgactaaatagtcagttcttatagcaaatattaatttatatttgcgtagcttcaaataagcattctggcttcaatttcgaagggaattgaatttt

SEQ ID NO: 59354 - DNA, 959 bp, Heterodera glycines
atgagggatattcaaaagggattttatgtggtttgtttttgtttaatcccatttttttaatctaagacattttcttacacagcaccttcttgccactttgacagttatttttaatgaaaatttccgattttttgcaatttgacgataaaaaaagatgaataattaatagggcttccttttttaggcaaatgcctaaaactttgcgcactaaatacgcaaagataagcacgaaaaacgcgtttcacacccctaagaaatgacccaaaaaaatttcagaaaatacacccttaagaattgaaaaattttcaaaaaaatgatcccaaaatttaatatattttttcttaataaaaatttttggtttaaaattttgtccttatttaataatttcatttgcaattgaaatatttaagttttacttgttttaataccaaaaaagcgttaataaaattttttttgcctatttttgtgcctattttaaggtttttgtgccaatttaatgcctattttgcgattttttgtgcctaaaaaaggaagccctaataattaatgattgctgtttatttgttagtttataaaaatgaagtttttttgaataaaaaaaattcttcgtatttcagagttcccaagtgtccttttttctaagatttgtcctttatttgtcacgacctccttattttgtgcttattcttggatttgaaaataaaattacaaaaacgaataactgttttgaattatttatgtatcattttttatggaagcaaatatttgaattaattcgattttgaaaaaattgcgtttttatttcgttttcttgagtgtaaaatgctctaaatttcagtgaaaattttgttaaaaattgtcaacatttctatttttcctccggcggcgtctatcggcaccgccgggccttccaaaacttattttttcataaaaattgaccaaaaattgtcatattttga

SEQ ID NO: 59355 - DNA, 505 bp, Heterodera glycines
atgtcaatggatcggatgaaacatttgttgagcacgggtgagcattcggatgtgcactttttggtgggggacggagacgcaaaagaggcgagtttaattaaaaataaaaatttaattttatttttcaattgcaatttcattaattatccacgttcccttttaaaggttttgccagcacatcagcttattttgaagagtgcttccgatgtttttgaggcgaatgttccgttttgacgccaaaaaagaaagaccggaaaatggtaaaaaaataataattttaagggaaaataccaattatgttatttgttcttcattttgtctctgctaatttccctaattaatttttcaattagtttctggtaattgtcctgatgttgtggagatccccgacgttgaagcagcagcattcaaagtgatgttgagcttcatttatacggaagagttgagtgatttgaatggagacaatgcaatggtagtgctttacgccggtggatttaatttttaa

SEQ ID NO: 59356 - DNA, 988 bp, Heterodera glycines
atgcttttgttcgaattcgggtttgttgagttcgaaacttgtcgaaattgtgtgagattcatgatccaagtgaaagcaatttttaaggatttttccatcaaatgtttgcgttacatttgtcaaaatgcggctgacttgttcggatcagatgattttttgcaaattgatcagaaaatattgtgcaatcttctcgagagtgatcgtttgttactcaacgatgaatttgaaatttggaaaattgtaatttcaatttaatttttaattgaatttaattttcgttttttttaatttaggcactccgttgggccgatgaaaaatgtcgtcagaatggcattgaatgctcctcgggaaatcgtcgttcagtacttggaccggcactgttcaaaattcgttttccaaatatccatgaggaggattttgccaaatgcgtcggtaaaatttttgaaatcgggaattaaattgaatttgttttggttgatatgaaattttacctttaatgcttgaatttcatacatggacaaggagggtcagaaatttttacataaaatttatgggaaaactggacaaagagaactgatgcctacagggtaataaattttgaaattttacagttcccttcggtgttttgtcaaaagatgaagtgatcgccgtttatcagttcaattcccatccgtttctgtatcttcgtggagtgcccgggctgtactcgttgaaattcccaagccatggacgaatttttaattggaacaaagccaggggcaaccgaagagggacactttcgatggaaattgaaaaaatgtcggaatttgcgggagagtctgtcgggagaagcagattcagtgatgccgtgtatataaatggatttccatggaaaattgaagcacaaattatgaattgcattgatgagaagaaatatttggggttttacttatggtgcgatgcaaaaaaaggtccaattttaattactattttaaaaatataatcatta

SEQ ID NO: 59357 - DNA, 331 bp, Heterodera glycines
atggacccatccaatggtttttacaacagagaagaagacaaagtgacattggccattgatgtcacagtgaaagatgaaaaaatagagaaatttgtttctgatcccgacaaatccaatggaacaatttcgatggaaattgaaaatttgtcgggatttgcacgagacaccaatcagagtgaacgtaaaagcgaaactgtgcacatcaaaggatttccatggaaagtatggacacgaataaaaacgaaaattggaagcactgacaatgagaaatgtttgggcattttccttttgagcgatgctccagaagaaggtgctaattagacgctaatta

SEQ ID NO: 59358 - DNA, 182 bp, Heterodera glycines
atgccctacaggggattcccgaatttcatttcatttgctgtgagtgacaataaactttccttaattgacccaattatgaacaattaaggaactgatggatccgagcaaaggcttttacgacaaaaacgaggacaaagtgacattggccattgatgtcagtgtgaaataagcataaatggaga

SEQ ID NO: 59359 - DNA, 452 bp, Heterodera glycines
atggaggtgggggagggggaagataagcaaatccaattcaaatgccaatgggtagttgagttcatttttcgacccatatcaatagctaaatgttgcttttaaaaaaaacgatgggaaaactggcagaaaaatggagagaaaagggagtattcctcccgaaatttacaacaacaaaaaaattcaaaaaatcaaattttattcacaaaatgtaaaaatttagacaaaaagcaaagaacgaactaatggaaaaaggcaacataaaatgaatgagcacagatactttttctgtttttgttcttgtttgtcaattggtcgcctcttccgaatcgatggcattgcaaagacaaaaagccacaattatgccgaacacttcacaatgcgaacagaagcaactaaattaaaacaaaaaattcaaattgatgttgttcgaagaatcgggatataaaaataaa

SEQ ID NO: 59360 - DNA, 1229 bp, Heterodera glycines
gcactccgttgggccgatgaaaaatgtcgtcagaatggcattgaatgctcctcgggaaatcgtcgttccgtacttggtcctgcactgttcaaaattcgttttcctaatatccatgagaaggattttgcaaaatgcgtcggtaaaaattttgaaatcggaaattaaatagaaattgttttggtcgatatgaaattttacctttaatgcttgaatttcatacatggacaaggaggggggtcagaaatttttcaaatttatgtgaaattggccgaaaaaaactgatgcctacagggtaataaattttgaaattttacagttccatccggtgtgttaacagtggaagaagtgctcggcgtttatcagttcaattcccatccgtttctgtatcttcgtggagtgcccgggctgtactcgttgaaattcccaagccatggacgaatttttaattggaacaaagccaggggcaaccgaagagggacactttcgatggaaattgaaaaaatgtcggaatttgcgggagagtctgtcgggagaagcagattcagtgatgccgtttatataaatggatttccatggaaaattaaagcaaaaattacgaaaggcattgatgagaagaaatatttggggttttacttatggtgcgatgcaaaagaaggtccaattttaattactattttaaaaatatatgctactgaaaaaggtgcaaattaactgttattaaatgctaattaacaacgatgagtaataatcattaagattcgaattggcgctgctacgttcgttcggcaacttttcgaattatctcgcaaaaaaatggcaccgagaattccattggcacacttcatgaccatgtttttgacaatgaattaaatggctggggattcggatttttcattacttttgctgtgagtaataatttaacatatttacttaattgatataattatggttaatcaaggaattgatggactcgaacaagagcttttacaacaaagcagaggacaaattggcattggcaattgatgtcataactgttgatgagccaaaaatggagaaattcatttccgatcccaacagatccaacggcacactttcaatggaaattgaaaaagtgtcggaatttgcgcgtgaaataattgggagtcaacgtaaaagcgaaactgtgcacatcaaaggattgccatggaaaattgtggcaaaatcttcgaattgtttcgcaaaagagcggc

SEQ ID NO: 59361 - DNA, 1321 bp, Heterodera glycines
atggttcatgagcattttcttttaaccatcactgctcgtgatatagaaggaaaaacattcgccattgatgttcggaaagaacaaaatgacgattctgagattaggaaattaattgaatttgtaaattttggttcattccctgaggggaccacagaagttgaaaaggaagatattgcatcaagagcggaaaatttgagtctttcctcaggcatattataccaacacttaccagatcaaaatgctcgaatgtacattccgctttctcttcgtccactaatttttgaagcttttcatacttcacaaataaatggtggtcatatgaacatcaaaaagacattagggaaatgtagaaaattttattggccaatgatgcaccgcgacatcacaaattggacaagacaatgcatcacatgtcaactaagacattcacccaatccttcatatcgtgcagaaatgcaaatgccaccaaaaaatactctcttcgctcaaattgcacttgatttggcaggtcctcttcccctcacgcagaaaggtaacaaacacatccttaacataatttgcacatttaccaaatatgtaatctctgtacctatccctgatgctaaatcccaaacaatagcactagctagcattctttaaacactgttatttaaagtttggaggctgtacgagtcttctaactgataatgccacggcattcacctctgatttctttaagtccttctgttcgcttctctatattaataaatgttatgctattccccattggagccaaggcaatgcagtagttgagcgatcttttaggacatttcacaatatacttgcgaaatatatttcaagtgaagaaccagattttgatgaatttcttgaatgtgccaatttctgctacaacacatcaattcactcttccacaaaggagacccccttctttttggtctttgggcgagacccgatattttgcattgagcaaattctgaatcccaacaccgaacccgaaaacaccagtgaagttgacaatgtcaagcagaaattagttaagtctcttagaaaagcttgggaatccgctgcggcggtcattaaagaagctcagttacggtcaaaagtacaatatgacaagttagtacgaaatcaaactgttcaaataggagatagggtcctattacgcaattacgcaggaaaagtcaaaacatccaagaaatttcaattaccctggaagggactttatcgagtcattgagattaatgatgtccttatcacaatcgtcagctgcacatctcctcaaaggcgcaaaagcgcccccccagagccgcgaagaggccga

SEQ ID NO: 59362 - DNA, 488 bp, Heterodera glycines
ctaacttgtcatattgtacttttgaccgtaactgagcttctttaatgaccgccgcagcggattcccaagcttttctaagagacttaactaatttctgcttgacattgtcaacttcactggtgttttcgggttcggtgttgggattcagaatttgctcaatgcaaaatatcgggtctcgcccaaagaccaaaaagaagggggtctcctttgtggaagagtgaattgatgtgttgtagcagaaattggcacattcaagaaattcatcaaaatctggttcttcacttgaaatatatttcgcaagtatattgtgaaatgtcctaaaagatcgctcaactactgcattgccttggctccaatggggaatagcataacatttattaatatagagaagcgaacagaaggacttaaagaaatcagaggtgaatgccgtggcattatcagttagaagactcgtacagcctccaaactttaaataacagtgtttaaag

SEQ ID NO: 59363 - DNA, 427 bp, Heterodera glycines
tccaacgcagaattaaagtacaggctatagtgaagctattccggaaggattcggtctccccataaatctgggcgcatcggttcagggggactgccccgaaaacccaaaaaaaaattttttggataaaaattatttaaatgaactgactagataatatttaaaataggttatttctcttcctttcagtatccctgcaaagtttggtgcgcttctgatcagtttctgaaaaaaaagttaagcctaaactttttggcctgtttaaaaaggaattaaaaatttttaaaaattttattcatctccctttttgatagaaaaagcatcagagtgcctaaactaacatgtaaataaaatttggtgcgtttcagaaccctttctgaaaaaatatttaagaattaattttgcaaaaaataaataaaaacgaaagact

SEQ ID NO: 59364 - DNA, 1290 bp, Heterodera glycines
atgctaataatgtaactctttcattgcttaggctaaaattgcacaaattctttgtataataaaactaaaaatagaagattctttgatactttaacattgagaaagttttttgaaaatttttgcataatttgttgccttttcaattaattaagtcattttgccttaaactttttttaaatttcattaaacactttttaacaaattcattcgaccttttatgccttttgatttggcatttttaagcggcatattttaagggcggcgccgggaattaattgcggaatctgtgcttctcccatattttgaagttgtgttttatgagacgaaaattataagaaagcaactaaatattgaaggaagctcgtaagtaatcgaaggaatcaaataacaattttatttaattttaatcgttttaaaataaatttaaaattttcatgatttataaaaacttttaagatcgatcggaattggactttttggaaaaagcctttacatgtatggggacaatggcttcatttttgggcacaatgtgaatggcttctggggatatccctcgtttgaagagggcgacacaatcggatgtggggccaatttaacatcgatggaaatcatttacaccaaaaatgggcagaaattgagtgagtaaaaataaaataaacttagtgaaaaaattcagagaatatcgtgaaaaattggaaagaaaaatgatgactctattcattaatttcgttttaaaagaaatcaagctatttaaaacacaattgtcacattaaatcttatttatttgatttccaagtttaattttttgagttaatttaaaagatagaaacacaccattacataataattattttttaggcactttttattcattaaatttatttattttttcatttttaagatccgctaatttgattttaccggtctctattttaaactcataaaatatatttattacatgacttctaaagtgttttaaatcagagacttagtagcgctgcaagatttttaaattttctattttttattttaaacagtattgtttttttttgatttttcatttttatagatacttcaaatttgttcgtaactgacactgatctgctccctgttgtcttcctgtatcttccaggagacataatcgaggcgaactttgggccgagatttgcttataatttcaacgccagcgaatcttttcttgatgattgatattcggcaattaaaattagtaccctgattttaaatttttgtggagaattccattgattgatttgttgtttaagaaataaa

SEQ ID NO: 59365 - DNA, 266 bp, Heterodera glycines
atggaggagtttattaatgtacgagtttgaatacaatagaaggccttttcatatgccagggctccaacccctggggcaataaacggcgaagcggcggcagaggtctgatggaccccgtggattttgtgtcacaactgaaacaatttgtggctttttgataggtcaatgaggatttttttggaaaatgaggatttttgtggctttttgagaaattttgaggatttttgaggcttttgggcctcagaatcttttaaaattttaataaa

SEQ ID NO: 59366 - DNA, 1209 bp, Heterodera glycines
atggtgttggttttccgtgaacttttccggcgaggattcaatccgagcatgttgaggaagggcaataagctgtatgaaatgaaagtgggcaagcagaagaaacgcaatccaaacgtggtgttccgagactcgtataatttgatgccctgctctttggctgaactcgtcacatccttcggcttggacgtcgaagacaaaccattcttcccgcacatggcaaaccaaccggataactacggaaagcagatataccccacgcctgaagactacttggccgatgggatgatgccggataaacgacaaaaattcaacgtctggtatgaacaacatcagcataaacccttcctccttgacgaagcattggccagctactgcacaaacgacgttgaaattttaacggcagcgctggtagcgtttcggatggaattctttgatgtgtctcggagggaagaaggcattgtagcggaaagggcacacgaaggaattgatgtattgagggagtgtatgacgatcgccggcgcctgtatgaagcatttccggatcaaccaccttccagctgaacacttggcaattgtcccggaacgaggctatgacaatgcacaaaatcaaagtagactggcccgccgtttcttacagtggtacacggaagaacataatgtggaagtgaggatggctaattcacccggaggagagaaaaagtttggtcaatattctgtggatggatgggtggaagcagagagaaaggcaatagaagttaacggatgtgtttggcatgcatgcagtgagtgttatccagacgataatatgatgatgccaaatggaaagacagctggtaaagtgcgggagaggaatgccaaacgattagaattcatacgaagtcaagttggccagctggaagtgtattgggagtgcgagatcgagaaaatgttaacgaaggacaaagaaatgagagagaaatttgaagactacatggatgatggtccgctgacaatacgcacatcatttatgggaggaaggacgggaccactgaaactactccataaagcgggaccgaatgaacaaatttcttacttcgacttcacttctctctaccccttcgttaattttactacacgctacccgattggtcacccaactgtgcatgtgttgaacgaagaagtcgaatggaaatgtccggaagatagccgctacccgttagcaattctcaaa

SEQ ID NO: 59367 - DNA, 85 bp, Heterodera glycines
aagacaatcactgacgccggctacgcgtactctgaccagcacaaagtgtgcgtgcacaaaaacgtggtgaccagccgtgggcctg

SEQ ID NO: 59368 - DNA, 192 bp, Heterodera glycines
atgataccaaatttgtctgaattatccgttttaaatggttaggagaccccttttttacctcaattttaaatttccacataacgaatttttaggaataaaatgatttttaaatataaaaatattttttattccatattatttttcagaaaatagaaattcagtattcacttcatagtttgatccgaattttta

SEQ ID NO: 59369 - DNA, 436 bp, Heterodera glycines
atggccacaaattttcagaccagctctttttccgtcacatttgctcgtcgtcgaacggattgggaggaacacaaaaaagggtaggaaatttatgtaaattttttgacaaaaatgccatggattttcgaattttttcgtttttttttttataaatttttcagcacttcttcgtcccccgtgttcaccaaactgttcagtttgggcgccaaaaatttgctgcttgcggtacaatgttctgcaattccgaccaaaactgttgccatcaggccgaaagtgtaaacaaaaaaatattttagggaaaatcgttttttttttaaatttttggactcgacctgtaccatggaaccaggcctggatttttcatggacatggacttttatccagaaaatccaagtcaaatatgaaaaactaaccaggtttaagttaggcacataca

SEQ ID NO: 59370 - DNA, 169 bp, Heterodera glycines
atgcaaagcttccgcgcgcttctcttcattctcgccggaacagcacgcgtttggagtattttgagtacggcgcgccgccgggaacgccagaaacgttttgccattccgtgtacaaaagcctggaagggatgggagagaaaaatttgtgaaatcgcaattatccaatttg

SEQ ID NO: 59371 - DNA, 976 bp, Heterodera glycines
atgacaaagcccttaaactgtacaaatttgtacggtaatttatttgtgtgttaggaaattgctttttcaaactttgtcaatttttcgtcattaaaattaccagagccctatttaataccaattatccccaaattagtacagtcaaccggtcattcgtaaaatccttttattccgtatttttataatattaaattatcaaattttggttttcccaatgaataataataataatcaccaatcagccacaaaatttattcattcctttcattttcatcacaattaacccataaaaaagagagaattctctcaataaaccaaattctgtgcaaattcagtgattttattattagtgaaaattatgccatttttttaaaataaaaattgtaaataattttaaattaaaaaaaaagttttaaattattttcgaagagcaaaatgcaccttttctatgtgttaattgctgctgcttttttcaatttgcacagcttcacaaatgggcaacaaccatcgcatgggccgtaaatattttaaatttatttttattttttaaattatttaatttaatttattttttcaaggcttcaatcgacggacggcaaaaacggggaaaagccaccagcagcagttggactcacatttggctttcccccgaggggcggacattgtgacgaagggtgggcaaaaaaatgaaaattcaaaaaaaaatttcaacaaattttaggctttggatttgctaccagggcatttttcagcagcatattggcacctcaggcagcaattttcgtgcgaaacgaacatttgttgtcagagacgaaaatgtaaaaaatcaaaaatcataagtagggcttggatttttaagggcgaaaaggtccaaaataaggccgtaaatacgggcgagaaaatcgcgaaataagggcgaaacgccaaaataaggatttctaaggtcgaataagggcgttaaacacaaaattttcaa

SEQ ID NO: 59372 - DNA, 225 bp, Heterodera glycines; identical to SEQ ID NO: 59154

SEQ ID NO: 59373 - DNA, 698 bp, Heterodera glycines
aaattggtgcgcttagagcacttctgaaaaaatattatgaaacaaaaaaatcgatttttcaagtgtccgttggggtactcaaacatttatggggagcaaaaatccaacgcagaattaaagtacaggctatagggaagctactcccgaaggattcggtctccccataaatctgggcgcatcggttcggggggactgccccgaaaacaaaaaaaatcgattttttcaagtgtccgtttggggtactcaaacaattatgaggagcaaaaatccaacgcagaattaaagtacaggctatagggaagctattccggaaggattcggtctccccataaatctgggcgcatcggctcggggggactgccccgaaaacaaaaaaatcgattttttcaagtgtccgtttggggtactcaaacaattatggggagcaaaaatccaacgcagaattaaagtacaggctatagggaagctattccggaaggattcggtctccccataaatctgggcgcatcggctcggggggactgccccgaaaacaaaaaaatcgattttttcaagtgtccgtttggggtactcaaacaattatggggagcaaaaatccaacgcagaattaaagtacaggctatagggaagctattcccgaaggattcggtctccccataaatctgggcgcatcggttcggggggactgccccgaaaac

SEQ ID NO: 59374 - DNA, 784 bp, Heterodera glycines
atgagtggggtctggtcatttttaaccattccagtcgccaatggacaagtcctaggttcggctggatcattggaccaataccctttcctttgttcaacaaattactttcaaacaataacgaaacaccgtccgataagctaatttccatggtgactattattcttagaggtgtaaacatatgcattttaagctttgtgatgttcttaaatcgaccgttcattcgctgtacactcaaagtgcccctcttttggataccattttggattttgtggacgtcatcgtttctgcacatcctcggcccgcctgtgaacttgccaaatctctctttttggcatgtcccaaattaaacttaattaaagcgaggttttcagactttccacaaaaatcgagacgaaacgacaacaaaattaattgcccatttggctaaatggttcgctgacgaatttgcttttctccaacaactgtccactttcgacgccattgatgcggaggaaagggacgaacaattattaactcttggctattacgtgctgaagaagttttgggacaatttgttgttcgtctcctccacgctgacgacgaccaaccaattggaagctggaactttgtgctgtgccttcgtccgccacttttgtcttatcatagcaacggcaattaaattttcttactaaactcatttttttcgccaataaattgacacttttcaggtgcttcaacacagcaaaaacccttcattagtacagcttggtctccgttcgcttttccatctgttgacaaagtgtaa

SEQ ID NO: 59375 - DNA, 549 bp, Heterodera glycines
atgtataagttaatgagaaatattttcgtagtgattggcgaagcgttcagtttggatgactgtggacaaaaagaggaaagtgctgaacaagttggagatgagaagttgaggaaggaggccaaaagcaaacagcaggacgatgatgatgatgatgatgatgggattttggtaaaaaataaataaaaacaaaaatatttaaaatggaaataatcgaaattaatttaattctggaagaagtcagagaaactggaaatggaattgagggtggccaaacaaatgtgcgcgttcatcaaaatggaacttgaagaggcagggattccagaaaaagctaaaaatcaaataccataaatatttaaaaaataaaataaaattacaaaactttgaaaaataaatttcgtaaattttaatttttcacagaaggcacttcaagcagaattaaaacagcaaagactgattgaagaaaacattgagttgaaagtcaaaatttacagaatggagaaggaaaaggagcaaatggaaaaagacggtgaaaaagaaaataaattgtaa

SEQ ID NO: 59376 - DNA, 191 bp, Heterodera glycines
atggccaattggaaaacgacgagctttgccgaaacggaattcatcgcggtgacctcctatcagaacaacttggcaagtgacggagggaaaggagagaaaagagataaaaagagtagggaaagagaaaatgagaaggaaaagaaaagtaaaatgggggaggagcaaaagggaaagaaaaagagggaaaaaga

SEQ ID NO: 59377 - DNA, 675 bp, Heterodera glycines
atgtgctggtgctgctcaaattgtccgactactttcaggtgggtgcccttacagatggaatattagacattacataaaattttattccgttttcaaaaaaatgatacttaaatttgaatatcctttatcaaagagagtttacccataattttcaataaaaaattaatttttactatttttaaattcattaggctaattattaggggcactaattgctccgttttgaggtggccgcgttgaagtcgcgttgcgaattgcatctgatcaattgcgtggaaattccactgatcgaccgtttccttctgattgaacgcttcggactcgacaatttgaaagtgatttaattttcaaatattttaaattattttttaaattaatttttagaattactttttgcatttgaatgttgacaaatttcgtgcctttttcaatgccaaccatgaacagttttttcctgttatcagcaaagaatttttgtgcgctttgtctgtccgaggaatggccgggctttgatcaaattgattttggcattttcatagaaattgatcaaactgattttggcattttcataagccgggctttgatcaaattgattttggcattttcataaaatgttttttagaaatttcctcattctcgatcagagagaaaattgttaattttttttgaactgta

SEQ ID NO: 59378 - DNA, 171 bp, Heterodera glycines
taattttttaattttttgaattttttgaatttttaaaattcccggttggtcccggttcccggtcccgaagaaaaatcgaggtcccggtcccggtcccggcttctcaggtcccggcaagtcccggtcccggttttgcccaaaattcccggtcccgctctactctagtgaaaa

SEQ ID NO: 59379 - DNA, 5039 bp, Heterodera glycines
atgttgagattgacattgagctcggcctgcaggtcggacgcttttatgatacttcaggaaacctcaaatagggacaagtacacgcttgagattgtcgactgcaggctgatagtgaagacggttgatctgatggacggactcatccttgacattgcaaagaagttggaactggagcccgccagatacggcatccggaaaacgctgatgaagtcgctgttcattaacggtggacgatacgatttttctgccaatctgttcaccgaggaagtgcctcggagggtcatcattgggctggtccccacccaaatttacattgggcgcaatgagcagcaccccttttgtttcaatcatgagaatgtaagtgtcaatctgtcatgtatttctggcagaatataaatggccaggtgatggcatattataaaatgccaatttggcagggcatactcccggcttcagtgaatgaagttgaatcagatgattcaagtgaagaaaaaggtgatttttcactctggaacactttattctatgagaatttaaaaaaaaaggtattttcgttaaaaattttgtgtgaatcactaaccgatcggggttcccggcccccgacattttgccccccccccccccgaggggtcgtggagcaaccctaatttaaaccaattccaaatcactacaaaagtgtcccacttttttttttctgggtactaaacagcaaaagtgccaataattgtatataatctaaattatatgattgcactgcacaaatccaaaaagactgagtacacactccagaaggcaaacaaatgactcaaattcgagtcaaatcaaatgttaaactaggtaaaaaaagataaggacatacaaaaatgataaaaatatattgggaatgttacggtattttttggtgtgagacaagattatttggcaggttatggcattttggtgtcaaaacgaaatttcgaaaaaaaaaacaaacaactattataaaattgaattagaatttcgtttgaattttgaattaaggacggccaatgttcgatgtattttaaatgaaataattatttttgaattaattattaagtgaaatcgtttcacattttcttctgttataatgctcaaattttaagtgaattgaattcaaaagaagaatgaaaattgttcttactccaagcttcaaaaaatggaaaagtttcaaaagttaatttcttaaggatcttaaacgatgccgcctggagaaaataaaaattaaaaccaaaaacattcgaaaaatatgttaattattaaatggtggtaaatagcgtaaataataaaataattgaaaaaataccatatttactggcaaaaatcttattgaaaattctgaaacaattaaacagttttataattataaattataaattaaatttaattcatccatcctttgctaatctgacgcaattgaaacctgaagaaaacatgaagaaatcgcggaatttaagaaaaaaaaagattgtgattaagacttgaatatccctttgttgatcattcaccaataatttttcgaatcaggcaaaatctcgaaactcgaataatcgaacaaaatgaacaaacaaaactaattttttgagacggaagtttgaagtgtgagacaaaagcttgggatcttcggttttgcttattgttgaccgtgaaacaaaatatgaccattctcatctgagttggcattcgtgagaccaaagcccaaagatcataacaaaatgtcggcacttttcgccggtagaaaatttcgaattacggtcaaagtgcgaagcacacactgacaatgatcgaattttaaaatgccggaaagccgttcaagtacgagcagaggaattgttcttactgtatttcttatcgataatttacagtatagctaatccaatacattttcaaagtcacaaaggcacacaaattttccattattgtagtcttttacatttaattcattcagtcatttgcatcataatgtgtttccctcaatcttttacagtatctcttccatttccctttatataaaatgcttttaacacataatgcttattactttttgaaaataataatattaataatttactcaaaaaaaaaaaaaaaaatttatttttgctttttttttgatcatcacaaaaaactaattacaaattcatattcatttctgaccatcgtttagcaccaaccggcaccaaccaccccattgatggaatgcacgtcctaaagtgattcatccccaatccaatccaatccaatgaatttgactgttatcgctattagcgatcagcttacccgccatcccttggctaattgtgatacgaattttttttccgtcagcttccacgggtgcgggggacagcggtggacaatttttacgcgacgtgtcacagcgccacccaccgcgtgggatgtgtgcggtgcccgcccatttgccgcgctgcttctgccgcagggaccgcccatttgggcactgtcgaccaccgcatttaagcgctgtccgatcagcgaacaatcagtcagttccaaaatttcatccagctcctaaccaaaaagcattcaactgacaaataagctggggaaaggaaataggaaaagccaaataaaaacattttttgaaaatgggtcagcgattaaaaaatttttaaataaactttttgaaaaccctttcttttttttgtttttcattttaatttagaactcaaaaaatattttttggtttaatatccattaattttgtattttattgtaacattttaggaagagatttttcctctatttctgatcccgaatcccactcttcaaagcaaaccgtcccactctcgacgttcaatatgaacaagtggtctgcacttgtgtacgttttgtggggagtgggggcttaaaccctggccaaatattaattctctgtcctctttcagtctgttgatcgcgctgatcagcgcgctggacagcgctgttgtgcgacaacagcgcgccaccaacgcggacgcatcgaaaccggaaccgaataaccaaaagccaggtaaaaaaatgaatttattaaaaataaattaataatttggtctaggaactgtggactcggacaaaggaaacgcggacaaaagccagggagcggacacggatggaaagaacccggaaaagccaaaggaaagccaagaagtggaagaggatggaccaaatccaaaggagccaacgaaaagccagaaactggaagaagatggaccaaatccgaagggagcaacgaaaagccaagaagtggaagaggatggaccaaatccgaaggagccaacgaaaagccaagaagtggaagaggatggaccaaatccgaaggagccaacgaaaagccaagaagtggaagaggatggaccaaatccgaaagagccaacgaaaagccaagaagtggaagaggatggaccaaatccgaaggagccaacggaaagccaagaagtggaggaggatggaacaaattcggacgaggacgagctcactgaaagacaggaagcggaagttgatcggatgcgtgtccgtgccggtgccacctccatgcatgggcttgacaaacttgcgccaacgccaccgccgagtgccacttctacaaatgccatcgcaatacgagaaaagcgcgtcccatggctagcactcgctggattagcgatacccattggagaaattgtgataccattcgtcaccaacaaattatgcgagcatcgtacccaatattgtccttgtgggaggggaaggtgcgtgccggtaactacgtacaaggcggacgaatgttgtgagagcaactttgaatggaagtgttgccccgatgtaagtattaagttaaaaagaaattattatcaaaaattctacattaaaatagtccgggagtgagaaggcgccgtgaaattttcttgaaaatttgagtggaaatgccattgtctgttcttgagcccattagttttatggcaaaaaccttttcagttttttgaacattagcctttttatttatttttggtgcaaagaccaaaacctagttaactttttaataataaattcaaaagaccaaaaccaaaatttggacattttttgaacaaaatcctataagaagcatataacaattttcaaaaaatctctagcaactatttgcctttatcaaaattttaaaaataaacgtgcattgcatcacctccttttagtgtttttttttcatgaccaatatctttttaaatttctggtaatcattttggttttatgcaaaaacggttttaaggagccgactacgccagcacctcaactggtattaaatttaattggaacatttatcaagtcttttgattgtataaatatagggaggtaataattgtttttaaaaaaattaaaattattaaggaaaagtgcgtgcctgttagatattattgggactggatttgtatgggattctatgggcataatgaaattcttgcgagctcacctaaatgcaaaaagtggtacgagcaatcattcacgtgcatgtgcgattttaagagcgttgattggtttccagaaattgaaggaatttgtcgaaaggtatctaattatatgcataagcatgataatttacaaacgaaaaataaccctaagaatcgatccaaaaattttcaaataaaccccaaagaaatgaaaaattttttaataaataatctcaaatttttataaaaaaattactcacttttggaatttttgtgcatttaagacacaggttttttccaatttttgcacctatttttgcaacaattttggcattttcggtgtttttagaatctcttttggacttttttggcaactgttttagtacctatttcagcatttttgcacctcaaaatcccagatctaataataatataatttaatttgaaggattgtaaaacagctacacccggagcaatcgccgaaggactctgtgactgtgggtatggaaaccattgtgcagtaattgagtaagtcaagtttagaaaattattcaaaattaaaagatgaagataattcataatacatgttaatattcctaaaaa

SEQ ID NO: 59380 - DNA, 1236 bp, Heterodera glycines
atgatcgacaatttttcggcagtgaagccgccaaacaaatcgatcaatgatgtgtcaacgcttaaagcggcactccaaaacgatttcccggaagtttttgaagaaggactaggacactgctcaaaggcaaaggcgcatctcattttgcggtctgatgcaaagcctgtattttgccgagctcgccccattccacacggcgccatggaagctgtgaatgccgaattggatcgtcttcttcaaattggcgcaattaagccgattgatttcagtcattgggccgcaccgatcttggccgtaaaaaagaaaaacggcaagacgagagtctgcatcgacttctcgaccggcctcaacaatgcattggaattgaaccgccacccactgccaaggccagacgacatttacgcctcactgaatggcgcgaaatttttctcaaatttggatttacgcgatgcgtatttgcaaatggaaatggatgaagaatccaagcaattgtgcgccatcaacacacatcgcggacttttccaatgccaacgcctgccgttcggagtcaaatcggcaccggcaatatttcagcatttgatggaccaaatttgtgctggcatccctggtgttttcgcgtatcttgacgatggattgatcgcaacgaaaaccctggagcaacacatcacggcattttacactctttttgggcgcataaaagagtacggtctccgaatccaactcgacaaatgcaaatttttgcagcccgaacttttgttccttgggcatattgtgtcagcaaacggcattcgtcctgacccgtcgcgttcagacgcaattcggaaaatgcccgctccgattgacaaaagcaccctccgatcgttcttgggagctttgaattattatggaagatttgtaaaatgcatgcgtgaactgcgtgcaccgctcgacaaacttctccaaaaggacgtagcttgggaatggacgtccgaacagcaaaatgcttttgaaaaagcaaaacaaataatgacgtccgatttattgctgacccactacgacccggcacgcccaatcgtcgtatcagcagacgcgtccaaagatggaatcggtgccacattaagccacacattccccgacaaaaaggaaaaagtggtggaacacgcagcctgcactctaacagcagcgcagcaaaattacagccaaattgaaaaagaagcattggccattgtgttcgccgttcagaaatttcaccgcatg

SEQ ID NO: 59381 - DNA, 76 bp, Heterodera glycines
atgtcccaaaaaatttttgatgatgcttgcagttggtggtactattttatccgaacggatgaaacccatgtcaaat

SEQ ID NO: 59382 - DNA, 1225 bp, Heterodera glycines
atgaaaatcttttttaattttccagaaagccgtcatccagctgaacgccttgcaaagcaacgcacaaacgttagtattggcacgaactcaacaggaaacgcggccagaatggaggctggaggagaccaaggaattcatggacattctcggaatttcggtcccattttattatttaatttggtttcaataattgacattttaaggagggaggctatttattttaataatccccatctccgctcccccaatctttgcgataactgctcttaatagatccctttttactgctttaattaattttcaattaaaagtaagcattttttgtatgaaaatttatcaaaattgcttttcacagattcgtaacttttggttacaaaaaattgctaaaatttttcttttctttttttttgcatttcttaaatcgttctctaacaatctgttcctcttctattcctattgtctctcagtttctctctttcactcgaatacgccacttgatattttatttttcgcaaaaaattatttttgtaaaaaaaataagattttttcagctggacgacattgaccgtctgaatgttgtacacatcaccggcacaaaaggaaaaggtgtttttttttgtttaaaaaatcaattaaaatccaaatttattttctttttacaggttcaaccgccgcttttctggagtccattttgcgttcccttggctacaaaactggcttttacaggtgtgggtgggtggcacccaattacaaaattttgaaaaattaatttttaatttagaattgctgaataatttcgattgacaaaaagtaaaaaagatttaaatatttttcatgaaatctgtataagaatcttacttttctgtaaatgtttttttatctataattggctcactctaagacatgaaaattttttattttaaggaaattttggtcaattttgaattttttgtagatgtcaattttaaatttcattttcattttttacagttctccccatttggtccatgtccgtgaacgcattcgcatcaatggacgaccaatttcaaagcaaattttcacccagcaattctttcacatttacaacacactttttgagcacaaaaaagaggtggcaaattaataatggtgctgctgttaaaaaaaggatttggcacttttggggccccatctttatttaaattaagcaacgttaacaaaaagcgcgctgaatagtcaaaataaa

SEQ ID NO: 59383 - DNA, 842 bp, Heterodera glycines
gtcgaagcgttggatgacaaattgggcactcttttggcgaaggtggcacatgaacgtagaaatactttgtactgtgccattatacgtaagtttccgacatttcgatcacatcataattttcttatcgtatattctctaattatcgccccgtcttccggggacaaattttcctcagcctgtgccatattttaatagcatttagtgctctcaagcaaatttcgtgttcccaccaaatttggcttgtgcttggagaagcccaaccttactgaagcggcttccgaaaactataacattggcaaattccgtgcgcacctcgcagaaatccgtgctcatattgttacgagtggggacactcaattgatccaaaaagcgtcagtgtgtaagtttttattgcaaatttggcaatgtgtaattaaaaaatggcaaatttcaatcaacattttcaggtttgcagaagcttattgtttttttggatgaacaggattagctaagaaggataaagccggacggacaactgaattagcaacggaaattccaacaaaaaaggcaaaaagtttcttttatttgaatgatggcacaaaattacactaataattcctaagtgccatacatttaattttaattttacgtctgttactacaatttttgagaaaattttataataatttttgttaattcttaattatgctaaattttgaatgaactgatgcgaattaaactaatatgtattgtcaaacaattaccaaaataatgccattttttgcgcaaattattgccttttgacatttattagtgccgtttttgcattaattcgtgacattaaccgagttaattaatcgtta

SEQ ID NO: 59384 - DNA, 1159 bp, Heterodera glycines
  unsure (1)..(1159): unsure at all n locations
tgactacaacgaattggtggacgcacatcatctgcccctcaggtgcagcaacagctccaaacacgcggnctttctgcactcggaagcggatcggagcagggcagcagcgcatccgcggaccaaattccgtccacgcacttccaagtggaccaacactgctcaatcccggcggacggacagcagcacaaagtgagggggaagcaaaaaaacgaatggggaggggaagggaagagaaagggaatgaaaggagggggggggggaagggaggggtgagaagcgggccaactgatgagtttcaactgttgtttaaatcggcttcttctttcttccttccatttttgtcccatttgtctgtccctgttaagctgttccgtttgtctgcttctgatgttgccatttgtcctttcaggtggacattgcgcacatcgaattgacccccaccctttggcatgagtgtgtgccctcccgtctttgcagtgccttcgtttcgtgcgttcgtttgttggcattccgtcccatttctcctctttagtgcccaactcgtcaactcttcccaacttccgcttttgcccggccctctctccgttttcttcaacaacactttcacttcgacggtccccccttatccatttttaatatttaatattattctctctcagactcatctcaacttggtgttacccggtgaagagtttcggtgtcttttgggggtcgatccggcattgaaagttgagtacaaacgggcacaactgtctaatcagcaagtaaagcagccaaatttggcactctttgcacgcaattgaccccaaggtcggcttcatgtcccgctcgtgcctttgcacccatgagcaggtcatttcgcttcgaaatgcaaaagcgtcccaaagctgtcgcgttacggtgcgcgagcccatcccaaaggcggcggatgagaaaatcaaagtgagtgaaacgaattaagaaatttaattgcttttaatttcagatttctctgctgcatcccgacttaaaggcgcagagagcggaggcgcgacttttggccaaggaaagccaattggaatggaccgtcaaattggggccgggcgaacagagagaattgagcgtgaaatggacagcggaatatccggcacaagaggtaaagcgaaggcagaagcaaagt

SEQ ID NO: 59385 - DNA, 536 bp, Heterodera glycines
  unsure (1)..(536): unsure at all n locations
atgcaaaatgtgaacttttttttctcacacatgtgagtgaaccagggctgggcgcaactggattttcaattacggaaatccgcaatccgcaattgcggagattttctcagttacggaaatccgcaattacgggggtccaaaaaccccgcaatttcccgcaatccgtaatccgcaagccgaatttttgtcagaatttttgaaaatttttttttcaatagtgtattaatgaaaatcaaaaaacagattttcgggatgtatcttcttatttttgatttcaattttacaaagaaattataatttttgtctctgaaaaaattcattctttttgaatttttgggttcatttttgaaaattttttgaaagtctgatcattataattggatttatgtatataaatatttcaatattgataagaatcaatagccaaaaaaaaaaatnttcggggggggaacccgaagaactgaactttttggccaaaatttttttagtgttacttaaaaaatttcagcgccggagagcaaaaacaggaattgtag

SEQ ID NO: 59386 - DNA, 3268 bp, Heterodera glycines
atccccaggttgaattccgttcatgcgtgcacaacgcggttgaggatgctattcatgatgcacaaaacaccattggaggagcaaataaggtaggtgtcataatttcttcggagcttttagaccagggtgacatcatcatgcctataactccaattacatcaaatgtcgtcgatgctgtatttaatcaattttgcaaagtggagcagagcaaagctaaacacgtcaatttttacggtgccccattttttataaccgtcactgtcctgaacactgattgtctaccccgtcgacgaacgaccaaaggaagtgcccctccaattcactcttcccaatcacacatcttcaaaattaacaacaacgacaattattgcctttttttatgcactggaactgatgcgctactactcattatatatcaggggagtaatttcaaggaaacaatttagatggctcaaagataaccaaactactgttcttcgtcaaaaagtactacttttactccgcgatgccgggattccgacaactgaaacggaatacgatgccgaaatatacatccatcaagtgcaaggattatggagcataaaatatcccggtgattttgtaaatttatgtaattataataaatattttaaaaatttaggcgaatacaaaatttttattttcaacgactatcaaacccgacccatcacaaagtctgacgtcattgactaccaatttccaattttactttatcatcacgacaaacatttcgatggcatcaaaaccttgccaaaattttggaacaaacgctactattgcctctcctgtgaatcagcattcagcaataaaccacaacattcaatgaactgcacatcactctgtcatggatgtcgggaggtgggcgttgactacccatgcgagccacaacagggatacttcaaaaaatgtgatcaatgtaacaacaatttctacaacaaggattgctatgaacgccacctacacaaggatctatgcaccaaatttcagcgatgcgaggactgtggggtaatttataatgtaaagtatcacggtaaaacaggtcaccaatgcggggaaaagttttgtcgactttgcaagcaattccatgtaaaagaggatgatgaggataatccgtgcagtagctgttttatccaacccctaaaaccccataaacttaaaccatacaggatcatcgcttatgattttgaggcgaacaggataaaaaagtaggtaataaatttgaacacgaggtaaactttgtgtcggcaatcatcatttgtaccgattgcatcaatggaaattggaaggactcacttaaaggatcctcttgcaaaattcgtggaccccaccgcacaatcaccttcgcaccattcgacttctcaaacacgatagtggaccaaaaagtcaccactcaaaacccactgcgcgactttgtccaatggctactcttcgaccacaacaaaaaatttcccacggttgcctttgcacactttgggggccgctacgacatgaccatggttatcaaggaagtcgtttcgcaaggtaaaaatttattaaatatttaattaatttttatcaatcaaggtattcataaccctgatattatcaaacaaggaaaccggctctatgaactgagaatcaatcaaaatgaacacgggcctttgaccatacttcgcgacagctacaacctaatgcccatcaaattatctggactaatcaaatcatttggtctcaaaatacaagtaaataaaaattttaagtattttcgtaattttaatttttaggataaacaatattttccccacatgttcaacaaagcatcaaactacgacaactttctctcccatctacctccttgcgaatattattgtcccgatcaaatgaaagtcccagaccaacagaaatttaacgattggtacaataataattacaaccaaccttttaaccttaaggaaaaacttcctgaatattgttgtaatgacgtacaaatccttacccatgcacttgtggaattacgccgggaattcaagcaactgacacaacggaacggaaaacacgggggaatcgacattctttggcaagcaatgaccatcgccagcgcatgcgtcaagaactttgcactcaatcatttgaagcccaactcgctcgccatcgtaccggaaaaaggttatacacctcaacagaaccaaagtgcccttgccatcaaatacctggattggtacgcccacataaacaacatcaatatacagacggctcattcccgctacggtgaatatgtctttaagcgagaaggacaggtttatcaagtggacggttatataaaagggactaatgggaagagggataaaattattgaggtaaatggatgtttatggcatggatgtgaggagtgttttgaggacttggacgaagagacgaggatgccaaacggaaagacgctgcgggagattagggagagggaggtgagaaaacacgagatccttcgccggtacgtcgacttggaaattgtatgggaacatgaaatcaatgagcagttgaaaaaggacgcagcaatgaaggattactttgacaattggaaggaccgttcccccatcaaaatcagagacgcgtttcatggaggacggactggaccaatgaagctactccacacagcaaagccgggacaaaaaatcagctacaaggacttcaccagcctttatccatggaccaacttttctacaagttatccactcggtcacccaaaaattatcaactttagattaaatgagcaaactgtcaactggcgagctccatccgacaatccatacaagggacttttaaaagttttacttttacccccaaacaggaatatcaatgtgaccgtaatgcccgtaaaatttgatgagcgactcctcttccctctctatgagaagtgcgccaaacacatcaccaatgaacacccgaatggcctcaaagacgacaactactcgtgtccacacttcaatcccaatgaccgtgcctttgtctctacctgcactcaccttgaattgagtgctgccttggaggtcggctacaccgtcagaaaactcttccatgtcctgcaatacgaccaatggagcgacaacatcttcaaatcttacgttagcgaaatgatggccctgaagatccacgcaaccggcttcccttcatggtgcagcaacgaagaggagaagaaggaatacattgaggagaaccgtcagcgatttggaattttgttagacaacgaaaagatgaaggctgaaccagggaagcg

SEQ ID NO: 59387 - DNA, 1543 bp, Heterodera glycines
atgcccgtaaaatttgatgagcgactcctcttccctctctgtgagaagtgcgccaaaaacatcaccaatgaacacccgaatggcctcaaagacgacaactactcctgcccacacttcaatcccaatgaccgtgcctttgtctctacctgcacccatcttgagttaaacgcagcattggaggccggctacaccgtccgcaaagtcttccatgtcctacaatacgaccaatggagcgacaacatcttcaaatcttacgttagcgaaatgatggccctgaaaatccatgccaccggcttcccttcatggtgcagcagcgaagaggagaagaaggaatacattgaggagaaccgtcagcgatttgggattctgttggacaaggaaaagatgaaagctgaaccagggaagcggtacatcgccaaactttgcctcaactcactctggggccgcttctccatgcggaacctcctctccaaagcaataatcaacaacgacgaaagcctgattcgccaatataccgacgacaagaaaatcgaattagtggacttggaaatgatggatgaggacaacgatgtttttatgctgacttaccgaccaaaagaagaatttgtcgacgaaaataaatactccaatgtcgtcatctccctcttcacgacatctgcagctcgcctctacctctacgaagctcttaaaaaagtagccgacacccccgactgcgaaatcctttattacgacaccgatagcgtcatttacgtgcaccccgaggaaaacgacccactaccaacaggaaagggacaccttggagaactaacagacgaaaaccccgaccacaatatcttggagttcattagtgctggctgcaagaattatgggatgaagctgcaacgcaaggacaccggtgaaatagaacatgaattaaaaataagagggttcacccttgatgcacaaacggttcaaagaattcattacgatactgtaaaagaccaaattttacgttatgggtccgatgaccccgcggaccccattattgtaacttacccccattttattcgccctaatcttatccaaggcaaagtgtatactcattccctcacaaaacattatcaacccatattcacaaaaggtattattaatgattcattccaagtcctcgaatttggttatcgcaaatgataagtatgcattctcaattaaattttctgtatattagttttcttattgttcccttcttttctttctctctgtttatatcactcatgtgggacggaatgacccctggttgatcctctccaacactccaggccatccatctgagatgaaggtggacgagctgttcattattgtaatgcgcagcctggtgcgtgagtgtttggattggggaccgaagggtgaagccgttccctgggtgtgtttactcacttttaagggaactctaagaattctgatatgccttcaaatctatcaaaagagttgcatactttctttttataatttcctttattctctattttacacttgtatttttcatttgaatgtttattcagaa

SEQ ID NO: 59388 - DNA, 1077 bp, Heterodera glycines
atggaaatgatcaacaccactcttgacaagctgtacaacgatccatcctctcctgctgcgtttgccggtgttagtgcactgtggaaggaggcgcggaaaaagctaaagaatttacgcaaaaaggatgtacaacactatttggagggacaccgcacgtacaccctgatgcgccccaggcgggtacgatttccgagagcaaaaactgttgcagcagggttcatgaccgacgtccaagtggatttggctgactttcaagcgctttctcgtcacaatcgcagtcaccgatacctgctggttgcggttgatgttctctcaaaacgcctgtttgtcgttccactcaaaaataagaaggccgaggagatgctggatgcattcaaagagcttgtcaagcaaatgccaatggtcccacaccgcattttctccgacaaaggcaccgaattcaaaaacaaattgctgaaggaattctttgaggagcaggagattgagaaacatgagcccgtgcattcgtcagtgaaagcttcagttgctgagcgggcaatccgaaatgtgaagcagcgactgtacagatactttgccgaaagggagacgctgaattgggttgatgttgtacaacaaatagtggatggaattaacagcactccgtcacgggttcacggaatgcgaccaattgatgtcaattttgaaaatgctcagaaggtgtggaagcgaatttatgaatcaccgcaaaaacgcaagaagccacgtttccgtaaagatgaatttgtacgcatgagcagagagaagggacagttcgagaaggggtatttgccaaactatggagacgaaatcttggaaattgacgaggtgctgaaggcggtgcgccccaacagatacaagctccgggatgatcgtggtgaaaaattccggggcaccttttatgagcaggagttggcccgcgtgagaaaagatgccgacaccagttacagaattgaaaaagtgtacagaaagcgaagaaaaccggatggaaccacagagatgctcgtaaagttcattgggtatcccgaacgagaatggattgatgagtctcagattgtataa

SEQ ID NO: 59389 - DNA, 1334 bp, Heterodera glycines
aaatccgtttctggcaagaatacatggagcccattgaatcaatgcatcattccactggtaatttattggatttcaaaaataattgatttagtataatatatcataccaaaaaggggggagtgaagaggattttttttgaaatttaatatatttaacaaattattaaaatgcccaaactatgttcgatggcgcctattggcacaaaagaataattgtttttactttaatatatcatacaaaaaaggacgggtgaagatgagtttttttttgaaattgaaaatctaatagctgggattccttttagtttattgttagacatcaaccaatcagtattaatacattcctttcagctactttggctgagtccaatgccactattgtcgctggagggggtggtgggatgaatggcactgccaatgacttggattcgtcgccacttttgttgccgccggagaaagggattttagaggagaattgcggtgtcattctcatcgcagcaatcaacaagagcgacatgcacacggacctaagcgcagaacagctcgaccggctccaataccatgtgcgcaagttttgtcttcaacatggcgccgcattggtaggaaaatggaagaaaccccaaattaattattccattttatatttacacttcggctaacgacgacctgaacacacaacttttgcacaaatacattgctcaccgcattttctcactaccattcactgctcccgcttatattgtggaaagagaccgcattttcgttccgactgttagcaaaaagacagtaaaaatcctaacgaataagttcataaatgttaagggatgggactctgagcagaagctgtccatcatcaaggaagcgttggtcggttctgatcttttggatgtgccgatgttggcccagcagtccagcgatgcgtcacccttctccaattatcggtagtcatttttgacaatttttggggcttcctgatttgggtttagtagtaactttttctctaaaaatgtagggcgactggcgaaaaggaagttaaggcggaggacgagcagtcttttctcgcccggctttatacaatcgcattggacggaagtgtcagcggtcagtcctcaaccggcggtgggcaacaatcgccacggcggccgggcggagacgtcggcaaaggccacggcgacaacacaatgctcgccaactttttcagttctctacttaaagacaaagaccatcatcgtgagttagggggagacaagcgaaactttattctcgacattctgaattaatgttttcaagagcgaagtcaagcttcttcagtgaagtccgggcacagcggtactg

SEQ ID NO: 59390 - DNA, 565 bp, Heterodera glycines
atggacgccgcggcacgggggcgactgctgcacaaattggccgatttgatggaaagggacgccgtccatttggctgttcgtttcatttggtcattctccacaaacctattttaagagtttggaaactttggataacggaaagccctacaaagatgcgtttctggccgatgttccgctgtcaatcgctgtctatcgttattacgccggatgggcggacaaatgccatgggaaaaccattccaattgccggtgattatttctgctacacgcgacatgagccggtcggagttgtcgggcaaattgtaaggaggagacaaaccattattattatgaacatggcccaaatgttgcaatttgtcagtgggcactttaacggctaatttaccccaaattcgacaattaatgtgtattttcttgccttcgaccttcagatcccttggaactttcctcttctaatgcaagcgtggaaattggcccctgcccttgccttgggcaacacatgcgttcttaaacctgctgagcagaccccgttgacggcgctgtacgtagccgaactcatcagagag

SEQ ID NO: 59391 - DNA, 698 bp, Heterodera glycines
atgattggcatgatgaacaacgcctgcatggacggacccgcggagtttttcgcgggccgtcgcgatttgtgcgaattgcttgtgccggcctcgtcgttagcagcggtggacggccaagcgcagccccacgcgccaccgccgaaggtttttgagccgacgcagcagaaaaaactgagctacacgggcagtggccgacggttggtggacggaaagccagaagtgaacgaaacgccagaggaaatgtggcggaaagcgatgctcagggcaacctgcacaagagcagtgaaaggtggaggagaatagggggaaaagccaaaattagggggggggaatagggaaaaaaagccaaaagatgaaaattcagaaatgcttggtgagaaacgccgcaaaagctccaaactgagacaattgatcagcagccaaagcggatcaattcgaaacttttttggcacagccaaaaaccttcgccatcggaccaccggcgccaatcaaccgcagcaacaggttgaggccggtggcaaagtgatcagcagcagaacggaggggccgggaaagcccgatcggatgatcatctgatcagagtaaggagaggaggagaaagacagcgcaactgaaagccaatcagtgatcagtggagaaccaatcgccttcaccgaacaaccaaataacctcacatttctttcgcctttccctcaata

SEQ ID NO: 59392 - DNA, 939 bp, Heterodera glycines
atgaacagacggtgaggaattcttttgaaaaattaaattttcgtttacccaattttttcccatgtttcagttggatttgtgcggatgtttggatggacattctgccatcttttgaccatgcccaactcggcctcaaaatggcattgctttccgaccgtttcgatgttttggtggacacgcattttgatggcaaaagcgaattcacaatttggagagcaatcgaaattgaaaaggaggaagggccaaaaccgaaaatgtttatacgaatcgatggcagttttgtggattttccgttgtctgttcgtcagatgcccaacaaaatttgctttaagaacctttggattgagtcagtcttaacttttgtgtacgctaaagcatttttatctttcttcagctacattgaccattccgtgatcaaatttctccgctccaagaagcgattctttgacaaaagtggcaccaaattggaagtgtttgtggatgcatttgatacggatgtccaaccgatttgggatatttttttccgtgaaatttggcccatttttgcgacaaacattcggcatttggcctttcacggtgccgatgctttggacaatttgcgtcgtcgcacatcgccgacacttctcactgatcttgttcaattgtattcaattacttcctatgaactgtgccccgatggaatttctgacgatgggccaaaagcaactgctggccaagcgttgtccaaatggttgcacacaaagagcaaaaatggaaaagcgaatgaattgtattgctgtgcttatttttgtgaaataacatggatcaacactttcaacgaggtgatcgagactacttaattgttcattaaacgattgactaattattgattgattgcatttgattcgtgaccggaaaatcggtcagtggaaaatgcgtcagtgatacaaatattttaaa

SEQ ID NO: 59393 - DNA, 143 bp, Heterodera glycines
aattgccgaaaaaattcgagaccaatttccgaatgttgaccgactaattgcaaaacgaaagccgtctttgtcaaagcgccttaccgagtcaaaaaatttggaaatgtatctcatatgcaatttcaaccaataaatttgaagaa

SEQ ID NO: 59394 - DNA, 543 bp, Heterodera glycines
atgaagctcatccgcgactccatcctctcggggaactttgccgtgaacgaaatgggaaacaacaatatgatagtgtggacggtgccggtgccacgaaacgcggtaaaattttgcgaaacaaaaaaataatgaaatcttatgtgtctttcaacttcaggggcctcaatgggtcgcgccgccgcgccctttggcaccgtcttgcccgccgccgccaccacaattgccggttttcccgccgccgccaccacaattgccgtttttaccgccgccgccacaaatcggcatggcgccgttttgcccgcggccgccgcaaatgggcccagtacttgcgccactcgctcttccgccgctggcaccggcgccacttccgctgccatcatgctcaaccttcgcgaacccattcggtgtccgcgcaccgccaaacaaatgcgcggtgtgcggacgccgttttctggcgcctcgtcgacgtgcgacaacggaaaagctgccgagtgcaaaaaaggcgcgggttcacgggccagaagagccaatggacgaggaata

SEQ ID NO: 59395 - DNA, 2470 bp, Heterodera glycines
atgaagaggggagtttctgcgtcagcaacggctaccgattccgcagacttacggacaccaaacgatgcttctgctgctgctgctactgcttttattggcgaaaacttaaacaaaaaacgagcgaaacggtcacgaagacaacagcgacgatgggactttcgcacagtcgccttctttgagcagcgctcctcctcctcatcagagtttgatgatgctgatcaggacagcaaaagcagcgcaaaagtcgaccattgtatgcaaataggctacggtagagcaccagcagcagcagcagcagcaggtaattcacagcggaacaacaacaacaacaatgttgacagcggcggcggcggcggcggcggcggcggcggcagtggtaatgaccgccgaagcgaagcagaaaacaacgccagcaatccggaagctgatgatgatgatgatgatgaaaaaggcggcgctactgctgaccaattgtatgaagagaagcagcactctgtgcatcggctggagcgtttcgcactgcagcggcacgtcaccgagtttgtgctgaacggtcagcatgagaggccggacgaggctctccgcgacgcatttgaacgcatcatcaaacgagcaatacgcaatgcggagcagcagcagcagcagcagcagaatgaacagcagtcggggaatcaggaggaggagcagccacaagacggtggcggcgccgctcaacaaagcccaagacgacgagtgacaaagattggaatttttctggatggaaacggtacttcttttttttgtttgttttggcaaatgtccccatcgaacatccatcatcatcatataggcctgactgaccctattgtgctaccgatacggccacctgagcagaacacagccgacactctgatgggtgaactggaaaagctgggacagtcggacggagacgaagacgtgcatggcggaggaatgagcaagcgatccctgttgctcagtgaaccggttcaaattgtcatcacctgcattgcaccgccggttggagcagctccgcgcttccaccattatcagcactggggttacaatgaaaggcagttgatccgaatacggaatgtcggtgaccatttctgcctgttccacgcgttgattgccgcccgttcttacactgatcatgacttgacaaaaatgattgcaccacagcaacaacaatgccatcaaggggacgtaagcagcagcagcagcaacagtgatcatcttattaacgtgccgtccgctgctgcaacagcagtgatgaggaggccggatttttgcgcaaatcatgaagtactgaatcgtcttctgtccagcccgggtcgaatgcaagaaacggtccgggggttgatgctgcatgccggcattgaccctgaagggcaagcgtacggggtggagcatgtcccgcatgttcaacagcattgggtcagtgccattttgaaaatgctttctgctgccgccacataataatttggaaaaaaacgcacacactttttaacaggatcggctctatccgggaatgtaccgcattgtgctgtttgaggaccgccctgaggaactgccgaggcctatctggaaggggccgatggggcgctgctttgtggtcgctttgttcatgtccggcggacatttcgacgcaatcaaaaaagtcaactgttttttcaagcttggccgtaaatattgtattgactgcgaatgcgtctacaccactgatgccaaacacaccatatcatgcaaaagccggtgtgctcagtgtacaagaggttattttgtgggccgtgtgcgcaaaattttgttcattgttgttgttgtacagtaggaccacagcagccatgtgcgagcgaaccaggcgtcagcatacattgctctcaatgcaatcgcttctttttttcacgcatttgttttgatgctcatcggagcggacaagcgtgcagactgctgaaacgatgcacaaaatgcagtcgaacattccaaaatgatgccaaaaacccgcaccagtgttacaccagtttttgtgggcgctgtaatgtacgttttttttttaagcggacggataaggacaacaaatttttcacaaaaatgcgcaggtataccacgaaaaagatgctgcttgtttcatcaaaaaaattcctgtcccgaaacaaaagcaaaactaccgcattttgtgctgggacacggaaacgcggctcgaacacctacaagaagcgggtcatcagcggcacaaagttaaccatttgtcggtcaacatcacgtgcacggaatgctgcgattctgcgacaggcgaatgcgtagaatgtgcgatatgcacaaccgaggagggaattttgtgcagaaagaaggactggtcggttcttcttcctttcttaatacatgcttgctcacatttttgccgacaggagtgaagcgaatggtgatgaaccgctcagggattttgtcgaatgggttctccgtgcttggagca

SEQ ID NO: 59396 - DNA, 405 bp, Heterodera glycines
cgcatcaatatttttctgaactgcacaatcgccttcaccctcctctccgtatcattttggcaatatgattgaagctcgtccggcaaatagaagggtgttgttgttttattttcctcatacctatgggaaatggggaacccccaccactgaaataaccctttagttttgcttaccaactgacaaatttatcgtatttttctcgtttcattgagccagcacagtagtcttctattggcggtaaatgcggaagcctcacgtcatagttttcccttaaaagcattattttttttgacaaatgtcacagctttcggaaaaaccttcggttgaaagcatagggaaaaaaaggtttctctgcacagtccaaattgaaagtttttggcagttgatcgagacgaacaggcatca

SEQ ID NO: 59397 - DNA, 2767 bp, Heterodera glycines
catagccgtcaaaattctctgctcatctggagagattcttgccttctgatgcccgttcgtctcgatcaactgccaaaaactttcaatttggactgtgcagagaaacctttttttccctatgctttcaaccgaaggtttttttccgaaagctgtgacatttgtcaaaaaaaataatgcttttaagggagaactatgacgtgaggcttccgcatttgccgccaatagaagactactgtgctggctcaatgaaacgagaaaaatacgataaatttgtcagttggtaagcaaaactaaagggttatttcagtggtggggttccccatttcccataggtatgaggaaaataaaacaacaacacccttctatttgccggacgagcttcaatcatattgccaaaatgatacggagattcttctgaaggcgattgtgcagttcagaaaaatattgatgcgtgatataacagggggatacgatgtgctacccatctcgtgcactattgccaggtaaaaacattgattgtgtgatcatgtgaaaaaaggagaagaaatgttttaagcatctgtatgagcatcttccgggcccaattcctttgtgagaatcaacttgccattgtacccgaaagagggtatgagcggaacgacagagccagtgtgtttgctattaaatatttggattggcgtgctaaaactgatgcggttaaaattcaacatgcgggaaacgggatggaaaagcggtggagacagtttaaattggacggttggatagaagagcaaaaccgctgtattgaagtgcttggctgctactggcacggctgtgagcgctgttttgatcccggcgacaaactggtggacgccaaatcatgcagagaactgaatgaggagaccaacctgcgattgatgcagcttcgtgaaggcgatgtggacggacaaggcttgcaggtcgaagcagtttgggaatgcgaaataaatgcgcagttggcctgcaatgccgaaatgcgagcctttttctctgatttggggatggacagagggcctattgaacccagaggagcctattttggtggaagaacgggcccattgaagctatttgcagagccaaaggaggacgaaaaaatatcagtttttgatatcataagtctgtatccttttgtgaattatacgtgcgaatatccggttggcataccgaccatcatacggccaatggccgatgaaatgtgcgttaattggacacggccggagcagttgccataccgcggcattctgcgtgttcgagttgtccccccacggggtctgcgcgtcccggtgctgcctgtaaaaattgacgagcgacttttgttttgctgttgtcatcattgtgcaacgatgtttcgcaaaaaaagcacgcgccgcccacataaatgtccacacacggatgcacaaagatccttcaccggcagctacacgcatattgaactggaaagagcacttgaacacgggtacaaaattgatcgtctttggagagcttggcactatgatgaatggtaattgtctttctgtttaaaatttgtatgcgatattttttttctctataggagcgaccaaatttttaaagattatgttagactgctcatcaagttgaaggtttgtctgcagacttttgacccatctgtttaatcatgtgttttttttgttaagattgagtctagcggtttccccgagggagttagcagcgcggatcagaaacagcgctatgctgatgagtatcggcgcatttacgaagtaaacattgaattggagaatgtgaaaaaaaatccggggcttcgattcattgcgaagcttatgcttaacagtctctggtttgtatatatgtccagccgattaaggtgcagcctatttttaggggaaaattcagtatgagaaacgaacttggcgcaaacaaggtcatcaccagaccacaagagttctttagtctgctctttgatcataaaattgtaagttcataacgtatatatatttttattggcttaacaacaaaaatgtgtgtgtgtgtccaggaggtttctgcaatcgtaccattctctgatcaagcgctacgcgtgctgtacaagccaaagaaaaacttcgtttccgaacatacaacaagcaatattgtgataagtttgtggacaacaagctgtgctcgtctcaagcttcacgactacatggtacaagtcgaccaaagagaagattctgatttgctctatacagtaaacgggttttttgtgagcgcactatttttgtgattttaaggacacggacagtgtcattgttctacataagcgggacactactccacttgagactggagagtttttggggcaaatgagtgaggagtacttggattacgatataaaaacgttcatatgcggaggttagtcgtaaatagcttattcaaaatttttatgcattaaggtgccaagcaatatgcctttcgtatgcgccacaggcggacaaacgaactggaatttgtccaaaaaatacggggaattacttttgatgtcaacaacagcaaggctctgcaatttgacaattttgttgaaaaggtgctcaattatggtaaagttgatgataaagacaacgacgacgaccacgatagttctgtttcgcccgctgttttctcctatcaaaagataatgccaacgcgcgacagcaagatcataactcggaagcagttgaaaaagtatttgccagtgtgtcaaaaggggatcatcaacaacagctatgaagtgttcccttttgggtatgaatga

SEQ ID NO: 59398 - DNA, 523 bp, Heterodera glycines
gctcatacagatgcttaaaacatttcttctccttttttcacatgatcacacaatcaatgtttttacctggcaatagtgcacgagatgggtagcacatcgtatccccctgttatatcacgcatcaatatttttctgaactgcacaatcgccttcagaagaatctccgtatcattttggcaatatgattgaagctcgtccggcaaatagaagggtgttgttgttttattttcctcatacctatgggaaatggggaaccccaccactgaaataaccctttagttttgcttaccaactgacaaatttatcgtatttttctcgtttcattgagccagcacagtagtcttctattggcggcaaatgcggaagcctcacgtcatagttctcccttaaaagcattattttttttgacaaatgtcacagctttcggaaaaaaaccttcggttgaaagcatagggaaaaaaaggtttctctgcacagtccaaattgaaagtttttggcagttgatcgagacgaacgggcatca

SEQ ID NO: 59399 - DNA, 417 bp, Heterodera glycines
atggaggaaaagtacgccaaaatggaagaggaaatgtcgtcggaagacagcgatgatgccatcgattttttccaagacaccattgaggatattgtggaaaagtgggtccacgtggcaaacatgtttcgatttaattgttatattcctaataagaatcaaccgttccgaagaaaaaattaaaaaatgggaggagaaatgcagcagcagcagaagtaagatggacaccatgagcacaatgatcgaatggtaggcacaaatgctgctaatacatgttatttgtttgataaaatttccagcagtggtgtggtcaacggcgaaattgatgacatggatgatcagcaggacgatgatgatgctccaacgtcaactgtttatctgaatttgggcaaagacgagcgcaccgcggaaaattattaa

SEQ ID NO: 59400 - DNA, 675 bp, Heterodera glycines
atgctttcccaagaggaagacagagggcgtagtgtggtaaattaaaacatataccaaaaaaaacataaataaaatttacattcaggagcgaacctctgtatgtggaactgaaggatctgatgatttgtccgggcgactcgccggaatgtctctcacgttgcggacgagcgagcagcagcagcagttattaccagctagcagtggacgagttggatctgcacagcgcaagcaacagcgacgacgacaaagagaacgacgcgacttggtgagagtgctctgccgattcaaccgatgttcgccaacttggcttcacaaaatgcttcagaaaaggaaggaagaaaatgtgaaattcttgaacaaactgtcattagccacccatcacctgaaaaggaatgtagctgtttccgcagatgcgctgtcccgacatggagccaacatgatgtttgcctaccgtggattcatgggaataactgttcaacaacatttatatgtgcgtcatcgcattatgctgaaatatccccaattaccatgtgttgtacaatttggtggcaacagtcaccaggacaattttccaattgaattactccatgttgtttcagaagagcaaaagaccgattaatatgtttattctaactattactatttttctctaacataatcatgatgaagaataaa

SEQ ID NO: 59401 - DNA, 2435 bp, Heterodera glycines
atggacgaattttatgtggtactaccatccaattcacctggaccagggaacacgacctcaaaattcactgtcaggcttccacatacgcttgagttggacgcaaactggatggttgcactttcatcaattatctacccctattcattcccatctgtcggaattgatgatgacgacttcatcagcattaaacttgtaaatccaaattttaaatttgcggatgacaaacgttttgtggatattgagctaaaaataccgagtatgcaattctctagtgttgggcatttaaggcaaacattaaatgatataattaatgatgcgtataaacagcggtttgggctctcatcacagaaagccgccaaagtgaaacgccaaattgacgttacggagctttttttttacgatcaccctgtcgattattgggaaaaaattgaagagttggaaaaaaggttggttgaattgagagaggagattgatacgaaggagagggaacatggtgccgaaggtacagagcagaaaagaaaaaatgaacttgaaggtgaattgaaaattttaaggcttcgcctcaagagaaaagatgatgagctggaggagcttaagcgggcagcgaagcgtcgtgatgacgacacccctgagaatcagcagaaaaaaatacgggaattcttccatcaccatccggatgatcatgaaaaaaaactgaacgagtctcgactgatcttcacaaaatatttgtccggtttgcaagaaaaaatgagtgaatatatcggtgaaagagatggagcaaaaattgtgcaacttaatgaacagacagggaagctgagagaaaaaatcaaatacttgctgcgcaatcttaatttgtttgagagcgctgtgctacagcgcgccaacagtgatgacccctcgcgaaaaactagagaggaatatgaaaagagcagccatgaacagaatagcgtatatgttcaggaattttttcaaagacacccgaccaattattggcaaataattcataacaactacgacggtctccgggaacagttcgacaagatagaagaactccaacaaaaaacggcacagaagcagctaaaggacgacgagcactcatcgttccagcagcaaattgaccgagcaaaacaactgctggaatacagacgcaagagatttgccgcattggaatttgaggcaaagaaacgtgacggacaacagcaacaatcctctccattctcttcaccaatttcatctgcattgaccgccggagaggcgttaaaggagcgattaggtgccgttcaagtgaagcagacagaaaagtcggatcaggataataataattcgatggaaaaaccaaaaacccacgctgaggttctcaaagagaaaatacaacaacaacaagatatagccacgtcgacaccaaatgagttgcaaaatgacggcaaagcagtagcagagccaaaaacccatgccgaggttctaaaagagaagctagaacaaaagaaaggcaccagcgcatcagctgagagggatggtgatcatgacagcgatgccgtcgatttactatcgcgaggtcataaattggtgagcatgattgccaaaaaaagggatggtgctcaaagtctcactggctcagcaattacaattgagcagacacatggagagctgcttaagaaaatgttgtcgttagcagataaagagcccattcgtgacgtgacgcaaaacagcggagaaggtcacacaagaggccagattctcaaagagttgctcgaaaatattgtaaaggaggacaagctgaggccgccgcctcatggttcatccgactcggatcggcaacttacaagaggtgaagctctgaaggagttgattgaaaagaaaaaggatgagaaacagcatcaatattattcttcagccaaaacgagaggagaaatttttaagctgattttagagcatcataaatataccggagaagctgaagcgagcttcaaaaggcttgttgaagaacagagaaagggaaaaactgccgcggaatttcatttcaatgagcttgctcaacgatttgtgctgaaaacaggatcaggcgtggtacaaattgatgtcagcaaacacctggcatatgttctaggatttaacagtattcgtctctatgatggagaacaagcacaatacatgcccgacctttccggcggcgttaaacaattgtatgtgtacgctcctaaactggttgatgaatccataattggcgataagatggctccattgctgagggttgttaatgtatctgcaacaccaggagggacggacgtgcccgaggttatatataccaatgaaattttccattctcttcaaaacaaacgaatttctgaaatccaaattgaaattcagaacgcatttggacgatacgtaaagtttaactggggtacttgcatcatcacgctacatttcaggcgtaa

SEQ ID NO: 59402 - DNA, 2795 bp, Heterodera glycines
atgtgtgagcaaacacatgaaaatgtgccggattcagaagtttttccagatatggaaggcttatccatcactactaatgtgatggcaagcgtagtggcgaaaaagcctcacgcatatctaatgaccagaaaaatactggtcagaaccaaaaacaatagaagagtttggatgaaagttccatttctctttgacccagcgagtcaagctacctatatttccgaccctctcatcgagaagcttaagccacccaaagtatcttctgaagaattggaagtttatggctttggtggagagagaactggaccaataaggttccattctcccgtatactccatccaaatcaaaaggacggatggaaagtgggaagatatccttctcaataggacggaaagaatttccacaccatttaaaatggcagagtggaattctgaagaattcccattggtaggcaaggacgcggcacacgctttgagcttttctcgggaagagcccgaaatacttataggtgccagacatttctggcaattcttccaagcgaaggaagaagtttctcccgggttatttgtaattcaaacaaccttgggccctttggtaaacggagagtccgactttgggccggaaattccgaacccggaactatcaatgatggtcattgatgagtccaatcaagggcaaatgcctaccgttaaagaaattgaatatttctttaatttggagtctttgggaatcaaagacgatccaaatgaaaatgatgaccaaacagcaatgggtctatttaacaagtccatccgtcgagaaaaagacggaaggtactctgttaagtggccatggaaggaggaggtgcctgacctcccttccaattaccgcatggccttttcaaagctaatgtctacttttggtaagcttcgtaattctccagacttaatggagcaatacgatgctaccattagagaccaattgcaaaaggggataatcgaagaggccaggaaagcccctggcactcttgagcattatatccctcatcagggagtccttgccaaaggcaagaaattgcgcgtcgtttacgacgccagtgctcacaccagaggaacaaacagtctcaatgcctgtttgtatagaggcccggtaatactgccggacctggtcggaatgcttatgcgtttccgatgcccaaaattccctctcctctccgacatccaagctgcatttttgcaaattgctttggaaccggaggacagggaagtcaccaaattcctctgggtgaaggacgccagtaaaccactggcaccaacaaatttgagcacttacagattttgtcgtgtggcattcggagtgatcagttcccccttcattttggctgcgactttgcagcaccatttgaaggggtatgaatctccagtggccaaagaattggcccaatccttatatgtggataacacactccttgagtgtgaatccgcagaagaggctttgcataaatatgcagagtccaaagcaatccttaaagaaggattttttaatttaagggaatttgttacaaattccccggaggtaatgaaggcgattcctgaggaggatcgcctgaacaagcctaaggtaaaagtcctagggctcatttgggacacagacaaagacgaaattgtctttgagttcccaactaatggcttagaaaaggtggcaacacgccgtcttgttctaagcttccttgcctcattatttgaccctctcggtctaatggggccgtgcattcagcccctgaagcttttcttccaaactctttgggaagaaaagaagggctgggatgatgttctttctgagaaagaacaaactcaatgggaatccttccaagaaaattggaaggatcagaccattagaatcccacggagatcaatgctacaagggaacccatcccttcaattacatgcttttgtggatgcttcgatccacacatttgcagccgcaatttatctaagagcggcagaaggtaaccaaatttcagtttggcttattttctccaaaaatagactcaagcctaaaaatgcctcaaaagcattaacaattcctagaatggaactcatggccattctaatagggataaggggtcttaaatttatcgccgatcaaattcggcgaccaatttctaatctccatctttggggcgattcacaaatcgctctaaattgggttgcttcaaaagaagcacaaccgaaattcattgagagacgagttaaggaaattcgtactctcaatgaatgtgcctttcactttgtccgaacagccgagaatccggcggatatagcaacccgaggcgcaaaaccaggagagcttagggataagtctctctggtggaatgggccttcctggcttaaagaaggccataaccaatggcctaaagaaatagaatttaaaataaaagatcctccagaaaatctggaggaagtgtctctggataacgaagagaaagttttcttcgttaataccagaacaaaggaactgattgagagtcctctgattgaccccaaaagattcagctcttggacaaaaattgtccaagtgacactctatgtcttaaggtttctccgtctgaaacttattcagaggggaaatcctcatcagcttttcgagagtcatagaaaagaaatcgtgaaagtgtccgaaaagggaccattttcagcagaagatgttcacctagcagagaaccttctgatccgcatagaccaaataaaaaatgctgaagatttcctcagctatccttctcttaaggatagtgaagggattttgaggctaaaaaccag
